United States Patent Application Publication US 2005/0228172 A9 - sequence listing, part 26

SEQ ID NO: 83298 - DNA, 898 bp, Homo sapiens
tacaatactgagtatagtgccttatacatgacttttactcaaggatgttagtgtaatttaaacagcaacttattaagggaaagcaatgtatcttttgatctagataaaggccacttttaatacactaaatcgaggaagctagaaaatgtgtaaatatgagtttatttatgagcttttatatatagcactgttttgggtattattcaaggaatagatattattagatgtagcccttgcatttgataagtcacagtctgattaagacacaaacattgtaaagtccttttttttttcttcttgtccagcattctttcttacctgttgaggacttgaccactccactctcaattcatatgctgcattgggkttcgcccacaggcaagcatacatgtcataggactggccttttggatgtgttcacattctagctactgtgattgcttcaaatctgggcatgagaacagctcaaggaattctgaaacttttgctagagctactggggaaaaaaatgtccatgaattgttacactagcaaaatttaaacctgagctgctcatccctcggatcgtctcataaaaaataaatgtttgagaaggaagcgaacacagaaggtggcagaggtgagagatggtaggagagacataggctgatgccatcactggagcccctgaattcagctgtacctgtatggtcatcccttgaacttccgagttatttttttaagttagtcggaactgtctttcagttattttcaatcaagaatcctgaacaatatagaaatacaatacagacattaaagaaacacgtgagggagcttacaaagcaacataaagcatccatcctcaagaaatatggaagtccatttctctttctaggtagaattactccaagttagatgc

SEQ ID NO: 83299 - DNA, 898 bp, Homo sapiens
tacaatactgagtatagtgccttatacatgacttttactcaaggatgttagtgtaatttaaacagcaacttattaagggaaagcaatgtatcttttgatctagataaaggccacttttaatacactaaatcgaggaagctagaaaatgtgtaaatatgagtttatttatgagcttttatatatagcactgttttgggtattattcaaggaatagatattattagatgtagcccttgcatttgataagtcacagtctgattaagacacaaacattgtaaagtccttttttttttcttcttgtccagcattctttcttacctgttgaggacttgaccactccactctcaattcatatgctgcattggggttcgcccacaggcaagcatacatgtcataggactggccttttggatgtgttcacattctagctactgtgattgcttcaaatctgggcatgagaacagctcaaggaattctgaaacttttgctagagctactggggaaaaaaatgtccatgaattgttacactagcaaaatttaaacctgagctgctcatccctcggatcgtctcataaaaaataaatgtttgagaaggaagcgaacacagaaggtggcagaggtgagagatggtaggagagacrtaggctgatgccatcactggagcccctgaattcagctgtacctgtatggtcatcccttgaacttccgagttatttttttaagttagtcggaactgtctttcagttattttcaatcaagaatcctgaacaatatagaaatacaatacagacattaaagaaacacgtgagggagcttacaaagcaacataaagcatccatcctcaagaaatatggaagtccatttctctttctaggtagaattactccaagttagatgc

SEQ ID NO: 83300 - DNA, 1113 bp, Homo sapiens
aacgtttattcatgacattctgttgaaagaaatcctttgtatatgataaatatcttcctgttattactgttaggcatgtagatcaataccaccttcctggaaagcaatttagcaatatagaccgtttgatccagtaaattcttcttctaggaatttatgcyaggaaataagaaatcaggccaacagtttctgtatgaagggctcatcacagtattgttaataaaaaattggaaacatcctaaatgttcaacataaggaaacagttaatctattctgggtggatctttttccagttgttattctcattaaaatcttctaacacttatgcctgtaaaactgaccttcgatatagttcagtaaatgtttcctgagccaacttcaactacgtgccaattcagtggtaggcagcggagacatgaaggtaaaacaaacaaggttcctatttacagtctaaatcaggggtcagcaaactgtagctagtaggccaaatctggctcacaacctgtttttataaataaagatttattagaacacaaacactcccatttgtttagttattgtctatggctgcttttgtgctgcaacagcagattaagtagttgcaacacaaacaggaaagtcgacaaagcctaaaatatttagatctggccctttacagaaaaaaattgccaatccctggtctaaattgaaagtcagacacaatcaaatcacttcaatattgtttgtaaatgtcgagtcctgtgcagccaaaaccaaggctcaggtagatgcttccaaatctacccctgactgccctcatcctgtatcatatacacccacttgatttgttccaaagtgactcaattgtaaaacagaaggcagagagttgtcttctaccacagtagtcttcaacttttttaagtagaaaaaaatatacttcaaaaataaaatctcatgtggaaatccaaagctccactatgcaaaatgagaagagcagaactgctttggttgaaggactgtcagggtttagaaacctagcttctcatcctcctgcctgctcttcttcctcaaggtgagggcttctcaactccagctctactgatgttttggtcctgaaaggtctttcttatgggg

SEQ ID NO: 83301 - DNA, 1113 bp, Homo sapiens
aacgtttattcatgacattctgttgaaagaaatcctttgtatatgataaatatcttcctgttattactgttaggcatgtagatcaataccaccttcctggaaagcaatttagcaatatagaccgtttgatccagtaaattcttcttctaggaatttatgccaggaaataagaaatcaggccaacagtttctgtatgaagggctcatcacagtattgttaataaaaaattggaaacatccyaaatgttcaacataaggaaacagttaatctattctgggtggatctttttccagttgttattctcattaaaatcttctaacacttatgcctgtaaaactgaccttcgatatagttcagtaaatgtttcctgagccaacttcaactacgtgccaattcagtggtaggcagcggagacatgaaggtaaaacaaacaaggttcctatttacagtctaaatcaggggtcagcaaactgtagctagtaggccaaatctggctcacaacctgtttttataaataaagatttattagaacacaaacactcccatttgtttagttattgtctatggctgcttttgtgctgcaacagcagattaagtagttgcaacacaaacaggaaagtcgacaaagcctaaaatatttagatctggccctttacagaaaaaaattgccaatccctggtctaaattgaaagtcagacacaatcaaatcacttcaatattgtttgtaaatgtcgagtcctgtgcagccaaaaccaaggctcaggtagatgcttccaaatctacccctgactgccctcatcctgtatcatatacacccacttgatttgttccaaagtgactcaattgtaaaacagaaggcagagagttgtcttctaccacagtagtcttcaacttttttaagtagaaaaaaatatacttcaaaaataaaatctcatgtggaaatccaaagctccactatgcaaaatgagaagagcagaactgctttggttgaaggactgtcagggtttagaaacctagcttctcatcctcctgcctgctcttcttcctcaaggtgagggcttctcaactccagctctactgatgttttggtcctgaaaggtctttcttatgggg

SEQ ID NO: 83302 - DNA, 1113 bp, Homo sapiens
aacgtttattcatgacattctgttgaaagaaatcctttgtatatgataaatatcttcctgttattactgttaggcatgtagatcaataccaccttcctggaaagcaatttagcaatatagaccgtttgatccagtaaattcttcttctaggaatttatgccaggaaataagaaatcaggccaacagtttctgtatgaagggctcatcacagtattgttaataaaaaattggaaacatcctaaatgttcaacataaggaaacagttaatctattctgggtggatctttttccagttgttattctcattaaaatcttctaacacttatgcctgtaaaactgaccttcgatatagttcagtaaatgtttcctgagccaacttcaactaygtgccaattcagtggtaggcagcggagacatgaaggtaaaacaaacaaggttcctatttacagtctaaatcaggggtcagcaaactgtagctagtaggccaaatctggctcacaacctgtttttataaataaagatttattagaacacaaacactcccatttgtttagttattgtctatggctgcttttgtgctgcaacagcagattaagtagttgcaacacaaacaggaaagtcgacaaagcctaaaatatttagatctggccctttacagaaaaaaattgccaatccctggtctaaattgaaagtcagacacaatcaaatcacttcaatattgtttgtaaatgtcgagtcctgtgcagccaaaaccaaggctcaggtagatgcttccaaatctacccctgactgccctcatcctgtatcatatacacccacttgatttgttccaaagtgactcaattgtaaaacagaaggcagagagttgtcttctaccacagtagtcttcaacttttttaagtagaaaaaaatatacttcaaaaataaaatctcatgtggaaatccaaagctccactatgcaaaatgagaagagcagaactgctttggttgaaggactgtcagggtttagaaacctagcttctcatcctcctgcctgctcttcttcctcaaggtgagggcttctcaactccagctctactgatgttttggtcctgaaaggtctttcttatgggg

SEQ ID NO: 83303 - DNA, 1113 bp, Homo sapiens
aacgtttattcatgacattctgttgaaagaaatcctttgtatatgataaatatcttcctgttattactgttaggcatgtagatcaataccaccttcctggaaagcaatttagcaatatagaccgtttgatccagtaaattcttcttctaggaatttatgccaggaaataagaaatcaggccaacagtttctgtatgaagggctcatcacagtattgttaataaaaaattggaaacatcctaaatgttcaacataaggaaacagttaatctattctgggtggatctttttccagttgttattctcattaaaatcttctaacacttatgcctgtaaaactgaccttcgatatagttcagtaaatgtttcctgagccaacttcaactacgtgccaattcagtggtaggcagcggagacatgaaggtaaaacaaacaaggttcctatttacagtctaaatcaggggtcagcaaactgtagctagtaggccaaatctggctcacaacctgtttttataaataaagatttattagaacacaaacactcccatttgtttagttattgtctatggctgcttttgtgctgcaacagcagattaagtagttgcaacacaaacaggaaagtcgacaaagcctaaaatatttagatctggccctttacagaaaaaaattgccaatccctggtctaaattgaaagtcagacacaatcaaatcacttcaatattgtttgtaaatgtcgagtcctgtgcagccaaaaccaaggctcaggtagaygcttccaaatctacccctgactgccctcatcctgtatcatatacacccacttgatttgttccaaagtgactcaattgtaaaacagaaggcagagagttgtcttctaccacagtagtcttcaacttttttaagtagaaaaaaatatacttcaaaaataaaatctcatgtggaaatccaaagctccactatgcaaaatgagaagagcagaactgctttggttgaaggactgtcagggtttagaaacctagcttctcatcctcctgcctgctcttcttcctcaaggtgagggcttctcaactccagctctactgatgttttggtcctgaaaggtctttcttatgggg

SEQ ID NO: 83304 - DNA, 717 bp, Homo sapiens
agtcctgtgctagacaagggagagaatgtcaatctctctcacaccctaaaaaaagagaaacacttcccaggggagggaagaaaaggcacagttcaactcatcattactaaaagagaccatgtgttgagagctgactgcatgccaggtaatcaaccaggagtacattctgtagtttaatcctgtaatgattcctgctttagagcataaaggtcagagaaatgaaacaatctgagcaaggctgtgaagccagaaagtgatggcactgcctcactcagctctgcctcgatccaacgtctgtgctccttcccgtccagacaagctgctccttaacgatcagctaacacctraacaggcatggtctccagccaggtgaagtccctgccttgagtagcaggatgtgttgatgataaaggaaggtgagtgtattcttttcctatttgctgttgtaacaaatcaccattcacttagtggcttaaagcaacataaatgtattatcttgcagttctggaggtcagaagtctgaaatggattttgctgggctaaaatcaaggagttggcagggctgtgttcctttacggaagctttaggggaaaaattgtttccttgcctttccagctgctagagttgtatttcttgcactccttagtttgtggccccttccttcatctgcaaagcccgcagttcagcctcttcaaatctcttcctgactcaactctt

SEQ ID NO: 83305 - DNA, 3150 bp, Homo sapiens
tagtttctgaggcactgggtcaaccacattctggctgatgctgttcatgttcccaactaataaacagattaggtccatggtcatttatcttggccctcctccatttgggatttgctacttctattcatcaaaataatcaagattccaactacagatggctgagtaagaaaataatttctgtggaaatcctatttcccttcccttaaattggtggtttttaaaactgtgttccttggagtccaagagattttcattaagtttccagatttctacaaagtgtcctcagaggtcatcctggaacagagggtggaatggaatggaggggggcacctccctgttgctttgttttaaatattttatgttatttgaacaaatagttccttggaattaaataaactggaaaacttccactttggagcattgactcagcccccycaggatgggaaagagcttgaagtttatctatcttagtctacctctatgcggaaggcttgaattcatcatcaccaagtgacatccagcctggatctgagcagcttcagaggcaggggattccccacatccctagccgctcaccccgtcttgactagtcctgatgcttttactactgcatgcatcactgcttctcaaacttggctgcccatggcaagcacctgaaaagtttttttttttaaactgatgcctgggcctcactcccagaaattctgatttaatgggttcaggtatggcctgggcaatgggagatttgaaagtttcctggtgattctgatttgtagcaaagtttgggaaccatgccttagataagctaatatctacaccctgcatgtgtccacccagtgctcttactcttccctggaaagctgggataacaagtcaaatccaacttctacataagacccttaagaaaatacgaagacagcttcactttcttcccagcgtttccagttaaggtcctggtgcttcctagatgcctcctcctgccacatgttatccggctgatctacgtcatctatagaccagtgaggagcccccctggaaggtaataactaggacgggtctgatcatggcacaggagagcagaaccgtgatgccccttcttctccacagtccacttcaattgctgcagctcagctttccatggaaccccacctacatgataaaaacgctttgattttttttcacacaggtgctgctgctaaacccttttttcccccatcttacatttggtcactaattactggctaaggcctaacgacaaccagaaaaccaaatcagcagaacctgtaggcaattcacccttacatccctgtagcattttatagttcgcagagtaaattcacacaccttattttaattactcctccccctggctgtccttattccaatcccgttttccaggtgagaaagctagttttagagcaaagaataggcgtgcccccaaaccacatggttagtatgtagcagagtaggggatgtaatccattttgtgatctgtacaccacgcgactctacctcccacgtaactgcacagtccacggtagtccagggacgggacctcacagcagggaaacctcggcttagcgctgcttcgtgtggcagtgttccagggccacccacgctctgtgcacagctgtgtgcagcaccataacagcaggacaggggtctttgccacagtgctgagaaaataggccaggtttcagggcaacgctatttgcccctcactttaagtgctgacagaaattaggtggtgacttaaaaacttcctcagagaaagactgccacatgcatggctcagccaaaaaccaaaccaaaccaaactaaacaaaacaccaaaagacactccaggtcagaatgaaaatccgtttggcaaaaattcctaacccagctcaagatgaattccttgctgcatatatatatgtgatgccttattctccttttggttcctgacatggctttgccctaggactgaaaaaaaatctcacagctgacacttaaatgatataccctttcagttagtttctatatagtttgtttttctggctgcacgtttggtattttctcaagactgtctcattcaaactcccattactgaccctactacaggtcttcatttcacttatttcatgggttgggctaaagacaaggccgatagcccttggccaggcactgggcgtggtaggtcccagatgcaggcaataaggaggtgcattgtctacagaggatgaaaaacagtcataaaactgtctagaagtggtgctttttattatcatcgtgtaaaatactctcccctgctgggtcagagcactcctactctccctcctccccagccttggcaggtcattgatgacgttcaatcacagactgcagtcccaatctgctaaggtctgggatctgtttttgtcctgtgtccagtgagttgggcagacagaagtcacatctaaccaggcttggcaggacttccacaaaacttcccagacagtacagatggaagggaactcagttaactctcttaaaaacaatatagtcctaaaagatggtgcagcttctatggcagaaccaaaaaccagagcaaactggattttaagaggctccaagaatatactcttgcacaacacagtggttattcccaagccctggaaagtatcaggctggaaaaagagggcatgaaattgtttttatttgaaaggcatttgtttgggaaaaggatgctttctccaagcaaaatgttagcttgcttggttagaagttaattacagtattcattacttaaagccagcctggaattttggcttgaattcttaggagcctatgattcaggagggaaatgacctattcaaccccaggccagtgagctaaaagttaatctgataactgccttgttcaaaagggcccaagagataagaaataaatccccaaggggtaaaaatcaaaactgtggttttaaatccaggaaaattatcgtagagatatcgaaatgtttgttaccgagattggagctaaatgaggaaatgacttaaaagaataaagtggttagttgccttggttcccaaattaataatgttcttgttcttttgatatctctgatattcacatgttggtttaattaaaatatttggactctaaagtgcagaacaagcagggaaatcatgc

SEQ ID NO: 83306 - DNA, 661 bp, Homo sapiens
acacaaacatgcctgtttgttggagccagtaatttctcatattgctgctctataatggagatgcacaaaagagcatactatggtattattaattaattttccatttctataacactagctatcttcctccagaggttattgaatcagacaaaatgtacataagtctttgtgcttgatatgaaaggccaactatgggtggaaatttcaggataaaaagatcttagatcagaagaaactaaatgaacagggctaacattcatcccatattcatgaggataatgacgaatgccctgccatgattttaggaatcatatgccacttcaattgcatttctttgagagttccaagtaagaaagcattaggccctgtgaagatgcttcctagaatctccagtgaggcagtttccaccataaatccttcacatcctatgaaaaatgtttccttaaagcatgaaggaaagttatatttattagaaggattttacaaaagagcagctacaggtttaaatctaagaatacacatgccccctgtgctcccatcccccaccccaccagtgtttcatattcttgtcaaatgtgctggttgccaaatgagaaatyttagtgttactaccactgcacatgtggtgatgacttgcaccaagtcatagaagtactactaa

SEQ ID NO: 83307 - DNA, 589 bp, Homo sapiens
aaccaagcactgccacttacctcccatgtgatctcagttaagttgcctccctcccctaagcctctttctacacctgtaaaatgaagatatgaaatgtttcctcttcatagggctgttgtgatgcttaacttcagaagcaagtggagaacgtaaaacgtggaatccttcttagctaggctcttgtgtctgaggtccttattactaasgaaaaagagggaattaatactgagaagaaaccagcaaccacggccacagagagcatctcatcagctctatttggctgcaccaacatggagcactccttttagacacagcattgtgccaagtccctgcagaaacatgtccctccctccatctagactgtgcacggccagtgatgcctggtctgaacagtcaggatgaatatggcagaagtggcttcattcagacagagtccgtggcatgaccctgactgtctcatgcaatgagaccctcatgaggaccctgctctcaggaggggggtgtaggcttggagggcacctcgaccttcagggactcactttcattctctcaagcaaaccccagaactatacctggcccatctcatcca

SEQ ID NO: 83308 - DNA, 484 bp, Homo sapiens
gaatgaggtcttgaaccagacaggcagggttggagtgaggatgtgtttttggatgtatttggaaggtcaagctcacaggattttctaatggatatagtcattgaggggaagggaagagcatggataaagccagaatgttcctctgaacatctcactctttcgaawctccaatgtcttttttgtttttgttttgttgttgttgttgttttgttttttttttttcttgagacggagtcactctgttgcccgggcttgagtgcgatggtgtgatcttggctcactgcaacctctgcttcccaggttcaagctattctcctgcctcagcctcccgagcagctaggattacaggcgcttgccaccacacccagctaatttttgttgttgttgtatttttagtggagacagggtttcaccatgttggtcaggctggtcttgaactcttgacctcaagtcatccaccaatcttggcctcccaaagtgctga

SEQ ID NO: 83309 - DNA, 1399 bp, Homo sapiens
ccctccatgccactggccagttagagggagatggccaccaagcagacgctggagcccagagcggcatggcccccggaagtgtcacccaatttttaaattactgggtcctgttttaagaccagctgctttccccctcaacagggtactcttcccttgtaccattaaatattcctcagcaagtccaatttcaatggctgcagggcatgctggtaaaatcccaaacccaagttcgtataaccagtgtccttgttggagttttacattattcctaaattcactattaggagtataaactaaagttctctgaaaaggattttggaggaaagagactttattccagtgaacagtttgcaaaccagagagactccagtgtaaaatgaagggtgcgctccataaagccaagggaagtgtcaggtttagcgtcctgcccaggctcccaatcaggtctgtttatgcaaatgaaggattgaaactttctgagttctcattggtggacacagctgagctctgattggttggctcaggtgatctctgaaagtccggaagatgaaaatgctgtgggttttcagggaagtcagagtacgtgggtgacctgtacttggctctattttaaactcaggctcagttagccactcaggatccgtcttgaaggagtggctcattcaggttcacatttgttcacaggaataacrctgagggttaggatatttgtagttttttatccctcacccccttcctcattctgagtctccaataatgtccattacaccaccctgttgcctttgcacacccatagctgagctcccacttataagtcagaacatgcagtatttgctttttaattcctgaattacttctacacaggggtggacttgtgtagacaggagcccacggagggggagtcgaggtgtgcacagattcgatgatgtgtttcgtactgagaaataacagagagagagaaagagagacagagaaggggaaaggcagcaagagccactcagaaatgttcaattcacagggtatctcaagcagtacttggaaatatatttgccttttgcttttataagaacacatactattttattttgttttactttaagttctggaatacatgtgctaaacgtgcaggtttgttacataggtatacatgtgccatggtgcacctatcaacctgtcatttaggttttaagccccgcatgcattacatatttgtcctaatgccctccctcccctgtcccccatccccctacaggccccagtgtgtgatgttccccaccctgtgtccatgtgttctcattgttcaactcctacatatgagtgagaacaacacacactattttataattgcagaagggatacatttgctacagaaaatttgaaaaatctttaaaaaaaaatt

SEQ ID NO: 83310 - DNA, 1806 bp, Homo sapiens
agactctgtctcaaaaaaaaaaaagaaattgggcaacatagtggttttcgtagtgaacttgaagaactagagaaagttcattttgttcaagtatctatgtgaatacagaggaggaaggctctagttcagtgtttctcaatttggtgcttttttgcaccctgatagacacctgacaatatctggagtccttttttggttgtcaaaactggactaggggagctactgacatcttgtgtgtacaacctagagacgctgctcaacatctgaccatgcacccttgttcctggaccaaaccaagggtcaggctgcttattctcttagcccaatgacaagatgcaggtgaactgggagagaagggagtttatttctgtaactgggcacagggagaagatctggaaaatattgccagaccaactcaaaattacaaagttttccagagctcatataccttctaagctatttgtctacatgtaagagtgcattcatctagacgtaagcgattaacttcttccaatctgtaactaagatgtcagtcctgaagatcttcctctgtagcctcagtaaatttatttaaactaaatgggtccaggtgctggggtgattacccttatcttgtctcctgctaaatcatggaggtttggggagttccttcagacccccaataaacttgtttgtggaggcttagaggagtttcttcagaccccccaataaaacttgtttaatcctaaacgggtcctgttaagaattccttcattatcttgttatgctcaaggcccagaaaaggcctgggcaaaattcttggtgggcttttgttacattccagcctttgtatgagggcactggctctgtcagcttttaatatttaacttaaccactcaatcagtgctgagacagttgttatggaggcctgcctgttcagcggttagggagacctgacctgccacaccctcccctaaccaccaccaccaaagaattatccagccccaaatgccagaatatgaatatcgttgaggttgtgaggcaggataagtaaggttaggaggccatactcacttgtatccttgcgcaaagccccatggatccctttcgaagcagattctttggttttcactctcrtgagtcagcacctaactcttgcaagataaacagtcctacaggatacaagcagaccaccagatggttgcaagttcctgttaatgtggcctgggaaagagaacaaaagccacttattcatggtgtagtttccccagtctccagccaatcaacaccaaaaacccaagaagctgtgagctacaaattcctgccttgggggagctgggaacttctccagggctctgcgggtgcagctatgttcaaagtttagcttatagtgaccttttcctcatttgaatagtagaaaatacacccctaggtggagattttatatgctaatgatacatgcaatgcgtgttagagcacatagattctgagtgcatgcctttcatgctggactcaccaatattttatgaatatgtatgtatagttcccatgaaaggaattaccttgagatgctagaggctgtctctccctccctctgcctctcagggtgtactttcgctttgtaataaacttctttgcctactcttactttggactcgctctcaaattcttttgtgccgcaaagtcaagaacctgaactggcccaccaacagcagttgataaactgctctaatccaagctgtgggaaagtacaggggctgggagaggggacagggtagggaatgcagcttgtctgaggaggtgatgtttgaaccagctctcaaagga

SEQ ID NO: 83311 - DNA, 1806 bp, Homo sapiens
agactctgtctcaaaaaaaaaaaagaaattgggcaacatagtggttttcgtagtgaacttgaagaactagagaaagttcattttgttcaagtatctatgtgaatacagaggaggaaggctctagttcagtgtttctcaatttggtgcttttttgcaccctgatagacacctgacaatatctggagtccttttttggttgtcaaaactggactaggggagctactgacatcttgtgtgtacaacctagagacgctgctcaacatctgaccatgcacccttgttcctggaccaaaccaagggtcaggctgcttattctcttagcccaatgacaagatgcaggtgaactgggagagaagggagtttatttctgtaactgggcacagggagaagatctggaaaatattgccagaccaactcaaaattacaaagttttccagagctcatataccttctaagctatttgtctacatgtaagagtgcattcatctagacgtaagcgattaacttcttccaatctgtaactaagatgtcagtcctgaagatcttcctctgtagcctcagtaaatttatttaaactaaatgggtccaggtgctggggtgattacccttatcttgtctcctgctaaatcatggaggtttggggagttccttcagacccccaataaacttgtttgtggaggcttagaggagtttcttcagaccccccaataaaacttgtttaatcctaaacgggtcctgttaagaattccttcattatcttgttatgctcaaggcccagaaaaggcctgggcaaaattcttggtgggcttttgttacattccagcctttgtatgagggcactggctctgtcagcttttaatatttaacttaaccactcaatcagtgctgagacagttgttatggaggcctgcctgttcagcggttagggagacctgacctgccacaccctcccctaaccaccaccaccaaagaattatccagccccaaatgccagaatatgaatatcgttgaggttgtgaggcaggataagtaaggttaggaggccatactcacttgtatccttgcgcaaagccccatggatccctttcgaagcagattctttggttttcactctcgtgagtcagcacctaactcttgcaagataaacagtcctacaggatacaagcagaccaccagatggttgcaagttcctgttaatgtggcctgggaaagagaacaaaagccacttattcatggtgtagtttccccagtctccagccaatcaacaccaaaaacccaagaagctgtgagctacaaattcctgccttgggggagctgggaacttctccagggctctgcgkgtgcagctatgttcaaagtttagcttatagtgaccttttcctcatttgaatagtagaaaatacacccctaggtggagattttatatgctaatgatacatgcaatgcgtgttagagcacatagattctgagtgcatgcctttcatgctggactcaccaatattttatgaatatgtatgtatagttcccatgaaaggaattaccttgagatgctagaggctgtctctccctccctctgcctctcagggtgtactttcgctttgtaataaacttctttgcctactcttactttggactcgctctcaaattcttttgtgccgcaaagtcaagaacctgaactggcccaccaacagcagttgataaactgctctaatccaagctgtgggaaagtacaggggctgggagaggggacagggtagggaatgcagcttgtctgaggaggtgatgtttgaaccagctctcaaagga

SEQ ID NO: 83312 - DNA, 1107 bp, Homo sapiens
gcattttataccaatccaagataccctctcttttcacagaaaaatatagcatttgatgaacaatgaaagcaagcataaataagtaataaatagcatttgaaagtaaataaatatagattatacaaaaattataaagtaataaagttttattgtatttgctgaacgaattaaagaattgataatggatggctggtagaggagaagtgtgagatattcattctttggaaggtgcattcttctttctgcaccattttctgcatcaattgttttttagacttttaggagctcatgattatcttggcttcaaatgaacttaacttgaagttatagcacagaaagttactgtgttaggctatttttgctttgctataaagaaatacctgagactgggaaatttataaagaaaagaggtttaattggctcacagttctgcaggttgtacagaaagcatggcagtggcatctgcttggcttctggggaggcctcagggagctttttcttatagtggaaggcaaaggaggaacagacttctcacatggtgagaagagggcaggtgccacacacttcttttttttttgagacacagtcttgctatgtttcccaggctggagtgcagtcgcacgatctcaactcactgcaacctccacctcttgagttcaagtgattctcgtgcctcagcgtcccaagtagctgggactaccagtgcttgtggccatgcccagctaatttttgtatttttagtggagactgggttttgctgtgttggccaggctggtctcgaactcctgacctcaagtgatttaccctcctcagcctcccaaagtgctgggattacaggtgtgagccagcatgcctggccaggtgccacacacctttaaaaaaccatttcttatgagaactcgctatcaygagggcagcaataagacattcatgagagatccgctccaatgatgcaatcacctcccaccaggcccctctgtcaacactgggatttacatgagatttgggtggggataaatatccaactgtatcagctacttttagagttgtacaagatgccacctcttcattctgtattggcaatgcaaaacattttgggtcatttaa

SEQ ID NO: 83313 - DNA, 542 bp, Homo sapiens
cagcggattcaaaatcaagatgtgtatgttttgattacacttaattacttagacaaattagttcacctactttacaactgagattcctcacctaataattttttttttcctgggaggggtcacttttcaagcactaaaacctcattatcttaaaggatctgggatatcctttaagttattctattttcccgacaagatataaagccacataaagcattcccaaaggatacagaaaaaaataactctcccttataatctccatatactttttgttttgcttcttggtaatactaatcamcctttctaaagagagtcacctcttcctttctagccaccatcagttcacctcccatttttcttctctataggtgttcccatgctcacatttcccagtctggtctacatttgcacaaagttttatacccagtagaactactaaaaatgatcaaatgaacagatttctttcctacttttgtttgtaattaagaactcaaaacaaatgcaattaacaaaaaaagacattcagagtaaagtcagggata

SEQ ID NO: 83314 - DNA, 1796 bp, Homo sapiens
tatatytatgtgaatgaatacaacagagtctctctcatctgtgtataatggtttgggaagggtggagcaggaagtagtgtccccccacctggccttccacccaagcctggaatcgtcccatcactaggagggagaaggcagtgaccagaaagagaaacaggctaatggccttaattctgactttttctgtacccaagagaaaggtgagccactcttctccctcccaaaaaaagattctctggaagtcagtcagccaggagttaaaatgaccacttcaagaccctccccacgccagcttctgagccaacgcctgccccgtccataccaccgctcccatacacacccaaacctcccagcacccgggtagggcacaaccctgctgcccagaagaggcccagtagggtgggcgggcaggcacaccagcatggcctcacagcagactctggcccccatctatgagaggagaatgccttcctcagacactgggtcgggaccacttcctgagcccagtcacagaccagggcttcctcaggcggaagcaggatgagggccacccagatcccaatcccaaagaaacttcttcaggccactgccctcccacttcaaccagggaatgtgcccaagagctaggggtgtcccaaagcgcaaggcatgacacatgtagaaactatgaagatttttcggtgattttttatttgctcaaacctgaacacagtccacgtggggtctcggtgtctctgcctctctctctctctcacatgtgacaaaaccattttcagagaagcctggcatctagggacctccctactctggccctgactggcctttccacaatagggttctcagctgtaactggtttctcccttcactggaactctgggcccaccaaaagaaggatgaagttatccagaaagcaaagacccttggttgatacaaagggagcctcagatggagagatccaagaggtggtcaaaactgtgggagaagtggttacacggggagccttagagctaggtgccaccagcagggaagaggtgtgaacggcaaggatggaggtgagggcctgactcctggccggcacacctggggttcaagtgctaatccacagcagaggctctcaactttgaatatgcatcagaatcacctggggaactcgtgcaacaggaagaattccagaccaacctatcccacgcgggaagtcaggcagttccccggaatttgcatttctccacagcccaggaccacattctggaaaccccatgctggggcaccatcctatcctatcacctcctccgcaacagtgccaaggggctgtctgtgccacagtgccttctatccccactgaaaatcttggtcccttttgggagaatagataaatctgtcagatagaattctaaataactaatgtaaatacaacccctacaggaggtacagctgaactccctcttccttaaatgacctccttccaaagactgcagcagtatggaaagaagggaaaagagtcacttgacagtggagtcacttgacagtggagtcccctgacaaacactacctgggccaggtgatcaagatcaacatcaaccatcataagccacgctgatcacatggacccttgatacaaaatggcacattacctcggtggccttcctccccaaaccggtaactctacactaatcatgaaaaaacatctgacaactctcaactgagggacagtctacaaaacacctgaaaagcagttttgctcctcaaagctgtcaagccattaaaaacaaggcgagtctaagaaactgtcccag

SEQ ID NO: 83315 - DNA, 1796 bp, Homo sapiens
tatatctatgtgaatgaatacaacagagtctctctcatctgtgtataatggtttgggaagggtggagcaggaagtagtgtccccccacctggccttccacccaagcctggaatcgtcccatcactaggagggagaaggcagtgaccagaaagagaaacaggctaatggccttaattctgactttttctgtacccaagagaaaggtgagccactcttctccctcccaaaaaaagattctctggaagtcagtcagccaggagttaaaatgaccacttcaagaccctccccacgccagcttctgagccaacgcctgccccgtccataccaccgctcccatacacacccaaacctcccagcacccgggtagggcacaaccctgctgcccagaagaggcccagtagggtgggcgggcaggcacaccagcatggcctcacagcagactctggcccccatctatgagaggagaatgccttcctcagacactgggtcgggaccacttcctgagcccagtcacagaccagggcttcctcaggcggaagcaggatgagggccacccagatcccaatcccaaagaaacttcttcaggccactgccctcccacttcaaccagggaatgtgcccaagagctaggggtgtcccaaagcgcaaggcatgacacatgtagaaactatgaagatttttcggtgattttttatttgctcaaacctgaacacagtccacgtggggtctcggtgtctctgcctctctctctctctcacatgtgacaaaaccattttcagagaagcctggcatctagggacctccctactctggccctgactggcctttccacaatagggttctcagctgtaactggtttctcccttcactggaactctgggcccaccaaaagaaggatgaagttatccagaaagcaaagacccttggttgatacaaagggagcctcagatggagagatccaagaggtggtcaaaactgtgggagaagtggttacacggggagccttagagctaggtgccaccagcagggaagaggtgtgaacggcaaggatggaggtgagggcctgactcctggccggcacacctggggttcaagtgctaatccacagcagaggctctcaactttgaatatgcatcagaatcacctggggaactcgtgcaacaggaagaattccagaccaacctatcccacgcgggaagtcaggcagttccccggaatttgcatttctccacagcccaggaccacattctggaaaccccatgctggggcaccatcctatcctatcacctcctccgcaacagtgccaaggggctgtctgtgccacagtgccttctatccccactgaaaatcttggtcccttttgggagaatagataaatctgtcagatagaattctaaataactaatgtaaatacaacccctacaggaggtacagcygaactccctcttccttaaatgacctccttccaaagactgcagcagtatggaaagaagggaaaagagtcacttgacagtggagtcacttgacagtggagtcccctgacaaacactacctgggccaggtgatcaagatcaacatcaaccatcataagccacgctgatcacatggacccttgatacaaaatggcacattacctcggtggccttcctccccaaaccggtaactctacactaatcatgaaaaaacatctgacaactctcaactgagggacagtctacaaaacacctgaaaagcagttttgctcctcaaagctgtcaagccattaaaaacaaggcgagtctaagaaactgtcccag

SEQ ID NO: 83316 - DNA, 624 bp, Homo sapiens
gggcaatagagtgagactacgtctcaaaacaaaaacaaaacaaaaaaagatttgggagaaaagcattggaaaattttgttttctattacrtaatgtgggcatataatgggatacagtgtaaaattctcaggcttgataatagctacattcctttgggggatgtgtgtttgttctttgtgactggaaatcctttgatagaaaattgtgtgtagcaatgataattaatattttctgaatttgacaagtgatttaggtcaattcaatatcacttgggctttctagccatattaggtttctcagcctcagcactagtgactttctgggccagataactcctggttgtgggggctatcctgtgtgttgtaggaggtttagcaacttccttggcctctacccactagctgcaagtagcaattccctaagtgtgacaaccagaaatgtctccagacattgccaaatgcctactgggggacaaaatcagccccagttgagaatcaatgatgtagatggatacgaattcctactctgccccttacttatgattaatagttttgtgaccttggacaaagtatgcaataccagtaaagttcatcttccttatctgccaaatgggatcagctcata

SEQ ID NO: 83317 - DNA, 624 bp, Homo sapiens
gggcaatagagtgagactacgtctcaaaacaaaaacaaaacaaaaaaagatttgggagaaaagcattggaaaattttgttttctattacgtaatgtgggcatataatgggatacagtgtaaaattctcaggcttgataatagctacattcctttgggggatgtgtgtttgttctttgtgactggaaatcctttgatagaaaattgtgtgtagcaatgataattaatattttctgaatttgacaagtgatttaggtcaattcaatatcacttgggctttctagccatattaggtttctcarcctcagcactagtgactttctgggccagataactcctggttgtgggggctatcctgtgtgttgtaggaggtttagcaacttccttggcctctacccactagctgcaagtagcaattccctaagtgtgacaaccagaaatgtctccagacattgccaaatgcctactgggggacaaaatcagccccagttgagaatcaatgatgtagatggatacgaattcctactctgccccttacttatgattaatagttttgtgaccttggacaaagtatgcaataccagtaaagttcatcttccttatctgccaaatgggatcagctcata

SEQ ID NO: 83318 - DNA, 624 bp, Homo sapiens
gggcaatagagtgagactacgtctcaaaacaaaaacaaaacaaaaaaagatttgggagaaaagcattggaaaattttgttttctattacgtaatgtgggcatataatgggatacagtgtaaaattctcaggcttgataatagctacattcctttgggggatgtgtgtttgttctttgtgactggaaatcctttgatagaaaattgtgtgtagcaatgataattaatattttctgaatttgacaagtgatttaggtcaattcaatatcacttgggctttctagccatattaggtttctcagcctcagcactagtgactttctgggccagataactcctggttgtgggggctatcctgtgtgttgtaggaggtttagcaacttccttggyctctacccactagctgcaagtagcaattccctaagtgtgacaaccagaaatgtctccagacattgccaaatgcctactgggggacaaaatcagccccagttgagaatcaatgatgtagatggatacgaattcctactctgccccttacttatgattaatagttttgtgaccttggacaaagtatgcaataccagtaaagttcatcttccttatctgccaaatgggatcagctcata

SEQ ID NO: 83319 - DNA, 755 bp, Homo sapiens
ttagtgattttgctgtgcatcmctgtggctccttttgatgtgtcttcagactggctcggccctgcccactcctagaatcctgggactattctgtggattccctagagaagacaggagagagtccaatgccgtcgcatgtccacagaggtttcctgctccaccaagccacagggacccattgccaggcaacagtggtgttcactgtgaggtgagccctggcttaccactcatccctggtgcccagagagtggcacatgtgcatttgtgagacaggcttgggctcttgtctttcagggctgtcaggctgcctaagcagaggaaaatagtggaggcagactggcctggtcttgagaaaaaggctgcctgcaacaaccaatgtgggaccctaaatgtcttgaccatagggcctcctcgggctaactccttgaccaggtcccgccagaggaatagttgcttggagactgtgaggtgggcactggaaactgctcttttgattccattcctgaaggaggctgtgtgcaggaatcgtatcccatgcggatggggatacagtctggtggggtctctgagatttggaatcatacctgagaccccagaggtgtgtgtcagcccaagattgttgggccattgatctcactacctcccttcatcctttgtctcccaggggctcctgcttctcagcatggctgtctgggaaagagagaaacaatgacaaaggcaagtccaaggtggagcaggggtctcacacctggaac

SEQ ID NO: 83320 - DNA, 2676 bp, Homo sapiens
caaagaactctgtgtgtgtgtgtgtgtgtgtgtgtgtgtgtgtgtgtgtgtatcaaagaatgatgctaaattcctttggaaccaagattttcagtataaaagtgatacagatttaaaaaatcaaagaagtacaaaccagtccttaaattgaatggactatattagcatagactcctcagctattttatcttaggaaaaaggtatatcctactattgttcattgtcaagtttgagaaggggctgatcaacaatgggacaatttgagcatcagaaagagtcatggatgaaaacacatcaaatagctgaaaagcccatrcattcatgataatactgaaaaatcctatttgatcttctgcaggttgctttgctcattattctgaaaacgagtgaaaaggcagggcggtcaggcaggtcaagcctccatattttaaaaattctaggccggatgcagtggctcacacctgtaatcccagcactttgggaggccgaggcaggctgatcgcttgaggtcaggagtttgagaccagcctggtcaacatggtaaaaccccgcctctactgaaaatccaaaattagctgggtgtggtggcacacacctgtaatcccacctactcaggaggctgaggcaggagaatcacttggacccgggaggcagaggctgcagtgagctgagatcgcaccactgcactccagcctgggtgacaagagcgaaactccatctaaaaaaaaaaaattctaataactcactagggaggcttcttggaggcccccagggtgtctcctgggccctgagctgtgccacagcctgctgctctgggggtatggggtccattggcttggggacactgaggcaggagagagactggacaagggattgtcttcaagctccctgcaagctccaaggagctgaagggggatgggtggggaactgagaggagggagtaaggccaggtgcgcaggtgaggtaaggtggggctgggctgggctgggtgtgggctcaggtgaggccaagggctgagggtgggggagtaagggtggatggcctggtaggacagacaatacaagtggggcctgaccgagcccagtggccactctctgtgtgagcaaggaggtgaggagggcccccatcagctgagggagcaggaccgcagggttgtagcctcccagctgccacctgctctctccaggacacaccctccactgaggaaagcccctcctctatcattccggtgggtgcacatgtccagccctggctgtcctagatgcaaagactgacagacctatcagccagcatgaacaggaaggcaaccctctcccagcctctcaggctctcaggctgtcccagagcctcagaaccttctggaaacatggcactcaatctacctcacaccaaccttccagggctgtttgccgacatccctcagctcaccaggctcacctcatgttcctccagcagggtcagaggcccacagtgggaggagcctcagaagtcaccaagaatgcatgaggaatggggaagctgaggctgaccaagggaagggtgtgtggctgctgtgagatcagcatctgcgggccagggctgggctgctagaacagccaggccaccacaggcttcctggccaacatcctccttcaggtagtcttcctacctattcattcattcaatcattcgttcattcccccagatcctcgcagagcaccggctgagtgccaggcgctgttctaggcgcaggttacagagctgtctcaccaccaggtagtggtgggacaaaaaaaacgaagggggcacaggatgggggtgcagattgtggagggtggtcagcaagggtcccaggggcgtctccacagagaccctggagcaggcccttcagcaaatctgggaggcatttgctgttggaggaggactctgcatgcaggaggcacccaatgcagaatggatgggagggtaggagatggggcagggtggctggacagagccaccaccctgtattcctcaagctgatgtgtctctccagaggatccttatgcctggcgaatgtctcctatggatatgatgccctacatctgtaaggcatcaccccatttaaggccctgctgttcttttttagattcagagggtatgtgtgcaggtttgttacataggtatattgcgtgatgctgaggtttggggtatggatgatcccatcacccagatagtgacaatggtagccaatagtttttcaacgcttgctcccccaccatctaccagtccccagtgtctattgttgtccctctatgtctatgagcacccatcatttagttcccactttcccacttataagtgagaacatgtggtatttggttttccgttcctcagttaatttgcttaggataatggtgtccagctggacccatgttgctgcagatgacatggttttattctttttcatggctgcatagtattccatggtgtgtatataccacattttctttacccagtctaccactgttgggcaccttgggttaattccaggtctttgttattgtgaatagtgctgcgatgaacatggaagtgcaggtgtctttttggtagaatgatttttcttttgtatatgtatccaggaattaatggaattgctgggtcaaatggaacttctgttttgagttctttgggaaatctccaaactgctttccacag

SEQ ID NO: 83321 - DNA, 786 bp, Homo sapiens
agtgaaagaagtcagacacaaaagaccgtatgttgtatgaaatgcccacaacaggcatttggaattatcaacatctctacaagattgtaagtacattagtggctgcctggaggtgagggtacggggagtgactgccaatgggtacaaggcttttttttgaaatgctgtcctaaaaatgactgtggtgatggttgcacaactctgtgaatacactaaaaaccactgacttgtatactttaaatgtgtgaatgaaatggtatgtgaattatacttcaagaaagcttttttaaaaaaaaaaaagaataaaagtttaaggagagaagcgttaaagtataaaatcactggctttggaacataagtttgtttctttttttaaggaaatactaataattaccatatcagatactaatgtctctacaaatcctgtgaaaaacaaatctggcatctattcttacccctcctttcaattttctctctaagtttacaaattatctcttctgctttaattcaattgtcttttcattgtagtcactgtttctgaacttctacaccrcatttgaaactgtcaacaccctgcccttgtagaaaatcttcctatcctggaaatgatgcactttctggttcttctcagaatgctattagcctatttcaagacccaaaattccaaacctcaaagctctttcttcattatactactaccctcccaacacacatctactgatgtgttttactagcatctatatccctggtcagtgcaaaatctacctttcatctaaccgttcattg

SEQ ID NO: 83322 - DNA, 881 bp, Homo sapiens
cattgttgttgttgcgagttgtctccactgctttatgaccagttttaaataagaaaattgttcaaatttgctttttgtctaacatcatttccttattctaaaataaacataaacagcaagtaataatcattaacaaaaaacataaagtgagaaatccccttaaaatgatgtgtaacacagccacgtttgtctaagaaagcattccactatcaaatggcaaatttcaacattgcaaaaaccacaattacttttgcactcaccatgtaaggtgaggaagcagaaatagcttctccaatcaggtgatatttggacagagatttgcagaggtgcatgagtgagttgatgacaacaaatggcagaagattagatgggcctcatcataactttggctgtaacgttagttttatccaaggacaccattaggctctatttgagaatctctggcagcacaggtacacagttagtctcataattcaactttacttatatgggaagatgtacatacattcttccccttttaaaaataatctaaagatttggtggtgcaaacttggagtcccagctactcagtaggctgaggtgggaagatcacttgagcacatgagttcaaggctgtactgagatgtgattgtcccactgtactccagcctgggcaagagagaaagacaccatctcttaaataaatctaagccattaaccaaaggctagttgccaccattctgattttttttcaagggagttccaaatctaccttragctattcataaaaagaaaaatttataagctttaattttacttttctaagcactcatatacctgagtaaacttacattccagttgtatgatttctattacctgtaaatatttctgctctgaatcgg

SEQ ID NO: 83323 - DNA, 613 bp, Homo sapiens
taagtctctctggattcaaatatatacagtgtgttaagaagagagtaaatttatcataaagggcctaaactattttttccctctgtaaatgataagactatatctagaagcctacctctaccacacccttgtccacactccccccacaacactttcacaaatttacaaatatacaaacgtgaacacacagaagcacattttatactctaaactgtgtactctgaaatctgatttagttatataatacgtgtcacatatttttcacttcacgaggttcacatagaatagatttatccactttaacttcaaatatcttactcatctttcaacttttaacttcactgttatcctctccaaaaattttcttttaacttatctttaccttaagtgccgccttctctgtatttccaaagcatcctaamactatctatgtcttttggaacccttattgtattgcattgaaatatgattcagtatcttgtgtctaaagatttctaacagggcaaggagctggtcttgtattcccagaactaggcacagagtctaaaacatactatattcccaataatgcttatatgatttatcataacctgagtctttatacacagttaaa

SEQ ID NO: 83324 - DNA, 721 bp, Homo sapiens
aaagtgcctatagatgtagcgagtagagtactggttgttaaaagatggaaaggggaatggaaaggggaaatattgagaggctggttaacaaatattaaattatagtttagatagtagaagtaagttaagtattctataacactgactatagttaaaaataatttattgtatatttttaaacatctaaaagagaggatttgaaatgtgctcaacacagagaaatgataaatgttcgagatgatggatatgttaattaccctaaattgatcatatacattgtatacayattaaaatatcactttgtaccccataaatatgtacaattattacacatcaattaaaaatattaaatgaaaagaaaaagcaataacttcatggacaagtaaagctcaatatgactgtaaaagatgctcccaaagagctacaatattttcactcattcatgctgcatattgaatgtatactgagagtcaccacctgccccagttttgcttaatgacacagtgttgtcaagactgttaattgccaaggtctaaagggtttgtggatagttgaacttcaatgtggcatcttgggctaatttacacattgcaggaaatataattgagacttatgatagtatatgtatgcaacagttttaacttgttccaatcatctctgtgtatctggtcaggcaaacaaaatactctgtgaaattgcctacctttattttctgagtttt

SEQ ID NO: 83325 - DNA, 721 bp, Homo sapiens
aaagtgcctatagatgtagcgagtagagtactggttgttaaaagatggaaaggggaatggaaaggggaaatattgagaggctggttaacaaatattaaattatagtttagatagtagaagtaagttaagtattctataacactgactatagttaaaaataatttattgtatatttttaaacatctaaaagagaggatttgaaatgtgctcaacacagagaaatgataaatgttcgagatgatggatatgttaattaccctaaattgatcatatacattgtatacatattaaaatatcactttgtaccccataaatatgtacaattattacacatcaattaaaaatattaaatgaaaagaaaaagcaataacttcayggacaagtaaagctcaatatgactgtaaaagatgctcccaaagagctacaatattttcactcattcatgctgcatattgaatgtatactgagagtcaccacctgccccagttttgcttaatgacacagtgttgtcaagactgttaattgccaaggtctaaagggtttgtggatagttgaacttcaatgtggcatcttgggctaatttacacattgcaggaaatataattgagacttatgatagtatatgtatgcaacagttttaacttgttccaatcatctctgtgtatctggtcaggcaaacaaaatactctgtgaaattgcctacctttattttctgagtttt

SEQ ID NO: 83326 - DNA, 721 bp, Homo sapiens
aaagtgcctatagatgtagcgagtagagtactggttgttaaaagatggaaaggggaatggaaaggggaaatattgagaggctggttaacaaatattaaattatagtttagatagtagaagtaagttaagtattctataacactgactatagttaaaaataatttattgtatatttttaaacatctaaaagagaggatttgaaatgtgctcaacacagagaaatgataaatgttcgagatgatggatatgttaattaccctaaattgatcatatacattgtatacatattaaaatatcactttgtaccccataaatatgtacaattattacacatcaattaaaaatattaaatgaaaagaaaaagcaataacttcatggacaagtaaagctcaatatgactgtaaaagatgctcccaaagagctacaatattttcactcattcatgctgcatattgaatgtatactgagagtcaccayctgccccagttttgcttaatgacacagtgttgtcaagactgttaattgccaaggtctaaagggtttgtggatagttgaacttcaatgtggcatcttgggctaatttacacattgcaggaaatataattgagacttatgatagtatatgtatgcaacagttttaacttgttccaatcatctctgtgtatctggtcaggcaaacaaaatactctgtgaaattgcctacctttattttctgagtttt

SEQ ID NO: 83327 - DNA, 677 bp, Homo sapiens
atgaaaaaggtacatctaaaactgcaaaaggaattcccaaatgattctaatgattctccacaccatccctgtggtcaatttaacagattaacttctctcatgaagccttctttggacaaagatcacactattttgatgtagaaattgttttcaaactagggaccctacctgacatttacatggattaaaagaagaaacaggttgctataattactaaccctaaactcctctgatttgaaagttctggtgtatagcccaaaggggacagacaagaaacttaagagtctgraaggggtaacaggggcttacgtacttctgtttctttgatcctttatgagttttctctgttttttcagctgacctttcccttgagtgactggagtctcgggaatccactgattctctcgatttacctcgtttaagatctctctccttatgttttttacgacgttcaatatcaaggcggagatcaacaggatcatctttgtattttccctcagcctatcaaaagataagccaaaattaaggtttctgggattcagagctgtcaactcaaccatcccacaaactgtggtttttactccaatggaggggtgcagaggaagcactgggaaatgtgaggcatctcacccaagcttggaagggatgcaggatgtcccacagaagttactccataa

SEQ ID NO: 83328 - DNA, 769 bp, Homo sapiens
gcacagatgcaggaaaatgagtctctgcagattgcaaatgaagttatttaagagatgtcacttaaaaggatacagtctgtgaaatacaaggaaataatcaattttctccaattctgtagaactcagcagttagttaatttaaaggcatggtttctcaaactctctggatagatactttccttgcaggagagggaaaacaaaagaaaaaaccatgaaacagataagccagaaataaaaactgaacatccagtggcaaatttatctgtttctaaaaacagagaagtcagattacaatcaattataaaagcatactttctagtggagaaattcctccagaaaagtctcttctaggtatatgatagcatgtaaagtgtctctagacctaccccagcacatactgccttcctaaaatattttttcctcatttgccaagtcagtgagcaagtgccaaatgatttgcagaacaaggagaaaagaactgcccggaattccagctgtcataaatacttcagagttggttaacatttttcaattcaattttgtctctcagttttggttgcatagcctcttggtgttgaaccaattatttagtttcttctagttactagattaaattttaaaaaggtatctttcataaccaaatgagctaaaactgaggtttaaactccctaaatcaagattctgggtacagggtaggagttactaagagtcttgctggtcccayggctttaaaagcaatttcctgaggtaaataaatttagggtttccc

SEQ ID NO: 83329 - DNA, 631 bp, Homo sapiens
tagggtgttaattactatacagctgtcaatgatcttatcccctgatatggtttggctgtgtccccacccaaatctcatcttgaattacagctcttacaattctcacacgttgtggtggagggttggggggagggtggtggggaaccccagtgggaggtaattgcatcayggggtgagtttttcctgtgctgttctcttgatagtaaataagtctcaagagatctgatggtttcatgaggaggagtttccctgcacaagctgtctctttgcctgccgtcatccatgtaagatgtgacttgctcttccttgcattctgccatgattgtgaggcctccccagccatgtggaactgtgagtctgttaaacctctttcctgtataattacccagtctcaggtatatctttattagcagcgtgagaacagactaatacacccccagaagcgcatccttaaagtaagattcctaggaccaattacgacacactcttttaggttgggttctccagattgagtttcctagaagcagagcctgaggtaaagatttgtgtgcaagtgatttactgatggagtacttccaggaaaatctggaatgagaaaagctgacaagggtaggtggggaaaggtaatcag

SEQ ID NO: 83330 - DNA, 631 bp, Homo sapiens
tagggtgttaattactatacagctgtcaatgatcttatcccctgatatggtttggctgtgtccccacccaaatctcatcttgaattacagctcttacaattctcacacgttgtggtggagggttggggggagggtggtggggaaccccagtgggaggtaattgcatcacggggtgagtttttcctgtgctgttctcttgatagtaaataagtctcaagagatctgatggtttcatgaggaggagtttccctgcacaagctgtctctttgcctgccgtcatccatgtaagatgtgacttgctcttccttgcattctgccatgattgtgaggcctccccagccatgtggaactgtgagtctgttaaacctctttcctgtataattacccagtctcaggtatatctttattagcagcgtgagaacagactaatacacccccagaagcgcatccttaaagtaagattcctaggaccaattacgacacactcttttaggttgggttctccagattgagtttcctagaagcagagcctgaggtaaagatttgtgtgcaagtgatttactgatggagtacttccaggaaaatctggaatgagaaaagctgacaagggtaggtggggamaggtaatcag

SEQ ID NO: 83331 - DNA, 770 bp, Homo sapiens
ccacatttaacaacaatccacaaaaaaaacaaaacaacaacaacaaaaaaaacaacttcacgagaaccaaaaatcaggtgagtgatcacagtgcctgtttttaatttcatagcactgaaagaggcactagagagagtaggaaagaaagtcttggattgccaacatcaaccctccctcatcccctggcagcagccatgtggcatggagagagaatccgtgaatgtgaaggaggcagagcacagtgattgtacaactttgcattgtaactcagtgctgccctgttacagcggaaaccagcacttgtggaactcatccagtgcccatggagggagcttttagaccagtcctgacatatttttgctctttgttttcttggctttttattctccctttttattgtattttgttgttttatcatctcatttttgatgtacactttattaaattcacattttctatcagttttctttagaaaaataactatagggatggtttttctttctctgagattaaattgtcttgttttgctttgctgtactttcctttcctttgtttttgcagaattgattttctttcattctttgtttcttttttttggtttttgctgtaatattttgcatacggtcatgctgtttctttttcaagttattcatatgtaaattaaatagccctgtcaaaactttgatttgctttgatataatatgggtcaattcttccagacaattttagttttaraaagatacatcacaattatctatgtcagaaaccca

SEQ ID NO: 83332 - DNA, 539 bp, Homo sapiens
cgccttccttgacgaaaatgttttatgatgggagagatggcyagaatgccatccccaactggaataggcatgttttacactcttcctatgtccataaagctggcttcttgcagtagaccgttttacatattaaaacaaggcatacattttagccttgagaaagaacactaaatataggcctcagcaataatatgcagcattagtatgcgctctcttgataaaattctcctaagcttaaaaaatacatttttcacatagctgctggaagaaatttctaagatttttcatatagatgctaagaaagagatgttttctcttttcactggggctgctaaactggtatgacatgactctgaaactgtctccagctatgttcttagtctcccagcttgtcaaaacccaagcttggtggaagtaaaaggggccagagagagacccaaggttgcaaagaaatgacatttttaactatttggactcagcttcacccctggacttcccaacttcctattatgtgaataataaattcctttatcctctca

SEQ ID NO: 83333 - DNA, 583 bp, Homo sapiens
attgctctccaatccattcatctgcacctctgctaaagatagactgcattttttagtatcaaatgaactctgtggcacattccttggggttctgcgtttgttaggaattttctctgccacctggaacagtccttttccctataacctgcacttttagacaaaactccaaaattaatctccccaggaaccctctctgaccaaactgatcccctccatgcattctctctcttgaaargttgagacctgaacctcagtaatacatcaaattatttgaaataagccattggctcttgattcacgtaaatttgtcttgtcttcgaaactagatttttaagtgtcttgagaggaggaagccaacatgactcaaagtccttgtacccttgacatcacccagcttagggatgagcatactgaatatacttaccatgccagtgaggtaaaggatgggatgctggatgaatgttcaaagatttcgagcccaagaatttttttctccgcttttggctataaccattctcaccagggcaacaccttctaagaatattcagaaatcattggctgttagggaagtattgcaatattc

SEQ ID NO: 83334 - DNA, 583 bp, Homo sapiens
attgctctccaatccattcatctgcacctctgctaaagatagactgcattttttagtatcaaatgaactctgtggcacattccttggggttctgcgtttgttaggaattttctctgccacctggaacagtccttttccctataacctgcacttttagacaaaactccaaaattaatctccccaggaaccctctctgaccaaactgatcccctccatgcattctctctcttgaaaagttgagacctgaacctcagtaatacatcaaattatttgaaataagccattggctcttgattcacgtaaatttgtcttgtcttcgaaactagatttttaagtgtcttgagaggaggaagccaacatgactcaaagtccttgtacccttgacatcacccagcttagggatgagcatactgaatatacttaccatgccagtgaggtaaaggatgggatgctggatgaatgttcaaagatttcgagcccaagaatttttttctccgcttttggctataaccattctcaccagggcracaccttctaagaatattcagaaatcattggctgttagggaagtattgcaatattc

SEQ ID NO: 83335 - DNA, 583 bp, Homo sapiens
attgctctccaatccattcatctgcacctctgctaaagatagactgcattttttagtatcaaatgaactctgtggcacattccttggggttctgcgtttgttaggaattttctctgccacctggaacagtccttttccctataacctgcacttttagacaaaactccaaaattaatctccccaggaaccctctctgaccaaactgatcccctccatgcattctctctcttgaaaagttgagacctgaacctcagtaatacatcaaattatttgaaataagccattggctcttgattcacgtaaatttgtcttgtcttcgaaactagatttttaagtgtcttgagaggaggaagccaacatgactcaaagtccttgtacccttgacatcacccagcttagggatgagcatactgaatatacttaccatgccagtgaggtaaaggatgggatgctggatgaatgttcaaagatttcgagcccaagaatttttttctccgcttttggctataaccattctcaccagggcaacaccttctaagmatattcagaaatcattggctgttagggaagtattgcaatattc

SEQ ID NO: 83336 - DNA, 1784 bp, Homo sapiens
ggcacaaatcctgagctcactgttcacatcagcatcaaccctgagacttttaacaaaaaccatcaaaaggagtccctatcctctgcggtctttaagggaatccaagccccaaggggtctgattgttctccagtgactggctgttccttaggaaatccagtgccttactacagtgctcttgaagcctgttcctactcagccattctgtcacttggcagtagcctacaggctatttttagttttcatgtttgtagaccctgaaggggtctacctggtacctccccacctctctccattacctctgtttgtccaagaaaacagtcacctcaactgcacaggctacactcagcaaatgtttataaaagaagcaaacaagtggatggtgatttacatggggtgtaataattgcattaaatgggaactgaatctgttcatcagggacctagtgcagagaacagggagtgcctctccattttgctgaaaaactttgcttcctaagtgcaatcccactagccaatcactgatggtgtgatgttctttaactgttgctctgcttctgtgggaagtcagcaccgtggctttaaatgaagacttcagcccagacccccagaggctgaagatcatgccataattttattctcatgtatattgagattttcgagctttcagtaaatattatacagcagcaggactttcctcatgcctcrtagtctagagctgaggccaggaggatttagtttcagtacttgaaaaacccaaaatagttctgttaatttaggatggccatgctttcctgagatgactgaggctagtgctgctgtgctggataaacatggtgaatggagggacagttggtctacagaaatggaaactaaaaatagcatgtaagttactgccaggtgactggctaggctggctatcaacagtccaagagccctgcagtgaggtactggatttctaaagcaatagcaagtccctggaaaatggcagacagggggctggatttcctcaatgagcaggagcatcatgaaggaggtaaaaggacactcttttttatggctttggttagagtcttattagggttgatgccaacctagatgtgcactgagctcagggtcaatgctatcattctgcattttttttataggccctggttctgttggtttttcataaccttgtggctggtcaccttttatgtaaggtacgtggccttccctgaggttctcagacaatctttcaggaacatgcttccaggagtcaattgctgaccaccttgaaaggtgtttcatgagctatatcttgaaagatgagtaagagtttctgcaatagatgaagaaaaattattccacgaggagggaaaaagcacacagaaaggcaggcacacagctctacagggaccccactgtggcttaaatggtgtgaaacttgccttagtgctgggtagaaacaggcaaggaactctgctttcacctaagaattatcattattccaaagagttggtgggaaatagtatgcttaaagtatttgtttagcaggaaatatatttggatttcaggaattaaaaataatctgacccagagaactagatattctgaggacagggtggcagccccacctcctgatattcatgacattgtataattgcctcactttagcagcttgtctttgaccaattgaatagggcaacactgaggtgtgtcatcttccatgagtaagttacaaaagattattacttgtgacttgctagctgactttctattgccttgtgttcacacttttatgaag

SEQ ID NO: 83337 - DNA, 1784 bp, Homo sapiens
ggcacaaatcctgagctcactgttcacatcagcatcaaccctgagacttttaacaaaaaccatcaaaaggagtccctatcctctgcggtctttaagggaatccaagccccaaggggtctgattgttctccagtgactggctgttccttaggaaatccagtgccttactacagtgctcttgaagcctgttcctactcagccattctgtcacttggcagtagcctacaggctatttttagttttcatgtttgtagaccctgaaggggtctacctggtacctccccacctctctccattacctctgtttgtccaagaaaacagtcacctcaactgcacaggctacactcagcaaatgtttataaaagaagcaaacaagtggatggtgatttacatggggtgtaataattgcattaaatgggaactgaatctgttcatcagggacctagtgcagagaacagggagtgcctctccattttgctgaaaaactttgcttcctaagtgcaatcccactagccaatcactgatggtgtgatgttctttaactgttgctctgcttctgtgggaagtcagcaccgtggctttaaatgaagacttcagcccagacccccagaggctgaagatcatgccataattttattctcatgtatattgagattttcgagctttcagtaaatattatacagcagcaggactttcctcatgcctcatagtctagagctgaggccaggaggatttagtttcagtacttgaaaaacccaaaatagttctgttaatttaggatggccatgctttcctgagatgactgaggctagtgctgctgtgctggataaacatggtgaatggagggacagttggtctacagaaatggaaactaaaaatagcatgtaagttactgccaggtgactggctaggctggctatcaacagtccaagagccctgcagtgaggtactggatttctaaagcaatagcaagtccctggaaaatggcagacagggggctggatttcctcaatgagcaggagcatcatgaaggaggtaaaaggacactcttttttatggctttggttagagtcttattagggttgatgccaacctagatgtgcactgagctcagggtcaatgctatcattctgcattttttttataggccctggttctgttggtttttcataaccttgtggctggtcaccttttatgtaaggtacgtggccttccctgaggttctcagacaatctttcaggaacatgcttccaggagtcaattgctgaccaccttgaaaggtgtttcatgagctatatcttgaaagatgagtaagagtttctgcaatagatgaagaaaaattattccacgaggagggaaaaagcacacagaaaggcaggcacacagctctacagggaccccactgtggcttaaatgstgtgaaacttgccttagtgctgggtagaaacaggcaaggaactctgctttcacctaagaattatcattattccaaagagttggtgggaaatagtatgcttaaagtatttgtttagcaggaaatatatttggatttcaggaattaaaaataatctgacccagagaactagatattctgaggacagggtggcagccccacctcctgatattcatgacattgtataattgcctcactttagcagcttgtctttgaccaattgaatagggcaacactgaggtgtgtcatcttccatgagtaagttacaaaagattattacttgtgacttgctagctgactttctattgccttgtgttcacacttttatgaag

SEQ ID NO: 83338 - DNA, 1784 bp, Homo sapiens
ggcacaaatcctgagctcactgttcacatcagcatcaaccctgagacttttaacaaaaaccatcaaaaggagtccctatcctctgcggtctttaagggaatccaagccccaaggggtctgattgttctccagtgactggctgttccttaggaaatccagtgccttactacagtgctcttgaagcctgttcctactcagccattctgtcacttggcagtagcctacaggctatttttagttttcatgtttgtagaccctgaaggggtctacctggtacctccccacctctctccattacctctgtttgtccaagaaaacagtcacctcaactgcacaggctacactcagcaaatgtttataaaagaagcaaacaagtggatggtgatttacatggggtgtaataattgcattaaatgggaactgaatctgttcatcagggacctagtgcagagaacagggagtgcctctccattttgctgaaaaactttgcttcctaagtgcaatcccactagccaatcactgatggtgtgatgttctttaactgttgctctgcttctgtgggaagtcagcaccgtggctttaaatgaagacttcagcccagacccccagaggctgaagatcatgccataattttattctcatgtatattgagattttcgagctttcagtaaatattatacagcagcaggactttcctcatgcctcatagtctagagctgaggccaggaggatttagtttcagtacttgaaaaacccaaaatagttctgttaatttaggatggccatgctttcctgagatgactgaggctagtgctgctgtgctggataaacatggtgaatggagggacagttggtctacagaaatggaaactaaaaatagcatgtaagttactgccaggtgactggctaggctggctatcaacagtccaagagccctgcagtgaggtactggatttctaaagcaatagcaagtccctggaaaatggcagacagggggctggatttcctcaatgagcaggagcatcatgaaggaggtaaaaggacactcttttttatggctttggttagagtcttattagggttgatgccaacctagatgtgcactgagctcagggtcaatgctatcattctgcattttttttataggccctggttctgttggtttttcataaccttgtggctggtcaccttttatgtaaggtacgtggccttccctgaggttctcagacaatctttcaggaacatgcttccaggagtcaattgctgaccaccttgaaaggtgtttcatgagctatatcttgaaagatgagtaagagtttctgcaatagatgaagaaaaattattccacgaggagggaaaaagcacacagaaaggcaggcacacagctctacagggaccccactgtggcttaaatggtgtgaaacttgccttagtgctgggtagaaacaggcaaggaactctgctttcacctaagaattatcattattccaaagagttggtgggaaayagtatgcttaaagtatttgtttagcaggaaatatatttggatttcaggaattaaaaataatctgacccagagaactagatattctgaggacagggtggcagccccacctcctgatattcatgacattgtataattgcctcactttagcagcttgtctttgaccaattgaatagggcaacactgaggtgtgtcatcttccatgagtaagttacaaaagattattacttgtgacttgctagctgactttctattgccttgtgttcacacttttatgaag

SEQ ID NO: 83339 - DNA, 1784 bp, Homo sapiens
ggcacaaatcctgagctcactgttcacatcagcatcaaccctgagacttttaacaaaaaccatcaaaaggagtccctatcctctgcggtctttaagggaatccaagccccaaggggtctgattgttctccagtgactggctgttccttaggaaatccagtgccttactacagtgctcttgaagcctgttcctactcagccattctgtcacttggcagtagcctacaggctatttttagttttcatgtttgtagaccctgaaggggtctacctggtacctccccacctctctccattacctctgtttgtccaagaaaacagtcacctcaactgcacaggctacactcagcaaatgtttataaaagaagcaaacaagtggatggtgatttacatggggtgtaataattgcattaaatgggaactgaatctgttcatcagggacctagtgcagagaacagggagtgcctctccattttgctgaaaaactttgcttcctaagtgcaatcccactagccaatcactgatggtgtgatgttctttaactgttgctctgcttctgtgggaagtcagcaccgtggctttaaatgaagacttcagcccagacccccagaggctgaagatcatgccataattttattctcatgtatattgagattttcgagctttcagtaaatattatacagcagcaggactttcctcatgcctcatagtctagagctgaggccaggaggatttagtttcagtacttgaaaaacccaaaatagttctgttaatttaggatggccatgctttcctgagatgactgaggctagtgctgctgtgctggataaacatggtgaatggagggacagttggtctacagaaatggaaactaaaaatagcatgtaagttactgccaggtgactggctaggctggctatcaacagtccaagagccctgcagtgaggtactggatttctaaagcaatagcaagtccctggaaaatggcagacagggggctggatttcctcaatgagcaggagcatcatgaaggaggtaaaaggacactcttttttatggctttggttagagtcttattagggttgatgccaacctagatgtgcactgagctcagggtcaatgctatcattctgcattttttttataggccctggttctgttggtttttcataaccttgtggctggtcaccttttatgtaaggtacgtggccttccctgaggttctcagacaatctttcaggaacatgcttccaggagtcaattgctgaccaccttgaaaggtgtttcatgagctatatcttgaaagatgagtaagagtttctgcaatagatgaagaaaaattattccacgaggagggaaaaagcacacagaaaggcaggcacacagctctacagggaccccactgtggcttaaatggtgtgaaacttgccttagtgctgggtagaaacaggcaaggaactctgctttcacctaagaattatcattattccaaagagttggtgggaaatagtatgcttaaagtatttgtttagcaggaaatatatttggatttcaggaattaaaaataatctgacccagagaactagatattctgaggacagggtggcagccccacctcctgatattcatgacattgtrtaattgcctcactttagcagcttgtctttgaccaattgaatagggcaacactgaggtgtgtcatcttccatgagtaagttacaaaagattattacttgtgacttgctagctgactttctattgccttgtgttcacacttttatgaag

SEQ ID NO: 83340 - DNA, 2474 bp, Homo sapiens
gcgtcgaccaggcactgggtggagggcctagacagagtaacacatggcattgttgagtccctgagcacaggggccagctagataaatatgcatcttgggggagagtgggtcaggacagcaggcaaaggggggctctggtaacccctggtgagaggacaggtaggaggtcatgtgggcaccagggtggggaatagaagtcagcctgtgcaattgagctgctgaaagaacttgctacagagtctcagagtttggccctctcctctgtaccatgttcttgagtgacacaagtgagaacacagtaaagcacctggatcaattctgtgaatgacttaagacaagaaaagggagctcatttatttgaatggcatatctcaggctcaccactgacaggccagcaccaagtttagagattatatctaacataaatctaacatccttcccttactttcaaatgccagagactcaagcacaaaagatgaagggacctgaactgacagaagttcttgtgaacacaagttgacaaactcctatacatccttcaaggaccagatgatctcttccctcctaggtgaagcctttccgagactccccttttatacatgctttcatcctagtccctctcatactggatcctattcccattctctctctctgtcgccaggtagactgtgccttccctggggctgagactatgtttgattcatctctcacacacatccccagagactagcataatgcctaacacaggtagggaataaatgaataaacgatctcgatcactcattaccattttggctgcccagaagctccacatgagctaacaaagttatatggccacttacagaaaagtgacctagttaggctgcatcaatagaggtattatgaccagagaaatggaggagagagtccctctctgttctgtacractcagaaagaatgccccgaaaggagaggcctgaatggaggtagagcctgaaagatgtgtgccatgaaagtattcaagaaaacccgggagaggagcctcagagctcaggagctgtctgtaatgacctgagggtcatcagaggtaatggaggggagcctagggcagcctttctccaggcccctttcacacctccaccttccccagcccacggcattatggccgccccatcacaccccacccagtggagatgtcagacttcctgatctgctgcagggaaggctagaagccacaggtggcctcttagggcccaaactgatggcttctggcttgaacggttatccagacggcacagagaggtaacttcacattgccggttcaaacaatagaattggcaaatctccctaaacaaatatatctaaattccgaatataacttcatttcaacttcatatcccaaacttatgtgtttacttcagggaggaagtgctattttatggtttccaggacaatgcagttcataattttttcacacctttcagagcaggtgacagcttgcttacaaaacctaatttattcccatgcagggcttggagttgcactttaatacacgcaccaataacatatcacaataaggttagagacaggcactccctccctccatcccaaataggcactttctggatccagccatccaagaagagagctaaaccaagtagacacctcaagtgaggcctccgaaaaccagcaataggaagcctcccagtgtaatttcgtcttggaccaagtaccaccacctcatccccctccccagcttaattgcaggaagaattgttatgctaattagcattattcaccgagttaacagagcacagggtctaaatttagatcccctgctgcagagggctctgaattcattggaagctggcaaagatgctggtggggttggggaggtccccgggctgggctgcaggacagtggaggggaggtcacggggtcgttctccctctcatcccatcttcagacctcctttaacttagaacagaaggcctgtgactcctggtaggaaagactccgaggaggcaaaatcctctcccaaaggaaggttgagccaaaggaaagggaagggcccgagggctgagtggccatcatgtgcccggcaagacacccaggtcactggtaagagcccagtgccgtggagcggctctggcttcatgtcacacaccctggggtccaggcctgactcttcggcatataagctgagtgaccttaggaaaagttactctgcctgtctggacctcagtgtcttcatccatagaggggatcatgacatcttctttgcagggctgctgtgaaggttgaatgagatactgcatgccaagtggtctcacagagctgggatttgtacccagacatgtctgagtaaaatggctgcgtggttctccccaccctccctggcttcaccccactgtcatgcatgccagagggagtagcagctcagcccaatgctggcccagcctcctgtgacccccattgcctcgtgggagcaaaag

SEQ ID NO: 83341 - DNA, 1896 bp, Homo sapiens
tggaaggggcattagggacgattactccatttagcgattaactttttttttctaagtgaaaattttctgcagaagctctacatacaaagcagataaaattggtgctagtttggttgaagtggggctggctcaactgctttagcctcaccccttgtttcatgagaaatgaggttcagagaagggaggtcacttctaaactcacagtgagttgagggtgcctggacttggccctgcaactcctggcccacagtgctgtgcattttgtgcttttccaccctgactggggatgtgtgctaacgtggatggagctctggcagcctctgactggctgcagagggagaggccatgccttctgtttacactgtgacgcaggcatatgcaagatggacagattcccattgagcaggtggtgtggggagcccctgcagatgccactgggtgtgattggatatgtgggcaccagaagccctcacaggacaggctcttgtactattgagagccacacaatctaaggctatagcacctctgaacatttctagcacctctggaggcaaacaagcattcctcatttccctagcataggcaggcttgctttatgtaagaacgggaaatagcagctctattttctggaagtggctgatcctggaggacctgcagactattgggaaatccaggtttgccagcacccaaccctgggggaagcctgcacagcaggagcctcccttgcctgtctgagccaacacattcaccaggtctcctgcagaaaaacatcagctggccatgcatgttgagagcagagtgcctggaagtgtcagagtaggagggaggcggatcctttgctcatcttgaggcaacagctttcttctcaggctcttccaaagggtgcccatgccatgtatgtgggagcagggagggtggccagacctgattctgctacaaggctggcacctgtttgcattaaataagattagacttggctatagagatgggatgattgtggctgaaagggtggagaggtgatgacgacagtgctggagatgtgagaagcattgcttagtcactccaaaagcattactagacaagcttctgtgtgccagacacagcaaggactaggaaaaaagatagacatggacaccccctcaaggggcttccttgaagatgtccctggcccccaggtcaggtcaagacagctgttatttgctttctggggcccctgtgcttttctttcatagcacttgtcatagtgtgcaataggtgtttctgtgattacttgatttctgcctgtgtctacctctaaactataggctttgcccactctgtatacttaggccaaggacccagtccagtaggtactcataaaatatttaccagatgaataaaaagagagtcacttttggcaatctcagtagagacttccttcaaagtccaagaatttacccttcagcacagcaagggttctatgccgacagattaggcactgtacatggcagatcagtggcaaggaagtgaagacatttttggcttagccttaaaggaaataaaatgcttgaatgttgctgggtggggtgggccaggctggcattgatggcagagtggagtgggaggtaaacaggatgggaggagaaggctctaggctttattctaatggaatcctcagcttatcttctgtccccagttagatcctcagtgagaggatcagggcaggaataggacgtgcccatgtcaggaaaccatggaaagccaccctgctcatttggactcgaagggatagttggagagactgaggtcttaatccagcagatcatgcccattggtgtccagattctgggggrtgagtgggcatagagttggcaccaataggcaacatcataatcaccatagcagggagcaagaact

SEQ ID NO: 83342 - DNA, 553 bp, Homo sapiens
tttagaagaaaacatgagaaaatcttctggacctagggcttgatgaagaactcatcaagtttaatataacaccaaaagcacaatctatacaggaaaaaagtaataaattgaactttatcaaaaatatgaaattttctctgaaaatgaccatatttacaggataaaaaggcaagctacagactgagagaaactattttcaaactacctgataaaggactagtatccaggatatattttaaaactctcaaaactcaacagtgtatcacctcatactcattaggatagctactatttaaacaaaccaaacaaccaacagacaaacaaacaaaaaacagaaaataagtgttgtcaaggacgtagagaaaytggagcccttatatattattagtggtgatgtaatgtggtgcagcctctatggaaaacagtatggagcaaacatacatagcatcaaaaaaataaaaatagaattaccagatgatgcagaaattctacttctgggtatatatcccaaaaaaaactgaaagcagaatcttgaacaaatatttgtaaaccc

SEQ ID NO: 83343 - DNA, 617 bp, Homo sapiens
ccaccccccatgacccaaacacctcccattaggccctatttccaacactgggactcaaatttcaacatgaggtttggaggagacaaacattcaaactatagcaactcttttcaattgttagtcctgcaggcaatggatgaaattaaaggaagctaaattctgtgtagatgtgttggaattaggaaatactctaagtcattttctgaatgagygcctgggacatgtggtagcaggaagggccactggactgattaaggtgattttctttgaaacagtgaggatgtcaagtcattgcaaagaaaaatgtcagattcttatctagtttgtgttctatgggaattgtccttccgttttcttactcctagtggacattccagatggattaagataaggcagttcatttggcaagtctccagccttgttcagctgggccctcattgcttcagattacagaggctcccaaggtctcagtctagctgggttgtgtgggtaatctaggaagccaagttgaggctcaagacacatttcagaactaaacggctcataggactcaggcttgagaacgttgaaaggaacagcttgctccctgccgggatatcaagacctggccagtgact

SEQ ID NO: 83344 - DNA, 901 bp, Homo sapiens
gcatggtaggtgatattaactttccaaagtccttcttctgaattctgaaacatatctggcaccaagggttgggataaaggaactgaggacctatctaaatataytgagagaatgggggtggggtaggtgcatcaggaaggaaggagctgctattcaggaaagctaaattctcaagcagagagtgacgagaatagcaatgtaatcatcttagacaggaatatgtaggtaaataatagaagaaacaacagatagagttgaaagcagttgcctttggggagcagtctgatgatagaaggaggcgtggcagaaggctactatttttcattataagcctttttattattaattgatgttttaaactatgtcttattttgatggaatatataaataattagaaaaaaatcaatcacccttccctgaggaatacatagcctagaaagccaataaaatcagtattcatttctacttgcctaaagatatatagcccagtataaaatgtcatattcatttcaaatacccggggagaaaagatacctagatattatctaaatactcagtttaagaggggctcaggtgatgcacgtgaattaactacattacaaatctcatcatacagaagcacctaaccatctgaaaatgtccaggaaaaaaacatacaaattcttcctggaggcattgaggaggaaatccaagccactttgtaccttcactttcatctcccacagttcaattttatcgcatacacacaaggcttccaagagcgtcctgagctgttttacagcaagattgctaatgaagttcttgatgttaggtatactttgcctgagcttatttatttatttatacatgagttttcttttagtgcctatttctgaagtttgaagcatgtaggaaattataa

SEQ ID NO: 83345 - DNA, 901 bp, Homo sapiens
gcatggtaggtgatattaactttccaaagtccttcttctgaattctgaaacatatctggcaccaagggttgggataaaggaactgaggacctatctaaatatactgagagaatgggggtggggtaggtgcatcaggaaggaaggagctgctattcaggaaagctaaattctcaagcagagagtgacgagaatagcaatgtaatcatcttagacaggaatatgtaggtaaataatagaagaaacaacagatagagttgaaagcagttgcctttggggagcagtctgatgatagaaggaggcgtggcagaaggctactatttttcattataagcctttttattattaattgatgttttaaactatgtcttattttgatggaatatataaataattagaaaaaaatcaatcacccttccctgaggaatacatagcctagaaagccaataaaatcagtattcatttctacttgcctaaagatatatagcccagtataaaatgtcatattcatttcaaatayccggggagaaaagatacctagatattatctaaatactcagtttaagaggggctcaggtgatgcacgtgaattaactacattacaaatctcatcatacagaagcacctaaccatctgaaaatgtccaggaaaaaaacatacaaattcttcctggaggcattgaggaggaaatccaagccactttgtaccttcactttcatctcccacagttcaattttatcgcatacacacaaggcttccaagagcgtcctgagctgttttacagcaagattgctaatgaagttcttgatgttaggtatactttgcctgagcttatttatttatttatacatgagttttcttttagtgcctatttctgaagtttgaagcatgtaggaaattataa

SEQ ID NO: 83346 - DNA, 368 bp, Homo sapiens
ccaaatagaagaatgtggggtgaggaatggtgagccagttttcagacaggttgaaaataggaaaagaaaataaattgctagctttagagcatttaggactaatcatcttgattgctgaagattttgagaaacacaatataaataggaacatagactttggctcaaaagttatctaaaaaaaggaatcaaaagggttgtatggaccattagcaaaataactttgggtacatatcaagtcttccttttgcttagatgaaaagaagtttaaacaaagttcaaatgaaattctttgggasaaaagaagagatcaattgcacattcttatcaaagaatcacccattaattcataaaatagctctattaaagct

SEQ ID NO: 83347 - DNA, 764 bp, Homo sapiens
tcctattttacaaacgagtaaaatgagtctcagagaagttaagtaactttcccaagttcactcatactttaaatgttaaacctcagattcaagaccagatttctctgactccaaagccagtattcttaattctttacagaaaactactagtcagatgaagggcaattatccatggtgtccaaaaccaaagtcgttaatcggaagcgtttaagagcatcttaagccagggcagaagagaaccctgactttggtcttccaattaaaggagcttgttagcatacaataatatttgcttatgattgatttcaaggaataaagaagggattttaagttgcatatttattacacaggggaacacactttaagtgcctatgatatgctagcatttaaaaatggaataaaacatttaatattagttatatgctctgtaataaagtctgcccaacatttaactctcaatccgtggcagaggaatgaaactatgcaattcctacagcaagtctaagagactagtcaggawgaagtctagagagaagtataaggtgtatagattcataaatgccactatcccatagatgtgtggacactggctagaaccatctctgctcccgctcatctgcactgctttcacagcagctgttgccattaagcaggtgtttgtgttatctgtcattctcaccttcagcattgactgaatgtggcaaaaagtaggagacactttatcattaaaggatcacaggctacgagaatttgaagggatcgtc

SEQ ID NO: 83348 - DNA, 832 bp, Homo sapiens
aatggtaattctattttcagttttttcagaaattgttatgcaatttccacagtggctgttctagtttacattcccaccaacggtatataagagttcccgtttctccaaatcctcaccaacatttgttatttttgtctatttaataacagccactctgcctggaacaagatatctcattgtagttttgatttgcatttctctgatgattagtgatggtaagcattttttcatacacctactggccatttgtatggttttttgtttgttttgttttgttttgtttttttggagaaatgtctattcgtgttctttggtgtcttttccccaatgttagttcttattggctttatcaaagatcagttggcygtaagtaaaacaaaaccacctcttatgattacagttgtgtgaagaccatgtcagactccctagtctggtagactttttcttaaaatctgtaagcatactatgttatactagttaatacaccagaaatattcctaggagtttctggtttgaacacatacacaaaaaaatgccaagaaccactgaggaagaactagttcaaaggtaaaatgaggtgtagatcctgttgcctcttcccctggttgtattagtcaaatttctccagagaaacagaaccaatgagattagatagatacatacatacatttattataaggcatgggctcatgcagtagttatggagactgagaagtcccaagatccacacttggtaagctgaaggtccaggagagccaatggtgttgctcagtctgaatctgaagttctgaaaaccaggtgagccaatagtataaattccagtccaaaggca

SEQ ID NO: 83349 - DNA, 743 bp, Homo sapiens
aaattttgcttccttgacaagtgctacattaaccttactgtagtcatgactctgtcgttactataccttgagtgcaccaggctcactctttcctctcagcctttgcagtgactcttctctctgtctggaatactcttccctccgatttctgcgtgctttgcttcttcaagctatactcaagtgtcgtcatctcttgatgcttactctggccactgtatttaagattcagaccccatcatccccactttccttacctgatggtttttctcctaagcactaattgcgttttaatattctacataattatttattatgtatattgcccaactccaattagaaggtaagctctataagggcaaaaatttttgcctgtttggttcactgttttatctaagtattagagtattgcttcrtatatagtgcttaataaatactaattaaatgcataaattaatgaccaaataaatatcatgatgcttgccagttatatacatccaagccttcttttatttaagctctaaaatatttcagccctccccaaactgggcttcctcctctttccaactcaaaccatagaagcctacacaccatgacaataaatggagacaacattaggagaaatgggagaagctatctttgccccaattcattcttggtaaaggaatgtggtcttcttcctgtgaacttactccattttctgacatcataatactttttctggtcatggacattagttttatagt

SEQ ID NO: 83350 - DNA, 674 bp, Homo sapiens
atgagcacccaacttgaaatgaggtatcactgtacgcattaatttataactacatatgaagaaaaggagmcaagtctcataaacccaagtgctggcctttcaaacacacacatttcattcagagactcaaatttgacaatgatacctgataaaggctcacatcagtcatatcacagcctccatcctgattacaaagtgcatactgtccatttctctgaataggatgccatgttatcaaaagatgataaatgtgcttgcaaacaggtagggctaaaaaaatgcttgcaatatttctttgtggttttgcaacaacaaacatcttgactgaatttcctatctgctgggaagtaaaaagcaaaaggctttaatgatcaggaaagttcaaatgtaaaatataaaaatgaaagaatctgggcattgggacagacattaggtcacatctagtacgaccacaatccagagctggaagttgctccaaaatattcctagcaaccaatcacatagcctgtattagaattcctccaaagtcaggaaaatatctagagtgctctatttgatagaatgtttatttgttcattgattcactcatatatttgtatgatgactattcatatcatacttttttttaaactggctaggaccatgcaaagcattaggaaaatagctatgaacaa

SEQ ID NO: 83351 - DNA, 727 bp, Homo sapiens
acatacatgtgcacatacataggtaaggaatccagttgttctaaaatttttatgtgatgcagggagcagttatatacataatatatctaggtcaaaacttttatcagccaaatagaaccagccaaatatcattcatcataatttcctcatgcacaacaaagaacagaatataatattttgttacttttatgtcattcctaatgtgaaatttatcatcactgattcacatacaaagatcctagaaccacaatattcaaataaggtttagctttttcccccacttctgaatttcccttctstttttcaatctctaaagatctgctaccagcacactctgctagcacttatcacacatcttgagaagggaacacttgataaaatctctttctttgaccaatctgaagcatgtcatgagccagtgctaagaaaagaaaaagcactccaggcacaaatggtttcacaatggtgcttcaactcctgtgccaagacgtatgcagtgggtcttttatcatgacagttattgttccagtgatgctttgttagggagaatgggtaggaaaagaaagaccccaggagttagcacaatttccacattgataagaggggcatttgtacaccactgcagcagatctataagagctgatggaaatgtgcccttttcaaataactttatattgcctcataaacttcaacagaggtatagattcataacccacaaaagcatttg

SEQ ID NO: 83352 - DNA, 1576 bp, Homo sapiens
ctcaagaagagtttgatccctttttttgcggtaatgagtgagttatccctctattaattcctgctasagctggttgtttaaaagagcctggcacctctcttccttcccctcctctccccttccctcccctctcctctctctctctctccctctctcatgcacgtttccttccttcctttcaccgtgtgatgcgtgcttcccttcactttccaacatgagtggaagcagcctgtggcctccccagaagcagatgctggtgtcaggcttcttgtacggcctgcagaactgagagccaaataaacatttttctttataaattatccagcctcagatattccttcatagcaatgcaaatggacttagacatctaccttcgacataatgcatgcaagctttgagatgcttggaaaatcacctgctggtgtgtgcaacctttgcctcctactgtgaggctgggcatacccccgggatagatttggtacagccccatcagcagaccaaataaaggatatggaaatcaggccagaaatttctaggccacaattgaaagaaagatgcacagaggggcccactgctgaccacctgtctgagggtagaagccaaccaaattgcctgttgctcagagctcagggcccccaaagaaaacccacccatccagcccctaccagaagctcagaaatagacccctattccttggaggtctgatctgacagatgtgtcagaaagcccagaaccatctgcaaagttggtcctggaagatggtgttatggtttggctgggtctccacccaaatctcatcttgaattgtagctcccacaattcccacatgtcatgggaggggcccagtgggaggtaattgaatcatgggggctggtctttcctgtgccattctcgtgatggggaataagcctcacaagatatgatggttttataaaggggagtttccctgcataagctctctcttgtctgccaccatataagatgtgcctttcgccttctgccatgattgtgaggcctccctagtcacatagaactgtgagtccatgaaacctctttttctttatgaattacccaatctcaggtatgtctttatcagcagcatgaaacagactaatacagatggcaaaacctctcaaagagcaaagcaagtgaggtctggaccactaaggaaactccttttaagtctctcctcccatccgttgtgccttcctggacaccctcatccattctcattccgacatgccctctttctaaataagatttctggcacacaaatctctccactgatctctggacgtccctcaagctttactcaacacaaacatcacagaattaggggagccgagacgggctaggagggagcgccatactcccagatcaacccttcctccctcctacccctcacccagcagtgccagccccacatgccgagacccaggggaagcccagccttaccttgttgattttgttggttttggggagcgtctgactgatgtgcaggtctgaatagcgaggtggcttccgtagagggttgttgatgtcacacggaacggactctgtccggactaaccttgct

SEQ ID NO: 83353 - DNA, 1576 bp, Homo sapiens
ctcaagaagagtttgatccctttttttgcggtaatgagtgagttatccctctattaattcctgctagagctggttgtttaaaagagcctggcacctctcttccttcccctcctctccccttccctcccctctcctctctctctctctccctctctcatgcacgtttccttccttcctttcaccgtgtgatgcgtgcttcccttcactttccaacatgagtggaagcagcctgtggcctccccagaagcagatgctggtgtcaggcttcttgtacggcctgcagaactgagagccaaataaacatttttctttataaattatccagcctcagatattccttcatagcaatgcaaatggacttagacatctaccttcgacataatgcatgcaagctttgagatgcttggaaaatcacctgctggtgtgtgcaacctttgcctcctactgtgaggctgggcatacccccgggatagatttggtacagccccatcagcagaccaaataaaggatatggaaatcaggccagaaatttctaggccacaattgaaagaaagatgcacagaggggcccactgctgaccacctgtctgagggtagaagccaaccaaattgcctgttgctcagagctcagggcccccaaagaaaacccacccatccagcccctaccagaagctcagaaatagacccctattccttggaggtctgatctgacagatgtgtcagaaagcccagaaccatctgcaaagttggtcctggaagatggtgttatggtttggctgggtctccacccaaatctcatcttgaattgtagctcccacaattcccacatgtcatgggaggggcccagtgggaggtaattgaatcatgggggctggtctttcctgtgccattctcgtgatggggaataagcctcacaagatatgatggttttataaaggggagtttccctgcataagctctctcttgtctgccaccatataagatgtgcctttcgccttctgccatgattgtgaggcctccctagtcacatagaactgtgagtccatgaaacctctttttctttatgaattacccaatctcaggtatgtctttatcagcagcatgaaacagactaatacagatggcaaaacctctcaaagagcaaagcaagtgaggtctggaccactaaggaaactccttttaagtctctcctcccatccgttgtgccttcctggacaccctcatccattctcattcygacatgccctctttctaaataagatttctggcacacaaatctctccactgatctctggacgtccctcaagctttactcaacacaaacatcacagaattaggggagccgagacgggctaggagggagcgccatactcccagatcaacccttcctccctcctacccctcacccagcagtgccagccccacatgccgagacccaggggaagcccagccttaccttgttgattttgttggttttggggagcgtctgactgatgtgcaggtctgaatagcgaggtggcttccgtagagggttgttgatgtcacacggaacggactctgtccggactaaccttgct

SEQ ID NO: 83354 - DNA, 629 bp, Homo sapiens
ggtgttcaaatgatgacatcagtagtctattacttttacttttctctgcagtggcttcattctcagggaaggatgacttttcctattctttcctgcaaatgttccacgcttgagtcttattggcttggcatggatcatgtgattattaatggcccaattgctgttggcagggggtagaaaggactccaatgttggagccaatgtgaggccatctgtcccctttgaactacatagactgagaggaagagataattttcctaaaggaaagtgggggtgctgctgtgaaaaggggcatagaggctgggtaggcaaagaccacaggacatctcccacactttcctcctccctcctcagcatgccctaatcttagacagattgcgtttcctcttgctttggtattttctttttctttaaaatgggaggagaccagaactttgggaggctgaggtgggcggatcacttgaggtcaggagtttgagaccagcctggccaacatggtgaaaccctctctactaaaaatacaaaaattagccgagcatggtggccgcgcgcctgtaattctagctactagggaggctgaggcrtgagaattgcttgcacctggtgggtggaggttgcagagagccgag

SEQ ID NO: 83355 - DNA, 662 bp, Homo sapiens
tggtgacggtgacgtacagatgggttttggtgtgggtgtcctttctgtttgttagttttctttctaacagtcaggaccctcagctgcaggtctgttggagtttcctggaggtccactccagaccctgtttgtgtaggtatcaccagtgcaggctgcagaacagcaaatattgcaaaacggcagatgttgctgcctgatctttactctggaagctttgtctcagaggggcacccggctgtatgaggtgtcattcggcccctaatgggaggtgtctcccagttaggctacttggaggtcagggacccacttgaggaggcagtctgtccattctcagagctcaaacactgtgctgggagaaccactacttcttcgagcttttmaagtgtttaaacaaaaggaaaaaagaaaacacaaaggaaatcatcaggagaataaattcaaaaattaaaaactctttttgtcaagtaccataaataaaaagataaatcgtagtaattttaaaaagtcgaattatattttgaaaagttataattcatggagagtttttataagtttaaaaggtaaattattctaattttagtgatttattttgagtaataatcagaacgtaaagcaattaaaaagtatatatagttgtcagtttttaaactgcatattcacag

SEQ ID NO: 83356 - DNA, 662 bp, Homo sapiens
tggtgacggtgacgtacagatgggttttggtgtgggtgtcctttctgtttgttagttttctttctaacagtcaggaccctcagctgcaggtctgttggagtttcctggaggtccactccagaccctgtttgtgtaggtatcaccagtgcaggctgcagaacagcaaatattgcaaaacggcagatgttgctgcctgatctttactctggaagctttgtctcagaggggcacccggctgtatgaggtgtcattcggcccctaatgggaggtgtctcccagttaggctacttggaggtcagggacccacttgaggaggcagtctgtccattctcagagctcaaacactgtgctgggagaaccactacttcttcgagcttttcaagtgtttaaacaaaaggaaaaaagaaaacacaaaggaaatcatcargagaataaattcaaaaattaaaaactctttttgtcaagtaccataaataaaaagataaatcgtagtaattttaaaaagtcgaattatattttgaaaagttataattcatggagagtttttataagtttaaaaggtaaattattctaattttagtgatttattttgagtaataatcagaacgtaaagcaattaaaaagtatatatagttgtcagtttttaaactgcatattcacag

SEQ ID NO: 83357 - DNA, 1266 bp, Homo sapiens
atatatatgtgtgtgtgtgagagagagaggcagagggagacagagacagaaaaacagagagatacactcataccaatggacctcaggagtgcaaatacccctcctcctttcctagtcacattcttctctttttcctaacaggtattgtgctgacttttatagtagccatttccttgcttttctttacagtgttacaacgtatgtatatatgcctaagtaataattttaacttttactcttcttgaacttcatattaattgaaacatatcctgtgtattttgtgacttgatttttcccttttgacattatattcattacttccttctgtgttaatctgtaattcattttgattgttagaatattgttgtatgattgcactgcaatttattccattgatgaacattaagattactttgaattttgaccatttatattttttgcatggtttcttgctagggtttataggtaggaatggaattgttgtggactggatttgcgttagtttctctgactttattagataatgttgctgtgttttccaaaggggttgtaacagtttacatttcctctagcagtgattgtgagttctggagaccttggttaattatttaacctattttattattttttaatagacattttaagaacaggtttaggttcatggcaaaattgagtggaagatacagatatttcccatatattccctgcccctacacatgcacagcctcccctattatcaatacgccccacagagtggcacatttggttatgatcgattagcctacatttgagaggttaatttattctttaatcttccaagctaagcctttggctaattgaaaggtatggccagatcttgtgtggatatggtaatggttctaaattgaccagtaacaaaaccactttcctttagtaacacttaaactgtctgaccttccttgcccttgtgcttcagatgcctggaagctttgacctgtgctgtttttgcagatagtaaccatagagttaggacaggattgaatactcttaggaaccttggatctttattgtgacagactcatttcatgggcaaagaaactgatgcccggcagagtgagaagcacaaactcyacactcccttcctatctggggcagttggactcctgttatgcagtaaggaatggcttattgaatggcacagcctgttcagttcctttttgtgtcttggttttcatgctctcatgatgttataggtcgtaccttttaatgtttgccattacagcaatt

SEQ ID NO: 83358 - DNA, 1266 bp, Homo sapiens
atatatatgtgtgtgtgtgagagagagaggcagagggagacagagacagaaaaacagagagatacactcataccaatggacctcaggagtgcaaatacccctcctcctttcctagtcacattcttctctttttcctaacaggtattgtgctgacttttatagtagccatttccttgcttttctttacagtgttacaacgtatgtatatatgcctaagtaataattttaacttttactcttcttgaacttcatattaattgaaacatatcctgtgtattttgtgacttgatttttcccttttgacattatattcattacttccttctgtgttaatctgtaattcattttgattgttagaatattgttgtatgattgcactgcaatttattccattgatgaacattaagattactttgaattttgaccatttatattttttgcatggtttcttgctagggtttataggtaggaatggaattgttgtggactggatttgcgttagtttctctgactttattagataatgttgctgtgttttccaaaggggttgtaacagtttacatttcctctagcagtgattgtgagttctggagaccttggttaattatttaacctattttattattttttaatagacattttaagaacaggtttaggttcatggcaaaattgagtggaagatacagatatttcccatatattccctgcccctacacatgcacagcctcccctattatcaatacgccccacagagtggcacatttggttatgatcgattagcctacatttgagaggttaatttattctttaatcttccaagctaagcctttggctaattgaaaggtatggccagatcttgtgtggatatggtaatggttctaaattgaccagtaacaaaaccactttcctttagtaacacttaaactgtctgaccttccttgcccttgtgcttcagatgcctggaagctttgacctgtgctgtttttgcagatagtaaccatagagttaggacaggattgaatactcttaggaaccttggatctttattgtgacagactcatttcatgggcaaagaaactgatgcccggcagagtgagaagcacaaactccacactcccttcctatctggggcagwtggactcctgttatgcagtaaggaatggcttattgaatggcacagcctgttcagttcctttttgtgtcttggttttcatgctctcatgatgttataggtcgtaccttttaatgtttgccattacagcaatt

SEQ ID NO: 83359 - DNA, 855 bp, Homo sapiens
gtaatttataaatataatatcatattagtatattatatggctaacagaaacatatttgtaacatacagtcttcccatgcacaaacaagataactatatttatttctatttattgaactgttcttttaagactttcaataatcttcaataatattgaagttctacaaatttcttgataagattataagggtttttttggttctacttcaaaakatttttttttccattatatttcctatctgactatgagttttcattaggaaaagtaatagtttgggcatgtagttggatctccagacaatttaacaaatgccttctttttaattttgttgttgtgttactagaattttccaggtaacgtacctgtaaattgtcatagttttataccacctatctaatggatatgcctctcatgaaatcataagttgttgaataaatacataccaataaaaaactctgttaggacctagtcaaatgctagaatgaaaaaaaaaattaccgtgtcttcatgaaggttacgatttaatgggcacttcaggaatttgtcaaataatcattaaaaagtataattctgaactatgatagtttacattaaaaacgcataaaacatcatgacaatatattgcaagggcatgtatttgccagtttacattttaggcagcagctgcggttatttagacgtattaagagtgagcattttatctgggtggcactgttaggaagcttcagacatcagggaaaatacggtgcattggagaacctaaggctttgtgcctggggcacagctcgcagagacggatacgagaggagagtgtattatttatttctgtgtaagaaattactgcaaatgtaacga

SEQ ID NO: 83360 - DNA, 1084 bp, Homo sapiens
aagttatgaattttaaatattgcttcacttctgaaaaaaagttatcatcaatgtttatatatttgtgcttctgaaataaatcatccacttattctatgtttaaatcccccagctcttctagtaaaagataagtcactatagctttgttacaaatagggaggggctagatctgtaatcctatctcagaaacccttagttatatcttctgaaataaatgttccggttttttttcattttatttccataatttttatatatacctataaaatcatttagtcgcacatcttggcaccacatcacacacctttatcaataaatgtattacamgtaaaaggatgtaattttccttctctaggtttgattagttttccataatttatgtctcccaataaggagtatcattaaaaataatcactgaacatttattttgatttaagtcaataaagactattattactagataaaacatatttctttattttaattttaattttttaaaaagttcaaaataaaatgatcaagataataaaagtctgaaaatattttatttctaaatttagaaatgcaagctatgacaggttataactttatctttgaaaaaagtgcatgcaaaaagcatagtatttttttaaatagtgatttaacttcggtatcccaaaagggttttgaaaattaaataattggatgagaaactaggtagtcagatttccaatatgataatcactcctatcaacattccatgcatcttagctattgatttataatacaaatatatataataaagtttacaatttatttttacattatatactcattcagtgcattaaaatcatggtcaatttcattacagtatttacaaattgaaaatcttgttagttttgattaaatttatccatagcaagatagtaaaaattgagagacatattttcattaattaattttcaattgtttatggtaaatcagctgactctgttccttaaatgcatataactataattgtaaatataagatttcaaaaaaataagaaaacagagagtagaagacatattttataaatatttgctttgaaattttatatttaaca

SEQ ID NO: 83361 - DNA, 1084 bp, Homo sapiens
aagttatgaattttaaatattgcttcacttctgaaaaaaagttatcatcaatgtttatatatttgtgcttctgaaataaatcatccacttattctatgtttaaatcccccagctcttctagtaaaagataagtcactatagctttgttacaaatagggaggggctagatctgtaatcctatctcagaaacccttagttatatcttctgaaataaatgttccggttttttttcattttatttccataatttttatatatacctataaaatcatttagtcgcacatcttggcaccacatcacacacctttatcaataaatgtattacaagtaaaaggatgtaattttccttctctaggtttgattagttttccataatttatgtctcccaataaggagtatcattaaaaataatcactgaacatttattttgatttaagwcaataaagactattattactagataaaacatatttctttattttaattttaattttttaaaaagttcaaaataaaatgatcaagataataaaagtctgaaaatattttatttctaaatttagaaatgcaagctatgacaggttataactttatctttgaaaaaagtgcatgcaaaaagcatagtatttttttaaatagtgatttaacttcggtatcccaaaagggttttgaaaattaaataattggatgagaaactaggtagtcagatttccaatatgataatcactcctatcaacattccatgcatcttagctattgatttataatacaaatatatataataaagtttacaatttatttttacattatatactcattcagtgcattaaaatcatggtcaatttcattacagtatttacaaattgaaaatcttgttagttttgattaaatttatccatagcaagatagtaaaaattgagagacatattttcattaattaattttcaattgtttatggtaaatcagctgactctgttccttaaatgcatataactataattgtaaatataagatttcaaaaaaataagaaaacagagagtagaagacatattttataaatatttgctttgaaattttatatttaaca

SEQ ID NO: 83362 - DNA, 1084 bp, Homo sapiens
aagttatgaattttaaatattgcttcacttctgaaaaaaagttatcatcaatgtttatatatttgtgcttctgaaataaatcatccacttattctatgtttaaatcccccagctcttctagtaaaagataagtcactatagctttgttacaaatagggaggggctagatctgtaatcctatctcagaaacccttagttatatcttctgaaataaatgttccggttttttttcattttatttccataatttttatatatacctataaaatcatttagtcgcacatcttggcaccacatcacacacctttatcaataaatgtattacaagtaaaaggatgtaattttccttctctaggtttgattagttttccataatttatgtctcccaataaggagtatcattaaaaataatcactgaacatttattttgatttaagtcaataaagactattattactagataaaacatatttctttattttaattttaattttttaaaaagttcaaaataaaatgatcaagataataaaagtctgaaaatattttatttctaaatttagaaatgcaagctatgacaggttataactttatctttgaaaaaagtgcatgcaaaaagcatagtatttttttaaatagtgatttaacttcggtwtcccaaaagggttttgaaaattaaataattggatgagaaactaggtagtcagatttccaatatgataatcactcctatcaacattccatgcatcttagctattgatttataatacaaatatatataataaagtttacaatttatttttacattatatactcattcagtgcattaaaatcatggtcaatttcattacagtatttacaaattgaaaatcttgttagttttgattaaatttatccatagcaagatagtaaaaattgagagacatattttcattaattaattttcaattgtttatggtaaatcagctgactctgttccttaaatgcatataactataattgtaaatataagatttcaaaaaaataagaaaacagagagtagaagacatattttataaatatttgctttgaaattttatatttaaca

SEQ ID NO: 83363 - DNA, 1084 bp, Homo sapiens
aagttatgaattttaaatattgcttcacttctgaaaaaaagttatcatcaatgtttatatatttgtgcttctgaaataaatcatccacttattctatgtttaaatcccccagctcttctagtaaaagataagtcactatagctttgttacaaatagggaggggctagatctgtaatcctatctcagaaacccttagttatatcttctgaaataaatgttccggttttttttcattttatttccataatttttatatatacctataaaatcatttagtcgcacatcttggcaccacatcacacacctttatcaataaatgtattacaagtaaaaggatgtaattttccttctctaggtttgattagttttccataatttatgtctcccaataaggagtatcattaaaaataatcactgaacatttattttgatttaagtcaataaagactattattactagataaaacatatttctttattttaattttaattttttaaaaagttcaaaataaaatgatcaagataataaaagtctgaaaatattttatttctaaatttagaaatgcaagctatgacaggttataactttatctttgaaaaaagtgcatgcaaaaagcatagtatttttttaaatagtgatttaacttcggtatcccaaaagggttttgaaaattaaataattggatgagaaactaggtagtcagatttccaatatgataatcactcctatcaacattccatgcatcttagctattgatttataatacaaatatatataataaagtttacaatttatttttacattatatactcattcagtgcattaaaatcatggtcaatttcattacagtatttacaaattgaaaatcttgttagttttgattaaatttatccatagcaagatagtaaaaattgagagacatattttcattaattaattttcaattgtttatggtaaatcagctgactctgttccttaaatgcatataactataattgtaaatataagatttcaaaaaaataagaaaacagagagtagaaracatattttataaatatttgctttgaaattttatatttaaca

SEQ ID NO: 83364 - DNA, 558 bp, Homo sapiens
agctattttcaaatatgactagcttacagtaatatcctttctgatatacttatcagctgggctgtcactggatacagaaagttctgaagcatcttgtaactggctaggtactcattctgaactgtggcccaagcagggctaacatgtctcttggggctaacatgtttgtttcttctttacacaatgaactctttttaattagaataagactgtgcattctgtgtgtcctccaaggggaccctgatctccagagacttcattagagatgtagtgaatgagatattacctgtcggatccagcaataaatcagtaatggaaggtttgcattgatagtagtctggggttgaaattgttctttctttgcagacgttcaatgaatttcaataattttacataaacatctcatttattaagcagtattaacttaatcagaaataagaagsctttgtatttctaaatcattcttttccaattattttataccaacacttcattctcctctggcatctaaggtagctccatagtttccagttgctttctgatattaaggcttagtcc

SEQ ID NO: 83365 - DNA, 652 bp, Homo sapiens
aagaagaatgaagaaaaaaaatatatttttaaggaaaatgtttaaaacaaatgtttaaaaaatctattaatatgacacacaaagaaagactgaaacgagatgtgctccaaataaaagaagcaggtttcttagaagcaaaattccacaagttaaatcaaacttctattcaattatagaattaatagaagttgaataacttgtagcaatgaagcagtctgatgttcagatagattccgtggaaaacattaactatagtgcaaaggttactttgcctgttcatactcttgcagcaagtccagagtaaacgaatgtaactgcctttttcctggatatttctggtcaaaacagacaagcaagattttttaatagagcagcataagaatgaaactacaaaacaaaaattatttcaggtttgtccaagtctcycaggagttgggcaacttttcttggattatttttagctcatacaacaggaagaaaacattcagaaatgtagtgcaatgaaaatggttttcaaaagtaagttttccattaacccaaaagaacatgtgacacttgcttattgccgaatagcaaatcactataaaatgctgtggcttaaaacaacagcaataaatagttaatttcacttataaaacttcagttttcacag

SEQ ID NO: 83366 - DNA, 652 bp, Homo sapiens
aagaagaatgaagaaaaaaaatatatttttaaggaaaatgtttaaaacaaatgtttaaaaaatctattaatatgacacacaaagaaagactgaaacgagatgtgctccaaataaaagaagcaggtttcttagaagcaaaattccacaagttaaatcaaacttctattcaattatagaattaatagaagttgaataacttgtagcaatgaagcagtctgatgttcagatagattccgtggaaaacattaactatagtgcaaaggttactttgcctgttcatactcttgcagcaagtccagagtaaacgaatgtaactgcctttttcctggatatttctggtcaaaacagacaagcaagattttttaatagagcagcataagaatgaaactacaaaacaaaaattatttcaggtttgtccaagtctctcaggagttgggcaacttttcttggattatttttagytcatacaacaggaagaaaacattcagaaatgtagtgcaatgaaaatggttttcaaaagtaagttttccattaacccaaaagaacatgtgacacttgcttattgccgaatagcaaatcactataaaatgctgtggcttaaaacaacagcaataaatagttaatttcacttataaaacttcagttttcacag

SEQ ID NO: 83367 - DNA, 299 bp, Homo sapiens
cacactgtcagtttttatttatgtgcatatcttaaaatactttccccaagtcttagttgacaaagagratcgcagttctgtagttgagtttcaaggcttctgttatagttagcagggttgatgtggagcgtgaaggagcgctagagcagggatccctgggcattctgttcttggtgaaatgcgggttctctttcactcttctcaaagtcactctgtcttcattttttaaaaaagagtatttccccctgtataattcaggttgactcttaacttcttaccttttcttttcactatatagg

SEQ ID NO: 83368 - DNA, 913 bp, Homo sapiens
atgcacacacacaaatgtctatatttacatatttttgtttcctttctaggagaaccctcacctaataataatgaatgtcagtgactgtatcccagatgctattgaagttgtaagcaagccagaagggacaaagatacagttcctaggcactaggaagtcactcacagaaaccgagttgactaagcctaactacctttatctccttccaacagaaaagaatcactctggccctggcccctgcatctgttttgagaacttgacctataaccaggcagcttctgactctggctcttgtggccatgttccagtatccccaaaagccccaagtatgctgggactaatgacctcacctgaaaatgtactaaaggcactagaaaaaaactacatgaactccctgggagaaatcccagctggagaaacaagtttgaattatgtgtcccagttggcttcacccatgtttggagacaaggacagtctcccaacaaacccagtagaggcaccacactgttcagagtataaaatgcaaatggcagtctccctgcgtcttgccttgcctcccccgaccgagaatagcagcctctcctcaattacccttttagatccaggtgaacactactgctaaccagcatgccgatttcataccttatgctacacagacattaagaagagcagagctggcaccctgtcatcaccagtggccttggtccttaatcccagtacratttgcaggtctggtttatataagaccactacagtctggctaggttaaaggccagaggctatggaacttaacactccccattggagcaagcttgccctagagacggcaggatcatgggagcatgcttaccttctgctgtttgttccaggctcacctttagaacaggagacttgagcttgacctaaggatatg

SEQ ID NO: 83369 - DNA, 1712 bp, Homo sapiens
ttttataccaaagctaacttaggggaataaggacaagctttcctccttaaagggactgctttgcttttggagtagaaagtgggcacttttaaagcagggggcctatgcagtggcagaagtgagcaggtaggggtctgcatactcactttggtgccttatctactggttagttgagttgacatcttcatgggcagaaataggctgtaaggtggctgaaaattctccaggtgggagagagtttcacagtgggcatactttgggttgtaaatcaactgttacctctcaaggcagtctcctggtgggtgagagttcctctctggagcttctaagcatatcattattaacagatgaacttgccytgtagggagtgtctggtgaaggggagataaaaggttataattgcatttccaaagggctaagtaggaagtggggaacagagggaattggggaaaagagaaaataataaaacaatagtaactcattctccttttcttagaaaaatggggtactcggttacacagggtctccaggaaatcccaggcatctaactctaagctttcagcccagctcattctctagtgaagttcccttttctgatccagcactatttactatgtgccttctacatacaagccactctattctcagagcaagctctgctgctcatgctttcagcttcttttgtttagatcagacatgcatttccctgtttttctatcaaccaatcttcactgctgcttccagctttctctgtcaagcatgccttctttggtaattaatcctgtctttgccctgacctgtactatttggatttcttgtctcaatttctgctgcatttaaccaagtacttactaaactcccactcaaactatttggcttaccacttaatcacccagccagatacagatctgaagatttattccaaataacctggcttaatttctccaatcaacgaggcagagccaagactttcttcagttaaccctgggtacatgtttccatcagccagagattatgactgcagcaatattttcctctgtctgttgtgtatatgtacatacagatagagatagggagatgaatacatagtgtgtttttaaataaaagttaaattatagtatatatatatgctcaggatttttttattacttaaaacaattactacaacatatgatgagtgtttttctttgatattaaatgttcttctagaaacaacattatttttaattgctgcatgatatcccttcttatgaatggacaatggtttatttccttgagtagtgttgtggatggtcagagaaacagggtggggaaagtgggaggagagtatgtgattaagtcctggtctgattcccaaacctggccttcttggccatactccagcattataaaaagagagctggacagagacccaggagccctaggttctggtctgattgtgcggctgtggcaaagtcacttcccattttttaacctcaatttcctcgtctgaaaaataatgggattggatttaataatctttatgattctttgatcccactgacttaaccttggcattttccactatttcccaaggaagtcctagattgcttttaaccagattatttttgactgatgtcacttgagcacctgagtcattcagcactcactgatagcgtatgttaatataaggcgttcttcttttgtctggagcttccagaagtaaagtttag

SEQ ID NO: 83370 - DNA, 760 bp, Homo sapiens
ttctgttttgtttacctgtttatcaatgtatgagcttgctgtgtattattgagcaagtcatttcattcatctagatcttaatttctgtgtctgctaagtgatttctaaattctcttccagatttccaaggtgtctgattctaggatgcacatatgagcaatattttccagagctaaataatgatgatattcaagtttaattatttctgactcttcaatcatgctcctattaaatattatttcatacttcattttgatcttttcagtcttggctgaacgtttaccattgactcctgtatcacttaaagtttccaccaattctacgcgtcagagtttgcacttacaatggactgtccacaaccttccttatcatcaggaattgaaaatggtatttcagatccagatcagtaggattgaaacatccaatgtcatctgggtggtaagtaatttttttggctcaatatttaaaaaatcatctttaaaaaaagacaccttggttttcttttataacatctgaaaaattctcgttttggaaayatattagcagctcaaaacagtttgtctaaacaattacatttctgcattttctgttaatgatccaggacaaagtaacatgacaactttggtttggtaggtaggatgggatgcactaagaaaatagattttctcagttttgctctgtcttctaagaagactgttgagtctgtcctcgtgaatactgaattccagagagccacgaagattaaccaattcattcctcc

SEQ ID NO: 83371 - DNA, 670 bp, Homo sapiens
gtcaataaaggtaccatggggagggacatctaaatcagtcattcttcactggggagggagaaagctttgcctaccacgcatgctccctcctcgcctctagtcccactgccagcaggtgtgataaaactgcttcactaattgagaaccactcctctagaccaactacctcattcagcagagaaggctcctgcaggtctgagagcctgactcacccttcagtgcctcatcacactgtgaattggtcttctctcgaccaataagcacataagcagtcactgcaggatcaccttgatgtagacaaagtttgtccaaagggtgccttgtgatcactaaacctgaaagagcctccatgatccaaaaaacagaaaaagattctgtcatcaagcacgcctgggaacactgcaccctatatcagtaagtcacaatcaacaacggcaaatgaggactctgaggagccctgcccctaagaaaactgcttaacaytgtttaaataaaagaatggatttaaacgtctgcttcctaaccttattggaccatatcacccctttttgtaacacttgttttgctaactacctgtggaaataagctttctgggaaacattctttgtggtgtagaagaaaagttactgaactgggaaactggctccactcccaaccagctatgcagtca

SEQ ID NO: 83372 - DNA, 953 bp, Homo sapiens
atgtagatataaattactgacctaagtaattttccatctccccgaggaatgtcttttaacatttcttgcaagacaggaaaattgaktccgaactcctttagttttgcttctctctttatttttccttcagttctttaggataatttcactgaatgcaagattaaacactattggattattttgtttaccactttaaacattttatccccctctctttttgtttgcattatctctgatatgaagacctatgtaattctattcttgttccactatagtaaggtgtttttttccctctcatttctttagtgtttttctcttcgtctttgattttttctagagtgattttgatatgtctatttatagtttttaaaaatttatcttgttttgagttctctgaggttctgggatctgtgatttcatgtctttcattaattttccataatttccagcctttattacctcacacactgctttttttccttctctcttttttctgcttggtgttctcattaggcttaaccctttgtagagtgtaattaatgcctctgagtttgtctgttttggggcccaagcacctgtgctttgtacttctgtaccaaagtaaagttaacactaactgacagaacttttggctcctccacttgaagataaatttgctccagtaagccaaggatattccacctaaatgaatctcaggtgcacatcctcagaagtaaagcaggtagctatcacatcctagggcagtaaatgacgtctgtgtacagagcagcagaggttactttgtacacaataagagcctatagcaagagatagacaaaaaatgaaacaattctagaattccatgaggctggctgctcctggatggtgcagtgtgtaaaacaattattgtattctgtggtccaagaccctcttccatacctccatttctatgatgtgggtttcctggtcaggtt

SEQ ID NO: 83373 - DNA, 653 bp, Homo sapiens
aaaccaccatggcatctgtatacctatgtaacaaacctgcatgttctgcacatgtatcccagaactcaaagtataattaaaaaacaattgtcttaagatggtagtggtttgtgaagggatcttgcctatatgctgtgaagttctcatgagacaggttctattaaaaaaaacaacaacaaaaaaaccatgggagcagatgagatcatctacattagcaggtatagggtcccaaacaaggatgttgcagggaagaccaggaccagggtattggcaaaaaagactgagaaggggcgctttcccacatagagaaaaataagaatagtgacaaagcagccagggaggaggctgtttaacagagaaagatgtgtcagggcctccccagtccatgcccttttcttcctggatgcccatctagaccacatgtcccagcctctccttgtggcagcctttcacacccacgtgatggagatctagccaayggaggtgaggcagcgggcatgtgtgttgccaggtatagctgcggcccttacggcgtgccagagccacagatggaaggaggagtctgggtcccgagtgcccacatggagaagagctgacccatctacttgaacacctgtccaggatgactacaggagcaagaaaataaactttcg

SEQ ID NO: 83374 - DNA, 677 bp, Homo sapiens
agcttcaggagagaaacctatgaagggtgttttatttttaggtcaagattgctatctagcaaagacccaagaactctcctaagatgaaaatttcagaagacaattgtctgtctgagacagatgagatcagtgtttctctgaagaaaagtttgttttcaggaatagagtctgaaattagtcctccaacctgagcgacattggaatagcagtaattcattgattactgcaatggcttaatgattaattatacaatcacattccctcattcttgcttttccaaattgatttacacctctgccaaaataaaaatcagacccaattaaggatatggagagagggaatcatctgttggttttcttcatatgctgttactcatagatgacattatgtagtgttctaacttttttaagaacattcatattcattatttccatttgtgtcttacattaccctagggatataaaaatggcaggtataatttccaatttatctagaagacaaatagaagttaaatggtatgggaaaggtcacagagctgtctcctgagctttggtgaccataagtctcttaggcagaagctcttttctccagcctaaccytcctgactccttcctctgagctcttttcacagggatagactgcctttaccacctgtgtgacaccttccctgtcatgca

SEQ ID NO: 83375 - DNA, 2090 bp, Homo sapiens
tagccacagaagagtttctggaatattctctaatggtgcaaccatccaccccatggatgcataacttaaacagttgagccatgtaacatccctgccccacactgcccctgtgttgagctgacaggtagagtcatctatggcaactcaagcacagatttgtagagggtcacagcagtgctatatccagctagtgtcatttggctggattgcatactagacttgtgattttcacatatgtgtagacataatctatgcctactgaaaaagattggaaggaatagttcttttggagaaagacagaatttgccaggtttccaggtctccttgagagacgtctgtacaagatctggagccgggttcctccagcttggcactgttgatattttgggctggaccatgctgtgttgtgaggctgtcccatagcctgcaggacagacagcagcagctctggcctccacccactaggtgccagtagcaccctcccatccacaccagytgtgacaacaaaaaatgttttctgatattgctaaatatctcctgggggacaaaattgccccatgttgaaagctattgctctagagattccgaggtaagacgaggtcactgctggaaatgggggaaggtaagtcaccttctgaaagtcaagggatgggcatttcaaggagctaaagggaggatcctttttgctaaagcctcctgatatctattccatacttctcacctgcctcaataacctcctaagctcctggaacgtcatgcctcatgggcttttggaggcttttgtgtgattagaggggaggacaagggtgtgatttggtaaaactgacataatacaaattgcttgtcaaatttcctctcacttgtctgtggagtgcaatagtaggaacatttgcacagagaaaaataaatgtctaaacatgcattggcacagacagtacactaactttcaacctaatgaaagaaacctaatgaatgaaaatgtaaggcttgccaaatgtgttatgataactctccagtgccaaggaaatatcaccctccccacggataccctggcaagcctgtgagtttaccccagtcagcaggtgcaccaaccatctcccctgcattgtaggtgagtgtatctatccctcattacaaggcttcttgaaattccttctgaactttctttctggaaatgctatccattatccaggcacccaaacccacccctttgtgcatggaatgtgtccaataaataactgggtttcataccacttgtgcaaaagcaacataaaaagtgctttttccttaaggggaaatatctcaccatttatacctcctgggagttagtagtttcatttaaatactaactttgtaagccacaagcaattcgctgtcttagtggagggaaatactcttctgtccatgttgctacatacagactactgttaacaaataagaatggagatatttccagtgccaggctcatagtagtgcccaaccaatttcagtgaaggagtctagcaagttgaacaaagtgctacttcaataatctattcctgaaaacttgtttttaatgtggtttagaggatacaattgtgcatgtatattttagcctatggaattttaactggatgctctttcttcttccctttctaccaatttctgttagatttctttctactttcaagccatgttctttttccacccaggtctattggtccctaggccttgagacccagagtcaataacaccttccctacaagaaacacacccagaagtgtccaccacctcaggtcccagtgaaaagaggtccaaggagatactaagctacgttcaatgtttccctttggttaactgcctgcttcttacatttccacaatgatttcctttacaatttgtatctactgctacaaatggcttatagatgtagtaccagaaggagaaaaactaataatagataattttctcaaaattacctggctatatttagtttcatgacaattaactaaaaactaatttaaaataaagtataatttggaaccagagctctattacgttataactctcacatatgtccccatggagagactgaatatgcaaatggacaa

SEQ ID NO: 83376 - DNA, 1005 bp, Homo sapiens
tgcatgcacatgcactgttcccggagcgcctgtgccctgctcctcacacccaggagtcgggggaggccgggtagtggctcgtttcatagttcagttcactgtagggacgggcagctgagtagaagtcaacgtagttgccggtggacttgagacccaggtgcatggtgtactcgctggcgggagggcgatggtggacctggtcctcraagaaggactcatcgtaatttcttgtggaattctgaaatggctggtaggtctcgtaatcttttctgctgggctcctgtgggactggctgtgctgaaacctaaacgggaaagaagagccacactgggttacttggtttcccttgactcagcctgcctcttgccccggcacccaactctccttcaaagaataggctgtgtatatccaggcattcaccactgtggccctgcttctccaaaactgccaactgtcattggctttccttttgaaaattggatcctaggtccacgtgctatcattctacataatctttatcatggcaaaatatacataacataaaacagcttgctttaagaaatgttgaagtgtaagattaattaggtggcattaagaacattcacagtgttgtgcaaccatcaccaccatccgtttccaccactttttaaatcatcccaaacagaaactctgtgcccattaaatgtaattcctcatcccctctctctcagcccatggcaagcaccattctactttctgtctctagaaatctgcctaatataggcactgcagagagtgtttgtccttgtgtgactggcttctttcacttagcataaagtttgcatggtccatccatggtgttgcacatggcagaccttgatccgtttttgtggctgaataatattccactgtatgatgtgcattgctccactgatgaatgcactgaaggccatgactttacctcaatgtagcaaaactgcacttgcacccccatgattgtatatatataagaataaaatagtccat

SEQ ID NO: 83377 - DNA, 1005 bp, Homo sapiens
tgcatgcacatgcactgttcccggagcgcctgtgccctgctcctcacacccaggagtcgggggaggccgggtagtggctcgtttcatagttcagttcactgtagggacgggcagctgagtagaagtcaacgtagttgccggtggacttgagacccaggtgcatggtgtactcgctggcgggagggcgatggtggacctggtcctcgaagaaggactcatcgtaatttcttgtggaattctgaaatggctggtaggtctcgtaatcttttctgctgggctcctgtgggactggctgtgctgaaacctaaacgrgaaagaagagccacactgggttacttggtttcccttgactcagcctgcctcttgccccggcacccaactctccttcaaagaataggctgtgtatatccaggcattcaccactgtggccctgcttctccaaaactgccaactgtcattggctttccttttgaaaattggatcctaggtccacgtgctatcattctacataatctttatcatggcaaaatatacataacataaaacagcttgctttaagaaatgttgaagtgtaagattaattaggtggcattaagaacattcacagtgttgtgcaaccatcaccaccatccgtttccaccactttttaaatcatcccaaacagaaactctgtgcccattaaatgtaattcctcatcccctctctctcagcccatggcaagcaccattctactttctgtctctagaaatctgcctaatataggcactgcagagagtgtttgtccttgtgtgactggcttctttcacttagcataaagtttgcatggtccatccatggtgttgcacatggcagaccttgatccgtttttgtggctgaataatattccactgtatgatgtgcattgctccactgatgaatgcactgaaggccatgactttacctcaatgtagcaaaactgcacttgcacccccatgattgtatatatataagaataaaatagtccat

SEQ ID NO: 83378 - DNA, 1005 bp, Homo sapiens
tgcatgcacatgcactgttcccggagcgcctgtgccctgctcctcacacccaggagtcgggggaggccgggtagtggctcgtttcatagttcagttcactgtagggacgggcagctgagtagaagtcaacgtagttgccggtggacttgagacccaggtgcatggtgtactcgctggcgggagggcgatggtggacctggtcctcgaagaaggactcatcgtaatttcttgtggaattctgaaatggctggtaggtctcgtaatcttttctgctgggctcctgtgggactggctgtgctgaaacctaaacgggaaagaagagccacactgggttacttggtttcccttgactcagcctgcctcttgccccggcacccaactctccttcaaagaataggctgtgtayatccaggcattcaccactgtggccctgcttctccaaaactgccaactgtcattggctttccttttgaaaattggatcctaggtccacgtgctatcattctacataatctttatcatggcaaaatatacataacataaaacagcttgctttaagaaatgttgaagtgtaagattaattaggtggcattaagaacattcacagtgttgtgcaaccatcaccaccatccgtttccaccactttttaaatcatcccaaacagaaactctgtgcccattaaatgtaattcctcatcccctctctctcagcccatggcaagcaccattctactttctgtctctagaaatctgcctaatataggcactgcagagagtgtttgtccttgtgtgactggcttctttcacttagcataaagtttgcatggtccatccatggtgttgcacatggcagaccttgatccgtttttgtggctgaataatattccactgtatgatgtgcattgctccactgatgaatgcactgaaggccatgactttacctcaatgtagcaaaactgcacttgcacccccatgattgtatatatataagaataaaatagtccat

SEQ ID NO: 83379 - DNA, 1005 bp, Homo sapiens
tgcatgcacatgcactgttcccggagcgcctgtgccctgctcctcacacccaggagtcgggggaggccgggtagtggctcgtttcatagttcagttcactgtagggacgggcagctgagtagaagtcaacgtagttgccggtggacttgagacccaggtgcatggtgtactcgctggcgggagggcgatggtggacctggtcctcgaagaaggactcatcgtaatttcttgtggaattctgaaatggctggtaggtctcgtaatcttttctgctgggctcctgtgggactggctgtgctgaaacctaaacgggaaagaagagccacactgggttacttggtttcccttgactcagcctgcctcttgccccggcacccaactctccttcaaagaataggctgtgtatatccaggcattcaccactgtggccctgcttctccaaaactgccaactgtcattggctttccttttgaaaattggatcctaggtccacgtgctatcattctacataatctttatcatggcaaaatatacataacataaaacagcttgctttaagaaatgttgaagtgtaagattaattaggtggcattaagaacattcacagtgttgtgcaacyatcaccaccatccgtttccaccactttttaaatcatcccaaacagaaactctgtgcccattaaatgtaattcctcatcccctctctctcagcccatggcaagcaccattctactttctgtctctagaaatctgcctaatataggcactgcagagagtgtttgtccttgtgtgactggcttctttcacttagcataaagtttgcatggtccatccatggtgttgcacatggcagaccttgatccgtttttgtggctgaataatattccactgtatgatgtgcattgctccactgatgaatgcactgaaggccatgactttacctcaatgtagcaaaactgcacttgcacccccatgattgtatatatataagaataaaatagtccat

SEQ ID NO: 83380 - DNA, 1296 bp, Homo sapiens
ttagaaatgattataaacactgatgtatgcaataaatgttgtacaagtgggtggtactaaataattatatgattacaaagaaatttgattaacagaaataagtgttcagaccacataatattctttttaaatttattttcctttttttaacttttattttaagttcaggggtacaagtgtaggtttgttacacaggtaaacttgtgtcatggaggtttgttgtacagattattttatcacccaggtattaagcctagtatccattagttattttttcctgatcctctccctccttccaccctccatcctctgaaaggcctstgtgtgtgttgttcccctctatgtgtctatatgttctcatcatttagcacccacttataaatgagaacatgtggtatttgattttctgttcttgtgttagtttgttaaggataatggtcttctcagaaatctataaggattaaaatctataaggattaaaatgcaagtgatatataagtgaactatggtaggaagcgaattggcacattttaccatttcatctcactaatttgttacactaaagacctttgaaaaatattacacaaaatttcagcattttaaaaaaaattgtggatttattcagaattattaacttggtttcaaaacttgcttcacttatctatcacaaaggaggtaaacgtatattgctaatttgctatgctcttataataggttatgacagcttgttttttaaaagaatatgcattcatcgaggaactggagatttaatgtatgcaatcagcattcagcaaaggaaggagacattttggtattaaaaaaactatttgtatattaagtacagtaagtccttgcttgacgatgttgttaagttcttggaatctatgactttaagcaacatgacaaatgggaagtctttgagtaacatcattttgttccacattgttgggtgataacattgataaggaaaaaaatgggtttgttatatgtcattttgaatacatattcctaatttcagtgtattttcctacataaaactattatatttagtaaattaattagcctatcctctttgcaaaataaaacatttaccaattgtgaagggaagaaaggacagtggttaatggagagacaaggaaggttgaaatacatgccgaataaaagaaaggtttaactatatggcactggaaacaaacaatttgagtgtgaaggacgtattttctctcaaggattatacaatatgagaaattaatcagaaatcaaagcaatgaattcaaccagttaggaaaattggta

SEQ ID NO: 83381 - DNA, 1245 bp, Homo sapiens
aatttgagttaacaataaattttattaatattgtatagatagagtctccatctccaggattagtaaagttttagctaagtcaaacctgagctagggtccagaatttttgttttaatgtacgagcacatttttatgataaatatattttccaaaacaaaaactaaagwtaagaagagtgggattgttttacaacttgcttatctctttaaagtacgtctgaataggggatagctggatttttatatctatttctggaatcaagcttttgtgatacgtagtttttgttgacaaatatgaagaaaatacatttctatgcagatatgaagcagaaaaatgaaaggagtattttgatagcctttgcagataattgtgcaaagtttcctttgatattctatcaaaaatcaataagaaatattttcttaaagcttagttgcaatttgggatctgttcagcgatgaacttttcatatgctataacattaagattcattgggctattttgcactttgaatgaatcttttacctaggtatgatttttgcgtcatcagtcattagtcattgggaaaataatggttcactgtgttatcccatacctgcaaattaggaagtaaatatttttaattctctatatttgaaaaattccttctgctattaggactaatttatgttgtggatttagtagttagataactttcttttacctatgatgtgtccgtggaggtgaataagactaagacacttgtctattaatattctgtttgtaaaaaaacaaaaaatattctgttataaaaaacattgcttgccatttctctttagaaatgtgtcaatgaagcacacatgctttaattaacattgtgcaattattataaataaaaatgagcatatctaaaatatcacagccttatacattaatttattgaggtaaaatatacatatataatttaccagctttaccattttaaagcatacagttcagtgataacaaatacatttatattatttttcccttgtcatccctcctttctgcctccccttcctggcctctagtaaccaccaatctactgtctatcttcatgtcattcacttttttaactcccacgtgtgagtgataacatgcaatatttgtccttctgtgcttggcttatttcacctaacataatggtctccagtgtcattcctgttgctgcacatgacaggattttattcttttttatacctgaataatatgttgtgtacaaataccaca

SEQ ID NO: 83382 - DNA, 1245 bp, Homo sapiens
aatttgagttaacaataaattttattaatattgtatagatagagtctccatctccaggattagtaaagttttagctaagtcaaacctgagctagggtccagaatttttgttttaatgtacgagcacatttttatgataaatatattttccaaaacaaaaactaaagttaagaagagtggsattgttttacaacttgcttatctctttaaagtacgtctgaataggggatagctggatttttatatctatttctggaatcaagcttttgtgatacgtagtttttgttgacaaatatgaagaaaatacatttctatgcagatatgaagcagaaaaatgaaaggagtattttgatagcctttgcagataattgtgcaaagtttcctttgatattctatcaaaaatcaataagaaatattttcttaaagcttagttgcaatttgggatctgttcagcgatgaacttttcatatgctataacattaagattcattgggctattttgcactttgaatgaatcttttacctaggtatgatttttgcgtcatcagtcattagtcattgggaaaataatggttcactgtgttatcccatacctgcaaattaggaagtaaatatttttaattctctatatttgaaaaattccttctgctattaggactaatttatgttgtggatttagtagttagataactttcttttacctatgatgtgtccgtggaggtgaataagactaagacacttgtctattaatattctgtttgtaaaaaaacaaaaaatattctgttataaaaaacattgcttgccatttctctttagaaatgtgtcaatgaagcacacatgctttaattaacattgtgcaattattataaataaaaatgagcatatctaaaatatcacagccttatacattaatttattgaggtaaaatatacatatataatttaccagctttaccattttaaagcatacagttcagtgataacaaatacatttatattatttttcccttgtcatccctcctttctgcctccccttcctggcctctagtaaccaccaatctactgtctatcttcatgtcattcacttttttaactcccacgtgtgagtgataacatgcaatatttgtccttctgtgcttggcttatttcacctaacataatggtctccagtgtcattcctgttgctgcacatgacaggattttattcttttttatacctgaataatatgttgtgtacaaataccaca

SEQ ID NO: 83383 - DNA, 568 bp, Homo sapiens
gtcagactctagcccccttatcatattataaagaacatgtaagatacttactggaaatggttcccaaagagaccttctcacatttgaggtagagaagaastgtcccccaccctacctcctttaaggcagttaggctctcagcacaactctctccaaggatatcctctatcttgcctctccaaccttttcttagagtagagttgtgtagtttttaccaactcttttgtaagtcctgcttagatggcctcataactcactatggaatgtcactgaagatggaaaccaggaccaccacaaatgattatgcagtgtgtaccctatataaagatgccagggtaaggcgatgaaggaatgctgaattccagcccttgctcccctagcagcacatggggccagaagaggcactttattgtaactcatctgcccagcagaggtacttgtttgctaatttatacaaaggcacctattgccctggagcccccattgaaactgagacagagtctcatttaaaatctcatttcagttagatgagttgtaagattggcagtttctctataggaaagccatc

SEQ ID NO: 83384 - DNA, 568 bp, Homo sapiens
gtcagactctagcccccttatcatattataaagaacatgtaagatacttactggaaatggttcccaaagagaccttctcacatttgaggtagagaagaagtgtcccccaccctacctcctttaaggcagttaggctctcagcacaactctctccaaggatatcctctatcttgcctctccaaccttttcttagagtagagttgtgtagtttttaccaactcttttgtaagtcctgcttagatggcctcataactcactatggaatgtcactgaakatggaaaccaggaccaccacaaatgattatgcagtgtgtaccctatataaagatgccagggtaaggcgatgaaggaatgctgaattccagcccttgctcccctagcagcacatggggccagaagaggcactttattgtaactcatctgcccagcagaggtacttgtttgctaatttatacaaaggcacctattgccctggagcccccattgaaactgagacagagtctcatttaaaatctcatttcagttagatgagttgtaagattggcagtttctctataggaaagccatc

SEQ ID NO: 83385 - DNA, 568 bp, Homo sapiens
gtcagactctagcccccttatcatattataaagaacatgtaagatacttactggaaatggttcccaaagagaccttctcacatttgaggtagagaagaagtgtcccccaccctacctcctttaaggcagttaggctctcagcacaactctctccaaggatatcctctatcttgcctctccaaccttttcttagagtagagttgtgtagtttttaccaactcttttgtaagtcctgcttagatggcctcataactcactatggaatgtcactgaagatggaaaccaggaccaccacaaatgattatgcagtgtgtaccctatataaagatgccagggtaaggcgatgaaggaatgctgaattccagcccttgctcccctagcagcacatggggccagaagaggcactttattgtaaytcatctgcccagcagaggtacttgtttgctaatttatacaaaggcacctattgccctggagcccccattgaaactgagacagagtctcatttaaaatctcatttcagttagatgagttgtaagattggcagtttctctataggaaagccatc

SEQ ID NO: 83386 - DNA, 716 bp, Homo sapiens
ctcttggacttacaccagtggtttggcaggggctctcgggccttccgccacagactgcaggctgccctgtcggcttccctgcttttgaggcttcggggcttggactgagccactactggcttcttcctgtcttctcagcttgcagatggtctattgtgggacttcatcttgtggtcatgtgagtcagttctccttaacaaactccccttcatatatacatacatactactagctctgtccctctgaaaaaccctgactaatatagaccttgaggacactatgctaagtgaaataagrcactctgagaaagacaagtactacatgattccatttatctgaggtatctcaaatagtcaaattcatgaagttaaagactagaatgatggttacctgggactaggcggagagggaaattaagagttggtaaccaataggcataaagttttagttaaataaatttagttaaataaaacaaatacattttagaaatctgctgttcaacattgtatctatgatcaacaataacatattttatacttaaaatttattaggagggtagatgtcatactaagtgttcttaccacaataaaataaaaactaaaatagaaaaagaagtaactccttttacctcttcacctccctcatcatattaacatctttgtttagtttgggatatcctaggtttaactcctccggaaacagattgagataaaggt

SEQ ID NO: 83387 - DNA, 1340 bp, Homo sapiens
cgctcgacactgagaatctgtaatatgtggaatcattgcaaacatgaaaaagatgctcaatgcacttgctacctgaaagtgaatgtgaaagcgtgcaaaatttaaggtataaaagcttagggaaatattacaattgtcacacttgattacttttagacacagcttgacattcttgaagaatagttattaaagagtattcttcaaagagaaaaattcgcttattcaggtattcaataaatattcattggaagcctactgtgcatgtaacatagcagatacattgatggataacaaagatgtatgcggtatcatattgaccatatatgtatcatttcttagaaggctttaccaacaaagaagaaataaaggagcctgattattgtaaatggtgatgaaagctgttccttatatacagtaataacatgacactaggcatccctttaacaacttagttccccaaaagacatatatattactcactgataaccagggataatttttttaawttttttttttttttttttttttttttaagtagagacggggtttcaccatgttagccaggatggtctcgatctcctgaccttgtgatccgcccgcctcggcctcccaaagtgctgggattacagtcgtgagccaccacgcccggcccgaccaaggacaattttaaggacactcttgtatggagaatgtagacctaggcaaatttgactgtgaagagaggatcccaagaactgatgcttaaaaaaatttccaagtgaaagaagataagtctgacttgcttaaagaggtcctctgtttcctaagacaataatatagattcaaatcaaaaggtcgatgcagagcaacattgggatctcatgattagaagagtggattttgtacatattgcaacctacttattctctaagaacacttgaaactaaggaagcaggaataatcagataagttgtctaagagaagcatttataggctttttctgagaagaaacatgatcttccaaactgtgaactagattgtcaagagactgaatttttaacattgtcgaatatgtcactgaattgttctataaaaatatgttattactatttccctacattttttatgtagcttacaagtttaatggaaaggtgaatggttttatatcacattacatctttcacatttttggagaaaaggagatgattcaagtcttaatcacattaggatagagataagggttactgcaaattcatggtcttgaacaccaacttggtccttaatactatctggaaagccttctctttctcagtcatctcttttcttctccataggggtaactatgcctgcttctccacaga

SEQ ID NO: 83388 - DNA, 2293 bp, Homo sapiens
cccgagtagctgggactacaggcgcccgccaccacgcccggctaattttttgtatttttagtagagacggggtttcaccgttttagccgggatggtctcgatctcctgacctcgtgatccacccgcctcggcctcccaaagtgctgggattacaggcgtgagccaccgcgcccggccaaaataatttcacatgtacacctatttttctcttagctatcttttgttactgaccattggaaggagtacaatattgggataccaatgcaggacaatgaattagtttatcatctcattctaacatgtataagcgaatctatcatgcctcaagcccgtacatgctatactctgatatagagcattataccaaagggctagtcttagttgtaggcaaacaactatttgcattattatcttgaggagttagaaaaattaaggtacatttatggtcagaaagatgggtgtttccttcagaatacacaagaaaaatatttcatccaaaagattttcttcttatatctttaaatacttgttttaaagtgggaaaaataaaaaatctctgggttctacaacatgatataagaattttatgtgcagcattagtatttcttgagaatctgaataccatactccacctcccctaaaaaatttattgagtcacacatgttgaatgacagttaggtgttgacagtgtgtctacttacatttgctaaaaacaaaaatgctttctgtaatgaatatcaatgttactcagggtaatacggttaagttacttatgttgatatgcttacctactttcaaatgatcccactgtaaaagtttcattgtcatctctcttcagcattaggaacaaaaattctgtaatatattttcatataaaagatgggaagcgactgtacaaaattactataaaataaactgaaactgactagctggctctcatatttttaaaatgcatgttcaacaaaaagaaatatcaagcaaaattgccaacaaatctttcaaaggccactcatcagtgctaaagaccacaatcagcttgtcataattaacttcataactaaggaagataaacgtaagcaacagcacacagcccaaatcacagcttgagaaatgaaattgaaatggctaaaaactgaacttgagccaaactgctttatcctagtcaccttgtttcataaatcaagtagaagaatatctgtacatcagcaatgttgtatattagttcagttttattgatgtgaatcgcattgttttacgaagtgaactttctccaaaaaatagcacgaataaagggatgtgaattatagatgtgcatcatcacaatatactattgactctaactttaatgctgtttctgcagatattactaacctgcatcttgtccttttgatcaaacacttgtctgtccaggatgtgacatggagaaaattattccagcaaacctatgggctttctgctttttaacttctgtctctcactgacgttttcccattgccctacctacatgaacctacttggtattgcgtccaataattacaccttaatttttgagctgaaaaagaaagtcattcaggtgagaattttatctgtgggaaccttgtgtttaccacagagaaactttaaaatatatatataagatggcaagaataaaggtgccaggaataaaggtgacaaaatccttcagctgagttagaaataaggtatgtaaatagctctgtaatacccccacattttctaaaaatatcaaatgcaaaaagaaaaacaagaatatagtaaccacattttcaatgtagttggaacttgctgccttggggtgaggaaaaagtagggggaaaggagaggaatccaattccaattttcattgcacgattcccatacgtatctatcagaatagttctcttggccaagtatttattaaaaatcctcacccagtctgcttataaacaatttgaaaactcacacattacaatattcatagctgtgttcaagaagtgaccttccgagctgactttattgtgaactataaaaagtgctagctaataaaacacaagggcatttcgttggtttccaagattttactttctaggtttctcacccccttcaaaaatccctcctaccagtgatcaaaactgttttgtgactcacccttgactatacagaaacccaaaagcagaggcagcaaaaaacatgtatcccactgaatcgtaaggagagcattcaatgcaaattttaaggacagatttgcagattgtaccactgctctctgytgtggcttatttgctgtttaattaca

SEQ ID NO: 83389 - DNA, 927 bp, Homo sapiens
tggtttgtttctttcttttgcaatgatcttcctttcttctccacgtttggtaaactatttcttttttcaaagctaatgttaatagaataacattattctgaaatcttcccagattcctcctggaagaaatcagaattctgtcttctgtgattcatcttatattatagawgcttcatcttaatgatatttgaaatttttgatatgatacttattgtgctaatatattgctaaaatactgaatcatttgtgggcttggagtcttgtcttatttttatggcaaatggctgcctacaataggcaacccattattattattttttcccaaatgaaaataagatgggtattcagagtctgaatatcaatcagttcatctcacctattttataatagttacaatgattgagatcatgtgatcacaactaaagcacacaccaccatctggtggcaacatatataaattgcagtatcaagttttaagatacgggtaaactttatgaaatttctccctgctagtgtgaattttaaaatagtgactaggctgggcgcggtggctaacgcctgtaatcccaacactttgggaggccgaggtgggcagattacctgaggtcaggagttcaagaccagcttgaccaacatagtgaaaccctgtctctactaaaaatacaaaattagctgggcgtggtggtgggcacctgtaatcccagctactcaggaggctgaggcaggagaatatcttgaaaccaagaggcggaggttgcagtaagctgagattgccccattgctttccagcctggacaacaaaagcgaaacagtctcaaaaaaaaaaaaaaaaaaaaaaaaagcatagtgactacactaagagttaccattttatgatcattttggtaacagattcttgtattgatgattagcagataacttcataga

SEQ ID NO: 83390 - DNA, 1672 bp, Homo sapiens
gaaattgctaatgaagtttagttgcaagggaatgcaagtattcctgttattgtccttggattggacccagtagagcagaacgttagcattattattcttcatttgtcagttgccagaatcttagaagctaaaattctcagaagggggatggagggagcatttaagagggtcagtgggtaataagtcccagaggccatattagtacaccacagctctgaagaaaatgtttctatttagctggatgatgccttggcaaagtatcacagatcacagagtaaataggttgtgctttagtctttactaacttagcatacatttgaacatttatttaagatgctcatggtaaaatgagcaaaatacattaatattacaaattcctatgtagccattacagtgaggatcccaaagtcaatggcttccaggagacagtgagataaattagtgtaaaaggcaagaagaaagacaatgactaggggaaggggctgtggggtctggagagtacatgmtccataaagggaggggcagctgcatttccagccaccttattgttgtcacttaggcgtagttttgccagatcgccaaatttttcaaaagaagacaaggaagtgtatttctatgtaaaatcttccaaattttagaaggagacaactaaaatccacgtttataaagataacacgtgagttgagttgctagatttagaaaataaaaatacaggacatacagttaaatttgaatttcaggtaaacaatgaaaactattttagcataagtatggcctagacattgtatgggatatatttacgtaaaaagttactggttatttactctgaaatccatcttttaaccatgtactctcttttgcatctggcaacctttgtaactggctatcataatttgaaacatatttgcaagctagattcctcacttggactgcatctacttttaaaaagtcctgccttcataagctccaattgactcttcattggaatatttaatttgaaccaccatattagactttgttattcaattactgtgtttctgtttctttggagtcttgttttaacaagcagatgttaaagaatttcctcttctctttctttgataatagatctaacttacagaggtaagttcaagaacagaagaaatgttatatgaagacccttgaatatgggtgttgaagaacataaacccataagaatttccatagtataaaataatttggacaattgaatcaagggcaaaacaacaacaatagtaactagcatacattaatatatacaatgggttagtcttgtcaggcccttttatatcaaattgcttaatctttttgtttctatgaagtgttggcactatcattattctcattttctagatggagtactgaggcacagagatgctaaatgtcttccctagggtaacacagctagtacatgacaaaaccaggattctaacccagatgttctggctccagagcctatttactctattatattttcacaaagcactaaaatcagtaaataggagactgaaagataagcagctctaggcaacatccatcagttttacagaacactgagacaaagatgtttgagtcaggtttagattcatgaacaaagatctgctatatacaaaaagcaacatatggtataatctgtgctgccctttggacatgc

SEQ ID NO: 83391 - DNA, 1060 bp, Homo sapiens
ccctgaggacattattctaagtgactactactcctatgcgagtagttaaaatcctaaagacagaaagtagaaccatggttgtcaggatttcctttggaaagggaaaatggggagtttgttttttaatgggtatagtttcagttttataagatgagagagagagatggatggtggtgatggttgaacattttgactgtatttaataacattgaaccatacacataagattggctaagataaattttgtttgtttatttttcctctattaaaacaaattctagcaggaaaaaaaagcctaaaagaagttgtataaataaacttctttttagacttagaaatagagtaagaaaatagtgtatagttatttcattcttgattttctaaattttatttagtaaaacatcaacttgatttattagcatagtaacatgggagtaacaacaaaataataaaacagacaaaaaacacaatatttaattaatagtaaatgtataaaacatcttcmattcttttaatttgctttgtattaaccattttagggtatatatttttgaaaaagcagtgagatgtttagatttcaatatccatatttcaatcttttaagtagagggataaatggcactggtaaaataaatccctgttgccctaaaaatgtcctggcagttaatataatttaacacttgtatacactgtatggtatatttttgccactttaagaactataacattttattttcatatgaattttgaagtgttaattatatgaaaccagttttaataagagcttgattaggtaacactgcctaaatgcctcttggttcaaaggggcctgaaacaaatgagttttcatcctgatgctagttttttctaatgatcctctaggaaaatctatgtcaagtttttattttgagaaatcatttttgaacaaagaaaaccgtatttacccaaaaacttctgtgatttttaaaactagcatctattgtcacaaaaacaaaatgtacttggtacttaagtgacgtatttttaccatcagagttaaatgaattttacatacatttat

SEQ ID NO: 83392 - DNA, 1060 bp, Homo sapiens
ccctgaggacattattctaagtgactactactcctatgcgagtagttaaaatcctaaagacagaaagtagaaccatggttgtcaggatttcctttggaaagggaaaatggggagtttgttttttaatgggtatagtttcagttttataagatgagagagagagatggatggtggtgatggttgaacattttgactgtatttaataacattgaaccatacacataagattggctaagataaattttgtttgtttatttttcctctattaaaacaaattctagcaggaaaaaaaagcctaaaagaagttgtataaataaacttctttttagacttagaaatagagtaagaaaatagtgtatagttatttcattcttgattttctaaattttatttagtaaaacatcaacttgatttattagcatagtaacatgggagtaacaacaaaataataaaacagacaaaaaacacaatatttaattaatagtaaatgtataaaacatcttcaattcttttaatttgctttgtattaaccattttagggtatatatttttgaaaaagcagtgagatgtttagatttcaatatccatatttcaatcttttaagtagagggataaatggcactggtaaaataaatccctgttgccctaaaaatgtcctggcagttaatataatttaacacttgtatacactgtatggtatatttttgccactttaagaactataacattttattttcatatgaattttgaagtgttaattatatgaaaccagttttaataagagcttgattaggtaacactgcctaaatgcctcttggttcaaaggggcctgaaacaaatgakttttcatcctgatgctagttttttctaatgatcctctaggaaaatctatgtcaagtttttattttgagaaatcatttttgaacaaagaaaaccgtatttacccaaaaacttctgtgatttttaaaactagcatctattgtcacaaaaacaaaatgtacttggtacttaagtgacgtatttttaccatcagagttaaatgaattttacatacatttat

SEQ ID NO: 83393 - DNA, 721 bp, Homo sapiens
ctgttgtaacaagtacacattccctctcctcgaggttgtccctcagcatgacgctgactgatgttcatcaagacttactgtcacactggctagtgctgccaagccatctagactacaacttattctagattcaccctggagagatcttagagggcatatcttcttcacccagagaaggcatttatgccttattgaggcctcagtttacccagaggaaacagctcttccctatgaccctgagaggtgctggtgctactyaaggcacctgtgttctggtgcacctggccctttaactaaaagataatggggcaaaggagagggtggggagcaagtgtaaatacctcattgtggagcagaggcagctaccaccccatctgagctagggtggccctggctaactcattttgctccacccttgattaagcagatttttacaatgttcttgcttaaaaatctatttgattcactgaaaagtagttataagtggttacactaggaagatgaatactactcttctgcaccccgctgtgtgataaacctgcctgccctcaagaagcagatcctggctcttgctgggtggggttggtgccagcctacactagagcacccgcggtggcatgtggctaggattatcaaagggagattggaggcagctggtgtgtaccaggaagcgcaccaaaccagcaaagttctggcccctctattcagtagctgcaggatc

SEQ ID NO: 83394 - DNA, 721 bp, Homo sapiens
ctgttgtaacaagtacacattccctctcctcgaggttgtccctcagcatgacgctgactgatgttcatcaagacttactgtcacactggctagtgctgccaagccatctagactacaacttattctagattcaccctggagagatcttagagggcatatcttcttcacccagagaaggcatttatgccttattgaggcctcagtttacccagaggaaacagctcttccctatgaccctgagaggtgctggtgctactcaaggcacctgtgttctggtgcacctggccctttaactaraagataatggggcaaaggagagggtggggagcaagtgtaaatacctcattgtggagcagaggcagctaccaccccatctgagctagggtggccctggctaactcattttgctccacccttgattaagcagatttttacaatgttcttgcttaaaaatctatttgattcactgaaaagtagttataagtggttacactaggaagatgaatactactcttctgcaccccgctgtgtgataaacctgcctgccctcaagaagcagatcctggctcttgctgggtggggttggtgccagcctacactagagcacccgcggtggcatgtggctaggattatcaaagggagattggaggcagctggtgtgtaccaggaagcgcaccaaaccagcaaagttctggcccctctattcagtagctgcaggatc

SEQ ID NO: 83395 - DNA, 615 bp, Homo sapiens
gcatatggttaattagctcaattgagccattctacaatatatacatattttataacatcatgttgtgcacaataaatagacacaatttttatttgtcagttaaaagaaataaattacaaagataaataaatgcttttttwaaaaaaaacataaaaatttggtacaatcctgtcaaactctatctcctaccgctgaattctctaaagacaagtaagggttgggtgatgccatggacacacaaattgaaaatactcagtagacttaaatggtttcgagcatttccttaaggtcccatcatcttttaatcccttattccactccggttctctctgactacagcactccggagggataccaagaggagagaaaacctgaatgaagtagcagtgcaaatggctgattttaaaaagaaaccaagcttcctaagttggtaatcaaggttgaagcacagcagtaggcagggggcagtgactctcatcttattctttagtactgtgggtggtccgtttgatgtttaaaacactcctgaggcctttatgatatttatgtgatagcacaagcctaaataaatacagaggatctgataggttacaaaattgtacataaaatgtgatt

SEQ ID NO: 83396 - DNA, 615 bp, Homo sapiens
gcatatggttaattagctcaattgagccattctacaatatatacatattttataacatcatgttgtgcacaataaatagacacaatttttatttgtcagttaaaagaaataaattacaaagataaataaatgcttttttaaaaaaaaacataaaaatttggtacaatcctgtcaaactctatctcctaccgctgaattctctaaagacaagtaagggttgggtgatgccatggacacacaaattgaaaatactcagtagacttaaatggtttcgagcatttccttaaggtccsatcatcttttaatcccttattccactccggttctctctgactacagcactccggagggataccaagaggagagaaaacctgaatgaagtagcagtgcaaatggctgattttaaaaagaaaccaagcttcctaagttggtaatcaaggttgaagcacagcagtaggcagggggcagtgactctcatcttattctttagtactgtgggtggtccgtttgatgtttaaaacactcctgaggcctttatgatatttatgtgatagcacaagcctaaataaatacagaggatctgataggttacaaaattgtacataaaatgtgatt

SEQ ID NO: 83397 - DNA, 885 bp, Homo sapiens
caaataataaatgttgttttgataaaatacactgctggtcatgcacaacacctagataactataatctctttttctcctacattagaaagcatgtctgagtgtctgagtgagaaacacttaaagtgatagtcttatagaattactaatttattttttaaaggaaaatatttgctaactcattgttagcataaaagcattgcaatgtgatgacacaaacatcatagtaccttgaataagagccactatgtataaaagtaggaagctacccataaaattatgatagttatctgcttaaaatccttcaaagactccctctaaagtcatcacagttcattagacacgcaatgccctttataatgtggccacaacttatctctccagtctttcttctttcactttctcctatgattccctggccccaggagaagaagaagaaaaamaaacaaacaaacaaaaaaaccggctacgtctgaattacatcatgtaatttaatttttagggcctttgcttgtattttcctatctgcttgaatcaccctttcgctatattctatgcatactcatctttcaaaacttaacccgaatgttactttcttcatgatatttgcatgcctcaaaataattttttctcagtgctcaaataaaatttcttagagctctccttgaataatagcattctttgttgataaattctttgatattacataatgaaatctcttgtgatgggattaaaatgtatttctcattatatctctaacatgatgtatgtgatttagaagttgtttaatgaatgtttgttaaaatagtaactaaatgtcaaacaattatgtactaatctcagactatcaccaaatacataccacttataagcaaggaaattctgca

SEQ ID NO: 83398 - DNA, 608 bp, Homo sapiens
aacttatgttccagtgggtagaaacccatgagcagctatctatttatttcacacaatctcacttatctcaaatcgaggagaaatttggaagatactttagagaggtaaccataccacatggcagaagagcaaggaagatagtgtgggtggtgtagggtggggcagggttgcagggtggggaaatgacagaggggtggggtgggatgtcagtgttgcagcacattgtggtraattgtgaacactttggtttttactttgagatgggaagacaccgaaaggttttgagtaagccaatgtcattttctgccattgtgcttcaaagaattgcttggctcctcaatggagatctgactgaagaggaccaggatggaggcaggaggggcaagcaagaagccactgcaacaatcaaggccagaaatggcagcagctgggacagatggtctcagtggaccaggtgagctctgctcatgctagtgaaatgtgctttgaaggcggagtcttccccgctctctaatggctggatgtgggatgaataaagaggaggcatttggcctgaacaactaggaggatggcagggacattttctggggtggggatattgtcgggga

SEQ ID NO: 83399 - DNA, 574 bp, Homo sapiens
cctaggttctaaacttagtcccttctgcccttactgtgtagcaacaccactaagtcctccagggaattagcatcttcccctgtaacactcattgctttattatgagctgtgatggtgagacagcgtgatggtgaatcaggtattccamataccacagaggattttgctgacagaagcattaaagatcagaaaagcaaatacatatccatattcatatgcaaaatatgtgtatttttcagagagtataaatcattgcgcctttcatcatagaagttgtttcacataatcagcttggagcaaggtacttggatggcccctcaaggaaagatgaccatgccagagcatggagctcttgtcagaatggaattcaacagcaacaggagccagatccatgttggtgggaaaaattccatgttgttgaccccatggattgtctcataccagacatcacgccctttagtttggcactggtgtggctgaggaaggacgacaatgaacagagagctcacctggttctaacagcctcctcctctgcagagatgccctctgacaggcaatcgtaaggcttgcaaac

SEQ ID NO: 83400 - DNA, 1587 bp, Homo sapiens
  misc_feature (1)...(1587): n = A,T,C or G
aatccaaaattcctttttataaggacattagtcatattatatctgggcccatcctaatgacctcatattaactcaatcatttgcaaggctctgtttccaaatacttacaggtactgtggatcagaacttcaacatctttttgagggacataattcaatacataacagcatgtgtttgcattccctttgtttgtgaatgttcaatttctgagaacacaactgtacttgaaattgtatctgtaatgtgatgtttttgttcaagtcatggtcaaactcatttgcaacagcaatcatttatctgcattatttaatgtttcttgcaagcatttgtcctgaaacatttgtgacttctcttcttcctttccctctgtcctctggagggattggtgttatggccagtcagttcctggggtaagttccctgtgcttcagcrttttcactgtgcatttcactaaattcagcctccttagcaaaatctgagaacatttgttttgcttctatcactttactgtaactttggaagggctcacaaaataagaggtcttttttaaaaaaataaattttctattttagaacagttttaggtttacagagaaattataagcatagtatagaaagttcccacatacttgatatccagtttcacctattattaatatcttacattagtataatatcattgttataacgaatggatcattatttatacattgttattaactaaagtttatacacttttcatgtttcctcagtttttatctaatgtcccctttctgtccctggatcccgtcaaagatatcttgttacatctagtagtcatgtctcgttggactcctaatggctgtgatagttttgtagacatcccttgttttggatgaccttgatgatttgatgagtatggggtcagataatctatggaatgtccctcaactggacttgtctgatgttctctcatgattaacctggggttatgaacttccagtaggaaggccatggaggtaatgtgacattttcatcacattgtatcaagggtacatatatcgacatgacttttgatattgatgttggtcacctggctggggcagtgtttgtcagatttccccaatgtgaagtacactttttcctgtctatattgtctagactctagaatgctagactctagaaagtctagacactttttcatatctagactccttgggagagcctagacctaaggagtggagatttgcgatactacatcttcagggaacaatatctatagaaataacttgggattcttttgcaaactgagatttgttgctttccatttcccttacttatntattgaattcttcctttaatcagaacagatattggatattcattgtatagattaatactcttttattttactgttcaaatttgtttggcactttgggcattaggagttcttctagttggaatttgtatttgacatccctccatatcttagttctttcagggttctgttacaaattgccatagactgagtggcttataaacaacagaaatttatttctcatacttttggaagctcagaagtctaagggtgccaacatagttgggttct

SEQ ID NO: 83401 - DNA, 1587 bp, Homo sapiens
  misc_feature (1)...(1587): n = A,T,C or G
aatccaaaattcctttttataaggacattagtcatattatatctgggcccatcctaatgacctcatattaactcaatcatttgcaaggctctgtttccaaatacttacaggtactgtggatcagaacttcaacatctttttgagggacataattcaatacataacagcatgtgtttgcattccctttgtttgtgaatgttcaatttctgagaacacaactgtacttgaaattgtatctgtaatgtgatgtttttgttcaagtcatggtcaaactcatttgcaacagcaatcatttatctgcattatttaatgtttcttgcaagcatttgtcctgaaacatttgtgacttctcttcttcctttccctctgtcctctggagggattggtgttatggccagtcagttcctggggtaagttccctgtgcttcagcattttcactgtgcatttcactaaattcagcctcyttagcaaaatctgagaacatttgttttgcttctatcactttactgtaactttggaagggctcacaaaataagaggtcttttttaaaaaaataaattttctattttagaacagttttaggtttacagagaaattataagcatagtatagaaagttcccacatacttgatatccagtttcacctattattaatatcttacattagtataatatcattgttataacgaatggatcattatttatacattgttattaactaaagtttatacacttttcatgtttcctcagtttttatctaatgtcccctttctgtccctggatcccgtcaaagatatcttgttacatctagtagtcatgtctcgttggactcctaatggctgtgatagttttgtagacatcccttgttttggatgaccttgatgatttgatgagtatggggtcagataatctatggaatgtccctcaactggacttgtctgatgttctctcatgattaacctggggttatgaacttccagtaggaaggccatggaggtaatgtgacattttcatcacattgtatcaagggtacatatatcgacatgacttttgatattgatgttggtcacctggctggggcagtgtttgtcagatttccccaatgtgaagtacactttttcctgtctatattgtctagactctagaatgctagactctagaaagtctagacactttttcatatctagactccttgggagagcctagacctaaggagtggagatttgcgatactacatcttcagggaacaatatctatagaaataacttgggattcttttgcaaactgagatttgttgctttccatttcccttacttatntattgaattcttcctttaatcagaacagatattggatattcattgtatagattaatactcttttattttactgttcaaatttgtttggcactttgggcattaggagttcttctagttggaatttgtatttgacatccctccatatcttagttctttcagggttctgttacaaattgccatagactgagtggcttataaacaacagaaatttatttctcatacttttggaagctcagaagtctaagggtgccaacatagttgggttct

SEQ ID NO: 83402 - DNA, 1587 bp, Homo sapiens
  misc_feature (1)...(1587): n = A,T,C or G
aatccaaaattcctttttataaggacattagtcatattatatctgggcccatcctaatgacctcatattaactcaatcatttgcaaggctctgtttccaaatacttacaggtactgtggatcagaacttcaacatctttttgagggacataattcaatacataacagcatgtgtttgcattccctttgtttgtgaatgttcaatttctgagaacacaactgtacttgaaattgtatctgtaatgtgatgtttttgttcaagtcatggtcaaactcatttgcaacagcaatcatttatctgcattatttaatgtttcttgcaagcatttgtcctgaaacatttgtgacttctcttcttcctttccctctgtcctctggagggattggtgttatggccagtcagttcctggggtaagttccctgtgcttcagcattttcactgtgcatttcactaaattcagcctccttagcaaaatctgagaacatttgttttgcttctatcactttactgtaactttggaagggctcacaaaataagaggycttttttaaaaaaataaattttctattttagaacagttttaggtttacagagaaattataagcatagtatagaaagttcccacatacttgatatccagtttcacctattattaatatcttacattagtataatatcattgttataacgaatggatcattatttatacattgttattaactaaagtttatacacttttcatgtttcctcagtttttatctaatgtcccctttctgtccctggatcccgtcaaagatatcttgttacatctagtagtcatgtctcgttggactcctaatggctgtgatagttttgtagacatcccttgttttggatgaccttgatgatttgatgagtatggggtcagataatctatggaatgtccctcaactggacttgtctgatgttctctcatgattaacctggggttatgaacttccagtaggaaggccatggaggtaatgtgacattttcatcacattgtatcaagggtacatatatcgacatgacttttgatattgatgttggtcacctggctggggcagtgtttgtcagatttccccaatgtgaagtacactttttcctgtctatattgtctagactctagaatgctagactctagaaagtctagacactttttcatatctagactccttgggagagcctagacctaaggagtggagatttgcgatactacatcttcagggaacaatatctatagaaataacttgggattcttttgcaaactgagatttgttgctttccatttcccttacttatntattgaattcttcctttaatcagaacagatattggatattcattgtatagattaatactcttttattttactgttcaaatttgtttggcactttgggcattaggagttcttctagttggaatttgtatttgacatccctccatatcttagttctttcagggttctgttacaaattgccatagactgagtggcttataaacaacagaaatttatttctcatacttttggaagctcagaagtctaagggtgccaacatagttgggttct

SEQ ID NO: 83403 - DNA, 1587 bp, Homo sapiens
  misc_feature (1)...(1587): n = A,T,C or G
aatccaaaattcctttttataaggacattagtcatattatatctgggcccatcctaatgacctcatattaactcaatcatttgcaaggctctgtttccaaatacttacaggtactgtggatcagaacttcaacatctttttgagggacataattcaatacataacagcatgtgtttgcattccctttgtttgtgaatgttcaatttctgagaacacaactgtacttgaaattgtatctgtaatgtgatgtttttgttcaagtcatggtcaaactcatttgcaacagcaatcatttatctgcattatttaatgtttcttgcaagcatttgtcctgaaacatttgtgacttctcttcttcctttccctctgtcctctggagggattggtgttatggccagtcagttcctggggtaagttccctgtgcttcagcattttcactgtgcatttcactaaattcagcctccttagcaaaatctgagaacatttgttttgcttctatcactttactgtaactttggaagggctcacaaaataagaggtcttttttwaaaaaataaattttctattttagaacagttttaggtttacagagaaattataagcatagtatagaaagttcccacatacttgatatccagtttcacctattattaatatcttacattagtataatatcattgttataacgaatggatcattatttatacattgttattaactaaagtttatacacttttcatgtttcctcagtttttatctaatgtcccctttctgtccctggatcccgtcaaagatatcttgttacatctagtagtcatgtctcgttggactcctaatggctgtgatagttttgtagacatcccttgttttggatgaccttgatgatttgatgagtatggggtcagataatctatggaatgtccctcaactggacttgtctgatgttctctcatgattaacctggggttatgaacttccagtaggaaggccatggaggtaatgtgacattttcatcacattgtatcaagggtacatatatcgacatgacttttgatattgatgttggtcacctggctggggcagtgtttgtcagatttccccaatgtgaagtacactttttcctgtctatattgtctagactctagaatgctagactctagaaagtctagacactttttcatatctagactccttgggagagcctagacctaaggagtggagatttgcgatactacatcttcagggaacaatatctatagaaataacttgggattcttttgcaaactgagatttgttgctttccatttcccttacttatntattgaattcttcctttaatcagaacagatattggatattcattgtatagattaatactcttttattttactgttcaaatttgtttggcactttgggcattaggagttcttctagttggaatttgtatttgacatccctccatatcttagttctttcagggttctgttacaaattgccatagactgagtggcttataaacaacagaaatttatttctcatacttttggaagctcagaagtctaagggtgccaacatagttgggttct

SEQ ID NO: 83404 - DNA, 671 bp, Homo sapiens
agggatgatgcaataacttctgcctccaaggagctcatagtttagtggacatctggcaaagtactcactgattcttgacaattcatataatcatatcaatagatgcaaaaaagcatttgacaaaatccaaattccatccttgatttaaaaaaaaaaattcttrgaaaactaggactagaggcaaactttctcaacttgataaaaaatatctacaaaaaaaatctacagggagaatctagaggctttcccctaagataggtaacaaggcaaggatgttctcttttaccactcctattcaacatcttatacaacttctgactaattcagtaacaaaaggcatacagttgaaaaggaaaaaataaaactgccttgcttctcagatgacataaatgtctatataaaatatctcaaagaataaacaaaaacaattagccacttaatctataaaataaaagatttagaaaagggctatgggcaatatggatcttttgcaggtacaaaattttttaagtccataaactttctccttcaaacaccgaagacctggaacttagctgggcgtggtggctcacacctgtaatcccagcaccttgggaggctgaggcatgcggatcacttgaggtcaggagtttgagaccagcctgaccaagatggtgaagtgccatctctac

SEQ ID NO: 83405 - DNA, 548 bp, Homo sapiens
ctgagcaagggagttttccttagcctcataaaagagaaatattttgtgaaggaaaagtaggactcatgccactttatggaaagacctgtgttacacaaattcacatgaaagacacattctaggggaaatgtgaaaagccaccaaaagtagaagcagacagatgtagtgtgaatccacctgtcctacctgtatgagctcaggaaattaaatcttctaagcccccttaattttttttttttttttgagacagagtctcgytctttcacccaggccggagtgtagtggcactatcttggctcactgcaagctctgcctccttggttcacgccattctcctgcctcagcctcccaagtagctgggactacaggcacccaccaccacgcccagctaattttttgtatttttagtagagatggggtttcaccgtgttagccaggatggtctcgatctcctgacctcgtgatccaccctcctcagcctcccaaagtgctgggattacaggcgtgagccaccgcacccagccctaagccccctttaaaaacagaaa

SEQ ID NO: 83406 - DNA, 1442 bp, Homo sapiens
tgtatagaataggtgcttaggatatgtttactgaatggaatggaactaaagcctcaggtgtaacttcatggagacacgcgtctgccttgtagaatgttacaggctgcctgttcctgaagctgaaacccttaagagtgagaagtcatttgggcctccttcaaaactctccacccttcttagaatcaggaatatttttaaamgtactttctagaattatctagcaatctctcttatatttaaatatttttgggtttaccacctatgaaggcttttctggagtttcactccacccagaattcatcatctctccttatcaggaaatctctcaccctcagatgcttagagtcagggtgagtccccccacaacaggagaatcggccgaggttgggccgaggccacatggtctcatccacatgtgccgcagattaagggatgctcaaactgcccagtaatacaaagtctgcacttgtcatttttttccaactttgtgtacaaaatgtttccctgggttaaaatagtcaatgcccactgtgtgctgagcacgtggggggctgcaggctcctttgggtgaggcatggtcacctgcacgctgcggggagaggatgaagaatgagacacaaacaagtgtggctggcccttgtgctgcagagaagctggcccttgcctcaggtggcagagcagggaagtgcagtgggcctgaagccatgcggggctgggagggatgacctggtctgtcctctgagccaggcactgcacttggaacgggcttcttgaacgcaaagcccagaccaagtgtggcagaaacatgaaaggacaggcaggcggctgctgtgggcaggaggcaggatgcctggaagcaggacgcccaggcctgtccccacccccgtgacccagagcctccctgggcagtgactccgggatgtccaggagcttcttctctacctcacaggactggaggggctgtggtgagacgcatcctgtgagggctgggctggccacaggcagctccccagggtgcccaccgccatctgctcctcactgcaaataggcctctgtgggcggccgccccagtctccagaaatagtcacaagacatcggctctcacggtgttggtgtttagggaaagaagcatggagagtttggcccctccatggaagctcgtggctgaaataggtgcagagcccattttattaacgtttgttaagacggctcttttagataaacgggtgtatcaggttttgctttgcttccctgggctgctttgctgcctgcaggacaggccaggtggatagggctctggccggcctgctgagctgtcctgtgggcactgcgcagggctacagggatggtgacctgtctcagcgccatcagaggctgtgctgagtggcactcacagcactcgtgttcacctcctgggcctggggctctcagcacgctcagga

SEQ ID NO: 83407 - DNA, 604 bp, Homo sapiens
aaaacaaggggaaagaggcaaccaccattcactgggcatcccaaagccagaccctgggcagtgatgttcacaactccaggagctcacacacaaccttcttgggaagagatactaatatgttcccatttccttgtgaggaatagsggctcagagtggtttaaaaacttatgagattatagaaccagcagcatctccacactggcccagaaacgaggtctgtctgatgccaaagtccaaatgcaggttacggtgccaattagtttctgatcactctgctaagaggagctttgcattcctgtgaagagtgagagaggtcagcctgggatgcctctgggggtatcagagcaacaggatcagacgcaggtcctggactgagcctgcagctaagagaaggccacaggcggggtctgggggtgcaggccagtccccatcagactctcagtgattgtggccactggggttaagggccagagtgtgaccttccgtggtcagaatggggctctcctaagtggactgaaagacaaaccctagatcttcaggtgggtccttctgaatctctggtgccacagaaggaaaactgagcactgcagccccatggggatgg

SEQ ID NO: 83408 - DNA, 1123 bp, Homo sapiens
tctcatcagacaccggatctgccggcgccttgagctgggacttcccctgctgtgtgaggacaaccagaggaggccgtcggagaaccgggaaggggctctcatcagacaccggatctgccagtgccttgagctgggacttcccaggctctggaatggtgagaaatacatgtttgttgcctaagcccccggtgtgtggtatttctgttgaagcaggctgaacagactcaaacacctaggaatgcttacaattagtcaaacgagcaactcggaatattgttgtaacctccactgtggaggaaggctctgtgctgcccactggaaggaagaggccagcggctttggggataccccagatgacgaggtcctttctagaggccaaacagcagcggggctcaggctcaagccctgggagggagacaggagctcctcatgatcccctcttctaggaagcgcgggaggaaggaaagaccatgtgtcagcaaggcagggtctcgctttggggaggagctcacaagaggccattaaggctccaaagttccagacaagcaccattaccgtggtttctgcttgtcagcagatcccaggaacaggcagctcctgggaggctgcgtgagtgctcaggagtatactacacaacagacaccacctgggcatgacgcttacatggaaagcaccctggatgcttggcagggggatgatgcaaaggaacagctccaacctccagtggaaaattaatacaagccactgaatgaggcgctggggattagggtcttcacacgcgaaatcctgctccctgttcccactttcattccagctggtcagctacgtccacccattcccttcgacatcccacagcaaacacgcagaccagaatatcccccatcggtttgtctaatatccaccactagagacactataaattcctacacatttcccacaaaayagacctgtgattagcaacatcacacctcacaggctcttagtgaatggactttccccgtgtggcaaagcgtgacatgatttaaacaaagtccctgatcgctagaaacagatgtttgtaatgtgcgcagcaggcagagcctgaagtaaaaggctgtgagtgagtctataaggtggaccagct

SEQ ID NO: 83409 - DNA, 624 bp, Homo sapiens
tgtgtttaagacaggacctgctccagggataatcgtcataactccttcagcaggcacactgcctttggtgtcaaaatatgtttttaggaacacttaatttatataatattgacaaataggctataaccgtcactgagaactgtgtgttttaaattaacatgccatataaacagcttactatacaatatttgaacaagttcaaatgtgagtacttattggtcacattttatgtgtgatacacactttcagtaaaatcaggtattccccatagaaaaataatgatggaatttttatagttttaactacttactaatcacattgcatatttcataaccagcgaagagttttatgttacagagaataaaacatgtgggacataagggatgttttttcccctttattctcagaagtttaaccaattctgggcagcttcaagaggatcactctgtgaacagtatgctgytgtgaaataaaacacagcagtatttttttgatcctaaaagtgtaaacatcttctattttagaatccatatcaacatttcaaaagcatgtttttgagcaattcaggaagaacttgttgaataaaaggataacagacgaggcaacaaattgccaaagaaaatt

SEQ ID NO: 83410 - DNA, 1351 bp, Homo sapiens
cacacagaagcctgcatccaggttcctacatagaaacctctgcctgcacaggtgtctcctcacctcctgaacatttctgacattgattyttgctccatttccaccaccacacactgggacactcatggatctggccaggatgcctcccaataagagtcctgtgtccagccttgactctctctaatctctactactggagagagtgttccaacatacacgtgagatcttgtcacccctttcctccttaaataataaaaacaaatatagaaaccacttaatgtttctttatagcttaaaaggtaaaatttttaaaaagtctttcatgatctgaaatttgtggaaaactctggtcacatctctcctcatcccccatccatcccttcactctccccacacccatgcaacatctcagctgtgtgcctgctgaccccttgaattctctgagcaaattgacaggctgctctcttttccccttcagatctcagcctgaaacactgtctgcaacctggatgattccttctcctgctgtgtctctcagctcagcacccctcaatgaagaagttctctttaaaccaacctctctgctttcccctgccttccgaagttttcatctcgctcaccctgcattccttttcagggtcctccatgtgagcacacagcattccttttctctagaggattcagcagtaaggtgccatcttggaagcagagagcagctctcgccagactgagtagccctcggtctactctttgcttctaaggtggaagcatgctggcaccttgaacttggacatcccagcctctagcactgtgagaaaatgaactttagttctttataaattaccctatctcaggtcttctgttatgggagccccttaaggactaagacactcagtgatgcattttaatgtagatttcttttttcactctgtgctaaaatgccggtagtgtctattatcaggacacttctcctttagttctgggaactttcatttctttgaaagttgggatatcaggagtcttttttatgactcctgtaagaaattaccacaatcttggtgacttaaaacaatagaaatttatgatcttacatttgaagaggccaaaaattcaagatcaaggcattagtagggctatactcctcctggaggctgtgggggatgctccgtctctcaactcttgtagtttgtgtggctcctggtgtccctcatggcgacactgcttcaatctctccccacatcttcacatggccttctaatctgtgtcttacaagtgtccctctgccttcctcttataaagtcagttatggtgccacatagcccaccacataatccagaataatctcctcact

SEQ ID NO: 83411 - DNA, 1351 bp, Homo sapiens
cacacagaagcctgcatccaggttcctacatagaaacctctgcctgcacaggtgtctcctcacctcctgaacatttctgacattgattcttgctccatttccaccaccacacactgggacactcatggatctggccaggatgcctcccaataagagtcctgtgtycagccttgactctctctaatctctactactggagagagtgttccaacatacacgtgagatcttgtcacccctttcctccttaaataataaaaacaaatatagaaaccacttaatgtttctttatagcttaaaaggtaaaatttttaaaaagtctttcatgatctgaaatttgtggaaaactctggtcacatctctcctcatcccccatccatcccttcactctccccacacccatgcaacatctcagctgtgtgcctgctgaccccttgaattctctgagcaaattgacaggctgctctcttttccccttcagatctcagcctgaaacactgtctgcaacctggatgattccttctcctgctgtgtctctcagctcagcacccctcaatgaagaagttctctttaaaccaacctctctgctttcccctgccttccgaagttttcatctcgctcaccctgcattccttttcagggtcctccatgtgagcacacagcattccttttctctagaggattcagcagtaaggtgccatcttggaagcagagagcagctctcgccagactgagtagccctcggtctactctttgcttctaaggtggaagcatgctggcaccttgaacttggacatcccagcctctagcactgtgagaaaatgaactttagttctttataaattaccctatctcaggtcttctgttatgggagccccttaaggactaagacactcagtgatgcattttaatgtagatttcttttttcactctgtgctaaaatgccggtagtgtctattatcaggacacttctcctttagttctgggaactttcatttctttgaaagttgggatatcaggagtcttttttatgactcctgtaagaaattaccacaatcttggtgacttaaaacaatagaaatttatgatcttacatttgaagaggccaaaaattcaagatcaaggcattagtagggctatactcctcctggaggctgtgggggatgctccgtctctcaactcttgtagtttgtgtggctcctggtgtccctcatggcgacactgcttcaatctctccccacatcttcacatggccttctaatctgtgtcttacaagtgtccctctgccttcctcttataaagtcagttatggtgccacatagcccaccacataatccagaataatctcctcact

SEQ ID NO: 83412 - DNA, 1351 bp, Homo sapiens
cacacagaagcctgcatccaggttcctacatagaaacctctgcctgcacaggtgtctcctcacctcctgaacatttctgacattgattcttgctccatttccaccaccacacactgggacactcatggatctggccaggatgcctcccaataagagtcctgtgtccagccttgactctctctaatctctactactggagagagtgttccaacatacacgtgagatcttgtcacccctttcctccttaaataataaaaacaaatatagaaaccacttaatgtttctttatagcttaaaaggtaaaatttttaaaaagtctttcatgatctgaaatttgtggaaaactctggtsacatctctcctcatcccccatccatcccttcactctccccacacccatgcaacatctcagctgtgtgcctgctgaccccttgaattctctgagcaaattgacaggctgctctcttttccccttcagatctcagcctgaaacactgtctgcaacctggatgattccttctcctgctgtgtctctcagctcagcacccctcaatgaagaagttctctttaaaccaacctctctgctttcccctgccttccgaagttttcatctcgctcaccctgcattccttttcagggtcctccatgtgagcacacagcattccttttctctagaggattcagcagtaaggtgccatcttggaagcagagagcagctctcgccagactgagtagccctcggtctactctttgcttctaaggtggaagcatgctggcaccttgaacttggacatcccagcctctagcactgtgagaaaatgaactttagttctttataaattaccctatctcaggtcttctgttatgggagccccttaaggactaagacactcagtgatgcattttaatgtagatttcttttttcactctgtgctaaaatgccggtagtgtctattatcaggacacttctcctttagttctgggaactttcatttctttgaaagttgggatatcaggagtcttttttatgactcctgtaagaaattaccacaatcttggtgacttaaaacaatagaaatttatgatcttacatttgaagaggccaaaaattcaagatcaaggcattagtagggctatactcctcctggaggctgtgggggatgctccgtctctcaactcttgtagtttgtgtggctcctggtgtccctcatggcgacactgcttcaatctctccccacatcttcacatggccttctaatctgtgtcttacaagtgtccctctgccttcctcttataaagtcagttatggtgccacatagcccaccacataatccagaataatctcctcact

SEQ ID NO: 83413 - DNA, 1351 bp, Homo sapiens
cacacagaagcctgcatccaggttcctacatagaaacctctgcctgcacaggtgtctcctcacctcctgaacatttctgacattgattcttgctccatttccaccaccacacactgggacactcatggatctggccaggatgcctcccaataagagtcctgtgtccagccttgactctctctaatctctactactggagagagtgttccaacatacacgtgagatcttgtcacccctttcctccttaaataataaaaacaaatatagaaaccacttaatgtttctttatagcttaaaaggtaaaatttttaaaaagtctttcatgatctgaaatttgtggaaaactctggtcacatctctcctcatcccccatccatcccttcactctccccacacccatgcaacatctcagctgtrtgcctgctgaccccttgaattctctgagcaaattgacaggctgctctcttttccccttcagatctcagcctgaaacactgtctgcaacctggatgattccttctcctgctgtgtctctcagctcagcacccctcaatgaagaagttctctttaaaccaacctctctgctttcccctgccttccgaagttttcatctcgctcaccctgcattccttttcagggtcctccatgtgagcacacagcattccttttctctagaggattcagcagtaaggtgccatcttggaagcagagagcagctctcgccagactgagtagccctcggtctactctttgcttctaaggtggaagcatgctggcaccttgaacttggacatcccagcctctagcactgtgagaaaatgaactttagttctttataaattaccctatctcaggtcttctgttatgggagccccttaaggactaagacactcagtgatgcattttaatgtagatttcttttttcactctgtgctaaaatgccggtagtgtctattatcaggacacttctcctttagttctgggaactttcatttctttgaaagttgggatatcaggagtcttttttatgactcctgtaagaaattaccacaatcttggtgacttaaaacaatagaaatttatgatcttacatttgaagaggccaaaaattcaagatcaaggcattagtagggctatactcctcctggaggctgtgggggatgctccgtctctcaactcttgtagtttgtgtggctcctggtgtccctcatggcgacactgcttcaatctctccccacatcttcacatggccttctaatctgtgtcttacaagtgtccctctgccttcctcttataaagtcagttatggtgccacatagcccaccacataatccagaataatctcctcact

SEQ ID NO: 83414 - DNA, 1351 bp, Homo sapiens
cacacagaagcctgcatccaggttcctacatagaaacctctgcctgcacaggtgtctcctcacctcctgaacatttctgacattgattcttgctccatttccaccaccacacactgggacactcatggatctggccaggatgcctcccaataagagtcctgtgtccagccttgactctctctaatctctactactggagagagtgttccaacatacacgtgagatcttgtcacccctttcctccttaaataataaaaacaaatatagaaaccacttaatgtttctttatagcttaaaaggtaaaatttttaaaaagtctttcatgatctgaaatttgtggaaaactctggtcacatctctcctcatcccccatccatcccttcactctccccacacccatgcaacatctcagctgtgtgcctgctgaccccttgaattctctgagcaaattgacaggctgctctcttttccccttcagatctcagcctgaaacactgtctgcaacctggatgattccttctcctgctgtgtctctcagctcagcacccctcaatgaagaagttctctttaaaccaacctctctgctttcccctgccttccgaagttttcatctcgctcaccctgcattccttttcagggtcctccatgtgagcacacagcattccttttctctagaggattcagcagtaaggtgccatcttggaagcagagagcagctctcgccagactgagtagccctcggtctactctttgcttctaaggtggaagcatgctggcaccttgaacttggacatcccagcctctagcactgtgagaaaatgaactttagttctttataaattaccctatctcaggtcttctgttatgggagccccttaaggactaagacactcagtgatgcattttaatgtagatttcttttttcactctgtgctaaaatgccggtagygtctattatcaggacacttctcctttagttctgggaactttcatttctttgaaagttgggatatcaggagtcttttttatgactcctgtaagaaattaccacaatcttggtgacttaaaacaatagaaatttatgatcttacatttgaagaggccaaaaattcaagatcaaggcattagtagggctatactcctcctggaggctgtgggggatgctccgtctctcaactcttgtagtttgtgtggctcctggtgtccctcatggcgacactgcttcaatctctccccacatcttcacatggccttctaatctgtgtcttacaagtgtccctctgccttcctcttataaagtcagttatggtgccacatagcccaccacataatccagaataatctcctcact

SEQ ID NO: 83415 - DNA, 1351 bp, Homo sapiens
cacacagaagcctgcatccaggttcctacatagaaacctctgcctgcacaggtgtctcctcacctcctgaacatttctgacattgattcttgctccatttccaccaccacacactgggacactcatggatctggccaggatgcctcccaataagagtcctgtgtccagccttgactctctctaatctctactactggagagagtgttccaacatacacgtgagatcttgtcacccctttcctccttaaataataaaaacaaatatagaaaccacttaatgtttctttatagcttaaaaggtaaaatttttaaaaagtctttcatgatctgaaatttgtggaaaactctggtcacatctctcctcatcccccatccatcccttcactctccccacacccatgcaacatctcagctgtgtgcctgctgaccccttgaattctctgagcaaattgacaggctgctctcttttccccttcagatctcagcctgaaacactgtctgcaacctggatgattccttctcctgctgtgtctctcagctcagcacccctcaatgaagaagttctctttaaaccaacctctctgctttcccctgccttccgaagttttcatctcgctcaccctgcattccttttcagggtcctccatgtgagcacacagcattccttttctctagaggattcagcagtaaggtgccatcttggaagcagagagcagctctcgccagactgagtagccctcggtctactctttgcttctaaggtggaagcatgctggcaccttgaacttggacatcccagcctctagcactgtgagaaaatgaactttagttctttataaattaccctatctcaggtcttctgttatgggagccccttaaggactaagacactcagtgatgcattttaatgtagatttcttttttcactctgtgctaaaatgccggtagtgtctattatcaggacacttctcctttagttctgggaactttcatttctttgaaagttgggatatcaggagtcttttttatgactcctgtaagaaattaccacaatcttggtgrcttaaaacaatagaaatttatgatcttacatttgaagaggccaaaaattcaagatcaaggcattagtagggctatactcctcctggaggctgtgggggatgctccgtctctcaactcttgtagtttgtgtggctcctggtgtccctcatggcgacactgcttcaatctctccccacatcttcacatggccttctaatctgtgtcttacaagtgtccctctgccttcctcttataaagtcagttatggtgccacatagcccaccacataatccagaataatctcctcact

SEQ ID NO: 83416 - DNA, 751 bp, Homo sapiens
tgaaactctggggcaatggtggatttgtcactgctgctgtgataccctgaacttatctacttcagcatataccatttatgcacaagcagtttgtcattttgatcatttctgcgggttaggctgaaatttgtctttctgttacctatgtttacagtgcttactgttggaaaaaattgaaagctttggaagttcatcacaaaagataaattccaaaagccaaaagtttctggatagtgtgacagtccctcagcaaatttattttattttatggtctgagagaaagcaamtgtgttgtgacggccgttaccttgaacctactaaactctcacctgtgcgggaagagtcccgtggtggagctgactttgacagaggcctggaggaagcacccgcaggaacaggtgtgaagggtcaaaggccgtgtgccctgtggtgttggcctatgtctttctcccaactaattttgggtaggaaaggaaagcatattatattggacaaagttaaattgtattatatttctgagtctttagcctataacacacagaaagtcacacctattatatttccatcatcaccataataaattaccccagacgtagcatttaaaatagcataaatttgtcatcttaccattttgtaggtcaaggttcaacacggggatggctggactaagatcaaggtgttgcagactgtgtttgctcctttctggatgatctgggggagaatccatcccctcgacttttccagcatctag

SEQ ID NO: 83417 - DNA, 751 bp, Homo sapiens
tgaaactctggggcaatggtggatttgtcactgctgctgtgataccctgaacttatctacttcagcatataccatttatgcacaagcagtttgtcattttgatcatttctgcgggttaggctgaaatttgtctttctgttacctatgtttacagtgcttactgttggaaaaaattgaaagctttggaagttcatcacaaaagataaattccaaaagccaaaagtttctggatagtgtgacagtccctcagcaaatttattttattttatggtctgagagaaagcaactgtgttgtgacggccgtkaccttgaacctactaaactctcacctgtgcgggaagagtcccgtggtggagctgactttgacagaggcctggaggaagcacccgcaggaacaggtgtgaagggtcaaaggccgtgtgccctgtggtgttggcctatgtctttctcccaactaattttgggtaggaaaggaaagcatattatattggacaaagttaaattgtattatatttctgagtctttagcctataacacacagaaagtcacacctattatatttccatcatcaccataataaattaccccagacgtagcatttaaaatagcataaatttgtcatcttaccattttgtaggtcaaggttcaacacggggatggctggactaagatcaaggtgttgcagactgtgtttgctcctttctggatgatctgggggagaatccatcccctcgacttttccagcatctag

SEQ ID NO: 83418 - DNA, 751 bp, Homo sapiens
tgaaactctggggcaatggtggatttgtcactgctgctgtgataccctgaacttatctacttcagcatataccatttatgcacaagcagtttgtcattttgatcatttctgcgggttaggctgaaatttgtctttctgttacctatgtttacagtgcttactgttggaaaaaattgaaagctttggaagttcatcacaaaagataaattccaaaagccaaaagtttctggatagtgtgacagtccctcagcaaatttattttattttatggtctgagagaaagcaactgtgttgtgacggccgttrccttgaacctactaaactctcacctgtgcgggaagagtcccgtggtggagctgactttgacagaggcctggaggaagcacccgcaggaacaggtgtgaagggtcaaaggccgtgtgccctgtggtgttggcctatgtctttctcccaactaattttgggtaggaaaggaaagcatattatattggacaaagttaaattgtattatatttctgagtctttagcctataacacacagaaagtcacacctattatatttccatcatcaccataataaattaccccagacgtagcatttaaaatagcataaatttgtcatcttaccattttgtaggtcaaggttcaacacggggatggctggactaagatcaaggtgttgcagactgtgtttgctcctttctggatgatctgggggagaatccatcccctcgacttttccagcatctag

SEQ ID NO: 83419 - DNA, 751 bp, Homo sapiens
tgaaactctggggcaatggtggatttgtcactgctgctgtgataccctgaacttatctacttcagcatataccatttatgcacaagcagtttgtcattttgatcatttctgcgggttaggctgaaatttgtctttctgttacctatgtttacagtgcttactgttggaaaaaattgaaagctttggaagttcatcacaaaagataaattccaaaagccaaaagtttctggatagtgtgacagtccctcagcaaatttattttattttatggtctgagagaaagcaactgtgttgtgacggccgttaccttgaacctactaaacyctcacctgtgcgggaagagtcccgtggtggagctgactttgacagaggcctggaggaagcacccgcaggaacaggtgtgaagggtcaaaggccgtgtgccctgtggtgttggcctatgtctttctcccaactaattttgggtaggaaaggaaagcatattatattggacaaagttaaattgtattatatttctgagtctttagcctataacacacagaaagtcacacctattatatttccatcatcaccataataaattaccccagacgtagcatttaaaatagcataaatttgtcatcttaccattttgtaggtcaaggttcaacacggggatggctggactaagatcaaggtgttgcagactgtgtttgctcctttctggatgatctgggggagaatccatcccctcgacttttccagcatctag

SEQ ID NO: 83420 - DNA, 1234 bp, Homo sapiens
agaattacattcagttccattagctttaacaattcctctgttctgtactccactgcttctcttcaaactccttggagtttattcaaactctttcagaagtttctagcagtagagttatatttcaagtactttgaccccctgaccctggtcagacggagtgctgccagtctacaaaggaattttgaggaacaaatttctttagctgatcaattcaacttaaatatgagacttctgttcaattgacttttccacagaagtgttttctttttttcttttttttgtaaagaaaaaaaattccctctaaacagaaaagagtctgaagttcccatttgtgggactggggagctttctaaacacaagactttctttttccatagcacttcagaaaatgtcaaaaaaatgttggtaaattactcttaaaaatcattgtttcattatcactctgtatgtctataatgtatttattttttctctgcccatattattcttagctactaccaattttaatatagtatttgttctatctaattgttttggtagcgtttcagttaaaaaacaatgatctttaatgatattacttgcttttggtgtatccatrtcattttttaaaagttgacatcacataatcatggaaataaagaataaatgtaacatgcataaagagctatttttacttgtatgtgattgtcagaacagatgcaaggtgatttttttttttacatgtgatttcaaaatttaaatctttcttaaaaaatgccccttcaaatatattagtttttaatcttaatctgtttaaatattagacttcctggtttatatattcactgaaagtggcttggattaacaacatttattcttggtttttggaaaaaaagacataatttcttaattttgtatatccaaaaacatgagatgggaaacagcatttatagtaaatgtttacgtgcataaccttgcttgaccttcaaaacaacccattgaaatattatcattatttacaggttgagaagctgaaggtcagaaggctctcattctgcaaatattgattaatatttacagggcctatgggaagaggtgttcaatggggctgtttggtccaacctgcaggcttaagagggatgttcattttggctgctattcagtggagattttgttcacggaaacagggtctgtccttgtttctgatgccagcttcaacctagaattactcttctatctttctcaaaaagccaca

SEQ ID NO: 83421 - DNA, 2305 bp, Homo sapiens
ccttttcatcttctggaggggaaaaaataatctacgtgggcgacaatcagagcttgcctcttttcagccatttaaaaggaaaatggggctgggtgtggtggctcatgcctgtaatcctagcactttgggaggctgaggtgggagaactccagctcagaaattcgagaccagcttgggcaacatagtgagatgagaccctgtctctctattaaaaaaaaataaaaataaaaataaagggaaagtgagtcagcccagtagctcacatgtgtaatcccagcactgagaggccgaggcagaaagatggcttgagcctagtagtttgagaccagcctgggcaacatagtgagacctccgtctctacttaaaaaaaaaaaattagccaagtatggtggagtgcatctgtagtcctagctactcaggaagctgaggtgggagaatcacttgagcccaggagttcaaggctgcagtgagctatgatcgtgccactgcactccagcctgggcaacaagcaagatcctgcctttaaaaattaattaattaattaattaatggaaagcgtggcttcgcggctctgtcctgaatcctattcacgcatgctggtcccatctcagtccagaggaccccagaatattacacttgtagcatcttgggtcataatggacaccaatgcagccacatggataccaaaagcacagactataggcattccatattttctttagtgtcctctttcagggaaacctgaggaaggttctggaagcaggaggatcccaaaatgtgcctgagagacccctgtcttcatcccagaggcctccttagacatcagcatttggggaaaaaactgtggacatttgctgcagcctccccagctggtcagcattattaaagtggggcacatctgttcttggctgttagcacggagaagaggagggggtcgagtgagaggagaaatccccaaacgcttggactgatcccacctagtactaagagcaaattgcctctaagttggcatcacggagaagtgcttcatgaaggggcagagattcctcatcaaaataccccttcttacccacttccctcctgccgcccttccccctcctctctctgtctaaaactccccaggttctagccagtcttgagatttatgacctgttttattttgtgaaccccctaagatcgtatttgggtgatgaggagctgagaggtctgcagatagcctgttggttggaaaagggagtataaagtataatgaatgcagtatatttcccagttgctctttcatgcacatacataaagttataaatgcccccgagcgtgtggcaagcacatagcggcctttgaaacacacacagcaatatgctcagagacagcaccccccccccccagacccatgcacagcgaggcatcacacgcttgcaaacacatgcaaaagacccacaggcgtacaggagcatattcatgcacaagcagacccataccaacatacaaaactagaaacagatgcaaaccaacatccaacatcagacccagatggggctatgcaccccaatatgcacccccctactgctgcggcccctccaaaaagttgaaatgcacagtgctggaaggatccttttagctccctcttcaatttcccttgcaatatgaatgtcttccaaattgcagccctgggacctacaaactgcactccattctgctttcttttctttttctttttcttttttttttttgagacagactctcgctctgttgcccaggctggagtgcagtggcatgatctcagctcaccgcaagctccgcctcctgggttcagccattctcctgcctcagcctccctagtagcagggactacaggcgcccgccaccatscccagctaattttttgtatttttagtagaggcggggtttcaccctgttagccaagatggtctcgatctcctgacctcgtgatccgcccgcctcccaaagtgctgggattacaggcgtgagccactgcgcccggcatttttttttttttttttttttgagacagagtctccctctgtcaccaggctggagtgcagtggtgtgatcttggctcgctgcaacctccgactccctggttcaattgattctcctgcctcagcctcccgagtagctggggttacaggcacgcaccaccacgcccagctaatttgtgtatttttagtagagacgaggtttcaccatgttggccaggatggtctagatttcctgacatcatgatccccccgtctcagcctcccaaagttctgggattacaggcgtgagccaccgcgcctggcct

SEQ ID NO: 83422 - DNA, 677 bp, Homo sapiens
ggtagtaaatcttattaactcttccctttagtgtctcgccattctcaaaaacttttacaaaaagcagcaacaccgccctcaccaaagacagatgaaaggagcggtttcaaagcccctctcccccctgccccagcaggcccccagattggtctgatgatgtcacaggggtaaccacggcaacaggccgtgacatcatgacaaaaggaggactgrccttggcctggaattcaaagcaaaagcagctcataaacttctaaagcaagcaggagataaatatccttagtcataaaagaacaaacgaagtttggggtggggggacgggggaaaaaaaagcagaacttttttttttttttgaaatacagtaaaatgtgttgccaagtttttcaggaagtgctagtggccattttgatgatgtgaactagattttaaaacagaaagaggaaaaatgaatgtggtggacaagggctgctgacaatattagatagaatcaggtgaaacttttccctaaactataatttgtaaaatgggggagaggggatgagccagacgaaagcaaaacaacagacaaattcatttctgagtgagagaaggaattacatggcaggagaaagggagtaatccaggaactgtatttatcaaaaagagaatgtgctcaaggcaacatagtactccggatg

SEQ ID NO: 83423 - DNA, 677 bp, Homo sapiens
ggtagtaaatcttattaactcttccctttagtgtctcgccattctcaaaaacttttacaaaaagcagcaacaccgccctcaccaaagacagatgaaaggagcggtttcaaagcccctctcccccctgccccagcaggcccccagattggtctgatgatgtcacaggggtaaccacggcaacaggccgtgacatcatgacaaaaggaggactgaccttggcctggaattcaaagcaaaagcagctcataaacttctaaagcaagcaggagataaatatccttagtcataaaagaacaaacgaagtttggggtggggggacgggggaaaaaaaagcagaacttttttttttttttgaaatacagtaaaatgtgttgccaagtttttcaggaagtgctagtggccattttgatgatgtgaactagattttaaaacagaaagaggaaaaatgaatgtggtggacaagggctgctgacaatattagatagaatcaggtgaaacttttccctaaactataatttgtaaaatgggggagaggggatgagccagacsaaagcaaaacaacagacaaattcatttctgagtgagagaaggaattacatggcaggagaaagggagtaatccaggaactgtatttatcaaaaagagaatgtgctcaaggcaacatagtactccggatg

SEQ ID NO: 83424 - DNA, 677 bp, Homo sapiens
ggtagtaaatcttattaactcttccctttagtgtctcgccattctcaaaaacttttacaaaaagcagcaacaccgccctcaccaaagacagatgaaaggagcggtttcaaagcccctctcccccctgccccagcaggcccccagattggtctgatgatgtcacaggggtaaccacggcaacaggccgtgacatcatgacaaaaggaggactgaccttggcctggaattcaaagcaaaagcagctcataaacttctaaagcaagcaggagataaatatccttagtcataaaagaacaaacgaagtttggggtggggggacgggggaaaaaaaagcagaacttttttttttttttgaaatacagtaaaatgtgttgccaagtttttcaggaagtgctagtggccattttgatgatgtgaactagattttaaaacagaaagaggaaaaatgaatgtggtggacaagggctgctgacaatattagatagaatcaggtgaaacttttccctaaactataatttgtaaaatgggggagaggggatgagccagacgaaagcaaaacaacagacaaattcatttctgagtgagagaaggaattacatgscaggagaaagggagtaatccaggaactgtatttatcaaaaagagaatgtgctcaaggcaacatagtactccggatg

SEQ ID NO: 83425 - DNA, 996 bp, Homo sapiens
tgcacacacacacacacatcataacacagcagcataaaaggtaataaaaaccagaccagctactcaggatttctggctaggggagaaaagctggtctctactaggattctcctcccaggatcccaaatggcttttgccttaaatttttagctggttccttttgaatgtgacttcttgatccttcttccccaaggggaagaagatgaaccttaaaacagacaggacaaagcccaagagkgggggaggagtgggtggcatcaatgacagcagttctaggagtttctctgtggcaaaattagtatggcgtttttttgctcagcattgttcctacctagtcaaggtgtttttctgtctcctcgaggtgtcattgtcctttccccccaaatgctccacaaatcacaaaagacaactcaagactctcgtctccactctcttgtaactttctcatcctgacttaaagcagcttttaaggggaaggcaaaatatcaccattaaaaaggaaagccccttgagtttaccttatcattctggtatgcagtcacagcgatgaattcagtttcggggaacaagtatgtccgaaatgtactataagggagtttcaagatgtcattggctcttacaatgtggaaccggggctggtatttgtgcatggagttcaatatagtctgcaggggcagggaagaggagacatacataaaacaaggatttagcagaacaaacgggatcttaggacccctgccaggctgaaatcttccccaccgcagggtaccacgcttgtaccgagcccacctccttggagtaccccctgggtacgtttcgctccacagatgttatcttctggagaatccaaattgctcctcagttgccaaagggccccccccaccctcaccatctaaggatcattcataccttgaaccctagcctacctgagtaccaaaactataattcccctgccacgtagcgtgatcacttgggaaggccaaagtcttaaaagat

SEQ ID NO: 83426 - DNA, 886 bp, Homo sapiens
atgacagcaagagcctcatctytaaagttttttaaaatacaaaaactaggccaggtgcagtggctcacacctgtaatcccagcactttgaaaagccaaagtgggtagatcacgaggtcaggagttcaagaccagcctgaccaacatggtgaaaccccgtctctattaaaaatacaaaaattagccagacgtggtggcacacacctgtaatcccagctactcaggaggcggaagcaggagaatcgcttgaacccgggaggtggaggttcagtgagccgagatcgcaccactgcactccagcctgggcggcagagctagactctatatcaaaaaaaaaaaaacagctaactaaaaaaacccaagttaatcttttctcagtttcctttgcctttttcctttctcccactgattttgcctgattgtttttcctatttcaatatggttaaaaaaaaattacagaggagaaaagaacagttttttcaataagctgctaggacaactggaccaacagcaaaagaataaagctggaccccctactttacatcatatacaaaaattgactcaaaatggatcaaagtcctaaatataagaattaaaactataaaactcagaataacacataggcggggcagggaaaaaataataataaaataaataaattttaaaaattagcacataggcattaatctctgtgacctttaacaatggtttcttagatatgacaccaaaagcacaaccaaccaaaggaaaatagataaactggactgcatcaaaatgaaaggtttttgtgcttcaaaggataccaaaaagaaagtaaaaagacaagccacataatgggagcataaattcacaagtcattatctgataagggtctaatatgtagaatg

SEQ ID NO: 83427 - DNA, 1309 bp, Homo sapiens
gcatggggcccacagttgccttcagaagctagccatgagggggctggtgagcaagcagacactggccttcctgtcctcaacaaagctactgtcccccagtgggggctttgctcagctggctgctgcctgtccttggattacacaggcataaatgctctggcctcttgggcttctggacagattctagtgggcctcaaagggcttaatactgaaaaagctaaggcagtagtccatttrtaagggggtaggggaaagtctttggacatactttaaaagcagcacacttttggtgcttttaaaatgcagtgcagctgaagggtatttgtgtgtgtggtgtgtgtgtgtctgtgcatgcgtgtgtgtatgttgcaggaagtttcagttaagagtgccagaccctgggagggagcactagatgagctgctccaatttcattctgcatccaggaccaaagagtgagctgtgaaggagctaaccttaaattcataggatttgtacacagattcaaggatcactcctcattgtgtgatctcaagatgtcccagattagaatgcagagttcttaggactactgacctggcagtaagaggtagtagaaacagcctctatgagcaaagacagaaaaagccagatcagaaaagaatatgattgctgtgtaacttggcggtgcctacgttcagttcaatattggggtgctagtgaaggaagatgtgtgctccaatggaaaactatgaaactatgtcacatctagactagcacaatacacccttcatggttatctaatttctattctatgggagctattttctaactctgtaagtaggaaaataactgatgccaatcaaaataattactttctttgtattttgaaatttttttgaagtgaaattttttctggtggaggaacaatactccctcatcctctcactaccccatgcccatgcagaagccagttttgcatccaaatgagcattcacatcaacatttcttagtccataaaaatttgtacttctatgacttctcctttgaaccagttgcctggtttctccacttaattaatgggttacataacatctttaacatgtgctcattttctatctatatgagagtcatgattttgcttctttttaaaatatctttgaacactagaaacatgggattcaaaggacaaagaacaatttaggaagttttgaatatactggatgggaaagaaaggcacctcaaataagactgggaatgcccctaggtcagctctctggactttgctcaaagcagcagtatcttaaatgctcttttctgagaggtgaca

SEQ ID NO: 83428 - DNA, 539 bp, Homo sapiens
gcacgattttatattaaatccaattgaagaaatggaaaataagcaaagtaagcaaatgataagtgtcgtggagaaaaacataaaaaacacacaaagctaggccatatttaagggttaaaatgttaaataagaaggccactttatgagtcaaattatatatatatatatatatatatatatatatatatatatagtctcactttaagaacaaacaaaaaacaatgagattagtagttttattaacataagggtacatagattcacaaaagttagacaacttacccaagattaaatggcaggtaaatggcgaggctggaatttgaatccagattgctctggcttcaaagttcaccataccaaattttttcacmatactacatttttataagtgtaaattttgctagagttagagttcattctttaaaatgcaaacacaattatgaactaaaaagttatggatatgttataaatacatgtggcagaaaataagcattcttttctactatctctgagcacctcttctgaagcagaacattgta

SEQ ID NO: 83429 - DNA, 1181 bp, Homo sapiens
ttgaagccctcttacacagcactgcactgctcccgatctctatcctcatccactcttcataggagctgaaacaagaagccagagcatccccttttttgaacgcaactgggaatgggagcctcactggaaaccagtgagtgactcaaatttttcatcactttgtgcatgtctgcaaatgactgcaaatgtgctgtattgatttaggtgttacaaatatattttagctagtaagtgaatttgcaaatacagaatctgagtaatgaggaggaactgtacacaaatatgtgctaaaacaaaggtctggcttgggggttagatggtggattagagtcttactcctgtttcacaatccccactctctatccctctctctgtataatgtatgcacataaacttgtgtaagtatattatctataattgtatatagattgtgtatattatacatatttgtgtttgtgtgagtgtgtattagagagaagcaattctttgaagtccagtcacagtatttatattttaccattttaaaaccaaggtggctgtcatcctgccagggctgaggaatgtaaaggcggtgtaaaatgagcccgcctcaggttcaagaatcctcctttctggtaagataacaaatattgggattattcacatttaaaaataatttaaaaaattcacaggatatccagaagttgaagaaccttgccttgcaaatttcacttttaagagcctgatatagttagaattttgtcaataatattctggagtacgtttcattatctattgaggtaactttcaaaatcggacaaccaataaagtggttctaagtattttgaaataagaaagtgttccttcagtatttttatttttttgagatggagtcttkctctgttgcccatgctggagtgcagtggcacgatcttggctcactgcaacctccatctcctgggttcaagcaattctcctgcctcagcctcctgagtagctgggactacaggcgtgcaccaccacacctggctactgtttgtatttttagtagagacagtttcaccatgttggtcaggctggtctcaaactcctgacctcaggcaatctgcccgccttggcctcccaaagtgctgggattacaggcatgagccactgcgccaggtctccttcaatcttttttatgtatttgtagaatattttta

SEQ ID NO: 83430 - DNA, 1181 bp, Homo sapiens
ttgaagccctcttacacagcactgcactgctcccgatctctatcctcatccactcttcataggagctgaaacaagaagccagagcatccccttttttgaacgcaactgggaatgggagcctcactggaaaccagtgagtgactcaaatttttcatcactttgtgcatgtctgcaaatgactgcaaatgtgctgtattgatttaggtgttacaaatatattttagctagtaagtgaatttgcaaatacagaatctgagtaatgaggaggaactgtacacaaatatgtgctaaaacaaaggtctggcttgggggttagatggtggattagagtcttactcctgtttcacaatccccactctctatccctctctctgtataatgtatgcacataaacttgtgtaagtatattatctataattgtatatagattgtgtatattatacatatttgtgtttgtgtgagtgtgtattagagagaagcaattctttgaagtccagtcacagtatttatattttaccattttaaaaccaaggtggctgtcatcctgccagggctgaggaatgtaaaggcggtgtaaaatgagcccgcctcaggttcaagaatcctcctttctggtaagataacaaatattgggattattcacatttaaaaataatttaaaaaattcacaggatatccagaagttgaagaaccttgccttgcaaatttcacttttaagagcctgatatagttagaattttgtcaataatattctggagtacgtttcattatctattgaggtaactttcaaaatcggacaaccaataaagtggttctaagtattttgaaataagaaagtgttccttcagtatttttatttttttgagatggagtcttgctctgttgcccatgctggagtgcagtggcaygatcttggctcactgcaacctccatctcctgggttcaagcaattctcctgcctcagcctcctgagtagctgggactacaggcgtgcaccaccacacctggctactgtttgtatttttagtagagacagtttcaccatgttggtcaggctggtctcaaactcctgacctcaggcaatctgcccgccttggcctcccaaagtgctgggattacaggcatgagccactgcgccaggtctccttcaatcttttttatgtatttgtagaatattttta

SEQ ID NO: 83431 - DNA, 1181 bp, Homo sapiens
ttgaagccctcttacacagcactgcactgctcccgatctctatcctcatccactcttcataggagctgaaacaagaagccagagcatccccttttttgaacgcaactgggaatgggagcctcactggaaaccagtgagtgactcaaatttttcatcactttgtgcatgtctgcaaatgactgcaaatgtgctgtattgatttaggtgttacaaatatattttagctagtaagtgaatttgcaaatacagaatctgagtaatgaggaggaactgtacacaaatatgtgctaaaacaaaggtctggcttgggggttagatggtggattagagtcttactcctgtttcacaatccccactctctatccctctctctgtataatgtatgcacataaacttgtgtaagtatattatctataattgtatatagattgtgtatattatacatatttgtgtttgtgtgagtgtgtattagagagaagcaattctttgaagtccagtcacagtatttatattttaccattttaaaaccaaggtggctgtcatcctgccagggctgaggaatgtaaaggcggtgtaaaatgagcccgcctcaggttcaagaatcctcctttctggtaagataacaaatattgggattattcacatttaaaaataatttaaaaaattcacaggatatccagaagttgaagaaccttgccttgcaaatttcacttttaagagcctgatatagttagaattttgtcaataatattctggagtacgtttcattatctattgaggtaactttcaaaatcggacaaccaataaagtggttctaagtattttgaaataagaaagtgttccttcagtatttttatttttttgagatggagtcttgctctgttgcccatgctggagtgcagtggcacgatcttggctcactgcaacctccatctcctgggttcaagcaattctcctgcctcagcctcctgagtagctgggactacaggcgtgcaccaccacacctggctactgtttgtatttttagtagagacagtttcaccatgttggtcaggctggtctcaaactcctgacctcaggcaatctgcccgccttggcctcccaaagtgctgggattacaggcatgrgccactgcgccaggtctccttcaatcttttttatgtatttgtagaatattttta

SEQ ID NO: 83432 - DNA, 960 bp, Homo sapiens
gaatgamaaaaaataaaataagttgaaaaagaatttaaaaaccatagtaaaaacaataaaccggtgaataatataaaagcaataaaccagtgaatctgaaaaggctttaacaattggctgataaataaatccttcctaacttatatcttatgacaagtctaatttttaaaaacacatttgtatataggaaatgggatataactacactcagatattatgaaaaatattattctagtaattcagaaatttctggacaaggaaaatttgcattatcaaagttgtttttaaaagggttaatatgagtaggttaaaaacaattaaaaattgataacaatttttaaaataatgctcaccaaaaattattgcatatagatagtttgcaggcaagtttttaaataaaccttttaaagaaagagttaattttcatgatactaaaccatttttagaggtcgtaatgtaacatgacatttttaacttactttatgaaactttctttaccctgatgacaaggttcaataacaaatatgccccacccttatcattcatttttttcttaaggacagagtctcgctctattgcccaggctctggagtgatgcaatggcaccatcgtggctcactgcagccttgacctctccagtagctgggactataggcacgcacctcccaaagcgctggggttacaggtgtgagccaccacccatggcctcatttcttactctggtaaattatgctgtctcctattcagctgaccaagcttcacatgttggcatcattcttgattcctcttgctggttcatcacataatattaatcacaaagtctcaagaattctaccttctaaatgcctctagaattagttcatttctctccatccttattgtcctccaggataggccattgccatcttgcattctggtacattaaatagtgtataattcatgacattataggagtgcttg

SEQ ID NO: 83433 - DNA, 2300 bp, Homo sapiens
taacttaataaatatgaagtgttgggaactagctaaaacccctctcttttatcttcttttctctttggtttcaccaatctctttaaaccactgttagaagaatgggtgaaagtataaaaacttttcatgaccacaagaaactctctcccaagcaatagccataccaacagttaggcagaaatacttgtgaagctaacaagaattttttcaagccacacaaatctttatttcttatgtcatgaaagtacaatgaatccttataattgctgatgtctactacatttctaattttctagaaatcagattaattcttagtgcagctagcagtttctgttgtagaaaacagaggacatccaataaaacttttttttgaaacagaagcacaaggcttagaactaaatattttagtaatttttaaaaatgaacataggtgaatgcaagctttgtggtgctggaagtgtatacaatttgggggacaccatttaggaaatttactagttcaaaattagatataaaagtgaatatgtaattagagtataaaaaataaaaacaaattacagagtacaaaaaaatcacaaaaacaatcgacaaaatatttttattaaataactacctcttatattgctggtcacatactttggtacctgcgacatgacaggctctctgctacggccttggaatagctcaggttcacctttgcttcctacaatcttttcagaggtctttttcaccttgagagtctatcacgtaacagacaccaagacacatttgtagaataaaagtcatctaagaaataaattaaaattttaaaaatgatttctgctcttctacgcaccctcacacttcataaattcatgagttcatcaaagccaaaaagaataaggaatataaccaaagcattgcaaattggattaataagtgacattttatatgatacagagaagaatttttctgcactgggaaaacaaaacttaatgaagacatattatttaacccatttacaggaatttagtttctgaaggaaaaagagatgcaaaatggaaaatggttgcatgatctcctttacaataaagctgtttgcattctaaaaacgtgagtggggtcagagcctctatccttagcatgggaaatcctagaaacaaatgtcagatgaagcaattagatgccatgatataggctctttccagaaggaagttattgaaacagaatgttcaagtgtgaataactaagttaaagtgtggtcaggccagctggaatgcatgtagggaaagtttacgcaggctgtctgaaaagcaaccaggagaaagtcaaaggcaagtttagttgaaacagaagaggcaaaggaagcaggtgaggcatagaaagggaggtgtaactgtgtaatcctaaaagcagaaaggtctgtcctggcagatctgtatcttgtaacaagccaacatcttctggaatagttttaaatcaactgagagttggggaagtccagtcctggaactgtagatgttgtacagtctgtagtccaaaaatacttctggccagtacttcctctttgcagttcattactgttttaagtcattgcccttcctttcccgacttcccatgctagcctaacatatagatctcactcagtgttgtcaatgttttctccctttatgttcagctaactgtttgcctgggactgtttgcctggaactgcaagggtttctgagatgtaggccttccagttttwaaaataggacagttccagtcaaacagagatgaattgataaccttaacgccaggccaaattatcttgcacctcacctctgatttcatgatggattagtgataggggccagctcatgctcagagtactaaatttccaacccaatacaccattcattacagtttgttcttattatgatggtcaatcccctttcttagatggtattaacctaatcaatgtgctggaatttattttcacatgtacatttgcaatgtatagacaaagtcctctgttggtaacacaaatgtattcctttatgaaagaatttgggatgattatatagagatttttgttttcatttcacagttacactatgtttataatatttttgtgtgtgtgtgtgtgtgtgcaaattacagtgctcatactggggcagaataaaatttagactcccaaaacaaaaattctcagtctgataacccctcaattttcttggagtggcactactatggaaattgagccattgagctactgagaaaagccattctctggctgtaaagcaaagtagatcttgtgaaacgcataaattaacatttgg

SEQ ID NO: 83434 - DNA, 793 bp, Homo sapiens
cctctcttttttcctctccatacctgtacttcttcctctctgctgatggcacactgaaatgagatgtgtgcatccctggaacagaagctctgttaagatctttttgctctctgttttcctcatattcctagtagctaatactgagtcaggcatatgatgttttcaataaatatttgttcaactgaattaaaatgaactgaattgaatcagattaaataaacttaaatacacgattggagctatagagatttttattttgataaaaaggagagttggcgtttttttctggtgaagagggggtgtggtttctaaaggttgataaatacctgagctcaaatctttctaacttctcaatacctttcctctgtaaaggaattcattttctggttttgccttgatctttytacttataagagttagcttaagacagatggccaaacagcctatggtcactcagggtttttacgcctgctgtttcataactgaccttctttgaatcttaaggatattttctgcttttaaatggcaatctttctatagaaagataatctataatttgttccgtaccttacaggacattttcctattcacaacatccttttctcagaatgtttctcttcatttatgaagagaagtttttcttttcctttctaaacactgaattaataaacattggtagaaactttgaaagataaagaaatgtaattaaataatgattacacataattccaatatccagagatgaccactgataacattttgtttcaatttgctttctatttattttctatgc

SEQ ID NO: 83435 - DNA, 793 bp, Homo sapiens
cctctcttttttcctctccatacctgtacttcttcctctctgctgatggcacactgaaatgagatgtgtgcatccctggaacagaagctctgttaagatctttttgctctctgttttcctcatattcctagtagctaatactgagtcaggcatatgatgttttcaataaatatttgttcaactgaattaaaatgaactgaattgaatcagattaaataaacttaaatacacgattggagctatagagatttttattttgataaaaaggagagttggcgtttttttctggtgaagagggggtgtggtttctaaaggttgataaatacctgagctcaaatctttctaacttctcaatacctttcctctgtaaaggaattcattttctggttttgccttgatctttctacttataagagttagcttaagacagatggccaaacagcctatggtcactcagggtttttacgcctgctgtttcataactgaccttctttsaatcttaaggatattttctgcttttaaatggcaatctttctatagaaagataatctataatttgttccgtaccttacaggacattttcctattcacaacatccttttctcagaatgtttctcttcatttatgaagagaagtttttcttttcctttctaaacactgaattaataaacattggtagaaactttgaaagataaagaaatgtaattaaataatgattacacataattccaatatccagagatgaccactgataacattttgtttcaatttgctttctatttattttctatgc

SEQ ID NO: 83436 - DNA, 810 bp, Homo sapiens
tcttcttgtctgccctcacattgtcctcataaggaagcaatctgcccatagcagtgggatatgagaccctttcagactctaagagtctggagtttgaagtgaccactttgcttgatcattagaaaggcagccaaaaatccttatcaaaaactgctgcctgaagttcccatcactagaagctcttctgcaggagttgtttccagagacacttattgacatgtaaacgtatgacatgggttttggtgttttactgctttcactccactatcagcttatctgtacccactcaggctgagtgagtgtcaggagacaggtagctgttgcgtaggggagacagktgttgacttaaccctcaccctctcccacgtagtttctgagttctgagtttgcctgagaacaggacagaaatgtgacgagaggatggggaaggaaggacgtgctgatttctcgagagaggcaaggcagcctacatgagtcctgggctgcaggaggctctaggaaccctggggcctgagactgaggtccagggagaccctaattcctgcaccccacccctcctggttccctccagatgggaggcatggaggctgtcatcacgggcctggcagatgacttccaggtcctgaagcgacaccggaaactcttcacatttggcgtcaccttcagcactttccttctcgccctgttctgcataaccaaggtgagtaggggctgggctctgggtcacctgggggcctctgaggccgcatttcaataaagtcaaacattcctagccttagaactggggctgagctcagggagaacaatgca

SEQ ID NO: 83437 - DNA, 310 bp, Homo sapiens
gggaccgcaggtgtgcaccaccacgcccagctaatgtttgtaattttagtagagacagggtttcaccttgttgggcagactggtctggaactcctgacctcaggggattcgctcaccttggcctcccaaagtgctgggattacaggcgtgagccactgcgacyggcaaaacttttaagatttttaaggctcagaaagctatcctggcccaccctaatgtcaactgtgcaacttcctcctaagggtacggctcacttaaatgagagaaaaagaagaggagtgtgaggccaggtgcggtggcttacgcctgt

SEQ ID NO: 83438 - DNA, 580 bp, Homo sapiens
cctcgcttctgcccttgtgcctcatgatctcttttggccaacaacagccaggagcatttcaccaccacccccaccacattttcttatgagaatcttcataatgaaaagttaaaagaatttcacagttaaaagccatatagccgccacctataattagattctacaattaacattttgctatacagacagtccccaacttatgacggtttgacttacaattttgaccttactatgggtttatcggggcattgaatgcattttcaacttatgttattttcaatttatgatgggattactaggatgtaacaccattgcaagtcaaggggcatctatacttgctagaataatctcttaaagttataaatcaggtcttgtcgcttccgtatttaaaaccagccaatcactcccatcacactcagagtaaagttaaagtctttccaggctgggtgcagtggttcacgcctgtaatcccagcactttgggaggccaaggtgggcggatcacttgaggccaggagtttgagaccagcctggccaacatggcgaaacyccgtctctactaaaaatacaaaaactagcca

SEQ ID NO: 83439 - DNA, 1323 bp, Homo sapiens
gaggatcccctgcccctggcacccagctgtggaggggacactgtctttgaggcatcactggttccacaaaaggtaggggaaggtcttgagggaccaccccatgccctcattaatcaaccagaagcttggccyggagcagcagcggggattccagtagctgtgggcatacaggatgctagggcggccacaacccaggcagctgaggccgagccacctaggaacgcaggctcagagcagaccctcttgggacagacggagaaggggagggggcgggcttctctaagttaagccgatcactgagcacctcactggacacgagagaaggcaagcccctcggaggacagaagggaagagccacagacttggaggctgtgaaagtggagacaggtggacctggggtggcagcaatgcgtgaaatgccaggccgtgcccccgccccaggagcccaacatgacaccagcccccagggaagctgactgtgccacttcatccagcgcccatcagtcgccttggagcatcaggaatcctgagggctggggtcccggaggatcacagatgctggggcacctcaacctcagggagccgctcgagaagtttcttttctgaagtgtccacctccttctggtcaccggctggagctgggacaggtacatcgtctggaaatggagggagggaatggtggcacaggacatccgaacccctcctcccccaggaccccagaggcccagcccctcctccctcacacccaggggtccagcccccagcccctcctccctcacacccaggggtccagcccccagcccctcctcactcacacccaggggtcccagcccctcctccctcacacccaggggtcccagcccccagcccctcctccctcagacccaggagtccggacccccagtccctcttccctcagatctgggagtctgggcccccagtccctcttccctcagatctgggagtccaggcccagcccctccaacctcagacccaggggtccagccctgcagcccctcctccctggactagggccagcacctgtgtctgggtggaacttgagctgcccctcagggtgggcagccggggccttgtggccttgctgctgctgctgctgctgcttccgctgctccatgtgcagcacagcctgtgggaggtggggggtcacacagacaagagggtgtgatgctggcattgcaagtgctcaggcctcagtccccaaacggagacttcacagcagcctgctaagtggtcacggccaaccccttctccgtgggcctcagtttctctctttcattgacagtcgggcttaataatagtcaa

SEQ ID NO: 83440 - DNA, 1430 bp, Homo sapiens
tgctttccatttagcccgctccaggccttcagcatctgcttgtccagtttcaattagaagctggctgttgaataactcaataaaataccatacccttgccagcttctgtgcctcctcatttggaggaagggccccgacatgccttcttttgcaccaccttaataaccaacactgaccgggcaaggtggctcacgcctgtaatcccaacactttggcaggctgaagctggtgcatcacctgaagtcaggagatcgagaccagcctggccaacatgtgaaaccccgtctctactaaaagtacaaaaattagctgggcgtggtggcaggcacctgtaatcccagctattcaggagactgaggcagaagaaacacttgaatctgggagccggaggctgcagtgagctgagatagctccacttcactccagctagactctgtctcaaaaaaaaaaaaaaaaaaaaaatgccgggcgcggtggctcacacctggaatcccaacactttaggaggtcgaggcggaaggatcacttgaggtcaggagttcgagaccagcctcgccgatatggcaaaccccgtctctactaaaaatacaaaaattagctgggcatggtggcgcatgcctgtaatcccagctactccggtggccgaggcacgagaattgcttgaatctgggaagcggaggttgcagtgacccgatcgtgccactgcactccagcctgggcaacagaatgcgactctatccccccaccaaaaaaaggaattttcacactacatctgaagaatcaggagcaactagctgagcaagaggcctcagggttgggatcctcaggcagcaggtagcactcatacaaaggtttttaattaggtggaattaggcttggttgccttggggaaatgaaaggattatatggcaggagtgggggtctcaaactcctgacctcgagttagagatcagcctgaccaacaaggtgaaaccccgtctctactaaaaatacaaaaattagccctgtgtggtggcgggcccctataatcccaactattcaggagactgaggcagragaatcacttgaactcgggaggcggaggttgcagggagccaagatcctgccattgcactccagcctgggcgacagagcaagactctgcctcaaaataaacaaacaaaacaaacaaacaaacaaaaacctgacctcaagtgatccatctacctcggccacccaaagtgctaggatttctagtttaactaagctgcttttgtaaagctaatgaaaggccattaggttaggaggatgagaggagcctgcattctgtgaaggtctagaggtagattaatacaaaaattagccctgcgtggtagcgcacgcatataatcccaggtactagggaggccgaggcaggagaattgcttgaacccagggggttgtagtgagcc

SEQ ID NO: 83441 - DNA, 840 bp, Homo sapiens
tttcaccacgggggttgtttcctcccctctcagagggctatctacaggggctttgggaaaatttgtcaaagaaggggttgaggaggaatagggtgagaatttttatttgcttaatgaggtgttttggcaccatgaaatcctctgagataacactcctttcttggataaagaaatatactcttgttgtatatcccagcctcttgtcagatggctctcaggagtttacttctaaattttagtgaatatactctacattgcagcagtatttgctgaggctgaatgaaagatgaacaaatcttagattggaataaatgtaagatattaagacactctgtgaagaaaatgaacattctttccattacagagtataaaaatgacagaatttcctatcaacactagagctgccttgggtaacctgtgttcatagacagaggtcagtaggaatacctggtggtccagagttggtcgaaaggtagagtgttttaaattagaaactttttacctaaatccaatgcctatacaacctatcagacccctggagattgccstgaaagatgggtcagaagaggatgcaactgaggatattcatgccccacaaaataatcaggttgtctgttgaaacacatatcaccagattctcactttcaaactagattcctggcaggtgtgtgcacagagaaaacattagggaagtatagcattgtataggtaaagaaggctttgaccccaaactccatctgttttctattttagcagcctaagatggttcaggtgtgagcctagaggtagatgtttgcccacatagtgttaaaaaagactagattcatagagctaatatgc

SEQ ID NO: 83442 - DNA, 666 bp, Homo sapiens
gttccctggtacctgcttctgggctaggctggaccagttcacctgactttggctttaaaggttctatacagttgaggcaaaattattagttgaatatcactgctctgagatttagttacccttctttttcctccatccagaaaatcttttcatggggcgcgaatatgggcagactcatgatttacatggacacacgtgaaggttgcctacttttgacacgtgttgttccttggtctccagagctgacttgcgtgatcattgctgaaggggtgggcaaggaggggtccttgctctacaggagccatccacagataggtggcacctccaagggaagataaagagggttgtatttttcttacagaatcccccaaattttaatttgaaataatgttttttaatttgaaataatgtggggattttttgcccttgagtatggcacttggcatgtygatagtaccggaatgtattctctcatccccaatattgccttgtttttccctagccacctctttccttaagacatgaatttcatacaacaaaaaagtcattgctagttaaagtattttccaaattttacatgatgataacccctactcatgacatcatgatggatatctattaagttatgacatataacatcgaattaaaagcatggcctctggatcc

SEQ ID NO: 83443 - DNA, 666 bp, Homo sapiens
gttccctggtacctgcttctgggctaggctggaccagttcacctgactttggctttaaaggttctatacagttgaggcaaaattattagttgaatatcactgctctgagatttagttacccttctttttcctccatccagaaaatcttttcatggggcgcgaatatgggcagactcatgatttacatggacacacgtgaaggttgcctacttttgacacgtgttgttccttggtctccagagctgacttgcgtgatcattgctgaaggggtgggcaaggaggggtccttgctctacaggagccatccacagataggtggcacctccaagggaagataaagagggttgtatttttcttacagaatcccccaaattttaatttgaaataatgttttttaatttgaaataatgtggggattttttgcccttgagtatggcacttggcatgttgatagtaccggaatgtattctctcatccccaatattgccttgtttttcccyagccacctctttccttaagacatgaatttcatacaacaaaaaagtcattgctagttaaagtattttccaaattttacatgatgataacccctactcatgacatcatgatggatatctattaagttatgacatataacatcgaattaaaagcatggcctctggatcc

SEQ ID NO: 83444 - DNA, 729 bp, Homo sapiens
ccaacacaacagctttaaagaatgcaaagtaccactacaggccaagatgtaataagagagactggatttaactttctgcacgaaacaagtaaaaacccagacaaaatatatgttggcacaatttttatgacattagactctagttaatgaaaggtagtaacctcctagagatgggaaataatctgaaagcctaaaataacctacagtcacagtccagaaagagagaaaccaggtagatcccagaagactttcagaagtgagacagaggaatctgcaatgatcaaggtggytaaaagtcagagggtagagtaatgaagaatagcttttgcacaaagagaggaactgtggtgatccatatgtggtccctctcgggaatttgggagagtatttaccagcacagacatgtgaacaaaccacccaagaacaggataaaaacaattaaaataatggaacacctaaaataatcagttaaagcacctgacactagtgaaagactgccagccaaattagaacaccgtgtaattcaagagcgattgggaagacgaaatagactgacctggcctagaataaatcctactctgtgactaacaatgcttaataacaagccccaagggaaaatactattttgctgtaacttaactgcattccagaacaaagatgaagaatcctggccaggcacagtggctcacgcctgtaatcccagcactttgggaggccaaggtgagtgta

SEQ ID NO: 83445 - DNA, 729 bp, Homo sapiens
ccaacacaacagctttaaagaatgcaaagtaccactacaggccaagatgtaataagagagactggatttaactttctgcacgaaacaagtaaaaacccagacaaaatatatgttggcacaatttttatgacattagactctagttaatgaaaggtagtaacctcctagagatgggaaataatctgaaagcctaaaataacctacagtcacagtccagaaagagagaaaccaggtagatcccagaagactttcagaagtgagacagaggaatctgcaatgatcaaggtggctaaaagtcagagggtagagtaatgaagaatagcttttgcacaaagagaggaactgtggtgatccwtatgtggtccctctcgggaatttgggagagtatttaccagcacagacatgtgaacaaaccacccaagaacaggataaaaacaattaaaataatggaacacctaaaataatcagttaaagcacctgacactagtgaaagactgccagccaaattagaacaccgtgtaattcaagagcgattgggaagacgaaatagactgacctggcctagaataaatcctactctgtgactaacaatgcttaataacaagccccaagggaaaatactattttgctgtaacttaactgcattccagaacaaagatgaagaatcctggccaggcacagtggctcacgcctgtaatcccagcactttgggaggccaaggtgagtgta

SEQ ID NO: 83446 - DNA, 729 bp, Homo sapiens
ccaacacaacagctttaaagaatgcaaagtaccactacaggccaagatgtaataagagagactggatttaactttctgcacgaaacaagtaaaaacccagacaaaatatatgttggcacaatttttatgacattagactctagttaatgaaaggtagtaacctcctagagatgggaaataatctgaaagcctaaaataacctacagtcacagtccagaaagagagaaaccaggtagatcccagaagactttcagaagtgagacagaggaatctgcaatgatcaaggtggctaaaagtcagagggtagagtaatgaagaatagcttttgcacaaagagaggaactgtggtgatccatatgtggtccctctcgggaatttgggagagtatttaccagcacagacatgtgarcaaaccacccaagaacaggataaaaacaattaaaataatggaacacctaaaataatcagttaaagcacctgacactagtgaaagactgccagccaaattagaacaccgtgtaattcaagagcgattgggaagacgaaatagactgacctggcctagaataaatcctactctgtgactaacaatgcttaataacaagccccaagggaaaatactattttgctgtaacttaactgcattccagaacaaagatgaagaatcctggccaggcacagtggctcacgcctgtaatcccagcactttgggaggccaaggtgagtgta

SEQ ID NO: 83447 - DNA, 546 bp, Homo sapiens
aataatgataaataattctgtgcttttcacagtctacaatataaacatctattcacagcttctctcagcatcattgaaatatcttcttagcactctctcttccaaagcctttttcacctcaggagagcataaatgcctgcacaaaactgtgaacttttggagttgtgaatctccttggtcagttaatcataatgttgcctacasaactgtatgggtcagctgaagttcagaagaaaggtggcaataaaccattggtaaaatttcagatggtacggttagaaagaggtcaactacacaggataatctagaagtgtattgtccctcttacccaatatttagtcagactttcatgcgcgtccgtgtgaagagaccaccaaacaggctttctgtgagcaacatggctgtttatttcacctgggtgcaggcgggctgagtccgaaaagagagtcagtgaagggagataagggtggggccattttataggatttgggtaggtaaaggaaaattacagtcaaaggtggtttgttctctggcaggcaggagtgg

SEQ ID NO: 83448 - DNA, 546 bp, Homo sapiens
aataatgataaataattctgtgcttttcacagtctacaatataaacatctattcacagcttctctcagcatcattgaaatatcttcttagcactctctcttccaaagcctttttcacctcaggagagcataaatgcctgcacaaaactgtgaacttttggagttgtgaatctccttggtcagttaatcataatgttgcctacacaactgtatgggtcagctgaagttcagaagaaaggtggcaataaaccattggtaaaatttcagatggtacggttagaaagaggtcaactacacaggataatctagaagtgtattgtccctcttacccaatatttagtcagactttcatgcgcgtccrtgtgaagagaccaccaaacaggctttctgtgagcaacatggctgtttatttcacctgggtgcaggcgggctgagtccgaaaagagagtcagtgaagggagataagggtggggccattttataggatttgggtaggtaaaggaaaattacagtcaaaggtggtttgttctctggcaggcaggagtgg

SEQ ID NO: 83449 - DNA, 546 bp, Homo sapiens
aataatgataaataattctgtgcttttcacagtctacaatataaacatctattcacagcttctctcagcatcattgaaatatcttcttagcactctctcttccaaagcctttttcacctcaggagagcataaatgcctgcacaaaactgtgaacttttggagttgtgaatctccttggtcagttaatcataatgttgcctacacaactgtatgggtcagctgaagttcagaagaaaggtggcaataaaccattggtaaaatttcagatggtacggttagaaagaggtcaactacacaggataatctagaagtgtattgtccctcttacccaatatttagtcagactttcatgcgcgtccgtgtgaagagaccaccaaacaggctttstgtgagcaacatggctgtttatttcacctgggtgcaggcgggctgagtccgaaaagagagtcagtgaagggagataagggtggggccattttataggatttgggtaggtaaaggaaaattacagtcaaaggtggtttgttctctggcaggcaggagtgg

SEQ ID NO: 83450 - DNA, 546 bp, Homo sapiens
aataatgataaataattctgtgcttttcacagtctacaatataaacatctattcacagcttctctcagcatcattgaaatatcttcttagcactctctcttccaaagcctttttcacctcaggagagcataaatgcctgcacaaaactgtgaacttttggagttgtgaatctccttggtcagttaatcataatgttgcctacacaactgtatgggtcagctgaagttcagaagaaaggtggcaataaaccattggtaaaatttcagatggtacggttagaaagaggtcaactacacaggataatctagaagtgtattgtccctcttacccaatatttagtcagactttcatgcgcgtccgtgtgaagagaccaccaaacaggctttctgtgagcaacatggctgtttatttcacctgggtgcaggcgggctgagtccgaaaagagagtcagtgaagggagataagggtggggccattttataggatttgggtaggtaaaggaaaattacagtcaaaggtggtttgttctctggcrggcaggagtgg

SEQ ID NO: 83451 - DNA, 1034 bp, Homo sapiens
acacatttttatcactcataaagattaatgccaggccatgattaaaatgaagtgtacagccctggaagctcacagaatttawcacacaactcagggacaagtcaatactaatcaagagttatagaagcatcatataatgctagtgccaaaagaaacctagtaaacacagatcagatatagaggaatttgctgttatgattgcatttgacagactacagtcaaaaagctaaagtcaatgatgtgataatcaagttatatatatgtatatttagtttatatatatgtatacacttaggttatatacatatacacacatatataatatttgatatgtgtgtatatatatatatatataacctaaatgaatacattttaaaaattattctagaacttgaccatctcagaaaaccaagaaaagaaggacagcaagaaagaaagagagaaaaagaaaaagaatactttaatatatttgccttattttcagtaatatatacattaaatgaatgaaattataaggtaattttaggcaatataatttatattctatttttcttttctaattttaacttacaatttacaatctctaaaagtaaatagtctataacatgcgtagacatatatgtgaccattagctttcttaaaagatgccatatgtaaatgaataaattgtgcacattggcttttatctataataatcaaaattatagaactggaaacacttttctagaagagaaacttaacatctgaatcaaatggaaaattaaaaacctgtttacctgttgctgtggtgctgggatgcaatcatacagagtttactcctctcagcatcttctatttgttattgattctgttcctacaactgaaagaaaataatagcacatagtgcagtgattggaaaatagtatatattccaaaatatacttgcttttcatgtaaaaatgtataaatgacaacaaataaagggaaggggacactgaacctaacattacatcttctggaatataaatataataaatgtacaaatctttggggga

SEQ ID NO: 83452 - DNA, 2629 bp, Homo sapiens
acaatcccactttaacatttagtattaacatttgaattgaactaccagtagagagtctgtcagctaaaggcatgaaaaagagcttgatatggaacaattcttaattctagaagacactttagaaatagaaggtaaaggccatatttatactgtcaaaatacagccaaagttgagagaaggtgggggatggttaacgggtacaaaagaaacataaataatcaataagatccagtatttgagaatacaacatggtgattatggtcaataaaaattgtacattttaaaataactaaaagagtaggattggatcatttgtaacacaaaggataaatacttgaggggatggataactcattttacacaagtgattgttttgcagtgcatgcctgtatcaaaacatctcacgtaccccataaatatatacagctgctatgtacccataaaaattgaaattaaaaattttaaacattaaaaaatgcagcaaacactccagaaaatattcattttatttggttttcatcccatctagttataaaattagaaatttttgttgcaaacattgtgccaaacacataaaaaatatggccaagttctaataataagccgaggcattgactgaggattcccctatcaacaaattgagtgtctttcagtggcaagaacattcactgagctcctttgtgatgttcacttactgggttatttagtgtacttgcctatacagagtatatttgctacacagaatcagtatagttatgtgcctaaacagaaacagtgtccccactgttccatttaagaaaatcccaattttattcaagacaacaacatatccagttaaaaacaattctcttgcctcccttacagctaagtgtgatsttgtgactcaaatctgagcaaaagaatttaagtgctattgtgaggtgggattctggtgagatacttttaaacaggtgacagacaccgtatggtactattttaaacacatgcataaacacacagagaagtgataaagaagagaaatatttactcctggaaacatagtaactctaaaaagccttagtcaggatattataaacaggtttatggttatacccaacaagtcagtagactacataacgaagctggaaacatttttttcccctcaaaatggtaccataaaacaaatgaatccaaacatatatatttattaagttttacttcaaggttttatttttgcctgtatctttgaagagattccttttactccctgaactcccccaaaaagctggtgcctttaaactcctttaaaataattattacaaaaaagaatcagagttgagttttagaggcccaaatagatactgtatcaaataaaataaataaagcaaacagacaaaacattttcctaggtaacaatatttcctcttttagtgccctattttatttcagcagcccattttatctaactaaaatgaatcaactaccctttagaaccatcgagaactaccaaaaattaaaacaagacaaaacaaaaaaaccaaaccaaaagcatctcagagctgatagggacccttaacactagagatagaaacccatcgccttttttcaaagaatagaaaataaaatgagctaggctcacgcctgtaatcccaacactttgggaggctgaggagggaggatcatttgaggtcaggagatcagcctgggaaacacagcaagatctcatctctacaaaaaaatttaaaaatcagccagatgtggtggcacacatctgtagttccagctacttggaaggctgatacaggaggatcacttgagccagggagttcaaggctgcagtgaggtatgattgtgccactgcattcctgcctaggcaacagagtgagatcttgtctcaaaaaaaaaaaaaaaaagaaaagaaaatgaaattgactcaccatcatatggcatattttgatttttgcgcaagtcacaagttaattactcatcaagaaaacaggaaataatagctgctctgcagtctgcacattcacagagacttaatttctagcttaaaaaagaggctcaatgagtggacataacgtccttctcccccttatacacagagctagacgtccattttcaaactttcagatgtctagatctaaatcatagtaaggtcatacatccatgccatctttactagagaatctttttttagattcaactgacaacttctggtatttgtcttttgtttttgagacagggtctcattccatcatcaggttagagtgcagtggcatgatcacagctcactgcggcatcaacttcctgggctcaggtgatcctcccccgtcagcctccaagtagctgggactataggcgcatgccaccatgcccggctgattttttttgtattgtctgacagggtttcaccatgttgcccaggctggtcttgaacaccgaggctcaagcaatccacccctcttggcctcccaatggtatttatcatttttcttgtgctttccagtaaaatataatgctagatccaaaaataataaacacaaagagtctgaagtagttgagaaccacaggccatttaaaaaattaaaattcattgcttgttgctaatctaatttattttgggtccccaagaaatctcttttaggcc

SEQ ID NO: 83453 - DNA, 606 bp, Homo sapiens
tgactgaatgraaacacacacacacacacacacacacacacacacacatcacacacacatcacacccttctaaaacagaagttttatggagcaacacagtggccagtggcatagatggctggttgttcacaaaattgactcttcttcattagtaataaagtaaagcaaggcacatgcctgctcagctacaaattacatttctcagcctcccttgtcgcaaagtgtgaccatacagctaagtttttgccaacagaaggtggacagaaatgaagtgtgacacttgcaagtctggagaccttaaggccctgagtacatgctccataccctttctcttttcaggaggctggggcacctgcagggctgtgattgagcttcaggtgtacagacagggacaccactgtggagagaggagcagtaagatggatgaatctggcctcttaaaggcttgtggggaaccaatcagaacagctcacctcaggaatgctgcaagggggaattaaacttttattttcctcacgccactgcattttggtgcccctttaatgcagcagcctaacctttatcccaaagcttatatttacctttactacctgcaatgtactttat

SEQ ID NO: 83454 - DNA, 606 bp, Homo sapiens
tgactgaatgaaaacacacacacacacacacacacacacacacacacatcacacacacatcacacccttctaaaacagaagttttatggagcaacacagtggccagtggcatagatggctggttgttcacaaaattgactcttcttcmttagtaataaagtaaagcaaggcacatgcctgctcagctacaaattacatttctcagcctcccttgtcgcaaagtgtgaccatacagctaagtttttgccaacagaaggtggacagaaatgaagtgtgacacttgcaagtctggagaccttaaggccctgagtacatgctccataccctttctcttttcaggaggctggggcacctgcagggctgtgattgagcttcaggtgtacagacagggacaccactgtggagagaggagcagtaagatggatgaatctggcctcttaaaggcttgtggggaaccaatcagaacagctcacctcaggaatgctgcaagggggaattaaacttttattttcctcacgccactgcattttggtgcccctttaatgcagcagcctaacctttatcccaaagcttatatttacctttactacctgcaatgtactttat

SEQ ID NO: 83455 - DNA, 1092 bp, Homo sapiens
accatgacaaatacatgttattgaatctacccagtctgtggtaatttgttgtagcagcctgaaaaaagataggcccctaaaagaatcctggcttctccaggtatgtcaaaagatgatctgaaagggaagcaggggagaaaggcaggctagcaaattacctattttgtaagcaggtaagtttgcaaggtgccactagagacacatatgtcaaacaatgcaatctattctgtttctatttatgctacacagaatataggatcttggttaacaatatggctcaggaactctatcataaatatggctgcataactttttggggggaaggtggcaccagcagaagggaattaagaaatttctatgaactaaataataacacacctaacataatgctatggtgagaagtccaggattgaaatgaaaggatcccagtgctagtcccagttctgccacttaatggccctatgacatgggacaagtcactgctttttcaactttgattcctttatccaataaaacaaaatagttgagccagactaatatatatatatatatatatatatatatatatatatatatatatatatatatatatatatatatttaaagcaaaaagcttaaaagaaattcaggccaggtgcagcggctcacgcctgtaatcccagcactttgggaggcctacrcgggcggatcatgaggtcaggagattgagaccatcctggctaacatggtgaaaccccgtctctactaaaaatacaaaaaattagccgggcacggtggcgggcgcctgtagtcccagctattcaggaggctgaggcaggagaatggtgtgaacccgggaggcagagcttgcagtgagccgagatcacaccactgcactctagcctgtgctgcagagtgaaactctgtctcaaaaaaaaaaaaattcaaacacaggaaataactccaggtagcactgtttaggttgaagtggaactggtggttaaagttcagtccttacagtgggtctctaatacaatcctaaaaagccccagtggttttgtagaaggctatttgaaaagctccctcaattctaatgatttgtatagccctgct

SEQ ID NO: 83456 - DNA, 659 bp, Homo sapiens
aaagaggcctttgagtgaggcgagatgaagaaaattaggttttgagatctttcctgaaactctggttccctgttaacagaaaagtgctgagaccacctgaaaccagttcacaaaatacaaatctccagcgcaacacacgcctgaggctgaaacccacgcctcgacccaggggaggctgcgcagccccctgctcgtggacgctgtgtgtcttcgtgaaccaggagttgggccccaggaacttccaagattccttcttgtccaggtgaggccatatgtgtaaatcagttcgcagcgaaatttggccgacttatttgagggattccttgggtcgctggattctggtgaccccgtcattggcagagggcgagggctctgctgggcattgtggggtcaccgttggggtttcctgggcaacccaagcgcgtagagggggcctgtgggtacattcccgggagaggacgcgaggggccctttggagtcctggaggcggcagcgttgttgtccagcccgacgkttcccgagatgtgggccccgcgctccgagaagaggcctgcgcgggccatggcggccccccggtttggtggcccccggcgcggcggcgcgcagcacgagctgctggagaaggcggccgctgggaaccggggccccctccgcgcggg

SEQ ID NO: 83457 - DNA, 1492 bp, Homo sapiens
cataccccataaggtcagttccaaatttctgtttcatgacttacatagaagaagggccaatttcccccgaggctctaccagagaggtgttcaaatatttagtgtctggtatagcatggctacctactaatcttggtagttcttggccatcaacaacaggatggctgtgatagagtgtcctgagtgaacatgtgctgcaaagccaccaaccagtaggaaaatctcataaacaatagatgcaaaattggcttaaatagattaacgaaatgggaaggagcatgaatgttcattttgctgccgatttagacattttgtttttttgaccttcgtgactgaactgcatcttgacaacaattagaggatgaatcaagacctcgtgttcaggcaaacagccagaagaggtgcttaatacaacacaggagagagatgctgcatttgaaacgatgacccccccgtgccctaatcactgttcctacaaatttaaatgtgatactccatcctggttatggaaacagcaatctaaatggctcgatttttcttcatcagactttgcttaacacagactcattgaagtggaaatctagtttgtacagaattatttacagtttgttggattttttaaaaggacctgtttataagaagacacataatgggctccactgagctggcctctggaatcagaatctcatttcataaaccctctgctaatgtgttctgatctctttacctcattcctctcatcggtcctgcctgttggcctaatttctgaggttatgtcctcacaatgggcattcttttatttttttcagcccggcatctgatgtgtacgtcctactatagaagccaaaatggtcagacatttgccatcccatgtctgggttgctgggatgcagtcatgtgagctgggatgcagtcatgtgatccaggcttgtccaagcagatgctcctacctgagacagtaaagctggagttagcgatggtgagaagcaagggacagagaattcattcctctagcaatgacctctacagtctcaggatagaagtgatattcatggtctccagtgggcagcaggcaggtgccagaagtagtgagtgacctgcgtgtggcagtgatgtttcagctagactaaatcaggcctatctttccctatcccctctcagcatccacgtctcccccttatcttcctctactttttaaaaaggctgcatttgccattttctaatatatcatgttacttactttctaaaatgtttattgcttatggttttccccactggaatgcaagcttcatgggggtgggcgctttgtctgttttgtttgctgacgtatcccaagggcctggcacatggtaggcactccatccatcgttgttagatwaaatatttgttggaaggatgaatgaagttttcctgtggtgtgattttggtgatctggccccctctgttccctcctctttttttctgaatcttattctacggcatccccgtggatc

SEQ ID NO: 83458 - DNA, 700 bp, Homo sapiens
tcttttctataagagatagctcattacacaatgtattctcatttgtctgaacgggattatttcccttaaggcgatggcctcttctgcatctttatgtctctaatgtctagcatgggaactactcaatatatatttcaggttgttgacaatgattgctgctgtctattccatctaggtaagggtttttgcattcaaaaggccctttgccttaagacctaaagaggttttggaacatcagcaagcatccatctcgaggtaaataactggaatcccaatgggctgtgtgtgtgtgtctgtgtgtgtgtgtgtgcgtgctaactggaatcccagtggggtttgtgtgtgtgtgtgtgtgtgctaaatggaatcccaatggggttttgtgtgtgtgtgtgtgtgcgctcatgcctgcatacacatgcgtgcacttctggtacattttgaacaggcatcagattacgttcccacagcccctcttcatcaaaatgaagaccttgtacgtctgaaatacagtttgtgaaagtcaaattgttatccctgtgacatagaacagccgttaaaaatgtatttcactggaatgtcattctaaatgaatatttttaaatagatatccaaaaataagaaaatacagtgattttagtgtaataaaactgatttcacaattgtttcaagaaactcrgaaaataaaacttcaaactgg

SEQ ID NO: 83459 - DNA, 602 bp, Homo sapiens
  misc_feature (1)...(602): n = A,T,C or G
atgggattttttttttcttacatgaaggcaggtctagtctgtctgtaatttgagaagccctgaagagacgccttgcccacaatatttttttttcctctcccaagactactttgtattaaatcccacatctctagaaagcttcagttatacttcagggaaacaaatacctgggaggaagaagagaagttggagagggccartcacttccctgggaagggaaagcccaaaaagagacaagcaacaagcaaaggaaacactgaaaagctttagtgtcaaaaatgagttgagagttttcttcagatttcaatgatgcagcacatgggaatgcactaccacaaagcttggcatgacaagctctactacaaatgtttctgtctttcctccctccttcccagttctccacgtaacagagaacgagactgatgtaggatgccactgaagaccccccaaaacacacacatgtccacatttccaacactaatttggatgtaagctaactcnnnnnnnnnnnnnnnnnnnnnnnnnnnnnnnnnnnnnnnnnnnnnnnnnnnnnnnnnnnnnnnnnnnnnnnnnnnnnnnnnnnnnnnnnnnnnnnnnnnntt

SEQ ID NO: 83460 - DNA, 682 bp, Homo sapiens
ccaacatggcacatgtatacatatgtaactaacctgcaggttgtgcacaggtaccctaaaacttaaagtataattttaaaaaaaagagagaataaactttaaaaaaaaaaaaaaaaaaaaaaaagtgagggatcatttgtgtagccctctgcattttctttcactatattgaccaggctggtcttgaaatcctgggctcaagcaatcttcccacctctgcctcccaaagctctgggattaaaggcatgagcccccatgcctggcctcaccttttgcattttaagaaatgcttttccggccaggcaggatggctcacgcctgtaatcccagcactttgggaggccgaggcaggcakatcatgaggtcagaagatcgagaccatcctggccaacatgggaaaccccatctatactaaaatttcaaaaatcagttgggtgtagtggcgcgtgcctgtaatcccagttactcgggaggctgaggcaggagaacagcttgaaccagggaggcagaggttgcagtgagccaagatctcgctactgcactctaggccggtgacagagtgagactctatctcaaaaaaaaaaaaaaaaaaaaaaaaaaaaaaaaaaaaaaagcattccacatcttcaaatgcaatttgccagaaattctaagtgaagaagtcggactaagatgaaccaat

SEQ ID NO: 83461 - DNA, 621 bp, Homo sapiens
aggtaccgatggtttctggatagaactgtattttcttcttacatgggaacacagattggacccatgtgcagttttattggcatattaaaatagtacctcctagtcagagtttgagccaaaaggagcttaaaagaattctgtggttggccgggcatggtggctaacgcctgtaatccccagcactttgggaggcygaggcggatcaggagatcgagactagcctggccaacatggtgaaaccccgtctctactaaaaatacaaaaaattagctgggcatggtggcaagcgcctgtagtcccagctacttgggaggctaaggcaggagaatcacttgaacccgggaggtggaggttgcagtgagctgagatcgtgccactgcactccagcctggcgatagagtgagactctgtctcaaaaaaaaaaaaaaatctatggttaatataagtacttttaattttgcttgaagatagtgtgatgctatttaaagtagctttgtaggtacagttagttgagtaaacaagctgccttatgtctattagtatattttgtcaagatagtatcacatttcccctcttcagcatgctttttaaaaaaggcagaaaaggattttccatggatcc

SEQ ID NO: 83462 - DNA, 818 bp, Homo sapiens
ggatcccatagtctagctagggagggactgagggagtataaaaatagaaaaataatagaaccatgtataaggtacctaacaggggacaaagaagacatctttgaggcrgggatgcttgagcaagattttgaagacagataaagtgggaaagcaaattgctagcaggaagaaagatatgacaaccacaggcaacagcatgatgtctgttgagaaatacaggtagatagttttggtggggtttaaaatatcagtgggaaaggtgaaaggaaatgaagctggagaaatagacaggaccaagtcaaagattgtcttatatacctagaagcacagcctttattctttaggccagtggttttcaaaatgttgttcctggatcagcatcacttgagaacttgttagaaatatagattcttggccaggcacggtggcttacgtctgtacacccagcactttgggaggccgaggcaggcagatcacaaggtcaggagatcgagaccatcctagctaacatggtgaaaccctgtctctactaaaaatacaaaaaactagctgggtgtggtggcggatgcctgtagtcccagctacttgggaggctgaggcaggagaatggtgtgaacccgggaggcagagcttgcagtgagccaagatcgtgccgctgtattccaacctgggctacagagcaagactccgtctcaaaaaaaaaaaaaaaaagtaatgcagattctccacccctactccagcagctgaatgataaactctggggatatagctgaaaatcctaattttaacaagatctccaagtgattctgatgccacca

SEQ ID NO: 83463 - DNA, 407 bp, Homo sapiens
catagacattcagatggtagccttcayctgaaaaggtgtcaaacactgataatgaaatcacataactgtattggtggtatcagcaataatagttggctaagaagctaattaaccagtattgaaaaacagatgaagtataaagcagtatccacaagcctatatgattaaagcaccatagtattttctttcggttaatttgtctattatcctattatagcatcaacagtcacagagaaggaagaattaaacaatggacattgtcatatctgaaatgagtgttccttatctggacattaggaaggatctgtgggctgtccttttaaaatttaaaatggtaggctggatacagtggctcatgcctataatcccagcactttgggaggccaggacaggaggattgcttgagc

SEQ ID NO: 83464 - DNA, 510 bp, Homo sapiens
acccggcacctcctctccttttctttacccctgaggttcatagattacacccttttctgtctgcccagaacatcccctccacgattctgaattccaactttgtcggaagattgctcccaaatatatcttctccacactcaggmctcaaaaaatacacaccaaagatacggccggcaatctgcaatgacccacaaatcgtccagaacactcccaaccgcctccttcaggtctcttcagagatttccattttctcccaaacaacttaacctgaaagcctctcttccaaatattctcccattgaacgcccacccttccagctcttaaaacccagtgaggggtctcctcaaatcggctgacttctataaaatgcccatacatggtagaaatgacgacttccctagaatctcacccaagcgagattgaccccgttgatcggcatctgttacatgcgcccccaagatgacccccaatgtcctagtttcatatctggtaggaaggcttggatcacca

SEQ ID NO: 83465 - DNA, 1444 bp, Homo sapiens
ggagttcacagagtgcttctcaggtgaggccacagcaaggctgttgccagcatgtagggtgcccttgctcggattagaaagagctcccccgccacccccagtggatggcttagaaagaggtgcccctgtgggcgcggcatggtggctcacgcctgtaatcccagcactggcgggcacctgtaatcccagctactcggtaggccgaggcaggagaatcgcttgaacctgggaggcataggttgcagtgagccgagatcgcaccactgcactccagcctggcgctaagagcaaaactcaatctcaaaaaaaaaaaaaaaaaaaaaaaaaagaggtgcccctgtgggcgggtgcagccccaggacttatggcttggagagttggaaagaggtgccccttcctctgggctggtgcaacccccttggccaggtgtcctctggcccttccttggcctcactccctgctccaccccactcccagccatcgtggagggtgacagctttgaggagatctaccacaaggtgaagcgtgtcatcgaggacctctcaggcccctacatctgggttccagcccgagagagactctgattcctgccctggcttggcctggactcgccctgcctccatcacctgggcccttggtctggactgaattgcccaagcccttggctccccccggcctccctcccaccccttcttatttatttcctttctaactggatccagcctgttggaggggggacactcctctgcatgtatccccgcaccccagaactgggctcctgaacgccaggaacctggggtctgggggggagctgggctccttgttccgagcccttgctccttaggatccccgcccccacctgcccccaatgcacacacagacccaccgggggccacctgccctcccccatcctctcccacacacattccagaagtcagggccccctcgaggagcacccgctgcagggatgcagggccacaggcctccgctctctcctaaggcagggtctggggtcacccctgccctcatcgtaattccccatgttccttgatttctcatttattttttccmctttttttcttctcaaaggtggttttttggggggagaagcaggggactccgcagcgggcccctgccttccacacgcccccaccatttttctttgccggtttgcatgagtggaaggtctaaatgtggctttttttttttttttcctgggaatttttttggggaaaagggagggatgggtctagggagtgggaaatgcgggagggagggtggggggcaggggtcgggggtcgggtgtccgggagccagggaagactggaaatgctgccgccttctgcaatttatttatttttttcttttgagagagtgaaaggaagagacagatacttgaaacttggtgtgtggcctggttatttgggacctgggtgtggaggga

SEQ ID NO: 83466 - DNA, 664 bp, Homo sapiens
ataaatgtctgctattgagtgacagtgtaggcagaataatgcaccccaaaccaaatgtccacatccaacccctggcccgtgatattcacctacatgtaaaagggctttgtggatgtgagtagggttagcgaccctgaaatggaaaggttttcctgaattacccaggtgggaccagtctaaccacagaggcactaaacgttggaggactgttcccagctgtggtcacagagaaacaggatggcagaagaagggtcagagagatgagaacttggtggctctgaagctggaggaaggggccacacaccaaggaacgtgggtgctcctagtggctgaaaaaagaggggactggatcttccctgagagcctccccaaggaacacagagctggcgactccttgattgcagaacttctgacctccagagctgtaagaaaataaacatgcttattttagtggcttgttttaagccactaaatttgcggtagttcattagggaarccatagagtctcgtccagtgacgaactcatgcctcttccccctattctgtggcgagatgcacattctcctggaagacccattctatcatttttgagataggatttttttttctcccacccaggcctttttcagttgcaagttcctaagaccaaactcaaatgtctaaa

SEQ ID NO: 83467 - DNA, 981 bp, Homo sapiens
tttgacaaattctacagagaacataaatgcagtgaacaccaccaagagacatctactcagcctcccttttcttgaaacaggctctcttcaaccatacagttgcagccagggactgccagtaactgtgttcaaacagtgtggaccagcatccacacaccagccaatgacaccaggaaagggtgtttcacctgagtgggaccagagtttcttccctgggaatcgggaggtggagctacgaggttgtaggcttgatttgacttgaaaagaagacttgaacataggagagacgctggtggcattgccaccccgcggactgagaagcgatgagggtcaggtctgaaccgtgagcggagtgtgtggcaaagacacgcaaagraaagtgaagcaagaagccaggcccaggtccagccactccgcacctcctgggtttccacgttgggtccccactctctttctgtgggctctgctgttttttatcagttttgaggaaagtgaatctgcttacattccaagagtaacatttgcccaggaccccaccgccgacaagcagtagagccaagatgggaagcccggcctgtgctcctggcctcctgacccctcagtcgctgtgggggtgggtgggcccttttctgcgctttctacaatttaatgaaaattcagcgaagttcaagcatccgcaagaacactcagcttttcctctagcactacaagtgggagccctctctccattcatcctgctgatttttagatacattttagatgaggtagctgacgtccatatcctccacttgtaaatattgaatatgcagaccttcctcaatctccctccataacagaaacaaacaccacacatccccactactcagtgctgacaactcttcctgctttgtccccccttctgaacagcaagagttcgtaaccagcagcagaacagagcagcagaacatactcttcaagaccctatctttacagcattttacg

SEQ ID NO: 83468 - DNA, 981 bp, Homo sapiens
tttgacaaattctacagagaacataaatgcagtgaacaccaccaagagacatctactcagcctcccttttcttgaaacaggctctcttcaaccatacagttgcagccagggactgccagtaactgtgttcaaacagtgtggaccagcatccacacaccagccaatgacaccaggaaagggtgtttcacctgagtgggaccagagtttcttccctgggaatcgggaggtggagctacgaggttgtaggcttgatttgacttgaaaagaagacttgaacataggagagacgctggtggcattgccaccccgcggactgagaagcgatgagggtcaggtctgaaccgtgagcggagtgtgtggcaaagacacgcaaagaaaagtgaagcaagaagccaggcccaggtccagccactccrcacctcctgggtttccacgttgggtccccactctctttctgtgggctctgctgttttttatcagttttgaggaaagtgaatctgcttacattccaagagtaacatttgcccaggaccccaccgccgacaagcagtagagccaagatgggaagcccggcctgtgctcctggcctcctgacccctcagtcgctgtgggggtgggtgggcccttttctgcgctttctacaatttaatgaaaattcagcgaagttcaagcatccgcaagaacactcagcttttcctctagcactacaagtgggagccctctctccattcatcctgctgatttttagatacattttagatgaggtagctgacgtccatatcctccacttgtaaatattgaatatgcagaccttcctcaatctccctccataacagaaacaaacaccacacatccccactactcagtgctgacaactcttcctgctttgtccccccttctgaacagcaagagttcgtaaccagcagcagaacagagcagcagaacatactcttcaagaccctatctttacagcattttacg

SEQ ID NO: 83469 - DNA, 981 bp, Homo sapiens
tttgacaaattctacagagaacataaatgcagtgaacaccaccaagagacatctactcagcctcccttttcttgaaacaggctctcttcaaccatacagttgcagccagggactgccagtaactgtgttcaaacagtgtggaccagcatccacacaccagccaatgacaccaggaaagggtgtttcacctgagtgggaccagagtttcttccctgggaatcgggaggtggagctacgaggttgtaggcttgatttgacttgaaaagaagacttgaacataggagagacgctggtggcattgccaccccgcggactgagaagcgatgagggtcaggtctgaaccgtgagcggagtgtgtggcaaagacacgcaaagaaaagtgaagcaagaagccaggcccaggtccagccactccgcacctcctgggtttccacgttgggtccccactctctttctgtgggctctgctgttttttatcagttttgaggaaagtgaatctgcttacattccaagagtaacatttgcccaggaccccaccgccgacaagcagtagagccaagatgggaagcccggcctgtgctcctggcctcctgacccctcagtcgctgtgggggtgggtgggcccttttctgcgctttctacaatttaatgaaaattcagcgaagttcaagcatccrcaagaacactcagcttttcctctagcactacaagtgggagccctctctccattcatcctgctgatttttagatacattttagatgaggtagctgacgtccatatcctccacttgtaaatattgaatatgcagaccttcctcaatctccctccataacagaaacaaacaccacacatccccactactcagtgctgacaactcttcctgctttgtccccccttctgaacagcaagagttcgtaaccagcagcagaacagagcagcagaacatactcttcaagaccctatctttacagcattttacg

SEQ ID NO: 83470 - DNA, 981 bp, Homo sapiens
tttgacaaattctacagagaacataaatgcagtgaacaccaccaagagacatctactcagcctcccttttcttgaaacaggctctcttcaaccatacagttgcagccagggactgccagtaactgtgttcaaacagtgtggaccagcatccacacaccagccaatgacaccaggaaagggtgtttcacctgagtgggaccagagtttcttccctgggaatcgggaggtggagctacgaggttgtaggcttgatttgacttgaaaagaagacttgaacataggagagacgctggtggcattgccaccccgcggactgagaagcgatgagggtcaggtctgaaccgtgagcggagtgtgtggcaaagacacgcaaagaaaagtgaagcaagaagccaggcccaggtccagccactccgcacctcctgggtttccacgttgggtccccactctctttctgtgggctctgctgttttttatcagttttgaggaaagtgaatctgcttacattccaagagtaacatttgcccaggaccccaccgccgacaagcagtagagccaagatgggaagcccggcctgtgctcctggcctcctgacccctcagtcgctgtgggggtgggtgggcccttttctgcgctttctacaatttaatgaaaattcagcgaagttcaagcatccgcaagaacactcagcttttcctctagcactacaagtgggagccctctctccattcatcctgctgatttttagatacattttagatgaggtagctgacgtccatatcctccacttgtaaatattgaatatgcagaccttcctcaatctccctccataacagaaacaaacaccacacatccccactactcagtgctgacaactcttcctgctttgtccccccttctgaacagcaagagttcgtaaccagcagcagaacrgagcagcagaacatactcttcaagaccctatctttacagcattttacg

SEQ ID NO: 83471 - DNA, 1882 bp, Homo sapiens
gatccaacagtgtcattttcctaggagtgtccccaattacgacagctcacctcggcagctgaaacttattctttcagatttcaaacgtctccttccctcctccctccagcttggccttcacactcttaataaaacattaaaaaacaccccacactatgctgcctgcacgtgtttcgcgagcttccctgaagtctgaccgtttctctgcatttccatattacagccatctttatccatttgcgtatagaggtgtccgtgcatgaggtctgatttcctgggaagtcagctgtgatgttattgtgttcaaagggaaagacagagaatatttttcactgctgtagaggctctgtgcctgccttttaaacttgaaagatcagtgggttttctgtggaacctgaacacagtattggaaaaagtgtttctgtaagaaaaaaactcattttctttaaagagccctactcattagcttacaggatttaactttctttggggggagggacaaaaaacataaaaatagatcactttattgagcatttgctctgcgccaagcagccttccaagtacttcacacaaatggttttatttaatctcgtaccatctctcctagggctgttgtgaggagtagacgaattaataaacacagagaacttaaagcaatcgagcatgtaatacttgttcaataagcatgagctatttgtgagtgacagtccagtgagataggtaccattatcatgcccattttacagatgaagaaacagaggcaggaaagttctggtatcttgctcaaggtgaagcaatgtgtaagtggttgagtcaaactaaaaaccagctcatagagaaggcaagatatagttcagtcctaaacgatgtttatatctgcacatcctttaagtgtaagatgccagtttgcactccaatctgttatcgttttctgtatttctttctcctccttctgagaaaataatctagaatgtaggataatatctatggcctcaggaatacttcttgatttttctcttctgtttctctgtcttgaaacagcatccccaaagatgctagtggagaatttaaaactatgagctcttggagctgattttaattttgctcgggtagcccaagggttaagttaaagatacagaggctgagttatcacgggcaggagtggatcctcctaagtcactcctgtaagacccttgctgcattcccccttagygctatccggatcacgtattttgacgttggataaggccatttgcataatctcctctgccaatcctcttatagtaaaaatgggcacccagcgcccaagtggttaaggggctgctcccagtcacagctccccttgcaacctcctctttgttcacctggccctgaggtctgccctcctccctcctctgtccctggagagacccacttgcttcctgaggttaaccacagctccaactctcaccatttcaaacacccgcctgtgaccatgacctcatcccaaattctctacagacacctcgatggcaaataatccacactgcactcatctttgcttcccatcacactgcctgtcctctgttggttttctcctgtcttgatgaatgtcactttgccaccaaagtcagaaatggtgtggtcctccctgaccattccttcttgctccctctctacataaaacctaatcctggttctaccttctaaggacctctccatccacctgcttccccctagccccactgctagcaccctcgcgactgctgcaaaaatgcaggttgccacggcctcctcccttgggctcccccacactggccaagtggcttttgctctttgccatgcaaccttgttccccttttgcttggaataaaggtgcagcagtgctgctgtgaagatgaaa

SEQ ID NO: 83472 - DNA, 738 bp, Homo sapiens
ttttctaaaactaaggccgtggggtacagatgctgagaaatctccaaattaatgctgtcaacaattcctttggaaaccctgtactgagctaaagagaatctaaggactagtgatatgtgtttgcctttctttctttctttttttctttctttttctttctttccttccttccttcgttccttccttcactagtgatgtgtttgcctttctccttccttccttccttcactagtgatgtgtttggctgtctttctttctttctccttcyttctttccttccttccttccttctttctttcctcccttccttccttctttccttccttcactagtgatgtgtttgcctgtctttctttctttccttctttccttccttccttcactagtgatgtttgcctgtctttctttctccttgcttctttcctccctccctccctctctccctcccttctttcctttctttttttccccagctttctgacttaaggccttgatgcttctcctaaaactcactgtctgtatgtgagggagggtcagatttcagcttagtagagagagagagagagagagagagaggaagagagagagagagggagaggaagaccttggagcattttgcttggaagctctacagctgctccttgcactgctcactgttaaactcacccagctgcgcccaacccagccacatgtcacaatcccttcacattcgtaaacaagatcagtcatttctgggat

SEQ ID NO: 83473 - DNA, 738 bp, Homo sapiens
ttttctaaaactaaggccgtggggtacagatgctgagaaatctccaaattaatgctgtcaacaattcctttggaaaccctgtactgagctaaagagaatctaaggactagtgatatgtgtttgcctttctttctttctttttttctttctttttctttctttccttccttccttcgttccttccttcactagtgatgtgtttgcctttctccttccttccttccttcactagtgatgtgtttggctgtctttctttctttctccttctttctttccttccttccttccttctttctttcctcccttccttccttctttccttccttcactagtgatgtgtttgcctgtctttctttctttccttctttccttccttccttcactagtgatgtttgcctgtctttctttctccttgcttctttcctccctccctccctctctccctcccttctttcctttctttttttycccagctttctgacttaaggccttgatgcttctcctaaaactcactgtctgtatgtgagggagggtcagatttcagcttagtagagagagagagagagagagagagaggaagagagagagagagggagaggaagaccttggagcattttgcttggaagctctacagctgctccttgcactgctcactgttaaactcacccagctgcgcccaacccagccacatgtcacaatcccttcacattcgtaaacaagatcagtcatttctgggat

SEQ ID NO: 83474 - DNA, 565 bp, Homo sapiens
aaacaaacaaacaaaacacacaaaaacaagcaaaccaaaacacataacaatcaaaaacctctggtcgcatgaagctcaaatttatttgtaggtagacggaaaataaaaataacaagtaagaaaaatatacagtattttataagtctaaaatgcgtggggattaaatgggcagggtgaaatcagacagacgatgtatgggatttgctattttatataggcaggtcagcataggcagcactgaggagatggaatctgatttatcttatctcactgttttcaaaagcaacaacataacctcttaacacaatcttaaatcaattctgtaatttttaatgtaattgttaaagcatcagaatgtttaacatcatttggaaatattcaacagtatgatgtatacagatgatttccttctgatgaaaattttaaaataaaactaaaaccaaatctgtcctgcattccttttagatgtaaattacgaagctttctgtgcattctcatagttgcaaataatgtaagttayttgataccacacatcaaatctggaaaaatctcagtaataaactga

SEQ ID NO: 83475 - DNA, 874 bp, Homo sapiens
cgcttttacatattttatatcttttgacttcagatttattaatgccacattacagaacactatagttcaaagagtttaagttatgttcccaacacctccagactagtgatagctaagtaagagacctaagtgcagaaggtgaaacttgatctgattgtcatgttgactgttctgtacattgttctaagggggaaatgtaggacaaggtacaaagtattataaggcaaatattggggcccatttctctctagaaaaaacaaaacaaggccaggcgcrgtggctcacgcctgtaatcccagcactttgggaggccgaggcgggtggatcacgaggtcaggagatcgagaccatcctggctaacatggtgaaaccccatctctactaaaaatacaaaaaaattagccgggtgtggtggcgggcgcctgtagtcccagctactcaggaggctgaggcaggagaatggcgggaacccagaaggcagaggttgcagtgagccgagattgtgccactgcactccagcctgggcgactgaccaagactctgtctccaaaaaaaaaaggaagaaaaaaacaaaacaaaacaaaagaagggaaaggtttaaaaatttggaaacatcagtactcaagacaatagaaaataacagtgttgaattcagaaaatagaaaaacacatatgattcaaatttgatctggtcaattataaaccaactaatacagaaatcacaaaataacaatctttgaagctagaaagacacctagtttgctctttcctctcttaggcatccccttttgcaaatgaagctacaaactctagagagaataagttattcgttcttatgtaaaataggataagaatggaaaaaaaaaaaaagaaa

SEQ ID NO: 83476 - DNA, 975 bp, Homo sapiens
gcgatatctacctttccttgatggtcaggaagaaaggtcaaaagaaaggttgttagagctaaaatctgaaagaggagaaaagtttttcagataaagagagtgtgcgtgtgtattttgtatgtgagtattgtgcgtgttctatgtgtgctgtatgccgtgtgtgtgtgttgtgtgtgtgtgtattgtgttgggatagagcagcaacacaacagtgtccctagcggaagaagtaatgtctgtgatggtaagggaaaagagggtgaaagtgagaaaagagtgagagagaggctcggacaacttaaacaactggaaggccagcaggataatggttatggtagaggtggagagaaatatgaagttggaatgggatgggatcagggacacatcatgccaagtcttctatgccacattgggaatggaaagtcatgaaaagattttaagctggagagttacctaatttatcatagattttaaaaagattcctcttgcagctgggtcttaagaattagtggctcttcattgatgagttcatgtcctttgtagtgacatggatgaagctggaaaccatcattctcagcaaactatcgcaaggacaaaaaaccaaacaccgcatgttctcactcataggtaggaattgaacaatgaaaacacatggacacaggaaggggaacatcacacaccggggcctgttgtggggtggggggaggggrgagggatagcattaggagatatatctaatgttaaatgatgagttaatgggtgcagcacaccaacatgccacatgtatacatatgtaagaaacctgcacgttatgcacatgtaccctaaaacttaaagtatataaaagaaaaaaagaattagtggctcttgcagttgttcaggcaagagatgaaggaggcttgcccttggatgaatggcaagattctgtgtgtggtatgaaagtctagagcttccttgatgaccatctcctacccc

SEQ ID NO: 83477 - DNA, 975 bp, Homo sapiens
gcgatatctacctttccttgatggtcaggaagaaaggtcaaaagaaaggttgttagagctaaaatctgaaagaggagaaaagtttttcagataaagagagtgtgcgtgtgtattttgtatgtgagtattgtgcgtgttctatgtgtgctgtatgccgtgtgtgtgtgttgtgtgtgtgtgtattgtgttgggatagagcagcaacacaacagtgtccctagcggaagaagtaatgtctgtgatggtaagggaaaagagggtgaaagtgagaaaagagtgagagagaggctcggacaacttaaacaactggaaggccagcaggataatggttatggtagaggtggagagaaatatgaagttggaatgggatgggatcagggacacatcatgccaagtcttctatgccacattgggaatggaaagtcatgaaaagattttaagctggagagttacctaatttatcatagattttaaaaagattcctcttgcagctgggtcttaagaattagtggctcttcattgatgagttcatgtcctttgtagtgacatggatgaagctggaaaccatcattctcagcaaactatcgcaaggacaaaaaaccaaacaccgcatgttctcactcataggtaggaattgaacaatgaaaacacatggacacaggaaggggaacatcacacaccggggcctgttgtggggtggggggaggggagagggatagcattaggagatatatctaatgttaaatgatgagttaatgggtgcagcacaccaacatgccacatgtatacatatgtaasaaacctgcacgttatgcacatgtaccctaaaacttaaagtatataaaagaaaaaaagaattagtggctcttgcagttgttcaggcaagagatgaaggaggcttgcccttggatgaatggcaagattctgtgtgtggtatgaaagtctagagcttccttgatgaccatctcctacccc

SEQ ID NO: 83478 - DNA, 281 bp, Homo sapiens
tggtttcagaattaaaaagaaagcacacatttttgagttctcgctcaaaaacaattttgtgagggtaagttatttaacttctccrtgtctcagcttcctataaaactagaattatgagatctctcttataggtttgaaataggatgaaaattcctccctctttttttttcttataacctctctcaaaaccttgcctgtgtctctatgagtgtgttgtgttacagttactgctataatttctctactagattagggtggagaagttcccatggctgttcgct

SEQ ID NO: 83479 - DNA, 569 bp, Homo sapiens
ttggtctatagttggttccctaaatctcacttcttctcttcctctagctttagggactggactcagcattttggtttcatttcttttttgaaaagtaaaaagaaaatttacaaaactataaaacaagttatatatgtatatataaaactagcatattaacaaatatatatgrgtaattatataaaattatttatacatatataattacccatatatatttttcataattacccatatatatgtatatgtatatatatatataattacccatatatatgtatgtgtgtatatatatataattacccatatatatgtgtgtgtgtgtgtgtgtgtatatataattacccagaattaaacacctttaggtgtaattagagtacattaaaatttggcatactttcctttagttcttttctaaattataaaagtaacatatagtatatttttcttctctaaaaatattgaaaagttaaagtttccttatccactttctcctcaaccagagctgcttctcccaaaatcccaagggaatcattattttgagtttgctgtagatacttcaaacgttt

SEQ ID NO: 83480 - DNA, 569 bp, Homo sapiens
ttggtctatagttggttccctaaatctcacttcttctcttcctctagctttagggactggactcagcattttggtttcatttcttttttgaaaagtaaaaagaaaatttacaaaactataaaacaagttatatatgtatatataaaactagcatattaacaaatatatatgggtaattatataaaattatttatacatatataattacccatatatatttttcataattacccatatatatgtatatgtatatatatatataattacccatatatatgtatgtgtgtatatatatataattacccatatatatgtgtgtgtgtgtgtgtgtgtrtatataattacccagaattaaacacctttaggtgtaattagagtacattaaaatttggcatactttcctttagttcttttctaaattataaaagtaacatatagtatatttttcttctctaaaaatattgaaaagttaaagtttccttatccactttctcctcaaccagagctgcttctcccaaaatcccaagggaatcattattttgagtttgctgtagatacttcaaacgttt

SEQ ID NO: 83481 - DNA, 602 bp, Homo sapiens
catttaaatatttcattttttagcctatgttgtagtagattgcttgattggtccaaggtagtctctaaatccaattagagaaaatgaaattcaggaagcacatcactgtagattttggtacagtgacttgagtatataattgccatctytttctatgttagctcaggggtgggttttgtgccataaaccaaccatccaaccaccagtctacccacctacccacccaactaaccatcatttgggctatatctatctgcatatcatacataatatccttgcaggaattaatccagcatccatatgagtgtaactcatacctaggctgataacaaaatctgaaaggtttttcactgaaatatatcaggtgactaaagaatttcacaacccaaaagaggagggtatatcgatcctagtggaattctatttcatggattttgttctgcctttattgacacagttagacattaaagagaataagtataataacaaaatttataagaaatgcttatggaatattttctaattttagctacaatgatgggttgtttatattctgtggtttgatttttatatcaatctttatgcagctattatcattaccc

SEQ ID NO: 83482 - DNA, 962 bp, Homo sapiens
tgcatctgcaggccgtatttctaagtgaatgaacataggaacagaaaaccaaatgctgcatgttctacctgtaaatgagagctaagcattgagcatacatggacataaacatgggaacaacagacacagcagactacaatatcgggaaagaatggaggggctgtgggttgggttgaagaactgcatattggttactgtgctcactacctgggcgatgggatccatgctccaaacctcagcatcatgtaatattttcatgtggcaactctgctcattacctcctatatctaaaataaaagttgaaatttaaaaataaatgaataaaaattagacgacaacaacacaacaaaaaattaagtgttgtaaaagtatatgtatgttagtgtattttaaatctaaaataaaagtactttggtatgttttaccctaaaatatcatttcaattcattatatttgacatggaattgctatattttattgagtaattttaagtttttgccacatgccaaatggaagagcagcatgtaataaataatttaaattaaatatattattcacatttaattttaatgaatataatgcttttaattttttaactgacactgcttcttgaagtaatccaatatataaaagaaaaaataaataattttatctaacacagcgattcgtcgccttggcatgtttgccatttttggctgargagtcactgatgtgcgggactgtgctgtgcactgtagaatgttttgcagtatctgtggcctttattcactaaaacttatttgggatcactgaaaatgtctctagatattgccaataccccataaaagacaaaatcactccaaattgagaacctctgctcttaccaaaaaaccaaatctttagtagtacttgatttctgatcccagctatcctgtcaattagctctatgaccttgggaaatcaaatttctgggcttcaaaata

SEQ ID NO: 83483 - DNA, 648 bp, Homo sapiens
acatatattcatatacatttctgataaatgtgtaaaaatttaagaaactttatagtaaggaaacaactggatcaagaagttttgagtcattttaaaaatgcaattaaaatggcttctagaaatactgcatatttttatatatctaaatgatgtgtatattaataacaattttctactctccatactattgtaggtataagtagatgtrtaagttgcaatttaataagaaaaatagcaatataataattcattactatgtcaaactaaagctaatgtttatgtcttttggtgtgatagtgaattaagttcataaagagtttcattatagtttctcaaatattttattgacattgttttgtttgtatctgatattgtttcacaaacatatttatgtgctataatttatatctaagaatattaactatttttatatggtgcatacattttttcagtttatatttttcaggcaaaacattttttgctacatataaattttattttccactatggtttcaatattactattttaaatttattttttattttattttactttaagttttgggattcatgtgctgaacgtccaggtttgttacacagatatacatgtgcccttgtgatttgctgcacctatcaacccattatcta

SEQ ID NO: 83484 - DNA, 648 bp, Homo sapiens
acatatattcatatacatttctgataaatgtgtaaaaatttaagaaactttatagtaaggaaacaactggatcaagaagttttgagtcattttaaaaatgcaattaaaatggcttctagaaatactgcatatttttatatatctaaatgatgtgtatattaataacaattttctactctccatactattgtaggtataagtagatgtgtaagttgcaatttaataagaaaaatagcaatataataattcattactatgtcaaactaaagctaatgtttatgtcttttggtgtgatagtgaattaagytcataaagagtttcattatagtttctcaaatattttattgacattgttttgtttgtatctgatattgtttcacaaacatatttatgtgctataatttatatctaagaatattaactatttttatatggtgcatacattttttcagtttatatttttcaggcaaaacattttttgctacatataaattttattttccactatggtttcaatattactattttaaatttattttttattttattttactttaagttttgggattcatgtgctgaacgtccaggtttgttacacagatatacatgtgcccttgtgatttgctgcacctatcaacccattatcta

SEQ ID NO: 83485 - DNA, 1052 bp, Homo sapiens
aaatatacatatgattggtagactatatcaatatctagaatcaaattactccttttggacaaagcccttcactgttaaatatcaatttatatttgatttcctggatgaatatatatatatatatatatattatatatatatatataatatatatatatattatatatatatataatatatataatgtgtatataatatttatctgtgttttctatctataattgttagtgcttactacatttttgttagttttacttgttatatcatttttttccttagtcatcttttagttctgtaaggctggggttattccctattattctcttggtggttgtcttcttaaataatcattttcttttttattagctaagtgaattcacctcacttttaatttttttctctaatcatctaawgtctgattttttttctaattctggtacgttatttttcatagcttttattttgctcattgaaaatattactttacaatactcttatgttttggagaagcgttattttcattgtttcctgatttgctccaatcctttttgtgtggtcttctgatcttttatatttccataaaataacttgtatgagaagtaactatgattttttttctgttacctatctaaaagacaatgaacattatcaacacttttagagtcaggtagctaacttttcctaagttagcttctctactttcatgactctagagatgtcttttgttgttttaattgtatgttagagctatggtcttgtagtcactgagatagtcctccactattaaccccctcccaagttatctagaaagtatccttattttctcttttgcaaccatcctgatcattttgaatactctatccaattgatattcaatggtggagggctttgtccaaaaagagtaatttgctttcagacattcatatagcccaccgattattattctgtctccttgcccttaaacaaggtacagtctatagatcttttagtttagattaatcactattagtctttactgttcttttaatggccagtgaggactatagaaattg

SEQ ID NO: 83486 - DNA, 2405 bp, Homo sapiens
ctagtatggaagtggcagcctgcacttccctgcagcctcccactcgggccactcccactgtgtctgtttccctttctactcacctctagttcttgactctgaacccaggcagttacctgaaattataacaagggtgtagtacccaccccttgaaccccgccactcctcacttcctcttctcccatcgtgatattgcaccattggatttttgttcttcaattggttagctggataacattgcacaattgacttaaatctctgcttgcattcctaaccacactggcaacagggttaagctctgggcttgtgagctggatgtcagcagccttactttgtgcttaccttttctttaaaccatgaatttctggacttcttttttttccctggaagtccttattgtctccctttttcttacattatttgcctttattataacttcaattctttttcaagcactatatcataaaatttatttgtgaggtccttcctctcccctagagacctccctggggagaccatccattcctacttcagattgcccctgactttctctccaggcgggtccactaccgtcacctttggacttcttaatgctcttctggggtagagcccctgtttccttcctctttcttggtttattccctcatctggttagagaagtggcccctaacctttttggcatcagggaccaattttgtggaagataatttttccacrgactgagatgggggttgggggattgtttcaggatgaaactgttccacctcagatcatcaggcattggattcttataaggagattgcaacctagatccctcgcttgcacagctcataatagggttcacactcctatgagaatctaatgccctgctgatctaacaggaggcagacctcaggcagtaatgctcacttgcctgccatttacctcctgctgtgtgggctggttcctaacaggccacagactggtactggcccatgcctcaggagctggggacccctgcgttacagaatatcctcaagaattcctaaaaaaaaatgcatgagatgtaaactatctattaattatctattaatctcccctcacacttgataggttgaacactattttctgggacttctgggttctgcaatagaataatctattttactgaaatactgtctctctataaattctagaaaatctagatacaatatcacaaacattatcagatttgaagaataaagtggaaactgaaaaccaaagtggttatagatgacccgccatgaacaccaagagttttagtgatcacatggagacagcaggtttagaacccccagtacttaagaggatgacaaactgaaaaagaatataaaataggtatgattaaaaaaacaaaaatgatagttaaaactcaaagaaaagaaaaagtatgcaaaaacgatgtggactcctggctccgctagggatataggaggctggaaagagcagttttcccactccccacccctcacctccaccccttataagagccacagcaacaacagtgagaaataaaaataaaatcccaaggctctcagctaactgaatggacccccgcttgtcaaggggacctcagagaaaccttaaaaactgagttctgggccaggacaggaagggaggtcagcacgccttgctgtacgccaccttgctaaccaccattagacttcccttcctaagggttaaaccaaacccagccctttggagagacttgctccactgttgatttacacaacaactgaccagcattccctctgctaagagaccaccgacccgaagtggactggatctggctggtttacagagactgagcacaggatgcctctgtcctctgttttacctgttgacatatagagcctaattttactgcatttaaacattaagttaatgtttactgcatcgagtgttaagtctccgcccaaagtgaacatgggatgtatgtaacacgcatgtgttcttaactatgcacacgccccaccttgtgaatattcatagctcctcctgtaacctgataaataagtacacttagccaacccgttgggtatacattcctgttccactcgttcctttctcaaagtgcctgcttattatggtctctgccagaggccatgcttccaaacctactgcgtggctagcctgcaggctgcaaccctttgtgagaaataaagccctcctttccaaatgtatgaacctcatgattcttcagttgacaacaacaaaacaaactcagagcaatctacaacttcacaacttttcctgaacccatctgagatttgagattggagggcagccaaataaccgggtattacaggaaatacagtcacttcccaggacagacagacacagatacttgcttacctgcgtcagaggccccaggatactggtaagga

SEQ ID NO: 83487 - DNA, 658 bp, Homo sapiens
gatgacctcaggatggtaattcacaatggggtctctgggcaaagcaaagagcagatagtcaccctgagacaggcctgttgcgcttaccaaaagacaggcctgttcctcagggcttactaattgtgaccagacaaattaggagggtcctctgagttaggactgctagatttccatcagcagttccttctgagatcccctccacatacacagacacacacaaaaatgagacagacagaaggccttccaaatcagatccctaaccaagaactccaagattatcccttccaaactatcctcctatattccatctgagaaatctcctcagatcttcctgattcaggagaagtctcctgaaccaagactcttcytactagttagggagagccaactgagacctccccaggagacaaactgagacagatgacactcggtggtggagctacaaacagacatcccacaatggggctacagacaccccaccatgaggttacagacagataccctgtgatagggctatagttaagggacatcttcccaggactatttctgtattgcaattaaatccatgcacattgggtcagcagtgccccaccagtagacagtaccagagccagcccctagtccaagagaactaggaggcctcttgggctggcctccg

SEQ ID NO: 83488 - DNA, 803 bp, Homo sapiens
tacaacctgaagtgtcttcagtcatagcacaccccaaggacatcatgcactccatgaaaatatgtccaatgaatgaatgaatgaatgggctccttcatccttcttgtcagagaaaggtcaccaattgttccaatgacacagttagggacaagggggctgctcaaacatcagcatcccctaagtcaataagcaaacaaatcctagttagcaaagctaccctctctgggggcagagacacctgttatttctcaaatgctggatgcccaagggtggcaaacacactgtttggaccccaggaaggagcagacacatgtgggtgaagctggaggccctgcttccttgcccagatcctcttgcccagacacactctggaaatgcccatcattttatacacctacgtacacatgtaaccagccaggatgcctttgttttccatttccaagaaaacagaggactatggaaaacaggtgggccgtaaggagccctacagaggaagatgcacctgtggcggtagccctgcctgcaccaccctgcgagctcatgccagcttaactcacttcacggtcaatcagacctactgctccaaacacagtaggaaggcrcgccttcacttgtgagtcggacgaaatcagcaatgagggcaataacaaccacagtcacgttactcttagtaacagccctgaggcccgcagtgtagcacagaagccaagcttagtggtgggcttaaggctgatgttgttaactgataccattcaatagctagatataggcaactaaaaggtgagcccaaatactgaaataag

SEQ ID NO: 83489 - DNA, 749 bp, Homo sapiens
cagatgagagggttgcaaactgtagaaatgtgcatagtctagcaaaggctgagcctccaagtcagagtggggccaggtcctggagtcagggcagggttgggatggaccagacattttgagcatagggttcatgtttccaaagcaacggcatgcctcccccaccctccagtttcccaggaagtgtctatcccaccctattattgcatcagtttccaaaccttcactttttgatgaagcattcttgggttcctttgctcatgcaacagtcggattctgagcacctatcacattccaggtgctatgctactgaggatatcatgagtggaacagtcatggtacttgccctcatggagcttacagtctataggaaggtagattgtaaccaatcatcaaacaacgaagtcagatgacagtggtggtgattgttacaagggcgaggcaggaggcactatgagagtgtgcagaagggagaaccggcctttgtctggggctcagagaaagcttccctcaggggcatgtaacagagctgtgacctgaaggcaaaagttwgggtgtcacccaggagcagagggcaggcaggaaccagatacaggacagagcatgctgtgggaggaaccaaaggaccctgggtggggctagggtcccctgagcaagggtccatgtgtataaggaggctggagggggcagggccttgctatgcaggaccttatgggctgtgcaaggatgatggtcttgatcctgagagccag

SEQ ID NO: 83490 - DNA, 872 bp, Homo sapiens
ggaatgttgttgctgcttcataaatatttgtcagatctatgaatggatattggtttgtacttgcatgagatgccatttggtggattaatttgttcttggactaaatctcattttatgcactcatttgttcaataaatatttaactcaacagctactgtgtcagaagccaacaaagattaaaaaaaatagtcttggacttcaatcagcttatagtcagtgggaaaaaaaggtatagaaacaatcataatatatgatatgacaactatatcttttttttttttttgagacggagtcatgcactgttgcctgggctggagtgcaatgccgctatctcggctcactgcaacctctgcctcccgggttcacgcrattctcctgcctcagcttcccaacaaatatatcttttgctgtaattgagatgtgtacaatatataaggaaagcaagggaaaaagctctcttaaaatttcctggggatgtcaaggatgttaggagagacttcagaggggaggtgatgcttcagaggggaggcaatgctggagataactgtgacaataacaatactgccaacaatggcaatggcgtgggacaggcgctgtgttcacattcgatagtcattcttatctcttttaatcctcaaaaccacatgtgagattattatcctcatctgcagatggggaatataaagatcaaagaagtaaagtgccatttgcaatgccactcggcaagtaggtgagatgtatccggtcaggggtgctttgccaggcagagaaggtagggagagagagtgtcataggagtggcaagattccacacaaaactcagagaagtgctggccctgtctttactattctgatactttgttcatcatgcat

SEQ ID NO: 83491 - DNA, 2419 bp, Homo sapiens
tgctaaaaataatattgtaaagagtttttaaccaatgatttcttgcagttgtcatatatgctaggtaggcaattgcttctgattactttattttttatttttatttttgagacagagtctcagtctgtcacccagtttggagtgcagtggcacgacctcggctcactgcaatctccgcctcccgggttcaagtgattctcgtgcctcagcctcctgagtagctgagattacaggcatgtgccaccaggactggctgattttttttttttttgtatttttagtagagatgggattttaccatgttggccaggctggtctcaaactgctgacctcaagtgatctgcccacatcccactcccaaagtgctgggattacaggcatgagccactgcacctggcctgcttctgacttattgtgagacatacaagaagacccattaaacaggtattctgttaacttgctgctgaacggaagcccataatgatgccccagtttcttgctttcatggatggggctacaggccttcgggagtggggaggtaaatacaacacaaaaataaaatcccatacatgactccacactgtcaaaactttgatttcatttgaatgcatcctatagcactgcagggtgcacatgctctgtctggttgaggcatggctgcatgtacttgtcttgtatttagtttgcctttgcagatggcaaacgttaatggtaggaagaatttctgtgtagggaccttgatctttatgatgattaatgtcgaaaacagaattccaatatggaaaaattcagtttgctttttaggagagttgatttttatctcacaatgcwggaaacagagtgaactgtcagagctgctcttagagaatggggcaggtggtcacactgagctgtgtggtccagtgtcaggctagcttctcatgtcctaggaggagctgggtggtcctagctgcatcctctgcctcctctctgaggttgttattgctgttaaagtcaggctggcctctttcccttttcccttctcttttttttcagtaatattcactgctcttcctctccgtgttggcaaccaggctagtaccaggacatgacagcacatcaaaacagcctctgacttttcagagcctacattctaatgggaagagagaaatgaagcaaatatttctaagaatcactgtataagtattagctgtgctgagggaagttatacaaagctgggaaagataaaggaggcaactggtctaatccaggggtttggcaaagcttatcatggggagcagtgctcctcacatggccaggcgtctcttattgtcctcctccttcagaggttactgtagtgtcccccagtttgcttaggggactttaagtggactctgttccttgcagccaaggacaaaggttaaaaaacaaagcaaaaactctccttaattcaaaggaatccaaatctaatggagaaattccaggcaccaggaagggacatagtaggggatgtttttgagggggagggggccagtcattatttttcagataatattgccacatctaaggctgtctctgagtaaggagctgctgtgaaacttgcgcagtggagcagtggcccctttggttggcaggagggctgcccatggtggaggagagccttcctgcagtttcctggcccagaaaaaaatgatggcattaattccaggcctggagaagaacagaaagccctggagcctaggcacagccctctgattttcctgggagtttccctgagttaaaatgcattggctgtgagtcaacattttcctcgcagtggggggctctgtgcctgagttccttggcctcatttccttaccaggacccggatgactgacaggcagccgtgaatgacaagcccccaaaataagggaggggtgttggcagggggaaaacagccctgacttggcaacaaagctctttgctttggggccttgtgaatagcatccagcctcatccagaaaatgtatctagaaagtgcatctctgggtgggtgcaggagtgcagcttgcaggtccaggcaaagtggagctggtgaaagtggccatgaaagcagagggaggctcacaccatccatgaggaagagcaagactagccaatgtgtcctggaggactttgaagtatgcattgacagttctctatctctcaggacagatgggtgaccaggataccacctcacagtctactctgcacatgagctcctgtgaatttactctgatccctgggctgggaatttgaagagctgggtcccacttccaactctatgccaatctgctgtgtgaccctgagctctctaagcctcagtcccttcagagaaaaaaagagggtcaggcccaagaagtcaaaggtctcttccagttctattgggatcttactagaagttcttttttcttatgcgttt

SEQ ID NO: 83492 - DNA, 1482 bp, Homo sapiens
  misc_feature (1)...(1482): n = A,T,C or G
annnnnnnnnnnnnnnnnnnnnnnnnnnnnnnnnnnnnnnnnnnnnnnnnnnnnnnnnnnnnnnnnnnnnnnnnnnnnnnnnnnnnnnnnnnnnnnnnnnncccaaaaaaccctctgggaaaatgtaacagggagaggagaatgtaataaaacacaaactaatccttttcactttctacttcagagttttgttgatcagatattgagcatgtttctagaaatgccttaaggtgtaaccaggtgtggaatcaacttcagggaattagggataataagtygggccatggttacaatcaccacccttcctttgtaattccatttgactctttccttttcttctgatcctttttggaagaacacataatatttcttttgtctttttctcattttttattttaaccaacaaaacaagcagcagtgacatcatatttctttgtaaaagctcattcctatcctagccaaggtgacccagcaacctctagtgactgtcgagaactccagattggagaattgactctcccttctctctaacttattgaaagagacttcgtgcgtgggttctagtttcagggttgtccattgcaagtcatgtggctttagttaagtcagccctgtggcatcactgctcctctgttgtaaaaggcagaactggatgtggatgcggtctgaggtccttcctgtatctcacctccagggttcttcccatggccctgcacacccttccctaagagacggggacatggagttgtaagggagtgggtttctctgcaaaaggtcctttccttctgcagccttctgtttctgagctttcatggttgatgctgagaacatcctcactgaggggtgtgaaaagccattactctgctccagacactggggatcaggaggaaaggggctgctggttgggcagagctagggtccctatatccttcacctcaagctgactggaagttcaggggtgtttatttttcacttgcggatggcacttgcctcttcactcagcctgaggctcacccttcagctcatcctcctagcaggagctcagtttgcccctgggctatcaccacttaacagtccctctagactcagccatcagcaggacctgacaaagatgcccatttcatctttccttctctctctcctacagatactaaatgctgctggaacaatgaaaagaaagaacggatgtcacaaaaagcattttcatttgatgaatagaactaaaagagcaaagcaattgaaagctcaacacaacacaggagggatccatggctgaggattgtatttcagaaccactgactgctcttgacaattgttaacccactaggctcctttggttagagaagccacagtccttcagcctccacttgataccaatacttaggaagaccaaagccagatggacaaacagcattgagaggctttagccctactcctctcagcttccatcctgtagagaacaggagtcaggagctgctggca

SEQ ID NO: 83493 - DNA, 1482 bp, Homo sapiens
  misc_feature (1)...(1482): n = A,T,C or G
annnnnnnnnnnnnnnnnnnnnnnnnnnnnnnnnnnnnnnnnnnnnnnnnnnnnnnnnnnnnnnnnnnnnnnnnnnnnnnnnnnnnnnnnnnnnnnnnnnncccaaaaaaccctctgggaaaatgtaacagggagaggagaatgtaataaaacacaaactaatccttttcactttctacttcagagttttgttgatcagatattgagcatgtttctagaaatgccttaaggtgtaaccaggtgtggaatcaacttcagggaattagggataataagttgggccatggttrcaatcaccacccttcctttgtaattccatttgactctttccttttcttctgatcctttttggaagaacacataatatttcttttgtctttttctcattttttattttaaccaacaaaacaagcagcagtgacatcatatttctttgtaaaagctcattcctatcctagccaaggtgacccagcaacctctagtgactgtcgagaactccagattggagaattgactctcccttctctctaacttattgaaagagacttcgtgcgtgggttctagtttcagggttgtccattgcaagtcatgtggctttagttaagtcagccctgtggcatcactgctcctctgttgtaaaaggcagaactggatgtggatgcggtctgaggtccttcctgtatctcacctccagggttcttcccatggccctgcacacccttccctaagagacggggacatggagttgtaagggagtgggtttctctgcaaaaggtcctttccttctgcagccttctgtttctgagctttcatggttgatgctgagaacatcctcactgaggggtgtgaaaagccattactctgctccagacactggggatcaggaggaaaggggctgctggttgggcagagctagggtccctatatccttcacctcaagctgactggaagttcaggggtgtttatttttcacttgcggatggcacttgcctcttcactcagcctgaggctcacccttcagctcatcctcctagcaggagctcagtttgcccctgggctatcaccacttaacagtccctctagactcagccatcagcaggacctgacaaagatgcccatttcatctttccttctctctctcctacagatactaaatgctgctggaacaatgaaaagaaagaacggatgtcacaaaaagcattttcatttgatgaatagaactaaaagagcaaagcaattgaaagctcaacacaacacaggagggatccatggctgaggattgtatttcagaaccactgactgctcttgacaattgttaacccactaggctcctttggttagagaagccacagtccttcagcctccacttgataccaatacttaggaagaccaaagccagatggacaaacagcattgagaggctttagccctactcctctcagcttccatcctgtagagaacaggagtcaggagctgctggca

SEQ ID NO: 83494 - DNA, 1482 bp, Homo sapiens
  misc_feature (1)...(1482): n = A,T,C or G
annnnnnnnnnnnnnnnnnnnnnnnnnnnnnnnnnnnnnnnnnnnnnnnnnnnnnnnnnnnnnnnnnnnnnnnnnnnnnnnnnnnnnnnnnnnnnnnnnnncccaaaaaaccctctgggaaaatgtaacagggagaggagaatgtaataaaacacaaactaatccttttcactttctacttcagagttttgttgatcagatattgagcatgtttctagaaatgccttaaggtgtaaccaggtgtggaatcaacttcagggaattagggataataagttgggccatggttacaatcaccacccttcctttgtaattccatttgactctttccttttcttctgatcctttttggaagaacacataatatttcttttgtctttttctcattttttattttaaccaacaaaacaagcagcagtgacatcatatttctttgtaaaagctcattcctatcctagccaaggtgacccagcaacctctagtgactgtygagaactccagattggagaattgactctcccttctctctaacttattgaaagagacttcgtgcgtgggttctagtttcagggttgtccattgcaagtcatgtggctttagttaagtcagccctgtggcatcactgctcctctgttgtaaaaggcagaactggatgtggatgcggtctgaggtccttcctgtatctcacctccagggttcttcccatggccctgcacacccttccctaagagacggggacatggagttgtaagggagtgggtttctctgcaaaaggtcctttccttctgcagccttctgtttctgagctttcatggttgatgctgagaacatcctcactgaggggtgtgaaaagccattactctgctccagacactggggatcaggaggaaaggggctgctggttgggcagagctagggtccctatatccttcacctcaagctgactggaagttcaggggtgtttatttttcacttgcggatggcacttgcctcttcactcagcctgaggctcacccttcagctcatcctcctagcaggagctcagtttgcccctgggctatcaccacttaacagtccctctagactcagccatcagcaggacctgacaaagatgcccatttcatctttccttctctctctcctacagatactaaatgctgctggaacaatgaaaagaaagaacggatgtcacaaaaagcattttcatttgatgaatagaactaaaagagcaaagcaattgaaagctcaacacaacacaggagggatccatggctgaggattgtatttcagaaccactgactgctcttgacaattgttaacccactaggctcctttggttagagaagccacagtccttcagcctccacttgataccaatacttaggaagaccaaagccagatggacaaacagcattgagaggctttagccctactcctctcagcttccatcctgtagagaacaggagtcaggagctgctggca

SEQ ID NO: 83495 - DNA, 1482 bp, Homo sapiens
  misc_feature (1)...(1482): n = A,T,C or G
annnnnnnnnnnnnnnnnnnnnnnnnnnnnnnnnnnnnnnnnnnnnnnnnnnnnnnnnnnnnnnnnnnnnnnnnnnnnnnnnnnnnnnnnnnnnnnnnnnncccaaaaaaccctctgggaaaatgtaacagggagaggagaatgtaataaaacacaaactaatccttttcactttctacttcagagttttgttgatcagatattgagcatgtttctagaaatgccttaaggtgtaaccaggtgtggaatcaacttcagggaattagggataataagttgggccatggttacaatcaccacccttcctttgtaattccatttgactctttccttttcttctgatcctttttggaagaacacataatatttcttttgtctttttctcattttttattttaaccaacaaaacaagcagcagtgacatcatatttctttgtaaaagctcattcctatcctagccaaggtgacccagcaacctctagtgactgtcgagaactccagattggagaattgactctcccttctctctaacttattgaaagagacttcgtgcgtgggttctagtttcagggttgtccattgcaagtcatgtggctttagttaagtcagccctgtggcatcactgctcctctgttgtaaaaggcagaactggatgtggatgcggtctgaggtccttcctgtatctcacctccagggttcttcccatggccctgcrcacccttccctaagagacggggacatggagttgtaagggagtgggtttctctgcaaaaggtcctttccttctgcagccttctgtttctgagctttcatggttgatgctgagaacatcctcactgaggggtgtgaaaagccattactctgctccagacactggggatcaggaggaaaggggctgctggttgggcagagctagggtccctatatccttcacctcaagctgactggaagttcaggggtgtttatttttcacttgcggatggcacttgcctcttcactcagcctgaggctcacccttcagctcatcctcctagcaggagctcagtttgcccctgggctatcaccacttaacagtccctctagactcagccatcagcaggacctgacaaagatgcccatttcatctttccttctctctctcctacagatactaaatgctgctggaacaatgaaaagaaagaacggatgtcacaaaaagcattttcatttgatgaatagaactaaaagagcaaagcaattgaaagctcaacacaacacaggagggatccatggctgaggattgtatttcagaaccactgactgctcttgacaattgttaacccactaggctcctttggttagagaagccacagtccttcagcctccacttgataccaatacttaggaagaccaaagccagatggacaaacagcattgagaggctttagccctactcctctcagcttccatcctgtagagaacaggagtcaggagctgctggca

SEQ ID NO: 83496 - DNA, 719 bp, Homo sapiens
cagtagatatttaggtttccatttcttcctccccttatcatttactaacctactgtaggtggaccagacttcaaaaactgtattctcatggcgactgcatggaaacttgagcacattttatggaaaattattgagcacagtcttttcatgatccctgtatgctgtgtgtcctgagggcactaactcagagtgtcctgttactccctcatcagtgtgtcacctggacaattcactgagctcgttctctctctctctctctctctctstgtgtgtgtgtgtgtgtgtgtgtgtgtgtgtgtgtgtgtgtgtgtgtctatctgtctttctctttcattcttttccatttggccctgttctgtcccaacatgaaggcaataatttgttacctcattaatggatctatccttttagttttttaaccacttccctatgctacccatgaaacctagttggggctctgttgtgtctgatttcccctggcttattctttactttttcctccttttccaggctcagcagggagctgctggaggtagtagagcctgaagtcttgcaggactcactggatagatgttattcaactccttccagttgtcttgaacagcctgactcctgccagccctatggaagttccttttatgcattggaggaaaaacatgttggcttttctcttgacgtgggaggtgagtacctttctatgaaggtgataaggatccact

SEQ ID NO: 83497 - DNA, 719 bp, Homo sapiens
cagtagatatttaggtttccatttcttcctccccttatcatttactaacctactgtaggtggaccagacttcaaaaactgtattctcatggcgactgcatggaaacttgagcacattttatggaaaattattgagcacagtcttttcatgatccctgtatgctgtgtgtcctgagggcactaactcagagtgtcctgttactccctcatcagtgtgtcacctggacaattcactgagctcgttctctctctctctctctctctctgtstgtgtgtgtgtgtgtgtgtgtgtgtgtgtgtgtgtgtgtgtgtgtctatctgtctttctctttcattcttttccatttggccctgttctgtcccaacatgaaggcaataatttgttacctcattaatggatctatccttttagttttttaaccacttccctatgctacccatgaaacctagttggggctctgttgtgtctgatttcccctggcttattctttactttttcctccttttccaggctcagcagggagctgctggaggtagtagagcctgaagtcttgcaggactcactggatagatgttattcaactccttccagttgtcttgaacagcctgactcctgccagccctatggaagttccttttatgcattggaggaaaaacatgttggcttttctcttgacgtgggaggtgagtacctttctatgaaggtgataaggatccact

SEQ ID NO: 83498 - DNA, 719 bp, Homo sapiens
cagtagatatttaggtttccatttcttcctccccttatcatttactaacctactgtaggtggaccagacttcaaaaactgtattctcatggcgactgcatggaaacttgagcacattttatggaaaattattgagcacagtcttttcatgatccctgtatgctgtgtgtcctgagggcactaactcagagtgtcctgttactccctcatcagtgtgtcacctggacaattcactgagctcgttctctctctctctctctctctctgtgtstgtgtgtgtgtgtgtgtgtgtgtgtgtgtgtgtgtgtgtgtgtctatctgtctttctctttcattcttttccatttggccctgttctgtcccaacatgaaggcaataatttgttacctcattaatggatctatccttttagttttttaaccacttccctatgctacccatgaaacctagttggggctctgttgtgtctgatttcccctggcttattctttactttttcctccttttccaggctcagcagggagctgctggaggtagtagagcctgaagtcttgcaggactcactggatagatgttattcaactccttccagttgtcttgaacagcctgactcctgccagccctatggaagttccttttatgcattggaggaaaaacatgttggcttttctcttgacgtgggaggtgagtacctttctatgaaggtgataaggatccact

SEQ ID NO: 83499 - DNA, 719 bp, Homo sapiens
cagtagatatttaggtttccatttcttcctccccttatcatttactaacctactgtaggtggaccagacttcaaaaactgtattctcatggcgactgcatggaaacttgagcacattttatggaaaattattgagcacagtcttttcatgatccctgtatgctgtgtgtcctgagggcactaactcagagtgtcctgttactccctcatcagtgtgtcacctggacaattcactgagctcgttctctctctctctctctctctctgtgtgtgtgtgtgtgtgtgtgtktgtgtgtgtgtgtgtgtgtgtgtgtctatctgtctttctctttcattcttttccatttggccctgttctgtcccaacatgaaggcaataatttgttacctcattaatggatctatccttttagttttttaaccacttccctatgctacccatgaaacctagttggggctctgttgtgtctgatttcccctggcttattctttactttttcctccttttccaggctcagcagggagctgctggaggtagtagagcctgaagtcttgcaggactcactggatagatgttattcaactccttccagttgtcttgaacagcctgactcctgccagccctatggaagttccttttatgcattggaggaaaaacatgttggcttttctcttgacgtgggaggtgagtacctttctatgaaggtgataaggatccact

SEQ ID NO: 83500 - DNA, 610 bp, Homo sapiens
cagacttcctgtgcattaatagttaaaaatgttctagatctttcccttagtgtgtcatcatctgtcttagaaaactgggatttgaaatgaaacaagctgagttgggtgattttgaggttgagattatcctaatcatgtggtctgataaacatgtttatgtgcgtaattgattcattcagtaaatatgtagtgtgtgcctattatgtgccagacaccgtactgggtgcttgagattcagcaccaaattgcctttaggaaacttacattccatgtaggggaagcagagagagagatctattagataatggtaagtgcatcgaaaaaaaattaagcacagtaagaagtgttggagatagagaagagattgctgggttttaaaaaaaattttttcccagctttattaaagtataattgacaaatattgtatatactcaaggtgtacagcatgatgtgttgatatacatatacattttgaagtgattgccacaaattaacacatccgtcactacacattttatgcgtgtatggtgaaaccacttaagatctactctcttagcaaatttcaagtaaataawacagtattattaactaaagtcaccatgctatcatt

SEQ ID NO: 83501 - DNA, 840 bp, Homo sapiens
cttcyctgtagtcctgagggtggtgttttgtttggcttgttctccttcccacctttttatacccaccaaggatccttctccttctgttgtagccagggctcctagagaaggctgtcaacattgaagggcccagatcccttctaccagtttttcttgtgcttcctatgtgcttgtaactgtgaatctcctgcttttccaacaactcttctgccttttgtatgggtatacattaaaggggaaaatcagggcctcttcacactactctggcaaaatcaacctgaactgctggattataggtcttggcctctggagctgcctgcttgagccctggcaggtctggaggcttggggctctttcattgactcagaaatatttctgcttcccacccaggacttctgttgtctcttcctcccttctcctcccctgctctcaggactcttagatgtagcccaggtttgcttccacacagttgacattggcggtgcacggtcttctcccctctatgccctcagatctccacgcctgtgcctatgacacgtgacacctgcacctgtgttgccaagcctggctcctcatccgtggccactcctgcccccacaacctgccagttctgcctcctttttgcctgcctcctgcctatctttacttcactgatttcttcggctggaaaatatttctacaacttcccctcccacactcacctggggctatgacattgttgtgcgcactggttgggcctcgcccctgccacctaacaagtacatcctacaggcccaggagggcattatctgtggttttgaatttctagtgtctcgaactgtactggcccagagaggacct

SEQ ID NO: 83502 - DNA, 1107 bp, Homo sapiens
agactgagtaaagcaggtggccctccaccgtgtgagtgggcattatccgattcactgagacccgaatagaacagaaagcacaggaagggtgacttcaccctctgcctaactgcttgagctgacacatcagccccctgtgctgttcttgactgggtcttataccatcgacactttggttctctcaactacatcactgcctytcctgggtctccagctgcagatggcagatcgtgagactttcagcccccataatcacatgagccaatttcttataataaactccctctctctccttctttccctctctctctgtctatatatatatatacacacacacacacacacacgtattaaatatatacgtgtatatatatacacacacacacacatgcgcgcacacgcacacacatactcttgattctgtttctataaagaaccctgattaatacaaagggcaatttcaaggatttgattatatatataaaatattaaatcacttatacatataacatcgtgtgtgtgtgtgtgtgtgtgtctccttttactgagttacctcctgatttttatgactttaggatgagaaccagggctatttttctaataacacagatacctttcctgagaaaaatcatcctagccatccacaatggcaaagatcacatatgtgtatgcatgttcatgtggtcacatatgtgtgcatgcatgtatacatgtctgcatgaccacatatgtgtatgcatgtgtattagggttctctagagggacagaactgatagaatagatgtacatataaaagggggtttattaaagagaatcaactcacatgattacaagataaattcccatgataggccatttgcacgttgaggagcaaggaagccagtggtgcatcagtccgagtcccaaaacctcgaaagttgggaagtaaacaatgcagtcttcagtctgtggccaaaggcccgagagcccctgaaaaatcactggtgtaagtccaagagtctaaaagctgaagaacttggagtctgatgttcgagaccaggatgcttccagcacaggagaaagatgaaagccagaagactcagcaagtctgttcttccatcttcttct

SEQ ID NO: 83503 - DNA, 702 bp, Homo sapiens
ggatccaactatgctaattccagggagagggtgttttgccatcttcatgttggcacaaatatttacaaacttgcagacttccctgagtccagatctctcaccccagcataacacttctgaactctcaatcttacctgtgaagggagagtgacagaactgatatcaggactaaagcaaggtcctcttcagagttgggagtttgataccagcctgaggcgaggttctcttaagctacaggtgtgtaggcctgtgctagtctgcatggggaattccagagtctcattattcctgcctaatggcctcatcctgaactgtcctcagctggaggtatccgaggctgtgaaggaggaaatccagttcaagagagttgagaagactgtagaatccttctttgaattggaaagagccacaaagcacagggtgctttaggccttctgcctggtcagtaagagtctgttcctcttatccagggagaatcaacagaaagggaacttctggaactgagaaccaaagtatccaaacaggagcgactccttcagagcacaactgagcatctgaagaacgccaaccagcagaaggagagcatggarcagttcatcgtcagccagcgtaggttccctgagagggaatgggggaagaaacaggcagtcttcccgatgccccacttgtgcttcagatgagaagtgatcaggggggcttggg

SEQ ID NO: 83504 - DNA, 708 bp, Homo sapiens
tgtaatctccccattttgggaggccgaggcgggcagatcacttggggccaggggtttgagaccagattgggcgacatggcaaagccccatctctacaaaacatataagaatcagccaggcgtggtggcatgcactgcctgtggtcctggctacttgggaggctgaggctggaggatagcttgggccsggaagcttgaggttgcagtgagcagagatcataccattgtactccagcctgggtgacagagcgagactttgtctttaaaaaaaaaaatagaggctgggcacagtggctgacgcctgtaatcccagcactttgggaggccgaggcgggcggatcacgaggtcatgagatcgagaccatcctggctaacatggtgaaaccccgtctccactaaaaaatacaaaaaattagccgggcgaggtggcgggcgcctgtagtcccagctgctcgggaggctgaggcaggagaatggcgtgaacccggaaagcggagcttgcagtgagctaagatcgcgccactgcactccagcctgggccttggagtgagactctgtctcaaaaaaaaaaaaaaaaaaaaaaaagaattgacttgaaggagtcaggccggaaggccaaataggagatgaatggggatagcggcttgaataagggcagtggcaaggaaaatgggctaggggttagggaagggggctgactggctgtgca

SEQ ID NO: 83505 - DNA, 708 bp, Homo sapiens
tgtaatctccccattttgggaggccgaggcgggcagatcacttggggccaggggtttgagaccagattgggcgacatggcaaagccccatctctacaaaacatataagaatcagccaggcgtggtggcatgcactgcctgtggtcctggctacttgggaggctgaggctggaggatagcttgggccgggaagcttgaggttgcagtgagcagagatcataccattgtactccagcctgggtgacagagcragactttgtctttaaaaaaaaaaatagaggctgggcacagtggctgacgcctgtaatcccagcactttgggaggccgaggcgggcggatcacgaggtcatgagatcgagaccatcctggctaacatggtgaaaccccgtctccactaaaaaatacaaaaaattagccgggcgaggtggcgggcgcctgtagtcccagctgctcgggaggctgaggcaggagaatggcgtgaacccggaaagcggagcttgcagtgagctaagatcgcgccactgcactccagcctgggccttggagtgagactctgtctcaaaaaaaaaaaaaaaaaaaaaaaagaattgacttgaaggagtcaggccggaaggccaaataggagatgaatggggatagcggcttgaataagggcagtggcaaggaaaatgggctaggggttagggaagggggctgactggctgtgca

SEQ ID NO: 83506 - DNA, 708 bp, Homo sapiens
tgtaatctccccattttgggaggccgaggcgggcagatcacttggggccaggggtttgagaccagattgggcgacatggcaaagccccatctctacaaaacatataagaatcagccaggcgtggtggcatgcactgcctgtggtcctggctacttgggaggctgaggctggaggatagcttgggccgggaagcttgaggttgcagtgagcagagatcataccattgtactccagcctgggtgacagagcgagactttgtctttaaaaaaaaaaatagaggctgggyacagtggctgacgcctgtaatcccagcactttgggaggccgaggcgggcggatcacgaggtcatgagatcgagaccatcctggctaacatggtgaaaccccgtctccactaaaaaatacaaaaaattagccgggcgaggtggcgggcgcctgtagtcccagctgctcgggaggctgaggcaggagaatggcgtgaacccggaaagcggagcttgcagtgagctaagatcgcgccactgcactccagcctgggccttggagtgagactctgtctcaaaaaaaaaaaaaaaaaaaaaaaagaattgacttgaaggagtcaggccggaaggccaaataggagatgaatggggatagcggcttgaataagggcagtggcaaggaaaatgggctaggggttagggaagggggctgactggctgtgca

SEQ ID NO: 83507 - DNA, 708 bp, Homo sapiens
tgtaatctccccattttgggaggccgaggcgggcagatcacttggggccaggggtttgagaccagattgggcgacatggcaaagccccatctctacaaaacatataagaatcagccaggcgtggtggcatgcactgcctgtggtcctggctacttgggaggctgaggctggaggatagcttgggccgggaagcttgaggttgcagtgagcagagatcataccattgtactccagcctgggtgacagagcgagactttgtctttaaaaaaaaaaatagaggctgggcacagtggctgacgcctgtaatcccagcactttgggaggccgaggcgggcggatcacgaggtcatgagatcgagaccatcctggctaacatggtgaaaccccgtctccactaaaaaatacaaaaaattagccgggcgaggtggcgggcgcctgtagtcccagctgctcgggaggctgaggcaggagaatggcgtgaacccggaaagcggagcttgcagtgagctaagatcgcgccactgcactccagcctgggcsttggagtgagactctgtctcaaaaaaaaaaaaaaaaaaaaaaaagaattgacttgaaggagtcaggccggaaggccaaataggagatgaatggggatagcggcttgaataagggcagtggcaaggaaaatgggctaggggttagggaagggggctgactggctgtgca

SEQ ID NO: 83508 - DNA, 708 bp, Homo sapiens
tgtaatctccccattttgggaggccgaggcgggcagatcacttggggccaggggtttgagaccagattgggcgacatggcaaagccccatctctacaaaacatataagaatcagccaggcgtggtggcatgcactgcctgtggtcctggctacttgggaggctgaggctggaggatagcttgggccgggaagcttgaggttgcagtgagcagagatcataccattgtactccagcctgggtgacagagcgagactttgtctttaaaaaaaaaaatagaggctgggcacagtggctgacgcctgtaatcccagcactttgggaggccgaggcgggcggatcacgaggtcatgagatcgagaccatcctggctaacatggtgaaaccccgtctccactaaaaaatacaaaaaattagccgggcgaggtggcgggcgcctgtagtcccagctgctcgggaggctgaggcaggagaatggcgtgaacccggaaagcggagcttgcagtgagctaagatcgcgccactgcactccagcctgggccwtggagtgagactctgtctcaaaaaaaaaaaaaaaaaaaaaaaagaattgacttgaaggagtcaggccggaaggccaaataggagatgaatggggatagcggcttgaataagggcagtggcaaggaaaatgggctaggggttagggaagggggctgactggctgtgca

SEQ ID NO: 83509 - DNA, 629 bp, Homo sapiens
actgtctcatctctttctttggggcaccagaacttatccaaagacaagactcagtgtttctggcaacagtgggccagaggaataatgtgtttcagaggaggaagaaggggttgtaccccatggaaacagtatatagttttacagtagtgcgtctctctccaataaytagttagcgtgttcctgttaatggaaaatactggtggtgtaagttcccctggatgttctcatcttcatgtaaatttgttcatttccttccttccttccttccctacttctctcccttccctacttctctcccactcgttttctctctctctttattctttccctccctccttcccttccaccctccctcccttccttccttccttccttcctcccttcctccttccttccctccctccattctttcctttcttcctttcttcttttctttttctttgtctctcatgttctctctttttctttcctttttgttctacttttttaaatagaccacactgcactgaaatctacattacttaccaaaacctctggagctgcttctgtcttgtaggcagggagctcgtcctgtagcccttaggtcctcccagcctcctcctcctctgatttgtgggtgccactggggc

SEQ ID NO: 83510 - DNA, 629 bp, Homo sapiens
actgtctcatctctttctttggggcaccagaacttatccaaagacaagactcagtgtttctggcaacagtgggccagaggaataatgtgtttcagaggaggaagaaggggttgtaccccatggaaacagtatatagttttacagtagtgcgtctctctccaataactagttagcgtgttcctgttaatggaaaatactggtggtgtaagttcccctggatgttctcatcttcatgtaaatttgttcatttccttccttccttccttccctacttctctcccttccctacttctctcccactckttttctctctctctttattctttccctccctccttcccttccaccctccctcccttccttccttccttccttcctcccttcctccttccttccctccctccattctttcctttcttcctttcttcttttctttttctttgtctctcatgttctctctttttctttcctttttgttctacttttttaaatagaccacactgcactgaaatctacattacttaccaaaacctctggagctgcttctgtcttgtaggcagggagctcgtcctgtagcccttaggtcctcccagcctcctcctcctctgatttgtgggtgccactggggc

SEQ ID NO: 83511 - DNA, 1147 bp, Homo sapiens
tgcatacttgtggcataagccactggtaggtagatttttctgttgtactgaaatatatcctaactgctatttcatactgacattggaaattggagaccagagtaatcaataagatgaaaacatatactgttaattcttccaggtgggaaatacaagttgttttctgtttaggtagagcactgaacctcacaaacaccaaatttatttgtaaatcgattgattgttcattggcgttcattatgagggagcctaggacggcagaaagctcatgggactggtgtctagatagcaaagttttggtctcaggtctgtgatctcaggcatcagttctctctttctgtagaagaaacacaaaggtttgaaattgaatcaaagcccgacattcaatmgggcattagtccaggacaaattttccagactgtattttttttctgtgactgaaaacccttacttcttcaaatctgaatcttaaaagatgaataaaattcatctttaaataaaatatctttaatgtgaactaatattttattttagtgataaaataaatgaataaaaagagtttcaactggtttctcttgtttattaaataatgtaataaatatatattacatctatatcatttttaattgatccatggtggagaatttgaagagcttaccttttcttagtagagtttgtgttgggaaacacagaactagatggctctgattctgaatagaaaaatgtgttagagttctttgccgatacaaagagccaaaacgaaggtttcagctggtggtgttctagtttcagggggccagggcagaaacacttagaacagaaactgggatggcatcccagcttcctgcctgttgttcaagcccaccctgactttctgggtgagggacctgtttgccaatgctatgcttcacttatgaccctgaataaaaatctggatacgctgttctatggaagtaaagcaaaaaactttaatttaggaactgtcatatactagtgtatggaaatccatttctgaggccctttgaattcttgttttcataggacaagatcaatggctaagaatcagatagtcaaatgctggaggactctttactgagctctgctacaggcacagtgctatgtgaagacatggtccttcttttctagg

SEQ ID NO: 83512 - DNA, 1147 bp, Homo sapiens
tgcatacttgtggcataagccactggtaggtagatttttctgttgtactgaaatatatcctaactgctatttcatactgacattggaaattggagaccagagtaatcaataagatgaaaacatatactgttaattcttccaggtgggaaatacaagttgttttctgtttaggtagagcactgaacctcacaaacaccaaatttatttgtaaatcgattgattgttcattggcgttcattatgagggagcctaggacggcagaaagctcatgggactggtgtctagatagcaaagttttggtctcaggtctgtgatctcaggcatcagttctctctttctgtagaagaaacacaaaggtttgaaattgaatcaaagcccgacattcaatagggcattagtccaggacaaattttccagactgtattttttttctgtgactgaaaacccttacttcttcaaatctgaatcttaaaagatgaataaaattcatctttaaataaaatatctttaatgtgaactaatattttattttagtgataaaataaatgaataaaaagagtttcaacyggtttctcttgtttattaaataatgtaataaatatatattacatctatatcatttttaattgatccatggtggagaatttgaagagcttaccttttcttagtagagtttgtgttgggaaacacagaactagatggctctgattctgaatagaaaaatgtgttagagttctttgccgatacaaagagccaaaacgaaggtttcagctggtggtgttctagtttcagggggccagggcagaaacacttagaacagaaactgggatggcatcccagcttcctgcctgttgttcaagcccaccctgactttctgggtgagggacctgtttgccaatgctatgcttcacttatgaccctgaataaaaatctggatacgctgttctatggaagtaaagcaaaaaactttaatttaggaactgtcatatactagtgtatggaaatccatttctgaggccctttgaattcttgttttcataggacaagatcaatggctaagaatcagatagtcaaatgctggaggactctttactgagctctgctacaggcacagtgctatgtgaagacatggtccttcttttctagg

SEQ ID NO: 83513 - DNA, 1029 bp, Homo sapiens
tctttttacccattgatcagcctcttcttatcccctcttcccccatactcttcaatctccggtaaccactgttctattcactgtttctacgagatcaaaaaattttaagattgttcgtataagtgagatcatgtattgtttttctgtgcctggtttatttcacttaacatatggcttccaggttcatccattcacattgtcgaaaatgacaattttattctttttttatgactgaatagtattccattgtgaatatataccacatttcctttatccattcatctgttgttggacacttgggctgattccatatatggctattgtgaatagcactgcaatgaacatggaaatgcagacatctctttgatatactgatttcatttcctttggatatatacccagcagtgggattgctggatcatatggcaattatagttttaattttttgaggaacctccatactgttttccataatactgtactaatttacatttccaccaacagtgtgtaaggattcgcttttctcccaatatgtagtttttagctttccaatatacccaaatagaaagtggttcaactggagtttgagaaaagtgaatccagttatccagcacaattctctcacacggacctgttctgaatttcctttatgaatttttgggttgaaggcacaccttcttattcccttggtctctctttctcttagacaccacttatattcaagttcatgaacaaattaagaaacagtgatttattatttaagaatcacttttgagcacctacttgtctgagaagacactgtattaggcacaaacaacacagaaaggaataagatttggttccagttttcaaaaagtgcacagcccttaaaggtagagggacwagaaagtaaattatatgatactgagtgagaaacggtagaagagatatgtgtgtaggattctgtggaagtgcatctaaaaagtcagattcttaaccatgctaagagggaagtgttagagaaagtagagagagaaataaggaaaatgc

SEQ ID NO: 83514 - DNA, 777 bp, Homo sapiens
aaaacaagtatagtaaattggaaacataagtttaaggtagaaataaatcgcaatacagtagtaattatgataaatgaaaatgttaaactcagtaataaaaagaccaataattccagactggttaaaaaaatacaacattccaaatgactcaagaaaggctaaattgaagaacgaaaaatacatactatagaaatattacccacaaaaaagctgtaatgacaattttaatatttgactaaataaatatcaagacaaaaatgtcctaagaaaaaaagatgaatgttataccaataaaaataacatgtaaccactgtgagcctgtatacacttaacaatatatctttaaaatatgcgaaacaactgacaaactgaagagataaataaatacaaaaacattagttgtcggacattttaacccatcccctccccacctaatggagacaaaaataagcwgtggtagaggccataagaataatacaatttataactaaagtgattaaatttgcagtgctaagactagcaaaccaagtacacgcagtctttctggttacttgatgcctgtcagcccctgttttttacctgtctgcaatgaaataaatgtaaaaattgagagtaataaaaaatttataacagttttctattgttgagacatatgatttcataattttttgtattttattttattaaaatttgaaaaatgatagtttgtaacgaaattaacaattttttaaactggtccttcaccacagaaagtttgagaagtactatttttatgca

SEQ ID NO: 83515 - DNA, 890 bp, Homo sapiens
cgcgactatttcaccaaagcgtagacaaggctgggccaggtggccagactttccctagaggtccaggcaaagccctacagagcgcagtggggagtggcccgcagctccctccacaactgctctccagaaacagccacagccctgaccttccagaaaagcaacacaaacagaaagcaatgccagacaggcccggggcaggcggcacatccracagaggctggggaacggcctccagatgaccttgtgactgtcagtgagtcgcactccccttgccaagtggacattttcacaccagggtttgctgtctcttcgtagctgttctttccatccaggagcccagcacattgcccatcgttaagccccatttttcctatgaccagtctcagatcccacagcagcagctgcccatcctgggccctcccatctgggctacctagaactattgtcaggagcccacagaccccctggccatatgtgatgtggcagatcagggcaagagagagtgcaaaagcaaataggtacatttttgtaattctcaaaggtgacagttcctgagattccatattcattaaaacttcctagactcttagacaggtgacagcatctccaaaggaagtaatgatggatcttggcttcaaatatacgtttaattggagtctacggcttgtgataaatatgtctttactggcctttcaactaaggacaatcgtggtgatattccagtgaattgatgtgagttccaagggtgtacttgggacctcgtgcaggcgcccatgcctgtaaccccagaactttgggagactcaggtggaaggattgcttgagcccaggaatttgagaccggcctgggcaacatagcaaaacttcatccctaaaacatttttagaaaat

SEQ ID NO: 83516 - DNA, 599 bp, Homo sapiens
cctctccattttcagtcccagaagggagtctccttgttgtgacatctgtaaaaaggaagaccctctaggaggagacagtgcccccaaaaaagggccagtgtggcctcagcagggccctcctggaagagggtgcttgtggttctggctttttctcctctgcttctgtgatggggcctgtagacccagctgctcagactgtggggctgtgggcaggctgttcctggtcccataagagggtgaaaggtctcacctgaaatgctgccctgcttccctgtgtggatgacaccttctgggaggtgtttaattttccaaggccctttgaaggaccccacagatccttcaattcagttcaaaactaggcccaaaggtatggggtcaagacagactgggcttgggaagtacctagagtcagggtggtaactgtccttgcactggtgtgggctcattctgagaggggaggagactggacgtggggaattccacacacacttcagtagaaaatatcttgaggggacatarggacagatagtccagtaatggaggttcttcttccagtatgggagctacgcccttcatctggcattcactactggagccga

SEQ ID NO: 83517 - DNA, 740 bp, Homo sapiens
tgagtgtatgggtgtgagtgcgtgtgtgtgagtgtataagtttaagtgtgtgtgwgagtggatgagtgtgtgtgagtaaatgagtctgtgtgtatgaatgtgtgagtgtatgagtgtgtgtgagtgtatgagtgtgtgagtggatgtgtgtgtatgtgtgtatgaggctgtgtgtgcatgtgaatgtgtgagtgtatgagtgtgtgtttgtaagtgtgagagagaaagagtgtgtgtgtatatgtgtgtgtgtgttttgtgctggcctgcaccagccatgctgctccacgagaagggagtggtcccagctctgtgccccccactcaccgcccaatccaaaggtgtctgcagcatcacacgctctcccaccccagctcccggtatacggagaaggaaaccgcctctctttccagctcccagcagagctgtctcgtcctgacacatggccagatgctcataaccctgaactgggagggtcacagaaaccaataagccttctccagggtggcttagagctgtgtccctgttccggcaccactcctttggtgcattgaggttggaatagtgactgtgttgacttgaggttgattctgcagagcttccagcactcacatgcacttctgactttaacgcttcttgctgcctaattttcttccagatttcactggtggttgctcctgatttacagcacaacttcttatgcaataccagaacctcatggctacaaccacgtgcagtct

SEQ ID NO: 83518 - DNA, 740 bp, Homo sapiens
tgagtgtatgggtgtgagtgcgtgtgtgtgagtgtataagtttaagtgtgtgtgtgagtggatgagtgtgtgtgagtaaatgagtctgtgtgtatgaatgtgtgagtgtatgagtgtgtgtgagtgtatgagtgtgtgagtggatgtgtgtgtatgtgtgtatgaggctgtgtgtgcatgtgaatgtgtgagtgtatgagtgtgtgtttgtaagtgtgagagagaaagagtgtgtgtgtatatgtgtgtgtgtgttttgtgctggcctgcaccagccatgctgctccacgagaagggagtggtcccagctctgtgccccccactcaccgcccaatccaaaggtgtctgcagcatcacacgctctcccaccccagctcccggtatacggagaaggaaaccgcctctctttccagctcccagcagagctgtctcgtcctgacacatggccagatgctcataaccctgaactgggagggtcacagaaaccaataagccttctccagggtggcttagagctgtgtccctgttccggcaccactcctttggtgcattgaggttggaatagtgactgtgttgacttgaggttgattctgcagagcttccagcactcacatgcacttcygactttaacgcttcttgctgcctaattttcttccagatttcactggtggttgctcctgatttacagcacaacttcttatgcaataccagaacctcatggctacaaccacgtgcagtct

SEQ ID NO: 83519 - DNA, 738 bp, Homo sapiens
agaaagctgtttcatttaagaggattaggtacagagagcatcatgcagtcaaaatcaggcttcttgtcaccaatactttttgaaaacaaactttgtccgctgatctttatattgtgcggcaacaaaaacacagacatcaaaaactaagagaaaaatgctaaagaattacatttgtagacaaaccttgttgaatgcttatcatctgtgtgaggaacaagtcaaagctggttgaatcatggctttccctcagcttgcaaaaacacgaagtgacttcagctaaagtgctttagtctttctaactcaccaccacaccgatcatgagaatgcttggcaggagttcgataccagcctgactaacacagtgaaaccccctctctactaaaaatacaaaaattagcmgggtgtagtggccgggcgcctgtaatcccagctactcaggaggctgaggcaggagaatcgcttgaacccaggaggcggaggttgcagtgagccgagatcgctcttgctctccagcctggaggacagagcgagactcgtctcaaaaaaaaaaaaaaacaaaacaaaacaaaaaaacgaatgcttgctcccctgcatttcaggaaggaaacttgagatagcagttgagacaggctgagcagcacataaaaccttttccaaagcacaatactggtttttattcttctggttcaaaatggtacttctgcatactttaaaatcccagtaaaccaagacagctaa

SEQ ID NO: 83520 - DNA, 738 bp, Homo sapiens
agaaagctgtttcatttaagaggattaggtacagagagcatcatgcagtcaaaatcaggcttcttgtcaccaatactttttgaaaacaaactttgtccgctgatctttatattgtgcggcaacaaaaacacagacatcaaaaactaagagaaaaatgctaaagaattacatttgtagacaaaccttgttgaatgcttatcatctgtgtgaggaacaagtcaaagctggttgaatcatggctttccctcagcttgcaaaaacacgaagtgacttcagctaaagtgctttagtctttctaactcaccaccacaccgatcatgagaatgcttggcaggagttcgataccagcctgactaacacagtgaaaccccctctctactaaaaatacaaaaattagccgggtgtagtggccgggcgcctgtaatcccagctactcaggaggctgaggcaggagaatcgcttgaacccaggaggcggaggttgcagtgagccgagatcgctcttgctctccagcctggaggacagagcgagactcgtctcaaaaaaaaamaaaaacaaaacaaaacaaaaaaacgaatgcttgctcccctgcatttcaggaaggaaacttgagatagcagttgagacaggctgagcagcacataaaaccttttccaaagcacaatactggtttttattcttctggttcaaaatggtacttctgcatactttaaaatcccagtaaaccaagacagctaa

SEQ ID NO: 83521 - DNA, 738 bp, Homo sapiens
agaaagctgtttcatttaagaggattaggtacagagagcatcatgcagtcaaaatcaggcttcttgtcaccaatactttttgaaaacaaactttgtccgctgatctttatattgtgcggcaacaaaaacacagacatcaaaaactaagagaaaaatgctaaagaattacatttgtagacaaaccttgttgaatgcttatcatctgtgtgaggaacaagtcaaagctggttgaatcatggctttccctcagcttgcaaaaacacgaagtgacttcagctaaagtgctttagtctttctaactcaccaccacaccgatcatgagaatgcttggcaggagttcgataccagcctgactaacacagtgaaaccccctctctactaaaaatacaaaaattagccgggtgtagtggccgggcgcctgtaatcccagctactcaggaggctgaggcaggagaatcgcttgaacccaggaggcggaggttgcagtgagccgagatcgctcttgctctccagcctggaggacagagcgagactcgtctcaaaaaaaaaaaaaaacaaaacaaaamaaaaaaacgaatgcttgctcccctgcatttcaggaaggaaacttgagatagcagttgagacaggctgagcagcacataaaaccttttccaaagcacaatactggtttttattcttctggttcaaaatggtacttctgcatactttaaaatcccagtaaaccaagacagctaa

SEQ ID NO: 83522 - DNA, 1154 bp, Homo sapiens
tgcataaacaagtgcttgtcacctagccatactaatcaccatttggtgagtgcctgaattaatgggctttgtaggactggggaaccaacagggcatggagtctagaaattggacttaaagttcaataactgctaatgaatgaggaaatcaaccagaaaaaatgatgctgcttaactttccttggagattatctgtacttggtccccctaacaatgactagactgtttgcaattataggtacagaatagccttctttcaaatagtatttccttctatcatcattagtgatgaaaattggccaggatttatttcacatattamaatgcagaatttgatgttgtttttatgtgaacataactgctctctaaaacctcaagcatttttctctattagaattggcagaggagaggttatataaacttgtggccagttgagaagttcccaaaacatcactattgaagtagagggaactgagagcatagcatggtgtgtgtgatttactcctttaggatggcttagacccatgattgcatctgttcttgattatggcgccgcttttaaccacagagatgactcagcactggaaggttagctgtgctgcccaaggtcacacagcaacatgggtttgatggggtatccaaaagcagggatagctgtttttccctaggagcccacactgactccctgcctccagcacatggaatgaatcacagaaagcctctgttgagtcatgatgacaaacgttgaagttgacggcatgtacccatgaggtcatatggagaattcccaaggggcaccctagcccacgttcactattgaacacaacggaagggggaattattgtgcttcttgctttgattcccaagctggtgttgtctgagcctgtctggcatgtgctctgcctgccctgacttctgaccccaggaggagcattcaaggagccaaggaatgggtccaggcattgtgctagtatctagccatggcaagatgctagatctaaccatgacgagagcagctaagatcggactgtacctgagtgagcccattgaatcctccaccagcaccacacggggtttctattgtttgtctcagctgcaggtgaggaagctgagctggagagggcttcagtggctggacccaggctgtgtgggctt

SEQ ID NO: 83523 - DNA, 571 bp, Homo sapiens
gtacataacagagcagctccctcgctgcaatctattgaaagtcagcccttgacacaagggtttatatataaaaaaaaaaaaaagacatttgcgggggtcaagccaagatggccgaataggaacagctccgttctacagctcccagcatgagcaactcagaagacaggtgatttctgcatttccatctgaggtaccgggttcatctcactaggaagtgccagacggtgggtgcaggacagtgggtgcagcacaccgtacacaggcggaagcaggacgaggcattgcctcactcaggaagtgcaagggatcagggaattccctttcctagtcaaagaaaggggtgacagacggcacctggaaaatcgggtcactcccaccctaatactgcgcttttccgatgggcttaaaaaatggcgcaccaggagattatatcccgcacctggctcggagggtcrtacgtccacggagtctcgctgattgctagcacagcagtctgagatcaaactgcaaggcggcagtgaggctgggggaggggcgcccaccattgcccaggcttgcttaggtaaacaaa

SEQ ID NO: 83524 - DNA, 712 bp, Homo sapiens
aataaagttggtgtggataagctttgatgagcaaagggagaaggtatgtgagatgatactagtgaaggaggcaggagccaatcatttaggaccatgtttattactttgcacttgaatgtaaggtcaatgaacaatcgctaaaggtatgctaagtaagccaatgttatgatttagtttgaggtttaagatcactcttattgcaatggattgggaagcatggctgtaaagagcagaagtagaagaggataaccaatgaggatgcttctgtagtagtctatatgaatgagaaagatgatttagaccagtggagataaagagaagtggatatatttggaagatatttgagataacagattggaggtaggctgcaaatcaggggaggatcctagtcagtctccagtgtgcaattaggcctttgataactaaactatttaggatttatcaggaatattctggaagcacaaggaaatggcatatagactgtctcaggataattccaattctaagaatccatgacttctttctaagaatgttgatgtttctagtcttcctctcacctgcaaatttgacttcttttctctggcccttttattttatttatttatttattaaattatactttaagttctgggatacatgtgcaaaatgcgcaggtttgttacataggtatacatgtgccatggtggtttgctgcacmcatcaacccgtcatc

SEQ ID NO: 83525 - DNA, 1192 bp, Homo sapiens
agcaggtcattatgcacagaactcctgtggtcactgtcctggcygttgtttcatgaataatgccaataatattttccagcatgtggatgctgagaatgatcccttctatatcaaaaggagttgaaattaaggatagggctgcctttgcccattgatagagaattctcagttctgtaggactgtcagtcttacagtataaattctcttctcttggggtcagcaaaggtaaagactcttagtagggtgaagggtatagcaagacaactctgctgctaaataattggatggtctggtaatctgtgaccttgagtcacatcagattgcaagtcagaagagaagtttctagaagaaaaatcccaggaccatacttatactagcttatcaccaactcaattacaatatcctggaaaggcgtgacaaagcagatcttaagattataaactatgtctataacataggaaaacccttttaaaaccactttactaatcacaaacttggctaatcctggcctaagaatctatatgagtcaaatcttatcttgccataactatggttcaaataattcaatttggttcagaatgtatgagtagctgctctgtgcctagcattgtactgtgtacttgagggcagggattcccaaagtgtggttcctggaccagcaggagctgcatcacctggaaacttcttaaaaacacaaatttctagtccccacccagaactaccgacagacactctggaggtgggtctcctgggtgattctgaggcacaaagtttcagaaccactgctctaggggatatacaaataaagttaaatggaattctgtcatattgatttttctacttaggaagtctttagttagtggaagtcttggaattttttgttttttttttttgagatggatttttgcttttgttgcccaggctgtagtgcaatggtgcaatcttggctcactacaacctctcctgcatcagcctcccaagtggctgggattacaggcatgtgccaccacacccagctaattttgtatttttagtagagacagggtttctccatgttggtcaggctggtcttgaactactgacctcgggtgatccacccacctcggcctcccagagtgctgggattacaagcgtgagccacagcacccgacctagaatttgttttttaattaattatctatccaaataacat

SEQ ID NO: 83526 - DNA, 1192 bp, Homo sapiens
agcaggtcattatgcacagaactcctgtggtcactgtcctggccgttgtttcatgaataatgccaataatattttccagcatgtggatgckgagaatgatcccttctatatcaaaaggagttgaaattaaggatagggctgcctttgcccattgatagagaattctcagttctgtaggactgtcagtcttacagtataaattctcttctcttggggtcagcaaaggtaaagactcttagtagggtgaagggtatagcaagacaactctgctgctaaataattggatggtctggtaatctgtgaccttgagtcacatcagattgcaagtcagaagagaagtttctagaagaaaaatcccaggaccatacttatactagcttatcaccaactcaattacaatatcctggaaaggcgtgacaaagcagatcttaagattataaactatgtctataacataggaaaacccttttaaaaccactttactaatcacaaacttggctaatcctggcctaagaatctatatgagtcaaatcttatcttgccataactatggttcaaataattcaatttggttcagaatgtatgagtagctgctctgtgcctagcattgtactgtgtacttgagggcagggattcccaaagtgtggttcctggaccagcaggagctgcatcacctggaaacttcttaaaaacacaaatttctagtccccacccagaactaccgacagacactctggaggtgggtctcctgggtgattctgaggcacaaagtttcagaaccactgctctaggggatatacaaataaagttaaatggaattctgtcatattgatttttctacttaggaagtctttagttagtggaagtcttggaattttttgttttttttttttgagatggatttttgcttttgttgcccaggctgtagtgcaatggtgcaatcttggctcactacaacctctcctgcatcagcctcccaagtggctgggattacaggcatgtgccaccacacccagctaattttgtatttttagtagagacagggtttctccatgttggtcaggctggtcttgaactactgacctcgggtgatccacccacctcggcctcccagagtgctgggattacaagcgtgagccacagcacccgacctagaatttgttttttaattaattatctatccaaataacat

SEQ ID NO: 83527 - DNA, 1192 bp, Homo sapiens
agcaggtcattatgcacagaactcctgtggtcactgtcctggccgttgtttcatgaataatgccaataatattttccagcatgtggatgctgagaatgatcccttctatatcaaaaggagttgaaattaaggatagggctgcctttgcccattgatagagaattctcagttctgtaggactgtcagtcttacagtataaattctcttctcttggggtcagcaaaggtaaagactcttagtagggtgaagggtatagcaagacaactctgctgctaaataattggatggtctggtaatctgtgaccttgagtcacatcagattgcaagtcagaagagaagtttctagaagaaaaatcccaggaccatacttatactagcttatcaccaactcaattacaatatcctggaaaggcgtgacaaagcagatcttaagattataaactatgtctataacataggaaaacccttttaaaaccactttactaatcacaaacttggctaatcctggcctaagaatctatatgagtcaaatcttatcttgccataactatggttcaaataattcaatttggttcagaatgtatgagtagctgctctgtgcctagcattgtactgtgtacttgagggcagggattcccaaagtgtggttcctggaccagcaggagctgcatcacctggaaacttcttaaaaacacaaatttctagtccccacccagaactaccgacagacactctggaggtgggtctcctgggtgattctgaggcacaaagtttcagaaccactgctctaggggatatacaaataaagttaaatggaattctgtcatattgatttttctacttaggaagtctttagttagtggaagtcttggaattttttgttttttttttttgagatggatttttgcttttgttgcccaggctgtagtgcaatggtgcaatcttggctcactacaacctctcctgcatcagcctcccaagtggctgggattacaggcatgtgccaccacacccagctaattttgtatttttagtagagacagggtttctccatgttggtcaggctggtcttgaactactgacctcgggtgatccrcccacctcggcctcccagagtgctgggattacaagcgtgagccacagcacccgacctagaatttgttttttaattaattatctatccaaataacat

SEQ ID NO: 83528 - DNA, 540 bp, Homo sapiens
tcaaaaatggacattccactctcacatctgcaacctggaattcatcattgaagtaaaacatacatctaaaaaacaaatgatatagtaataatatatccacaatagaatgtgataagtgatatataatagtgtgtcctggtaaggccaacttattctacctggggacatcaggaaatactttatccttataaactaattatatttgcattttaaaagtgtcttgaatagattatatgaaaccatcacagactgctccattcttaacatgagcatgaactagctgctgggaactgcacgtgtgcatagatgtcakttgggagcaagctttgaacttcaccttttcacaactgttatgctccttctccttcatcatctccccaaatttcagaaaaactcacaaaacttctttatagtatcttccctggtgctattataagccactgggtcagtggatagcagttttaagctacttgcttaatggcttataatggtttctctacacttagtatgctcttaagtacctctagtttgtcatctaac

SEQ ID NO: 83529 - DNA, 540 bp, Homo sapiens
tcaaaaatggacattccactctcacatctgcaacctggaattcatcattgaagtaaaacatacatctaaaaaacaaatgatatagtaataatatatccacaatagaatgtgataagtgatatataatagtgtgtcctggtaaggccaacttattctacctggggacatcaggaaatactttatccttataaactaattatatttgcattttaaaagtgtcttgaatagattatatgaaaccatcacagactgctccattcttaacatgagcatgaactagctgctgggaactgcacgtgtgcatagatgtcagttgggagcaagctttgaacttcaccttttcacaactgttatgctccttctccttcatcatctccccaaatttcagaaaaactcacaaaacttctttatagtatcttccctggtgctattataagccactgggtcagtgkatagcagttttaagctacttgcttaatggcttataatggtttctctacacttagtatgctcttaagtacctctagtttgtcatctaac

SEQ ID NO: 83530 - DNA, 540 bp, Homo sapiens
tcaaaaatggacattccactctcacatctgcaacctggaattcatcattgaagtaaaacatacatctaaaaaacaaatgatatagtaataatatatccacaatagaatgtgataagtgatatataatagtgtgtcctggtaaggccaacttattctacctggggacatcaggaaatactttatccttataaactaattatatttgcattttaaaagtgtcttgaatagattatatgaaaccatcacagactgctccattcttaacatgagcatgaactagctgctgggaactgcacgtgtgcatagatgtcagttgggagcaagctttgaacttcaccttttcacaactgttatgctccttctccttcatcatctccccaaatttcagaaaaactcacaaaacttctttatagtatcttccctggtgctattataagccactgggtcagtggatagcagttttaagctacttgmttaatggcttataatggtttctctacacttagtatgctcttaagtacctctagtttgtcatctaac

SEQ ID NO: 83531 - DNA, 1061 bp, Homo sapiens
acacacattagtaatctagtaaaataatgtgtgcacatattgagagacaagaagggggagagtatcttcaggattctcaagttttcaatcttgaaatgcttgcaaaagataaagtaggtaaatgcacttaacacaaatgtcaaacagtagatgcttaattaaaaagttaactctgaatctgcggggaagaaagcagtctcataataaattacaaacagaagactgatgggttttctagaaatgaagatagtaagcctcagagccctcattatagttctgcagcagatttagtggatgatctggaagaagctgctgaacgtctccatttcctgatcgcctcacatgcaaaatgcagagactatagtcagagtggcatgtatatcttgtaaagcttttatccctttgtgagccagacaaagtctggggagcattttttgttccctcaaaaatgcagattcaatataaaaataagatataagatatgaaaccttaagagttacatgaagaatcatcataagtgattgttttaaaatttttaatagagtaagattgaccccaactgaccaagaaaatcaaatttctacagctcagtggagcaattcttttttccatataaagaaagcagctcaacattaaaatgggcaaatacttaaggaagaagaaggaggattgaaaaactccaatgctccttttaaaaagctccctagaagaatgtgtattgcaagctgctcacttgaaaactgacaaggttccgctgtttctcttttgtgtgggtggatagacaatagacaggcagagtcaggaaatttcaagtcggggctctggaattaatttattctcacatcaaagtcagtgtggttggggctcaaaatgaaacacttgaataaaaactgacagaaggcattgttccccctcctgcagtgacacagaggtttctaatccccatgagccttagaaattcctcccagcytctggcagccaagagttttctttttgccttgtacagtcattgctaccaggtcattatgaggtgatccatgaggtagaacagcttgagagat

SEQ ID NO: 83532 - DNA, 828 bp, Homo sapiens
ataggttaacatgacaaaaggtatgtacttcttaggcgtcacctatacagggtactttacaagaaaattggggagttgtgacctctgactgccaagacttggaacccacattgcacatatcacccctgtattagtcaggattctctagagggacagaactaatagactagatatatatatataaaggggagtttattaagtattaactcacccaatcacaaggtcccacaacagccatctgcaggctgaggagcaaggagagccagtccgagttccaaaactgaagaacatggagtccgatgttcgagggcaggaaggattcaacatgggagaaagatgtaggctggaatgctaggccagtctctcttttcatgttttcctgtctgcttyatatttgctggcagctgattagatggtgcccacccagactaagggtgggtctgcctttcccagcccactgactcaaatgttaatctcctttagcaacactctcacagatacacccaggattaatactttgtatccttcagcccaatcaagttgacactcagtattaaccatcacaacccctaatcagtcaatcaaaaggcatttactcaggtctcatcatgcaactggaattcatgtttttcaataaggttaggaaatctttcctccatatcaaatgaggattttgcaattttaaaagtttagtttgatgttccagtggaaagatcaacatctgttggagttagagctatattaagtagaaattaatgattttagagtttgccttctaaaatccctctctgttagaattgtctttagtgagccattatcatctagaat

SEQ ID NO: 83533 - DNA, 828 bp, Homo sapiens
ataggttaacatgacaaaaggtatgtacttcttaggcgtcacctatacagggtactttacaagaaaattggggagttgtgacctctgactgccaagacttggaacccacattgcacatatcacccctgtattagtcaggattctctagagggacagaactaatagactagatatatatatataaaggggagtttattaagtattaactcacccaatcacaaggtcccacaacagccatctgcaggctgaggagcaaggagagccagtccgagttccaaaactgaagaacatggagtccgatgttcgagggcaggaaggattcaacatgggagaaagatgtaggctggaatgctaggccagtctctcttttcatgttttcctgtctgctttatatttgctggcagctgattagatggtgcccacccagactaagggtgggtctgcctttcccagcccactgactcaaatgttaatctcctttagcaacactctcacagatacacccaggattaatactttgtatccttcagcccaatcaagttgacactcagtattaaccatcacaacccctaatcagtcaatcaaaaggcatttactcaggtctcatcatgcaactggaattcatgtttttcaataaggttaggaaatctttccyccatatcaaatgaggattttgcaattttaaaagtttagtttgatgttccagtggaaagatcaacatctgttggagttagagctatattaagtagaaattaatgattttagagtttgccttctaaaatccctctctgttagaattgtctttagtgagccattatcatctagaat

SEQ ID NO: 83534 - DNA, 1414 bp, Homo sapiens
agctggtgaagaccaaggaaagcaaactgaagttttatggacaatggttgaagggatcagaaaataattattaaatctatgcaaaagacaggtggcccctggaaacagaagaggaactcaggggcccttaaaaggtctttcaggctgggcacagtggctcacgcctgtaatcccaacactttgggaggctgaagtgggtggatcacctgaggtcaggagtttgagaccagcctggccgacatggtgaaacccgcctctactaaaaacacaaaaattagctgggcatggtggtgcatgcctataatcccagctactcaggaggctgagacaggagaatcatttgaatccaggaggcggaggttgcagtgagccaagatcttgccactgcactccagcctgggtgacagagcaagactcagtctcaaaacaaatctgaaatctgatctatcygccacttcaataggattccaaatgtttttggttgttaatggcttagataccctgagatgctgaggctgttcctacaagtccagctgccacatgcctacctttcttagctttttaatggtcacctgcagatctcctacttcagtttcatactgacgtctgaggtcactgagggcttcctcagctttgcgtttttcctaaaagaaaaaaaaatatgttgttcatttaaataagttcaccctcttaaccttcaaaaccccacaggtgagaaacattttgtgtcaaattaaggctgacttcagttctcctacacagggaaggtgagaaaggatatcagaaggaaaccaattgacttcagatgtaccacaattttggaactgaaacctacaaaactgaaagaagagcaggatcccacaacctacatacacacctcacccgggagtgacacctctaagactattactcacattgtgatagagaccatagcacatcaatcaattaagtaattattgctataattagttaaaagacatggcacagtgaccggaatcctatcatgtcatcaggactcaagaaggcatcctgggtgaacccttttccctagagatgatgtcttatctaaatcccaattacatcactgcaaatttctatgcaaagtgcctccctgtggcctggtacttctcgggggtgtcccttcaagttcttctggagcagagaatggcagtaaggcaccccaggtcaggggattgccattcagaagctcccactggctgaaacatctctaaatttacttttcttttaataaatgatacaattttatattttaccttcagtattcaaatagttttatgttgacagccagtaaaattcagtgtacaaatattcgcttatcacctaccaatggttctaagggactggggacatggggacagagagggggataataaaactgatgttctcaggcatt

SEQ ID NO: 83535 - DNA, 674 bp, Homo sapiens
ataaatataactaacatgtacaggactcatatgctggaagctgcagaatgttgatgaaggaaatcaaagaaggtctaaatgaatggagaggcataccatgttcatggattggaagactcaatatartgaggatgtcagttgtccacaaattgatattccaatttaatgaaattcctttcaaaatcctagccaggtttttaaataaatatagacaagataatctaaaatttatacagaaaggcaatataactaaaatagctaaaatacttttgagaaaaatggaaagaatcagtctactcaattctgagacttattacatagctacaataaccaaaagtgcatgctatcagcagaggaatgtacacatagatcaatgaaacagtagaaacttaaaaatagatgggagggaaatgtgagtggctaataaaaggcagcaggagggatccttatttgatggaaatgttttgtatcttcattctatcaatgtcaatgtcctgatttaatattatactataaatttgcaagatgttaccattgggggaaaccaggttaagggtacaccgaatctctctatattgttttttacatcttcacgtgaatctacaagtatctcaaaagacaagtatctcagagtctaattaaatataattacctcaatagacacagaaaatgca

SEQ ID NO: 83536 - DNA, 826 bp, Homo sapiens
aaagatgttgaagtatgatggatattattcagccttaaaaagacaggaaattctgacatatgctacagcatgggtgaaacctgaggacattatgctaagtgaagtaagccagtcacaaaaaggcaaatattgggtgagtccactcatatgagatacctagaccagtccaatccatagagataaaaagtagaatggtggttgccaggggcagagcaagggggaaatggggagttgcttaatgggtgtagtttcagatttgaaagataaaaagagttctggagatggatggtggtgatagctgtataatattaatgtataatatttaaagtaactgaacagtacacttaaaaatgattgacgataaattttatgtgtgtttcaccacaataaaaaaaaaagatgttcaagaacacaatatcacatggaaacatgtaataatatattgttaaatggaaaaagcaagttgcaaaaataacttaaaatgtgcgattttgtaaacacacacacacacactccrcagagaaaaatgttggaaaagggaagatgctaacaaattcacaaatctgggtagtggaaacaaagtgattgctattgccttctttttgtttatccatattttcagatcttccaggaacttcccattcttgaaaattacagcaaatgttgtgtttgtaagagtgatatgggaggctccctaagctattctgagcctcaggtttgagggttcctgggaatggagaattgagatggtgtatgtacagggatgcacggaggcagtccaccctccctagaagcagctttagtgagactgtggcaatggctgcag

SEQ ID NO: 83537 - DNA, 1384 bp, Homo sapiens
gaggttggtcaatgggtataaaaatacacttaggtagaagaaataagttccaattttcaatagcacaataaggtgatcattacacattgtatgcatgtatcaaaataccgtatgtacccccataaatatgtacaactgttatgtatcaataaaacaaatcaaaaaagaacatcattgagacagctgataaaatttcgatatgtattagataggagtttgggtctgacatgtaaagagcctggatatcattactcccatcctcacaacaagaaaaaagctgaaaaaataaaaaatttacaactcttcttagacccatcaaagaattaaggccttagggcaagccatcatactgaaaattgagacagatgaatacacaatatcacagcttgtgttccatcacctccccagtggccctgaccttgttagtaagtcctcttatttctccaaacctcctgccttggttgaggtttaggctttcatcgggtgttctttgttgccaactgtcaacaaaggaattttttccttttcagtgagtactcatggggacttctaagggtataggtgccaagtcactcctttctggaaaccctgctgcttttatgtacaaaagttacagtctttctcaatggaacaacatcactaaaagtgatttgaaaccacaatggccaacctgaggatcatttgatttgccaaaacttgttttcctctgtggacaattataacggctagaagaaaagattaaatagcctgtcagggcgcagttgctcacacctgtaatcccagcactttgggagactgaggcagcagatcacactccaggtcaggagtgtgagaccagcctggccaacatggtgaaaccctgtctctattaaaaatacaaaaattagctgagcatggtcatgcacttttaatcccagctactcgggagactgagggatgagaatcgcttgaatgcacgaggcggaagttgcagtgagctaagatcgcaccactgcactccagcctgggcaacagagygagactctatctcaaaaaaaaaaaaaaaaaagaaaagactaaatagcctgagtgggaagtctgctcgtatcttgaggcattcaagagactccagaaatcaaacctaatatccctaagagataataatgacaaataagctcaaagactttctaaattacaaaagaactcagaaacttctaaaggtaagtcaaaaaacaagtgtacctctatctctttgaccttgtcctgtgttgctttccccttctagctgtaccccttcccaacccactgctgtcctatgcaccctcttgcttactgcctgtctacccttccctaactgaacttcccttttttgatgaaccctgtggtggttaatattgagtgtcaa

SEQ ID NO: 83538 - DNA, 521 bp, Homo sapiens
tagaggctccctctgcatgaatggattagaaaaacacattttgccaagcaataaaagccttgtggtcctgtacactcgaaatgcatatgtctgagttcaaatcctagctctgcctcaccctgtggaatggctttggtaaataactagcctctcagtacttccatttcctcatctrtgtattggggacatttagcgctctctccaaaattaattgtgtggttgaattgaggtgttaggaagaagatatggctggcccttagcacacattccatatatatcatctattcgttcttaaaaataaaatatggcattaatttagaaataacactttttttcactagccttttatgcaaaaaagttattgagacatttcccctcatctttaatatctgtctttatcatcaatagacacacttttgaatcacttaaaacagttttccagagcccaacatcttgaattccaagttaagaatcaatactatgtttttgtatttggcagttgtattagtctgtttttatgc

SEQ ID NO: 83539 - DNA, 521 bp, Homo sapiens
tagaggctccctctgcatgaatggattagaaaaacacattttgccaagcaataaaagccttgtggtcctgtacactcgaaatgcatatgtctgagttcaaatcctagctctgcctcaccctgtggaatggctttggtaaataactagcctctcagtacttccatttcctcatctatgtattggggacatttagcgctctctccaaaattaattgtgtggttgaattgaggtgttaggaagaagatatggctggcccttagcacacattccatatatatcatctattcgttcttaaaaatmaaatatggcattaatttagaaataacactttttttcactagccttttatgcaaaaaagttattgagacatttcccctcatctttaatatctgtctttatcatcaatagacacacttttgaatcacttaaaacagttttccagagcccaacatcttgaattccaagttaagaatcaatactatgtttttgtatttggcagttgtattagtctgtttttatgc

SEQ ID NO: 83540 - DNA, 521 bp, Homo sapiens
tagaggctccctctgcatgaatggattagaaaaacacattttgccaagcaataaaagccttgtggtcctgtacactcgaaatgcatatgtctgagttcaaatcctagctctgcctcaccctgtggaatggctttggtaaataactagcctctcagtacttccatttcctcatctatgtattggggacatttagcgctctctccaaaattaattgtgtggttgaattgaggtgttaggaagaagatatggctggcccttagcacacattccatatatatcatctattcgttcttaaaaataaaatatggcattaatttagaaataacactttttttcactwgccttttatgcaaaaaagttattgagacatttcccctcatctttaatatctgtctttatcatcaatagacacacttttgaatcacttaaaacagttttccagagcccaacatcttgaattccaagttaagaatcaatactatgtttttgtatttggcagttgtattagtctgtttttatgc

SEQ ID NO: 83541 - DNA, 521 bp, Homo sapiens
tagaggctccctctgcatgaatggattagaaaaacacattttgccaagcaataaaagccttgtggtcctgtacactcgaaatgcatatgtctgagttcaaatcctagctctgcctcaccctgtggaatggctttggtaaataactagcctctcagtacttccatttcctcatctatgtattggggacatttagcgctctctccaaaattaattgtgtggttgaattgaggtgttaggaagaagatatggctggcccttagcacacattccatatatatcatctattcgttcttaaaaataaaatatggcattaatttagaaataacactttttttcactagccttttatgcaaaaaagttattgagacatttcccctcatctttaatatctgtctttatcatcaatagacacacttttgaatcacttaaaacagttttccagagcccaacatcttgaattccaagttaagaatcaatactatgtttttgtatttggcasttgtattagtctgtttttatgc

SEQ ID NO: 83542 - DNA, 521 bp, Homo sapiens
tagaggctccctctgcatgaatggattagaaaaacacattttgccaagcaataaaagccttgtggtcctgtacactcgaaatgcatatgtctgagttcaaatcctagctctgcctcaccctgtggaatggctttggtaaataactagcctctcagtacttccatttcctcatctatgtattggggacatttagcgctctctccaaaattaattgtgtggttgaattgaggtgttaggaagaagatatggctggcccttagcacacattccatatatatcatctattcgttcttaaaaataaaatatggcattaatttagaaataacactttttttcactagccttttatgcaaaaaagttattgagacatttcccctcatctttaatatctgtctttatcatcaatagacacacttttgaatcacttaaaacagttttccagagcccaacatcttgaattccaagttaagaatcaatactatgtttttgtatttggcagttgtattagtctgttttyatgc

SEQ ID NO: 83543 - DNA, 1740 bp, Homo sapiens
  misc_feature (1)...(1740): n = A,T,C or G
gtgacagaataagtgagatgttaacacctttctttactgcttaacttagggctgtatgtgttgcatgttcttcacattccaccctcttcccctttctgtcaattctatttcttaaatttcccttcaatcttctattcccattcatactgtcttagtcaaaacatattatcatgttcttagactgatttagccactcacaactgatgttctatagatctttttccttccaatccattctcacattgccccagatatttatttatttatttacttacttacttayttatttttgagacagagtctcactctgttgcccaggctggagtgcagtggtgcaattatggctcactgcaacctctgcctcccaggttcaagcaattctcctgcctctgcctcccaagtgatgggattatatgtgcctaggattacaggcttgcactaccatgcccagctaatttttgtatttttagtagagacagggattcaccatgttggccaggctggtcttgaactcctgacctcaagtgatctgcccgccttggcctcccaaagtgctgggattacatgtgccccagatattttttaaaagccatgaatcccttctcaaatctcttaaagttgtttaaaaattttagatggccaaaaagctctgctggctcctactgattttatatgtcctggctaaacaacatttcttcaagaaagcattttctggtatcgctggctaaatcaatttcccatgttgaatacttatagcatcttatacaatctaaaaatataataaattaatgtgaaattatcctcttaatgcctatcattttctccactattttgtataaaagtatgagtcatatctgttttgtttaccaagcagaaaaaaaattttttgaatgcatgagttagttaaacaatcaagttggcatcatttcagctctcaggaaagaagctctactcttaaggtgattgataacataaacaaataattataaaattaactggccttactctcagtttttcacacttgcccaccnaatggtacattaatttccacatatataccatagctctgatgcagcatattagttcctattgctgctgtaataaattaccataaacttagtggcttgaaacaacacaatttatctgctttcagttccagagagcagaaatccagaatgagtcttatgtggctttaatcaaggtgcctgcagagctagatccttctgaagtctctggggttgaatccatttccttggcttttccagcttctagaagccacctgtattcctttgtaacatctcctactatttaccttgatattcctgcatccgtcttataaagacccttaaaactacataggacccacctagataatccaggataatatctccatggaagacccttaacttaatcacatttgtgaagctcctttttccatgtaaaataacatagtcacagattccagggattaggacgtgaacatctctgagggattgttattcagcctaccacactcaactataagaaatgtttaacaatccgtatagagaaaaatctgctaaatttcctgtctgattaagagaaagaaaaatgttacttattcaaaatcaagtcccttctgcaacagagttttaaatgactgcaaaaatgagtttggctgcttgaagagttttttattataaaaatttacaaatctcattaagctttgttactgttttctcaattctaaatgcacagctg

SEQ ID NO: 83544 - DNA, 930 bp, Homo sapiens
ttaagaaggtatcaagtgtggcacctgcagtattaggtcagcacgtgtatcctggagtgtgggttcaaaccctgactccaccaataacttctggtgtgacttttggaaaattactaatctctctgagccttgaccttggctcacagagattagtaatttataaagttcacactaacaataacactaatctcattggccttttctgaaaatgcaaatgaaacaatctttggaaagtgtttaatacagtatctgacataaaccaaaaactcaataaatcttagctattatcattgagtttaggcagggttctgtgaaacgtggcctctagtagcaaagtaagaatagcttgcaagccttgaatacttaaaatagttggtcattctcactgtggtcactagaagttgcttctgctttggactcataaatgcttctggcaccttttttttttttttttttttttttgggacagggtcccgctctgtcgcccaggctggagtgcagtggtgcaatctcggctcactgcaagctccacctcccaggttcatgccattctcctgcctcagcctcctgagtagctgggactacaggcgcccaccaccatgcctggctaattttttgtactttttaggagagacagggtttcaccatgttagccaggatggtctccatctcctgacctcgtgatccacctgcctcagcctcccaaagtgctggggttacgggtgggagataccgtgcctggcacttctggtatctttttttttttttttcctttttaaaaatttttattttataaatagggacaggatctcactatgtcacctaggctgatctcaaactcctgccctcaagcaatcctcccgccttggcctcccaaagtgctgagattacaggtgtgagccactgtgaccagcytggtctcttaagctt

SEQ ID NO: 83545 - DNA, 717 bp, Homo sapiens
gctcagtgatgttaactcgtatctcctgtttgtccctccagtccctctcccattcacctcacaacctgaccttgagcccyttcttcactcagtacagggctcatcagcacatggtaattaacaatgatggacatggcttcctggcactctctgcatgccaggcactgttcgcagtgctttaatccacaaaacagctttgtaagtactgctattgtctccgttttacttgcgaggaaatagaagcacaaagaggttaaataacttgcccctgatcacatagctagctggtgacagagtcgagctttgaaccagagtctgtgcccatagcagctaacctatgtgctttactcatacatctacttacctataacttatttagtctcataagaaccctgaaaagtaggtgctattcttatccctattttacagatggcggtactgaggcagaggcaggttaaggaattgttcatggtctcccagttagtgagtagcattcctgagactggcattcaagacatctggccttggctgggcacagtgactcacacctgtaatcccagcactttgggatcctgaggtggaaggtcgcttgaggccaggagtttgagaccagcctggacaacatagtggactgtgtctcaaacaaaacaaaacaaaaacgaagtctggccttggggttcaggctctacgctactgtgctacatgatcctgcatgca

SEQ ID NO: 83546 - DNA, 834 bp, Homo sapiens
gcatgtgagttattcttaggcctattgcaggaaagaccaggaggtccagaagggctgttaacccagactttgcattcaaaaagcgttttaaatttaaaccttctccaaatgaagtcattcatatagtcccagcaacacagtgatcagacggacagaaatttgaacctgtgcctcagtgcgagaccacactccctacactgtgccatgaatggatattttatttttatcttataattatcctatgaatagccacaactttgcattgtaatttttgtgttaaaatgttattttgttacatgtcaacatgtaaaatatatcgccatttttgaaacattgttttggctttcctaaatttaaaaaaaaaaacattcctcaataaatggaagtgctctgagtctctctggtcttctgaaaatccattttgtaaaatagagcagggttcagtgattctgaaaacaaatgtatgccagctcagctttctaatacctaaaaagggcccaggcattttcctcatcatcaatctcatcattttaaattaagctctatgactctgttaatcctacaaatttcttgttgttccccgtgtcaattaagatgtttttgcctgtaagccacagaacatccaactaaaaatgagggaaatttatttcacataacaaggacagaaggtagggtgtttccaggactggttaactcaatagctcaatgttatcaccaaggatgtggccatgtgctttctatcctgctctaccattttcagcaagtgtcaaaagaaggctgcagtggctcctrccatcacagcagacacaacatcaagcaaagacaagacatttt

SEQ ID NO: 83547 - DNA, 967 bp, Homo sapiens
gcatatatatacacacacacacaactatatacccataaacattttttaaacaacaggttacaggtaacaatgtgtcaaagatggatagttatgtaatgagtggcttcatgaaaatataatttttatttcatttaaatttataattttaataaaaataaacaagaggctttgtataacctcataaactatcctatgctggactactttaaaattgtctaattttattaatgcactaagatcttagatgaagcccgtgtttgtgaagttacctattaggtcagcatttttacaatggatctctcctggtaacctgcccccaaaacctaagcatttgtagcaatcaaatcttcacctattgtttcaagattagtactctctttgaggaagagataaggaaagtcaagaatacttcatatggggtgtcttcatctttcaatctgaaaatgccaaagttgaaagcctagctggcaaaactttaaattccattacctcccaaaccagagagagcttacggatctaggcaatgaagtcaattaccaacatcactaatgtaattttaattattctgcatggcaatcacttgctataaggccataaatgtcaaaaaaaaaaaaaamccacgaagtttaggatttgcaataatcaggcacaagtatatgattgggcgggataattgagttatcagtacttagaggaaacaactgcccataaaacaataaaaagcattttgtttaggctgactctgagaaaaacagcataacatggaactataatttaaagtaggaagaaagtgagcgtgagagaaagagtgagagagaggggaggggagcgagaacgtacagactatgaaagaagcttaggatgcaagacatactgtttttgtgtaaagcacatgttgacttgggaagagttagttgtcaccaagtcactgcagcacgcttgtaacatgatgccttttaaagaccag

SEQ ID NO: 83548 - DNA, 732 bp, Homo sapiens
ctgcagcgttcatcacagcggtggctcccctcgtggctgtcatctctttcatggtgtaagacccatacctgagaagaaaacgttcaacagtcagatttgtcttttgtagaaaagtacagatttgagctgtctttcccaccatctggagccacatagtgaggcctgaaccaagcagcagccgatgatcgttttccaagctcctctgagcacatccatggacaagraaactccaggggcctcacgggctccccacttctcacgttctggaaataagcacaccggagctggaaatgagttatctttcaaacttccatggggtgcatgatcatcatcatcatcatcatcatcatcatcagaggaataaggcacgatagtatgaagagacagggaagcaatggtctgtgaagcacaaagcatcaatatttttcccccaattacagctgcaggaggcagtgtatggcaggcgagacaccagggtcctcagggagggtgagaaagagcagccgagattgtctcagggccgaaaagcaactgcctatggagccgcattccctgcctgggaatctgcagatagagcagacactcagtcacctcccggctgacgtcacagaagctcggagggacagggagggaggagagaggaagggacctctgcaccaagaaaaatattcacacttggtacaccctcccataaatagtccaagaggtggggacatatctgaggatcctagg

SEQ ID NO: 83549 - DNA, 382 bp, Homo sapiens
ttctgcacrgaaggtaggccaaagttccgggctctaaagtgtcttcctccctggatgccatccacagtcctgaggtcactacatgaagcccagggagccagcttcctctgccatctgagatcaatacagcttgaaaacgtgagtgtgggatgtgtgagctctcttttctggtggccgtcaatcactggcagggcctgccataggacagcaaagagagaaacggcaaataagcatttgcattagtagaacatcacgaagccctttgcctacggtaattgaaaaaaaatctaatttctgcttgtgtccctggagtatcttcccatttggattcctatagagtctccaaatcttgtcaacacaagtgaggtggtggaaggaattc

SEQ ID NO: 83550 - DNA, 744 bp, Homo sapiens
gctttacagtgtgctgggctttgttctaggtgattttcatgtgctaactcattttatccacatgtcaaatctatgaggtaagatagtattattatcatcaactccaacattacagatgaggaaactgagcactggttaagaaagtgcccaagatcacaccgccagtaagttggttatatttattttcaaatcaaggcagtctgacccaaaagctctgctctaaccactatgaggagaagcactgatgtcggagctggctgtgttatcccaggggtaaagtaacctgcttggatgtagaagactggcacaggacttgtacacactagggactcaatcaattgttgtttccctttatttcatggaagtcctgaaataaaataacttgccatgtgcagccctggtgctggcttcttgmcatcaggatgacccagaagtacttcaatcctttctgcctgtcacataggactcaaggaaatttgtcttaaatgcactgggcctggactttaaccaacaaggagaaacattcaaccttgctgccagtcaaaaaacacacattagaattacatacttttaggctgagtgcagtggctcacacctgtaatcccagcactttgggaggctgaggcgggtggattgcttgagcccaggagttgaaaaccagcctgggaaacatggtgaaaccctgtctccacaaaaaaatacaattacctaggtgtggtggcacatacctgtggtcccaactac

SEQ ID NO: 83551 - DNA, 968 bp, Homo sapiens
gcacttactttttattttacttgatcacgatttggctctttaattaatttcatttacttttaatctttctttkggcccagaggaaaaattaacaagttgaaatgccatgtttgggtttaatttgagaatgagatttgaaatatgaaatatacctcttcttcaaatcacttctgtggcttaaagaatgacaaagacctctatttcctaccacatcagtcacagctcttcctaagcatcacactttcaacagaaatacagctgacctcataatcatcccagataaaccattttttattttccctgatcttcagtgaacattttaaaaaggcagagtgattggagagcaatgtggaggagtgaatagtgcagcatagtgctgagagccctcaagaactaagctttgctaagaatgtggaccttgttgaagacgtaagtcattatccagagatgaagagaagcaccaagtattgtgacataaaattttgcagaaggaagaggcaatattaaaacaacaacaacaggttatatcagggacattttcctaggtttgcataattttttttttttttttgagacggagtctcgctctgttgcccaggctggagtgcagtggtgcaatctcggctcactgcaagctctgcctcccacgttcacgccattctcctgcctcagcctcccgagtagctgggactacaggcgcccgccaccacgcccagctaaatttttgtatttttagcagagacggggtttcaccatgttagccaggacggtttcgatctcctcaccttgtgatcggcccgccttggcctccaaagtgttgagattacaggcatgagccaccgcgcccggccacaaaaatttttaaataaggaaaattttaaaattgtcacttcaacttaaatgtttcatctatgagaggctgcatagcgcctaaaatctctcatcatacttcttctcctgaaagatgc

SEQ ID NO: 83552 - DNA, 862 bp, Homo sapiens
tgctcaatggtttcctgggccatacaaaaagccatgggacagcagcaaattctgacgagcaaggtgctctctgcagcccaggaacaggctgaagcaggctgccagctgagtcagtcagcccagggacagctccataaccagccctgcgatcaccctgtgccttgcacctaggggcctcctgccggctcttcatgacgctttagactgctttaaaatgtcttatcaccaaaacatttgaacaccttggaaaatactgtcctctatggaggagaaaaagagaactttgaaagaccagcccagaaggaaagtgaatgactatctgcctgccatgaaacattctggcttgaacttgccactctgaaataaagctccagctccagcacactctgttaatgaggacatgttagtatcaggcacataaacacagtcaggtgcatctccagagggggatctcagatacttactgctagttgctgattacagcaacatcagtttctgtgccacatccagagatttttctgcacactttttatcaaggcttcaaacatgatcccagttgtctgggaaatactatcagccacttaagtttccccttaatttaggaaaggaagatgtattttcaccrtaacagcaaaagcttataacacttgtcttttagaattaagagtcaacaacccagggggatccacagaccacccaagtggattgtgacgttgtcctggccttctcgtgggggtcaggccatctcatcaggcaaggacgacccaatgccttctcggtggaacagttttgattgaaaagatagttaaaaaaaaaaagtgatactgctgtaaaaagagacacaacatcacatccaaacaca

SEQ ID NO: 83553 - DNA, 749 bp, Homo sapiens
  misc_feature (1)...(749): n = A,T,C or G
ataaaaggacagggcagcaactggtgcatttgtatgccaaggcctgagagtgcccagtgcrtgctctctgactttgagtgctgagctactgttggagcaatgtgggcccctccaggaactctcagctgggcagaggcaaagaactcaccagcctttcacaactgagcataccatatttttcagaactctatttgtttgctatcaacgagattaaaaaatacaaagcattggatatggaagagcacatgatctcaagagatgactgctgagtcagaccaggggaaggcagggaaaggctttgggaaggccggagggcaaagaaaggagagaggcagcttagaggttgatggctgggatgttctggagcctatttgtggacttctgactgaaatttcttaaattctgcaggctcggtgagagaaaactggttttttttaaaattgaaaaggccagttttttagagtcttacctccaactggggaaccattgctnnnnnnnnnnnnnnnnnnnnnnnnnnnnnnnnnnnnnnnnnnnnnnnnnnnnnnnnnnnnnnnnnnnnnnnnnnnnnnnnnnnnnnnnnnnnnnnnnnnncctgggaagtcttcatcttttgataacttttaatccgcaaagtatctcactaaaattgataggccaggttccatgcagcattccccactgttggattctcatcagtttgcctccagcgtgcctttgagatgcggtaacaaaggtatcagaacatgtgt

SEQ ID NO: 83554 - DNA, 816 bp, Homo sapiens
aaaaaccatagctcaatctagtttattaatattaatttaagaattttacagaaaaccaaatgccgcgtgttcttacttaaaagtgggagctaagcattaagtacacatggactcaaagaaaggaacaacagactccgggacctacttgaggatggagggtgggaaraggatgaggataaaaatactacctagcaggtcctatgcttattacctgggtggcaaaataatctgtacaccaaacccccatgacatgcagtttacgtatatcacaaacctgtgcatgtcccccgagcctaaagtaaaagttagaaaaaaataaacaagtattatgggaatcgtttaaaaaagagttttaaataaaaattagcaaaaccaaatcaaaaagcacataaaaagaaacatcaatgaatgattaaaggagatttattccagaaacatgagttaggttcagtattaggaagcacattaatataattcatcatattagtagattttatgaaaaaaatagtatgaaagtcaacatctatccataataaaaccactcagtagaagaggttcatgtataccttttaaacgtgtgtgtcactacccaacttcaaactatactacaaggctacagaaaccaaaacagcatggtactgctacaaaaaacagacacatagaccaatggaacagaatagagatcttggaaataagaccacacatctgcaaccatctgatttttgacaaaaacaagcaatggggaaaggattccttatttaataaatggtgctgggaaaactggctagccatatgcagaaaattgaaactggatcc

SEQ ID NO: 83555 - DNA, 720 bp, Homo sapiens
aggagcatgtgacatggcaccataggagcaatcagtaaaagccagatgatagaaaactctagagaaaaatatatatataagatttttcaacaaacagagggaaaaagacggaggcaaaatctgtagattaaaaaagacatatcaaccaattacaataagagatcttacttgaattctgattcaaacaaactgaaaaagtaaatatgtgaacttacaacatttgatatcattggaaatttgcacactggatattgcactgaagaatttttgttatttttaggtgggattatggtactgtggttatgttttaaagagtcttagagagagatggaagtagttgtggatgaaataaygtgttatctggaatttgcttcaaaattatgtgagcaggagaagggttggagatagagaagaagcatggttggctaagaattgatgattgtcatgcctgaggcatgggtacattggctttaatatccttttctgtctacttttatacatatttaaatttttattagaaaaatatttttaaaatatataccatcaggtaattctgtgttctccttgttagcctaaaaatctaagctcaagagtagagagactggaatgttgaggtgccatttacaatttctagtgccccactttctcctgtcagttaaactactgtttaactcgtattaagaaccattgaagaatttgatatgtcattgatgagtatat

SEQ ID NO: 83556 - DNA, 569 bp, Homo sapiens
cgttctcaggccccactcagacctactgaaccagaacccacatttcaactgtatcgccagagatgcttacacacagcaaaatttgagaagtgctgctctataatggatataatgtaatccctggctcacagggttgatgtgagaattagcagaatacccggtacttactctttccttttccatcacagtcagcctagtgtcaggaaattacttccctctagcccttccttgcactggccaagaaatgaagacaacctttcagacacgatcggcccacaggatggagaagctcaaggccctgatgagttgggacccatttatcctgttctagtttcctgcagctgcagaaactcacatgaagttgctggttaagtgacagcttttgcttcccacttgaacagctgttttttatttgcttctttgcttttatcttgyagtctatactcactgtcccatttccgtcagtactgactttcatcttgttagattcagtgcaccacaactcctgcctaggacaagccatctggactccttttggctctagttgcccggcctaacctccaggcaga

SEQ ID NO: 83557 - DNA, 1118 bp, Homo sapiens
aagatggcactgggggaacagctctttgaaacattctgctttacagccttttattatgctaccttgccagtggatgaaagctgcaatgcttagcttggctcacatcaccagcatgatatgctaagacacctttatagatctcacttcctgcctcccctcgcatgcaccctgtacagtcataaagcatcttccctccttggttccttcttcattcattaatcttctattcattaagtgaccattaattgaccattagctaatatgtgccaggaactttactaagtcctggggatataaggataaatatcctcaagaaaatgatgagtggctataatatccagagtcacaattcattacacaatattttgaaatatgctattacaaacattgtatctattaaaacagaggccagaagagggtatggctttgtctaaaggaggtgaactttgagctagaattaagaacaagtaaaaatttgtcaaatgcatagagcagtcggaaaaatggaaaacagtgttctgtaaatgttgacatgagaattgagcagtttctgatatgcaactgttttttttttcttgttaacactttttgctttgctctccccaaatcctgaagcctcttcttccagtctcctgttttctgtttccttccacctcttcrctgactttccagattaaactctgcattgcggatctctgacagtttctctcctgctttgctaaccactttaaaaaatagacatttaaaggccttctgtgtgtctcctgctatgttatggctctcctgctgtgtgaattgaagctccctgcccagaggacggatgccccaccgctggggcgctggaggctccaaggcttaccttagaggtttgcaccatgggctgtgatgaatggcagcttggctttcgttccccaaggtcagtcacctgttccatgcctgatttcaccaaagggcatggtaccagattgcttgctcaccaagaaggtgaggcccagacagggcagtgaagcagctccatgcaacatggattaggtccagcccaactcccagcttttccttacctttggagtcatataatccttatctgcatactcagcctgcccatggtcctctgcgct

SEQ ID NO: 83558 - DNA, 745 bp, Homo sapiens
aaagcccagtgtcagacttctgacctacaggactgtaagacaatcaatttgtatcattgtaagccactgttgtaattagaaaataatatgccacctcttaacgttagtcttcctaaagattatttgaccttcaaattttatagctacttaggaacacttttaagatttaaaaaataactacaagctgatgcctccaaaatcaacatctttagccctgacattctccccaagcttcaaatgtctacatccaactgcttatggggtatttccgcttccatgccccatgtttccacaaactcagtgcatcttgatggaactcaccttcattctttccaatcctactcctccttgtataatatatccccttatctgaattaggggctgtcaatctacaccagaaactcaggagtcctctttcacggacccctcaattctccctctctcccaccagtcagttgatcactacgtgctctttattttacctctgaagttattttttcctctgctgtccatcccagcgatttaccaccatcctagttctcaccctcagtatctttattgtaaccttcctttctctgatctctytgcctttcagctggtccttcggaaatccaacctccacagagttgaaagtgatacacctaaagtttaaatctgaccaaatcactctcctatttaaaaatgttcaggctgggtgcagtggctcatgcctataatcccagcacttcgggaggctgagatggga

SEQ ID NO: 83559 - DNA, 562 bp, Homo sapiens
tgtccattcagctcaggccacattggcctttcagttcttcagacttgccacactccttcctgcctctgggcctttgctagactgcacccactgccctgaaagccccttcttctcttgccctcctcctcccaacaacacccacttgtcctcagggaggagcttccttatcccaagtgtatttcytctaattctttttcactgcactctgcacttttgctgctcggtacccaacataatttttaattacgagcccacttgtgtttatctgcccttctatactgtgtacttcaagggcaagaaatcagctctccctgtttcaccactaacctaacacctagtgcccagtggacattcaataaataattgaatgaaggaatgaaggaaaggcagggccggggagtctcatttctggggccctgaaggtgatgtgtgccgagatcagccctggcttcaggcatccattgctacaaacaccagattccaatgacaccgatgttttcttgtttaaagaaatggctatcatggcctctgaaagacatgacacccacctgacgtgcagaaa

SEQ ID NO: 83560 - DNA, 562 bp, Homo sapiens
tgtccattcagctcaggccacattggcctttcagttcttcagacttgccacactccttcctgcctctgggcctttgctagactgcacccactgccctgaaagccccttcttctcttgccctcctcctcccaacaacacccacttgtcctcagggaggagcttccttatcccaagtgtatttcctctaattctttttcactgcactctgcacttttgctgctcggtacccaacataatttttaattacgagcycacttgtgtttatctgcccttctatactgtgtacttcaagggcaagaaatcagctctccctgtttcaccactaacctaacacctagtgcccagtggacattcaataaataattgaatgaaggaatgaaggaaaggcagggccggggagtctcatttctggggccctgaaggtgatgtgtgccgagatcagccctggcttcaggcatccattgctacaaacaccagattccaatgacaccgatgttttcttgtttaaagaaatggctatcatggcctctgaaagacatgacacccacctgacgtgcagaaa

SEQ ID NO: 83561 - DNA, 513 bp, Homo sapiens
tttgcacaaagaaaatgctatttttggagccagagttttcatgtctgagtgatggcgatttccttaagaaccagaactgttggcagaaagggagcacccacacgcttagatagccgatgtcttattagagggcagtttgtagttcctgatttggaaattaacattctccaaacattccagtccagtgaaagttttatcmgctttcccatatgaaacctcttcccttgagagtgacttgattctcacaatcccattggagtcgtgtgtgagtcctacagtgtgaggttcagcattgccatctccaagtgctcttcatagggaaacagtttctggtcatgacgaggttccacttcccatctgatcctggcctggcctggaaacagagcacatgtgtttcaggatggcagtgtttggggacaggacatgagcgtattgtgtggggctgctaggacaggcctggcggggtgggggggcggtgtccaagtcagtttacttggttcacaggttcccagg

SEQ ID NO: 83562 - DNA, 513 bp, Homo sapiens
tttgcacaaagaaaatgctatttttggagccagagttttcatgtctgagtgatggcgatttccttaagaaccagaactgttggcagaaagggagcacccacacgcttagatagccgatgtcttattagagggcagtttgtagttcctgatttggaaattaacattctccaaacattccagtccagtgaaagttttatcagctttcccatatgaaacctcttcccwtgagagtgacttgattctcacaatcccattggagtcgtgtgtgagtcctacagtgtgaggttcagcattgccatctccaagtgctcttcatagggaaacagtttctggtcatgacgaggttccacttcccatctgatcctggcctggcctggaaacagagcacatgtgtttcaggatggcagtgtttggggacaggacatgagcgtattgtgtggggctgctaggacaggcctggcggggtgggggggcggtgtccaagtcagtttacttggttcacaggttcccagg

SEQ ID NO: 83563 - DNA, 513 bp, Homo sapiens
tttgcacaaagaaaatgctatttttggagccagagttttcatgtctgagtgatggcgatttccttaagaaccagaactgttggcagaaagggagcacccacacgcttagatagccgatgtcttattagagggcagtttgtagttcctgatttggaaattaacattctccaaacattccagtccagtgaaagttttatcagctttcccatatgaaacctcttcccttgagagtgacttgattctcacaatcccattggagtcgtgtgtgagtcctacagtgtgaggttcagcattgccatctccaagtgctcttcatagggaaacagtttctggtcatgacgaggttccacttcccatctgatcctggccyggcctggaaacagagcacatgtgtttcaggatggcagtgtttggggacaggacatgagcgtattgtgtggggctgctaggacaggcctggcggggtgggggggcggtgtccaagtcagtttacttggttcacaggttcccagg

SEQ ID NO: 83564 - DNA, 760 bp, Homo sapiens
cagactctcccctctccttttttcagtatcgagtgaacagcagggttttgctcctccactatgaagagctttctgtgctattgaaggagggcagatttccgtatctggaaggggcatcttgggggcagtctgtacacagtgatttccttaggaccggaaggattacagcccgactttctctatagagcaacttccctttgcctaaaaggcactatgtcaaatgttaccagcaggtcgagggattccctacctcccrtgctatctgtttggagctattggaatcttgttcctggggctccaaagctgctgggaaacaggattgttctgcttgaattccctcctccccaccatgagaccactttttgattcttttctatctcaggacagagcagactctgctgacagttttctggcagctgcttttgtgtctcacctggctgctggtcataagagctcatgagcatttcctgggtgactgccagggagccgttgtgggtttgggggtgactcccaggagcttacacacgaatgggtagatgtggatgctgttaaaaggctcggccaggcgattcctcttgaaatctggcccgaaatctctgaagatggtctttatatccatgaggacattatcaaagccatggctgcctttgttgaaacacattataattctctgaaaaataataacaataaaaaagccattttagattccaatccgctgaaagaaaactgtcccttagttaatgtcatgcttgttggatcc

SEQ ID NO: 83565 - DNA, 760 bp, Homo sapiens
cagactctcccctctccttttttcagtatcgagtgaacagcagggttttgctcctccactatgaagagctttctgtgctattgaaggagggcagatttccgtatctggaaggggcatcttgggggcagtctgtacacagtgatttccttaggaccggaaggattacagcccgactttctctatagagcaacttccctttgcctaaaaggcactatgtcaaatgttaccagcaggtcgagggattccctacctcccgtgctatctgtttggagctattggaatcttgttcctggggctccaaagctgctgggaaacaggattgttctgcttgaattccctcctccccaccatgagaccactttttgattcttttctatctcaggacagagcagactctgctgacagttttctggcagctgcttttgtgtctcacctggctgctggtcrtaagagctcatgagcatttcctgggtgactgccagggagccgttgtgggtttgggggtgactcccaggagcttacacacgaatgggtagatgtggatgctgttaaaaggctcggccaggcgattcctcttgaaatctggcccgaaatctctgaagatggtctttatatccatgaggacattatcaaagccatggctgcctttgttgaaacacattataattctctgaaaaataataacaataaaaaagccattttagattccaatccgctgaaagaaaactgtcccttagttaatgtcatgcttgttggatcc

SEQ ID NO: 83566 - DNA, 760 bp, Homo sapiens
cagactctcccctctccttttttcagtatcgagtgaacagcagggttttgctcctccactatgaagagctttctgtgctattgaaggagggcagatttccgtatctggaaggggcatcttgggggcagtctgtacacagtgatttccttaggaccggaaggattacagcccgactttctctatagagcaacttccctttgcctaaaaggcactatgtcaaatgttaccagcaggtcgagggattccctacctcccgtgctatctgtttggagctattggaatcttgttcctggggctccaaagctgctgggaaacaggattgttctgcttgaattccctcctccccaccatgagaccactttttgattcttttctatctcaggacagagcagactctgctgacagttttctggcagctgcttttgtgtctcacctggctgctggtcataagagctcatgagcatttcctgggtgactgccagggagccgttgtgggtttgggggtgactcccaggarcttacacacgaatgggtagatgtggatgctgttaaaaggctcggccaggcgattcctcttgaaatctggcccgaaatctctgaagatggtctttatatccatgaggacattatcaaagccatggctgcctttgttgaaacacattataattctctgaaaaataataacaataaaaaagccattttagattccaatccgctgaaagaaaactgtcccttagttaatgtcatgcttgttggatcc

SEQ ID NO: 83567 - DNA, 760 bp, Homo sapiens
cagactctcccctctccttttttcagtatcgagtgaacagcagggttttgctcctccactatgaagagctttctgtgctattgaaggagggcagatttccgtatctggaaggggcatcttgggggcagtctgtacacagtgatttccttaggaccggaaggattacagcccgactttctctatagagcaacttccctttgcctaaaaggcactatgtcaaatgttaccagcaggtcgagggattccctacctcccgtgctatctgtttggagctattggaatcttgttcctggggctccaaagctgctgggaaacaggattgttctgcttgaattccctcctccccaccatgagaccactttttgattcttttctatctcaggacagagcagactctgctgacagttttctggcagctgcttttgtgtctcacctggctgctggtcataagagctcatgagcatttcctgggtgactgccagggagccgttgtgggtttgggggtgactcccaggagcttacacacgaatgggtagatgtggatgctgttaaaaggctcggccaggcgattcctcttgaaatctggcccgaaatctctgaakatggtctttatatccatgaggacattatcaaagccatggctgcctttgttgaaacacattataattctctgaaaaataataacaataaaaaagccattttagattccaatccgctgaaagaaaactgtcccttagttaatgtcatgcttgttggatcc

SEQ ID NO: 83568 - DNA, 760 bp, Homo sapiens
cagactctcccctctccttttttcagtatcgagtgaacagcagggttttgctcctccactatgaagagctttctgtgctattgaaggagggcagatttccgtatctggaaggggcatcttgggggcagtctgtacacagtgatttccttaggaccggaaggattacagcccgactttctctatagagcaacttccctttgcctaaaaggcactatgtcaaatgttaccagcaggtcgagggattccctacctcccgtgctatctgtttggagctattggaatcttgttcctggggctccaaagctgctgggaaacaggattgttctgcttgaattccctcctccccaccatgagaccactttttgattcttttctatctcaggacagagcagactctgctgacagttttctggcagctgcttttgtgtctcacctggctgctggtcataagagctcatgagcatttcctgggtgactgccagggagccgttgtgggtttgggggtgactcccaggagcttacacacgaatgggtagatgtggatgctgttaaaaggctcggccaggcgattcctcttgaaatctggcccgaaatctctgaagatggtcttyatatccatgaggacattatcaaagccatggctgcctttgttgaaacacattataattctctgaaaaataataacaataaaaaagccattttagattccaatccgctgaaagaaaactgtcccttagttaatgtcatgcttgttggatcc

SEQ ID NO: 83569 - DNA, 760 bp, Homo sapiens
cagactctcccctctccttttttcagtatcgagtgaacagcagggttttgctcctccactatgaagagctttctgtgctattgaaggagggcagatttccgtatctggaaggggcatcttgggggcagtctgtacacagtgatttccttaggaccggaaggattacagcccgactttctctatagagcaacttccctttgcctaaaaggcactatgtcaaatgttaccagcaggtcgagggattccctacctcccgtgctatctgtttggagctattggaatcttgttcctggggctccaaagctgctgggaaacaggattgttctgcttgaattccctcctccccaccatgagaccactttttgattcttttctatctcaggacagagcagactctgctgacagttttctggcagctgcttttgtgtctcacctggctgctggtcataagagctcatgagcatttcctgggtgactgccagggagccgttgtgggtttgggggtgactcccaggagcttacacacgaatgggtagatgtggatgctgttaaaaggctcggccaggcgattcctcttgaaatctggcccgaaatctctgaagatggtctttatatccatgaggacattatcaaagccatggctgcctttgttgaaacacattataattmtctgaaaaataataacaataaaaaagccattttagattccaatccgctgaaagaaaactgtcccttagttaatgtcatgcttgttggatcc

SEQ ID NO: 83570 - DNA, 1048 bp, Homo sapiens
cttgggaacccaagatacaaggaggttcttcacctactcatcaggccttttcacaggcctttctgagattctcataaaaaactggtggcaaggcagaagacatgtgaccattacctaagtgtgtggacttcgagagtaggcttaggtctgagggtggagcagcagtctctggaggcaacattcatgatttttcaggacctgcatgagtataagcaggtgatcagctgccacttcaggacaggcatcaaatctgcccacattgtggaaccttttctgatacatagcaaaatccatcttctactggagaagaagtgggaatcctctcacccaccagtacttgccctgaaccgggcaagttcacctgccagtagattagatttgtattaacaagggcaaaaacctctgtcactagcagaggggcaggatgctgaaacatactcagaatcctgcactgatacaggcacagttcattgccacaggggagcagagaagaggctgagaccatayttgcattagaggaatgggttgtttatcatcacagaaggagcaggaatgctgggaaagtctcactattacttgaaaggttatattaatatttgaaagtacactcataaatttaagatctagattttaaacctaaaagcagaatttctcaaccttggtgctattaacatggctagccaggtatgtctttgttgtggaggccactgtatgcgttgtaagacattcattaggatccctggcctctacctcatagatgccggtagcatcacccagttgtgacaacccaaaaggtctccagatataaatattgccaaatgtcacctgggtgcacaaaatcaccacaggctgagaaccactggcctagattaatgatagatagatagataggtacgtagatagttacatagataaataggtagatagatagctcataagtaaatagattaagttataaaaagtaatcacattttaaagaggccagaaagagaaaaaaggagcaaagaatagacaggtcaaatagaaaatgagccatccaagtacctca

SEQ ID NO: 83571 - DNA, 1048 bp, Homo sapiens
cttgggaacccaagatacaaggaggttcttcacctactcatcaggccttttcacaggcctttctgagattctcataaaaaactggtggcaaggcagaagacatgtgaccattacctaagtgtgtggacttcgagagtaggcttaggtctgagggtggagcagcagtctctggaggcaacattcatgatttttcaggacctgcatgagtataagcaggtgatcagctgccacttcaggacaggcatcaaatctgcccacattgtggaaccttttctgatacatagcaaaatccatcttctactggagaagaagtgggaatcctctcacccaccagtacttgccctgaaccgggcaagttcacctgccagtagattagatttgtattaacaagggcaaaaacctctgtcactagcagaggggcaggatgctgaaacatactcagaatcctgcactgatacaggcacagttcattgccacaggggagcagagaagaggctgagaccatatttgcattagaggaatgggttgtttatcatcacagaaggagcaggaatgctgggwaagtctcactattacttgaaaggttatattaatatttgaaagtacactcataaatttaagatctagattttaaacctaaaagcagaatttctcaaccttggtgctattaacatggctagccaggtatgtctttgttgtggaggccactgtatgcgttgtaagacattcattaggatccctggcctctacctcatagatgccggtagcatcacccagttgtgacaacccaaaaggtctccagatataaatattgccaaatgtcacctgggtgcacaaaatcaccacaggctgagaaccactggcctagattaatgatagatagatagataggtacgtagatagttacatagataaataggtagatagatagctcataagtaaatagattaagttataaaaagtaatcacattttaaagaggccagaaagagaaaaaaggagcaaagaatagacaggtcaaatagaaaatgagccatccaagtacctca

SEQ ID NO: 83572 - DNA, 1048 bp, Homo sapiens
cttgggaacccaagatacaaggaggttcttcacctactcatcaggccttttcacaggcctttctgagattctcataaaaaactggtggcaaggcagaagacatgtgaccattacctaagtgtgtggacttcgagagtaggcttaggtctgagggtggagcagcagtctctggaggcaacattcatgatttttcaggacctgcatgagtataagcaggtgatcagctgccacttcaggacaggcatcaaatctgcccacattgtggaaccttttctgatacatagcaaaatccatcttctactggagaagaagtgggaatcctctcacccaccagtacttgccctgaaccgggcaagttcacctgccagtagattagatttgtattaacaagggcaaaaacctctgtcactagcagaggggcaggatgctgaaacatactcagaatcctgcactgatacaggcacagttcattgccacaggggagcagagaagaggctgagaccatatttgcattagaggaatgggttgtttatcatcacagaaggagcaggaatgctgggaaagtctcactattacttgaaaggttatattaatatttgaaagtacactcataaatttaagatctagattttaaacctaaaagcagaatttctcaaccttggtgctattaacatggctagccaggtatgtctttgttgtggaggccactgtatgcgttgtaagacattcattaggatccctggcctctacctcatagatgccggtagcatcacccagttgtgacaacccaaaaggtctccagatataaatattgccaaatgtcacctgggtgcacaaaatcaccacaggctgagaaccactggcctagattaatgatagatagatagataggtacgtagatagttacatagataaataggtagatagatagctcataagtwaatagattaagttataaaaagtaatcacattttaaagaggccagaaagagaaaaaaggagcaaagaatagacaggtcaaatagaaaatgagccatccaagtacctca

SEQ ID NO: 83573 - DNA, 1054 bp, Homo sapiens
tcatacaatattgaaatttaataattaaaacgtgaaaatacatttttttaggttcaagagactctaaaatcccattaggaaactttctattgtctgactaatgatgtataagaacagtaagagtcacgggtggtggttcctcctggaagaaatcaattactgtctcattcactctctccctaygggaatagaatgaatggcaatacaattccagttggcataacaccttgcaaaatgcctccttttcctggctaacatttgaaaatgtttcaaataaaagaaggtacttactctgtttatatattcctttctctcttcttccatttttttcactggatcacagaagcaatgcaaattatgcaggattcatataattcagctatgtactttgaaatatttaatttaccttcaggataagaatgtcagaaacatttaaattattttttctatctaatttaaaatccaacaaaataactctgaagtagatttaacttttttttttttttttttttgagacagagtctcgctctgtcacccaggctggagttcagtggcgtgatcttggctcactgcaagctccacctcccgggctcacaccattctcctgtctcagcctcctgagtagctgggactacaggtgcccaccaccatgcccggctaattttttgtagttttagtagagacggggtttcaccgtgttagccagaatgctctcgatctcctgacttcgtgatctgcctgcctcagcctcctaaattgctgggattacaggcgtgagccaccgtgctcagctaatttaacattttcttttaactgtgtgaaaaagttgatcactagctaatggcatggcatagaaagagatgacaaatttatacctcttattctttcattattgcatcagccaacaacttgtttccctcagactcagccataggctgaagctgtaaccctcttaaacgtgaaaaagcataaataacctaggaataatgtgttttggcacaaataatcctaaaacaatagtggggataggcattaaagattaacttgtcatgca

SEQ ID NO: 83574 - DNA, 1054 bp, Homo sapiens
tcatacaatattgaaatttaataattaaaacgtgaaaatacatttttttaggttcaagagactctaaaatcccattaggaaactttctattgtctgactaatgatgtataagaacagtaagagtcacgggtggtggttcctcctggaagaaatcaattactgtctcattcactctctccctacgggaatagaatgaatggcaatacaattccagttggcataacaccttgcaaaatgcctccttttcctggctaacatttgaaaatgtttcaaataaaagaaggtacttactctgtttatatattcctttctctcttcttccatttttttcactggatcacagaagcaatgcaaattatgcaggattcatawaattcagctatgtactttgaaatatttaatttaccttcaggataagaatgtcagaaacatttaaattattttttctatctaatttaaaatccaacaaaataactctgaagtagatttaacttttttttttttttttttttgagacagagtctcgctctgtcacccaggctggagttcagtggcgtgatcttggctcactgcaagctccacctcccgggctcacaccattctcctgtctcagcctcctgagtagctgggactacaggtgcccaccaccatgcccggctaattttttgtagttttagtagagacggggtttcaccgtgttagccagaatgctctcgatctcctgacttcgtgatctgcctgcctcagcctcctaaattgctgggattacaggcgtgagccaccgtgctcagctaatttaacattttcttttaactgtgtgaaaaagttgatcactagctaatggcatggcatagaaagagatgacaaatttatacctcttattctttcattattgcatcagccaacaacttgtttccctcagactcagccataggctgaagctgtaaccctcttaaacgtgaaaaagcataaataacctaggaataatgtgttttggcacaaataatcctaaaacaatagtggggataggcattaaagattaacttgtcatgca

SEQ ID NO: 83575 - DNA, 1054 bp, Homo sapiens
tcatacaatattgaaatttaataattaaaacgtgaaaatacatttttttaggttcaagagactctaaaatcccattaggaaactttctattgtctgactaatgatgtataagaacagtaagagtcacgggtggtggttcctcctggaagaaatcaattactgtctcattcactctctccctacgggaatagaatgaatggcaatacaattccagttggcataacaccttgcaaaatgcctccttttcctggctaacatttgaaaatgtttcaaataaaagaaggtacttactctgtttatatattcctttctctcttcttccatttttttcactggatcacagaagcaatgcaaattatgcaggattcatataattcagctatgtactttgaaatatttaatttaccttcakgataagaatgtcagaaacatttaaattattttttctatctaatttaaaatccaacaaaataactctgaagtagatttaacttttttttttttttttttttgagacagagtctcgctctgtcacccaggctggagttcagtggcgtgatcttggctcactgcaagctccacctcccgggctcacaccattctcctgtctcagcctcctgagtagctgggactacaggtgcccaccaccatgcccggctaattttttgtagttttagtagagacggggtttcaccgtgttagccagaatgctctcgatctcctgacttcgtgatctgcctgcctcagcctcctaaattgctgggattacaggcgtgagccaccgtgctcagctaatttaacattttcttttaactgtgtgaaaaagttgatcactagctaatggcatggcatagaaagagatgacaaatttatacctcttattctttcattattgcatcagccaacaacttgtttccctcagactcagccataggctgaagctgtaaccctcttaaacgtgaaaaagcataaataacctaggaataatgtgttttggcacaaataatcctaaaacaatagtggggataggcattaaagattaacttgtcatgca

SEQ ID NO: 83576 - DNA, 1171 bp, Homo sapiens
atttggaagttatgttcaaggcaaaatcctgatggtgtttggtrtttgcccagatagcatatttataattatataatttctgttcttctctgtacttgtgaaatactttggatctgctttacattggagtacactgctcctctggcagttttttttattggcctttattcagtcattaaatattaactgagtattagctatgactaaagctttatattcagccctagagaatataaagaaaaacaatataaaggcccagctctgaacagaatttataatctaattggaaggatatgttttcattagaaaaggcagcggggggtcccagtaaggatgtgataaatgctttgagactggaacagatttttgggatttcactcaggagcgagtactttgagctcagatgtggaatgtaagtaaagggcaagtgagaattttggggggcagtggcaggggaagagaaagtttggcgttagggtactcatttctggaggaagaaagcaggaaggtcaataatggaaagagcattgcaaaaggacaagatgtacttaacacagcaaggggaccattttttgcccagaaaaaaagagctcacacaggggactaataagatgagaaacggaagatcttaagatcctaagttgtcaattaaggaaccacaagtcaattacaatgtaatagatgtgcaggctacccacgggaagttggattgaaagctatgctagagttgggggaaggaggtgaagttttgataccactaacttagcctaccttgtttgagatccaacagagcaccattaaaaggtagcctgcagatatatacccaagcttggtgcagtgatcactgctagtttcattagcagaaaattcttcatcagccagtttttaaaactgaattataatttatattcagtaaaatttacccctttggggtgtggttctatgagtttcagaagtcataactattactacgatatgatggaactgttctatatcttcattagaatagttatataactattctgtgcccctctctaatcaatcctcccctttcctctagcccctgaaaccactgattttctttccctatgatacttgccttttctagaatgtcatgttgatggaatagtattttagtaggctttgagtcttgctgtttaccctcaacaaa

SEQ ID NO: 83577 - DNA, 1396 bp, Homo sapiens
ggaattcctacatgccacgtctaaggggagaaagttgctcttggagtctggcattctttcccaagttggggaagttgtgagaaaggtcctagagaaacatgtggctctgctgaaaccaagcttcttttgcttaagagtttagggtaagtgatacacgtcaagttatgttcaagtcaagtaatgatagtaataaattactatttcacacaattgaacctctacgtacgtcctaaagcagttacataacaaaacactatcaccttccccccaaaggtctcttttgcttcttccaggtaatcactattcaactcctactttcttactctcccatatatkcccctagggtttcaagttatctaccagccatttgaatgtcttctttttgtgaaatgcctatttatgttctttgtatatttttgttttgggtgatcatctttttcttacaaatttagaaaaaccctttattattaagaacattaattctgactttacgtgttgcaagttatctgcttttaactttgtttttagttatttcctgaacaatttttatatttatacaaacaaacatatatatatctaatatataaaaaacaaatatattatatttgatatatcaaatatatttattatatattatatattaatatatattatatattatatattaatatatattatatattatataatatattatataatatatatttgatatatcagatatataaatgtttgtataaatatatataggtgtttgtattatatatatgtattcctagtatatatatatatatatatatatatatgtgtgagataggtggtttgtttgtataaatattatatatattatataattatgtgtgtgtgtgtgtgtgtgtgtgtgtgtattccaacactgtggtgttatacttaagctctctctgcccacgccaagattacaaaaatgtgtgttattttctgatttgattatgacacttaaacttttaatccatttaaacattcaattttttaccttgcatagagatacactcctacatccccacatttaaccagtagtctcaacactgctgatggaacaagcctgcctttccccagtgtgtattggaaacatgttcgattcctataaataacttgggcctaagccttctattctgtaagactgatctgtctattctcagaataatccaagttgttttatttatataattctataatatattcagttcctagagaactcccctctcaaaatgttcttgccggttactaccaacttagtctcctagaggacatccagaagtgtttttgatgagtttaaaaaatcatttaattattatgattagaattatattaagcccatgtataaattagggaaaaattaatcttctcacctaaaatt

SEQ ID NO: 83578 - DNA, 746 bp, Homo sapiens
aaactcccagccccccacacacatacaccctgtcaagacagcataagcaaatgtagaaataagaatgttgttattacaggattagtcttggttctaatttatattattaaaaagcaaatcacttgccaggtttaaaacttaaactaatttcataacaaatcctgacatcaaggtgaggctaccgcatggtgtagtcaactgtacctacaattctcatttgtggagaaaccccaaggaacctacaggaatggaggctaggcatgcagtaccacgtcccacaccctcacaggcctggctgacccaggctggtcttaccagaacagacttttggttagcctggagcctggagatggcattttcattcaacttgagtttccgctccaagtctaactgggtgcactggagttcagcctaaaagtggaaagcagagaattaaggaggaaggagcccaatgcacacagaaggacacgggcactctccagccctgacatccccgcccttcttccctggaaagaagtttaacttctgtggctgatctcagaaaccagccgggaggcacgaagggttggcggtgagcccgtgccctcctggggctgcagtcagcatgagtcagcgaaaatacagtgagcacggatgccgtgctrctcaccatttcaagcattttgtggattaccccacaccatccttgccatacccatactagctgtaaaccagaaataaaatcctaaacccccaacaatctgaat

SEQ ID NO: 83579 - DNA, 746 bp, Homo sapiens
aaactcccagccccccacacacatacaccctgtcaagacagcataagcaaatgtagaaataagaatgttgttattacaggattagtcttggttctaatttatattattaaaaagcaaatcacttgccaggtttaaaacttaaactaatttcataacaaatcctgacatcaaggtgaggctaccgcatggtgtagtcaactgtacctacaattctcatttgtggagaaaccccaaggaacctacaggaatggaggctaggcatgcagtaccacgtcccacaccctcacaggcctggctgacccaggctggtcttaccagaacagacttttggttagcctggagcctggagatggcattttcattcaacttgagtttccgctccaagtctaactgggtgcactggagttcagcctaaaagtggaaagcagagaattaaggaggaaggagcccaatgcacacagaaggacacgggcactctccagccctgacatccccgcccttcttccctggaaagaagtttaacttctgtggctgatctcagaaaccagccgggaggcacgaagggttggcggtgagcccgtgccctcctggggctgcagtcagcatgagtcagcgaaaatacagtgagcacggatgccgtgctgctcaccatttcaagcattttgtggattaccccacaccatccttgccatacccatactagctgtaaaccagaaataaaatcctaarcccccaacaatctgaat

SEQ ID NO: 83580 - DNA, 1194 bp, Homo sapiens
actaatagcactaaattggtagtgatgaatggtatctaatttccagtgatcatctccccatcccccatcaacgaaactgggctttcctaatgctcactaaattgttttcagtgggactacagatgctaatctcgcccaacctccttctgttttcttattttgatgatatcaaatatttggctcaggggaagataaytgggagttcccacattaattaccaggaagaaacagtcaaaaaaaaaaaaaaaggccaaatagcaacatccgcttggctttctgtttattgtaaaacactgtaatttcccaaggctggtttagataaatacattttgtccaagttcaggggccgctgttttcccttgcttcgtgaaattatcaataggcaggcctttgatcttcctgatccatgcagctttgctggcttttcctggatcaaccactccagtggactccctggcctgatattccttcatcttggcttcctggtgctccttctcctccttcacggtcaacagcacgaactcagcgttcactctaaaaggatcaagggctgtatagatgcgaggccgttctttcttaagagacagggtggctgtgcccacttgtggagctagcatgcggtttggtttaatgacctgcatactggtcaggggacccgtactgcacacagccctttcaattgaactggtcacttggtctccaccctttaagctgccagagaacctggagcggataatcatgggctcgggtatggtggactgggctctaggactgtgcaaagagatcttcaagttgggctgcagtttctggatttcaaggggaatactggttcgtttcacatctataggaggattgctcaatctcaaccgatcaactgcacgttggattgattttcctttgaaattcaagaccttccttgggtatgaaattgaaggtccccagacatcagtaatttctgtttggggcctacagggataggcaaattccccggaattacgggcgtgctgcagggcgctaacagtcaggaggaattggtcaggtgacatagggattttccaagactttttctttgggtgactgggcagttttccaggagtttccaattgtccttgtttttgtgctttctccgcatcatctgctttttcaaaaaaaagaaaattttaaaaaatcggcgttctatgaaaaatattaagt

SEQ ID NO: 83581 - DNA, 1194 bp, Homo sapiens
actaatagcactaaattggtagtgatgaatggtatctaatttccagtgatcatctccccatcccccatcaacgaaactgggctttcctaatgctcactaaattgttttcagtgggactacagatgctaatctcgcccaacctccttctgttttcttattttgatgatatcaaatatttggctcaggggaagataattgggagttcccacattaattaccaggaagaaacagtcaaaaaaaaaaaaaaaggccaaatagcaacatccgcttggctttctgtttattgtaaaacaytgtaatttcccaaggctggtttagataaatacattttgtccaagttcaggggccgctgttttcccttgcttcgtgaaattatcaataggcaggcctttgatcttcctgatccatgcagctttgctggcttttcctggatcaaccactccagtggactccctggcctgatattccttcatcttggcttcctggtgctccttctcctccttcacggtcaacagcacgaactcagcgttcactctaaaaggatcaagggctgtatagatgcgaggccgttctttcttaagagacagggtggctgtgcccacttgtggagctagcatgcggtttggtttaatgacctgcatactggtcaggggacccgtactgcacacagccctttcaattgaactggtcacttggtctccaccctttaagctgccagagaacctggagcggataatcatgggctcgggtatggtggactgggctctaggactgtgcaaagagatcttcaagttgggctgcagtttctggatttcaaggggaatactggttcgtttcacatctataggaggattgctcaatctcaaccgatcaactgcacgttggattgattttcctttgaaattcaagaccttccttgggtatgaaattgaaggtccccagacatcagtaatttctgtttggggcctacagggataggcaaattccccggaattacgggcgtgctgcagggcgctaacagtcaggaggaattggtcaggtgacatagggattttccaagactttttctttgggtgactgggcagttttccaggagtttccaattgtccttgtttttgtgctttctccgcatcatctgctttttcaaaaaaaagaaaattttaaaaaatcggcgttctatgaaaaatattaagt

SEQ ID NO: 83582 - DNA, 1194 bp, Homo sapiens
actaatagcactaaattggtagtgatgaatggtatctaatttccagtgatcatctccccatcccccatcaacgaaactgggctttcctaatgctcactaaattgttttcagtgggactacagatgctaatctcgcccaacctccttctgttttcttattttgatgatatcaaatatttggctcaggggaagataattgggagttcccacattaattaccaggaagaaacagtcaaaaaaaaaaaaaaaggccaaatagcaacatccgcttggctttctgtttattgtaaaacactgtaatttcccaaggctggtttagataaatacattttgtccaagttcaggggccgctgttttcccttgcttcgtgaaattatcaataggcaggcctttgatcttcctgatccatgcagctttgctgrcttttcctggatcaaccactccagtggactccctggcctgatattccttcatcttggcttcctggtgctccttctcctccttcacggtcaacagcacgaactcagcgttcactctaaaaggatcaagggctgtatagatgcgaggccgttctttcttaagagacagggtggctgtgcccacttgtggagctagcatgcggtttggtttaatgacctgcatactggtcaggggacccgtactgcacacagccctttcaattgaactggtcacttggtctccaccctttaagctgccagagaacctggagcggataatcatgggctcgggtatggtggactgggctctaggactgtgcaaagagatcttcaagttgggctgcagtttctggatttcaaggggaatactggttcgtttcacatctataggaggattgctcaatctcaaccgatcaactgcacgttggattgattttcctttgaaattcaagaccttccttgggtatgaaattgaaggtccccagacatcagtaatttctgtttggggcctacagggataggcaaattccccggaattacgggcgtgctgcagggcgctaacagtcaggaggaattggtcaggtgacatagggattttccaagactttttctttgggtgactgggcagttttccaggagtttccaattgtccttgtttttgtgctttctccgcatcatctgctttttcaaaaaaaagaaaattttaaaaaatcggcgttctatgaaaaatattaagt

SEQ ID NO: 83583 - DNA, 701 bp, Homo sapiens
caagaaggggcaacaagctcagttctgcacaactagaatttcttggcttattcctgaggccagggaaggggggtaaaatcactgcatggtgacagcagtcatttcaggtacagmcaaaaatacacacatatacatataaaaattgagctttagagtctattaggctagtccagatttcagttcagtgtttcttcacttggatttgtgatattctgatagctttgcaagagaaaataaccagggtaggagaggagggattttcatcccttaaaatataataaagcatcgccactgtaacaacctataaaagtataattctttggtatttaaccaaatgaagagtctgagtggatttgtccagacattcagggagattctccactgtgaagtctctggtgtctaatgagggctgaactacacgaaagctctgccacatttatgtgacagaactcataccggagaaaaaccctacaagtgtaaagaatgtggtgaagccttcagtcagagctcaactcttacaaaacatataaaagtctacactggagagaaaccctacacctgtaaagactgtaggaaagccttcagccagagttcatctcttacccagcatcagagggttcatactggaaagaaaccatttgattgtcaggagtgtgggaaagccttcagtagaagcgcccatgttacccaacatcagagga

SEQ ID NO: 83584 - DNA, 612 bp, Homo sapiens
catctataaaatcaaataaatacttcctgtcccatgggattattgcgaaaattgagattatgaataccaagttgttagagcagtagcacatggtaaggaagcattaaatagtggctatgaataaaaatgttggtgacaatataacttgaagaatagaaactgatagtccacatgtaaagagaagattggtgaggtgtttcacatttctcaagccattatttttaatttatgttgaccttaaccaaatattcttccaacaattaacacaacaaatacagcaaaacaaaacttcctattcccattttaagaggctgcattctttacttgggtggtaattgtttcactttgatgtcaagtataaacaattaacctagcataaaaaatcaaatatactgcaaaggaaaaatatagtcytatttattttttagtaatttccatttgagtaaaaaacttaaatgtaaagtagttatagtcaagtcataaactggtaaagtagcaattttgtatttaatgtaatatattcctacatctgtacccaatagtcaatttctatctacctaatctcctgtttatttcactccactattcctcattcttctcttggatattttc

SEQ ID NO: 83585 - DNA, 561 bp, Homo sapiens
atgtaacccatcacataaacagaaccaatgacaaaaaccacatgattagctcaatagatacagaacggcctttgataaaattcgacatcccttcatcatggtaaaactctcaataaagtaggtactggtggaacatatctcaaaataatagctatttatgacaaacctacagccaatatcatattgaatgggcaaaagctgaaagcattccctctgaaaactggtacaagacaaggatgccctctctcactactcttattcaacatagtattggaagttctggctagggaaaccaggcaagagaaagaaagtaagggtattcaaataygaagagaggaagtcacgttgtctctgtttgcagtcaacatgattttatatttagaaaaccccatcatctcagcccaaaaacttctggaactgatgagcaacttcagcaaagttctgtacatgtatccccttttgttttaagaagaaataaaggggggaaaaaagaaaacaaaacaaactaccaagaaaaaatatttaaaaaaatgttttttaactaggtttataatagatcca

SEQ ID NO: 83586 - DNA, 876 bp, Homo sapiens
gagaaccattgataaagaaagatgcttggaaatgatacaacatatttaaacaactcattgtttagaatcatacagaattaggttagaatctcaggtctaatattaattagctgtgttaccttggaaaatttgtataatttccttgagactcagtttcttcatctgtaaagtgggactaataataacacctgtctcaaggggagattttgagtattaaataagctaactcatgtaaagtgctttgcatagtatgtggtggcacttactaggttctcagtaaatgaaaacatcattattatattactcttctcaagtaacttgttttacaatgaagatttatgaaataaatttttaaatattaaatcctctctcagttcttttaaactgtggttagaatggttatcttataactgcacatatctttgtataaaaaagatacaaatatctcttaaatattatagaactggttgaaaatattttcttttttttttcttcttttcttttcttttttttttttttttgagatggagtctccctctgtcgcccaggatggagtgcagtggcgtggtctcggctcactgcaaccctgcaacctccgcccttccgagttcaagcaattctctgcctcagcctcccaagtagctgggattataggcacccatcaccactccctgctaatttttttgtatttttagtagaggcaggkttttgccatctttgccaggctggtcttgaactcctgacctcgtgatccgcccatctcggcctcccaaactgttgggattgcaggcgtgagccaccgcacctagccaatactttcagttcatcagcacatggtctctggaagcatgttatttacttcaacaaattctccct

SEQ ID NO: 83587 - DNA, 600 bp, Homo sapiens
cagcctgggcaacagagcgagactccatctcaaaaaaaaaaaaaaaaaaaaaggagactaaaatattaaaaataaaatcataaatgacaaaaaaaaaaaaaaaaagctgaggaactgttccagaattaaggaggtcaaagagacacagaaaccagacacaagacatgatcctgaactggacacggtactggaggaaaggccatcagggacacacatggatcagttcaacagaccctggaacatrggccattgattttgttccaagaatatgagttaatacataaacaataaatcaggcaaatcttcaccccttagagatttggggagagggttattttgtcatgtgacccacagaaaaggactgtattcacccccagaggctcaggaggatgcccgcttattcagacatgaaacgcagccaagacaccggatctggtgatttttgcaggtttgcccctgttgcatttcatgctcatgttacagggagtttgctccatcactcattcagtcagcaaacatttctggagcccacacttgcatgcataagacatttcaaaagaggcagtgctgtggcagtcaaatgaggttgcactgtcccca

SEQ ID NO: 83588 - DNA, 2656 bp, Homo sapiens
tccctccatgaaaattcctctgcacacagaattctgcacgtgatttcatgggtttcagagactcctgactgaaaggggaaaggatgggagatccccctgtattagtccattttcacgctactgataaagacatacccaagactgggcaatttacaaaaggaagaagagatttaatggatttacagttccacgtggctggggaggcctcacaagtaggatggaaggcaaggaggagcaagtcacgtcttacatggatggcagcaggcaaagagagaaagcttgtgcagggaaactcccatttttaaaccataagatctcgtgagactcattccttatcacgagaacagtgcagggaagacccacccccataattcaatcacctcccaccaggttcctcccatgacatgcaggaattgtgggagttacaattcaagatgagatttgggtggggacacagccagaccatatcaccccctttccccacagaggagagcacaggggagtctggtgcttcctcagggcccgtgtgcacagggccccacatcacccagctcctgacatggccagcagcatccggccagtgtgcaggcgatggctgtgtggcgaggctgggatctccgagcctgtaagtgtccacaggctgtctttgttctgcctgcatctcactccatgacagcagtggcccctcaggggcagggatagtaaaggaaccaatgacagacatggcatctgctcttcttctgggggtggaggcagagaggtgagtccacgaggagacctcagccaccctgtagcacacgccaccccttccaagctcacttcagaccttggtgggtgtggtctgcccagcattcccccattcccccaacccccttcttccctaacagcccccagggagcagcctcccccaggctctctaaccactccaaccaaccctcctgctccggggctggaaagccagagccacaggttcagggctggacatataacttagccagagagaggcacagagtaaagcctgggcccttcactccagaaaaacataactaggagtttgaagctagcactgtccttgcactgaggggagagcctgtctgagagcagagctgacaccgaaaaggcagagtaaaaccatggaggggcatgggctcctggcaacagaatctgagcaactggatccagccatgcctgaagacggagtttccccagaaggtatgagaaaccatcacagctgccttctggcttatgctggtttgagctgggtgtgtctgtcccttgcaaacaaaaggcgcccaatagcattggtccagtgaaagtccaacaaatccagtgtgcaaacagaggaccagttcatgtgagctcccagcaagcagaattaaggtggacattttaaatgatgaatcatttaggggaccactgtggggggtcagcaatgtgaacagaagcctgacagctaccctcgaaaatcccaaatttcatagcccactgcacaaggctgacccctcccctgtcccgaactccccacagacacgggccaggactcgctgcacggggagctgcccacgcggcaccctgaccctggcacttgctcttgttccagaggcagagggagagcactgagagaggacgccacccaccccggagcccagagaatcggggcacctccatgcagggcccagccacatggagcctcccgcaggctgatggcccaacagagggaggacagggtccccccaggaaggaaggctggcttggctggagaagagaatgctaattaaagatcccccattctcagctccctgcagagacaggaccctatgggcagagggaaaaggcctgctgaggcaaggccgggtcacttctgtccacatcccatcggccacacccgcaagccgcaggtggacacccctcccatagcgacactgccagtcagatggcgttgggcaggaggggcagcagatgatcagggacagtcctgcagcgcaccacaggggacctgctgcacccagctcttacctggtcagctcaatgcaccttcatggaggagaccaaggcacagagaggcttcagaagcaggaaacagcccagccctgcgccctgagcagggcgagtggttagagagggtgggatggagccaggagaggatgggcctgcaggccccagagaggatccttgcctgcgtcctaccctctgaaaggtttacgcaaaagaggcgacaggatcaggtctgtgtttcctgacagtcgcagcagctgccatgagcactggatgagagggcggcgtgagggcaagtgaagcccggggtggcccaggagggtagygtggacagcactgaccctggtaccagggccccacatgccttggagaccacactccttccctcaagcccctactagctgtctcagaacctgggtccgtgttgagtcacacacacaggggctgttgcttctttcccttaaatgtgggtacagcccccacctagaggttctgcctccaggagaaactcacactggcgcgtggctatttcaaggttgaattcttgtgataaagtttaccttgagaacctggagtccctactcaattcaggacggctgaccagccaggatgacgcggcttcttcgtggccaaggacggccacccaaggggcttctctaca

SEQ ID NO: 83589 - DNA, 2872 bp, Homo sapiens
acgtgcatgcaatcattgcaagacctattatagatgtttaagcatttttatctagctagcaagtaggcaaatccagcaattataacttaaatgtaaactacatattatttgaacatatgttatagagtaaaaaatttgaaagctaagaaagaaatgaacagttatgtttttcttttcttctctcttaccctggaaaaagaatctatctcactcagactactttattgtacttaatggtacaaaatataaatatgaacagagaaaacaataaatataacaaaagaaaagagtgataactaatagcaagtggttcaagtaaaagtataaatagagatgttggaaaggtagtaacacatttcttctggctaaggaataaagacagctcaagagtttaagtttggtacatatttggataatttggggtataagaggagcacatatattatgaaaatcagtttaaagatacttagcaaaaaattaaaaatttacactagaaaaaataaaggaattctagccatagagcttatgacaattaaatccaagagatcatgtatttgtataagatacaaaagaaagtaaatgttacatgccttttaatcaaaggaacaaaatatttttgcatacaaaacagagaaaagaaaaccctccaaaaataaataattaaaagagatgactctgtgaacgctacctgaataatgttctgaatattgtttttattttatgtatgaatctatgtatgtatgtatatatgtatgtacgtatgcatgtatttaagatggagtctcactctgttgcccaggctggagtgcaatggcatgatggcggctcactgcaacctccgcctaccaggatcaagtgattctcctgcctcagcctcctgagtagctgggattacaggtgcacgccaccacgcctggctaattttttatatctttggtacagatgaggtttcaccatgttggccaggctggtctcgaactcctgacctcaagtgatctgccagcctcggccttccaaagtgataggattacagatttgagccactgcacccagcctgaatattgtttttaaatgctaatatgaaaacagaaacactcaaacttgattcaggcctttatttaggggacactattggacaatttagagaaataaaaattaatctcccgaatttttgcacttgcgtttgtgaggaatattgcattgtagtaatcttctgcaacatttttgtatgtgtttgctattaaggtgattctagaattctggcccaacaaaattaattagaaaacgttctcttccctgctcttttcagaaagagtttgaatataatcatttttttccttctaaaatgtttcttttaattgactggggaagtgatttgggcctaaggttttttttttaaagtatgtattcaattgtttaatagatataaggctattcagattatttatttctttttgtatatgtaatttgtatgtttcaaataatttgttcattttcaaatattttggcctaaatttgttcagcatattctcctattaccattttaatgtccacaggatgtataaataatattggtatattcctatattggctggtattattgtgctttctccgtctctgtttttcatgatcattttataaagaatttaacaatataattatattttcaaaaaacctatattttgttttctttctggttttctaacataaaaaccatttactcaatgacacattttctaagggttgctttagtcttactctacacattcgattttatattctgtgcttttatttcattctatttaaaatattttaatattgaatattaaaattatttttttatgtttactgaaattaaggttatttgggatgttattaaatttccaaatatttgcagattatcaaaattatctttctcttactgataactaattatatattggcctaaaccacactatgtaaaacaacttgttcaaatactctgaactttggaggttatagggtttattctcagatattaaaaaataaataaaactttgctttgcatgcatacacttcatgaaacttctgtattcttcatcgttagccagaacctcagataagagtgagatgtgtcggtctcatacgccaatcacattgctattcagtatggcgcacatgggcatgtgttgacaagtaaaagtgttggggtacaaagcacacaaatgtgaaatcaagtttcttattgcctaatgacccccgatgtggtatccaaaacaaaaataaagtgagcataatgtttcgttttattttatggtaatactaatacgtgaattcttatctccaatactttgaaaaactaattaaatatacaraaaataattttaatgccaaaataattataaatgttactataataaattaattattaaaatgtatcctacaagcattttcacctagaaatatgtatttatgtttcctccatgtcttttcatggcttgaaacgtatttctttttaacactgaatatctttcactatcaggcaccacagtttatttgcccattcacctgccgaagaacattgttttattttgtttgtgctgctatataggaatacctgaagctggctaatttatagagaagaggtttatttggctcacagttctccaggctgtataagaagtatggcaccagcacctcattctggtgagggcctcaggctgcttccactcatgacagaaggttaaggggagttggtgtgtgcaaatgacctagcaagagaggaagcaaaagagagaacagaggaggtgtcaggctcttttctacaagttcttctggaaactgagtgaatacccactcatggctgcaataacagcaccaagccatacacagg

SEQ ID NO: 83590 - DNA, 848 bp, Homo sapiens
aaaaggatttattaagttctacaaggtaagcataccatacacaattgcaggaagtgcagacatgtctcagaaatacagaagtgacaggaagttactctttccttttacattcttctcatgatttttataattccattttgatcctctcttcctctctctcaaattgttgccttatctgttcatacatatttattcattatttactagtaatctctccatcttgagtctatggaaacttggagttcatgttttttaaatgagggattaactctattcaaatgtcagtcaaaaaattgaggaaaatgaagttatatgattttaaatcaggtgtccatttgtgactgttggccatgatattgttgagggcaaattctattagaaggcattttgcaatcaatgcttatctaatatgctgcctggttaaaatacataacaccaacctttctccccaaatatatacgttaacaacatcccttagcatcataatctagccacattagtctgttttcacactgctaataaggatatacccaagtaatttacaaaggaagcaggtttaatggactcatagttccacatggcyggggaggattctcaatcatggtggaaggcaaaggaggagcaaaagcacattttacatggctgcaggcaagagagtttgtgcaagggaactcccatttatgaaactatcagaactcctgagaattattctctatcatgagaaaagcatggaggaaactggccctgtgattcaattctctccacttggccccatccttgacatggaggaggatggttattgcaattcaaggtgagatttgggtggggacacagccaaaccatatcag

SEQ ID NO: 83591 - DNA, 848 bp, Homo sapiens
aaaaggatttattaagttctacaaggtaagcataccatacacaattgcaggaagtgcagacatgtctcagaaatacagaagtgacaggaagttactctttccttttacattcttctcatgatttttataattccattttgatcctctcttcctctctctcaaattgttgccttatctgttcatacatatttattcattatttactagtaatctctccatcttgagtctatggaaacttggagttcatgttttttaaatgagggattaactctattcaaatgtcagtcaaaaaattgaggaaaatgaagttatatgattttaaatcaggtgtccatttgtgactgttggccatgatattgttgagggcaaattctattagaaggcattttgcaatcaatgcttatctaatatgctgcctggttaaaatacataacaccaacctttctccccaaatatatacgttaacaacatcccttagcatcataatctagccacattagtctgttttcacactgctaataaggatatacccaagtaatttacaaaggaagcaggtttaatggactcatagttccacatggccggggaggattctcaatcatggtggaaggcamaggaggagcaaaagcacattttacatggctgcaggcaagagagtttgtgcaagggaactcccatttatgaaactatcagaactcctgagaattattctctatcatgagaaaagcatggaggaaactggccctgtgattcaattctctccacttggccccatccttgacatggaggaggatggttattgcaattcaaggtgagatttgggtggggacacagccaaaccatatcag

SEQ ID NO: 83592 - DNA, 706 bp, Homo sapiens
aggaaaagcagcttttaatccacctcttctctcagctaaggagatactctgcaaattcccactagcaaatgcaaatctttttctattttctttcaaaggaaagtcatcctctgaggatggcatgtgtgtacgtgtgtagagtgagagagagagacagagttggttaaaactaatattctaccacctaaaaggcccagtgaggtaaaagagaagaaaaacctagatcacagatcagcaagttatgggccacaaaccaaatccacctgccatggtaaataacatctagtgggaatggtcccactcattccttctgtatcttctgtgactgcttgcacactacaatggcagagtcraatgcttgcaacagactctataccacctgcaaagcttaaaatattggcaatctggccctttccagaaagtttgtcaaccatcaggcaaatacctcaccctccttctctgtctgagtacacagcataggctgcagtgagaagacaggcgtgtgtctgcattactcacatgcctcagtgggcacagagaaagctctggtcactgcatcactcatgggctgtttaacccacggaggcctctccttaccttccccggtggtgagaatgacagcataggctttgatgggtccgtggctggcttcaaatccactgaacttgacctttactgaattgtgactgacagatgtaatattagg

SEQ ID NO: 83593 - DNA, 706 bp, Homo sapiens
aggaaaagcagcttttaatccacctcttctctcagctaaggagatactctgcaaattcccactagcaaatgcaaatctttttctattttctttcaaaggaaagtcatcctctgaggatggcatgtgtgtacgtgtgtagagtgagagagagagacagagttggttaaaactaatattctaccacctaaaaggcccagtgaggtaaaagagaagaaaaacctagatcacagatcagcaagttatgggccacaaaccaaatccacctgccatggtaaataacatctagtgggaatggtcccactcattccttctgtatcttctgtgactgcttgcacactacaatggcagagtcgaatgcttgcaacagactctataccacctgcaaagcttaaaatattggcaatctggccctttccagaaagtttgtcaaccatcaggcaaatacctcaccctccttctctgtctgagtacacagcatrggctgcagtgagaagacaggcgtgtgtctgcattactcacatgcctcagtgggcacagagaaagctctggtcactgcatcactcatgggctgtttaacccacggaggcctctccttaccttccccggtggtgagaatgacagcataggctttgatgggtccgtggctggcttcaaatccactgaacttgacctttactgaattgtgactgacagatgtaatattagg

SEQ ID NO: 83594 - DNA, 757 bp, Homo sapiens
cgcaccaggtccacaggcagagcttcctgccagcccggtgyggtgcgcatgcactcctcagcccttgggcggttgatgggaccatggtgcaaaggagcagggagtagtgctcgtaggggaggctctggccatgcaggagcccacagccagtgggaggaggctccggcatgactggctgcagtcctgagccctgccccgctgggaggcggctgaggccccgcaagaattcaagtgagtgtgggccagcaggcagtgctgggggacctggctgcccctctgcagctgctggcctgggtgctaagcccctcactgccctgggcctgcagcaccagcagcctgctccgagtgcggggccgccgagcccactcccacccagaactcgtgctggcccatgagcaccacgcgcagtccccggttcccacccactcctctccctccacacctctgcgcaagcagagggagccggctccggcctcggccagcacagagaggggctcccacagtgcagcggtgggctgaagtgctcctcaagcgtggccagagtgggaaccaaggcccaggaggtgctgagagcaatcgaaggctgccagcatgctgtcacctctcagtaagaagggatgaagcaaaacatgaacttttgtctccaagggccataatctttccacatcccacagtgggctatcaccaagaggtgaactgaaataaatctaaggtcacacagctaacagatgacagggtaggggtttccaatctagat

SEQ ID NO: 83595 - DNA, 757 bp, Homo sapiens
cgcaccaggtccacaggcagagcttcctgccagcccggtgcggtgcgcatgcactcctcagcccttgggcggttgatgggaccatggtgcaaaggagcagggagtagtgctcgtaggggaggctctggccatgcaggagcccacagccagtgggaggaggctcsggcatgactggctgcagtcctgagccctgccccgctgggaggcggctgaggccccgcaagaattcaagtgagtgtgggccagcaggcagtgctgggggacctggctgcccctctgcagctgctggcctgggtgctaagcccctcactgccctgggcctgcagcaccagcagcctgctccgagtgcggggccgccgagcccactcccacccagaactcgtgctggcccatgagcaccacgcgcagtccccggttcccacccactcctctccctccacacctctgcgcaagcagagggagccggctccggcctcggccagcacagagaggggctcccacagtgcagcggtgggctgaagtgctcctcaagcgtggccagagtgggaaccaaggcccaggaggtgctgagagcaatcgaaggctgccagcatgctgtcacctctcagtaagaagggatgaagcaaaacatgaacttttgtctccaagggccataatctttccacatcccacagtgggctatcaccaagaggtgaactgaaataaatctaaggtcacacagctaacagatgacagggtaggggtttccaatctagat

SEQ ID NO: 83596 - DNA, 420 bp, Homo sapiens
tggctgctttatctcgaatgcattactagcctcccagagcctctgttcagggagggacagcagagagagaccagtcttgacccccaaaatccattcccccattttcccttcatcatacccacccagatttttagccctgtgtgtgcatacctgttggaaacaaagaccacatttcccagctcccatggagctagatgttgcaatgtgamtaagttttgctcaacgaagcatgagcagaggtactgggtgacttctaggaagtgtcctttaagggtggggcacaaccttctgcccttcctccttcttatacctgtagtgtggatgcaatgactggagctcacgctgcctggctctagaaccaaaacctcagcggtggctgcagcttcctgatcccaggatcacagctcagaacatagaccc

SEQ ID NO: 83597 - DNA, 555 bp, Homo sapiens
ctttcctgggtgccagactctaaaaagtttcaattcctattgctgttctcagccccartgtgttcccctgtaaaatcagaacacgtttccttccttcctcatgcaggtgggggatcaaactaaaatgtggaggaaaagccctttataaattctaaatctccatacacatggaagagcaatttattttttagaacatttagttactgaaagtaagaaccagtaagggagacggaaggtaccctttgtaactcacccaagccaccttctgtgcccaaggggtctccctttgtcttatttgattgtagaagatacgggttgatgttgtattgaacccctggcttcaggcccgagatattgacctgaagtcttgagtcttgagtcaactcctcatggcttccaatgctttcaagaagaacccggcaggaggcagtgccattgccattgctccaggagagagcagccttcctcacacccgtgagggcaacacggagatcagaaactgggatcggctctattttaaaaatacaacatgcattaatggaacaagatatatgc

SEQ ID NO: 83598 - DNA, 555 bp, Homo sapiens
ctttcctgggtgccagactctaaaaagtttcaattcctattgctgttctcagccccaatgtgttcccctgtaaaatcagaacacgtttccttccttcctcatgcaggtgggggatcaaactaaaatgtggaggaaaagccctttataaattctaaatctccatacacatggaagagcaatttattttttagaacatttagttactgaaagtaagaaccagtaagggagacggaaggtaccctttgtaactcacccaagccaccttctgtgcccaaggggtctccctttgtcttatttgatkgtagaagatacgggttgatgttgtattgaacccctggcttcaggcccgagatattgacctgaagtcttgagtcttgagtcaactcctcatggcttccaatgctttcaagaagaacccggcaggaggcagtgccattgccattgctccaggagagagcagccttcctcacacccgtgagggcaacacggagatcagaaactgggatcggctctattttaaaaatacaacatgcattaatggaacaagatatatgc

SEQ ID NO: 83599 - DNA, 746 bp, Homo sapiens
ccttacagaaaaacattgctgatacctgggttagataattgattctaaaactgtggttcagagatctctaggggtctcctagattctttcaaggtatttctgggtattgttttcataatactactaacatgttatttggcttctttactctcattttatcatgagtgtacrgtggagtcttgcagattctatatgatttgggatgacactgtcactcttacagctaatggaatgtatgctttcatattgtttaaaaaactttatcttttttatttctaatacagtatggtaaatattaatcaatataacccatataaacaaaaattctccgggagccttaataatttttaagaagttaaaagggccctgagaccacagtgtttaagaattacttgtctaaaagcattgtaaattatttaactgctcccctgttgttgggaaggtagattatttatttataatttttcataaaaaacattgtgatacaatagttttgttagttctagaagtattgataaaatcacatacacagttaaaataagtcattgaattatttctagggtaatatgagaaacttttagaaattcctaaggggctgggcacagtggctcatgcctgtaatcacagcactttgggaggctaaggtgggtgatcacctgaggtcaggagttcaaggccagcctggccaacatggcaaaaccccgtctctgttaaaaatacaaaaattagccgggtgtggtcatgca

SEQ ID NO: 83600 - DNA, 1410 bp, Homo sapiens
tggaagaaggaaaagtaaggtgaataagagatacttcaaaataattttattttatttaatattttttgagacggagttttgctcttgtcacccaggctggagtgcaatggtgagatcttggctcactgcaacctccacctcccgggttcaagtgattatcctgtctcagcctcctgagtaggtgggattacaggtgcccaccagcatgcccggttaatttttgtatttttagtagagatggggtttcaccatgttggccaggccgatcttgaactcctgacctcagttgatccacccacctcggcctcctaaagtgctgggattacaggcctgagccactgctcccggcccgagatacttcaacatagttttgaaagcagagaaaatcttgaagtttttctctccttcttttcataaatgtgttgtttaatcatttgaagttacaagcctcttcaggctagaaccatgttccattctcctttcctatgtcctgagttgcctaggcctgtggtaggtacttaataaaatctttggtttaaagagttattttaaaagaaatcctgcaccttctgctgacaaaaatgtttgctaatggcaagcaaactggaagacagaaacaagcaaagtggtgttgtccatatgttatattcaaactattgtttgatagggagctattctccaaacaacttctggatgttcacttagctctcagctgccaacattttctcaaaatggttgtaaaattcatgaagctataggactgggcaaaaaccatagggtctgaaagaattcagaaacttacatagttcatgtaatgaaaacatcaaagatattccctaaaatggagatgtttcacttagattggcatttctggggagtaaataaatggaggaaacaaaagagtcaggagcagaaggtcactatacaatctctaacacaaagacatgaccagagaaaatggagaataggagaaatgttagtaattaatataaatggttttcatgctgaaagcggtaattttttttacttaaagtaatgtatgagttggaataatatgacctgggaggcttggctaattcacaaattctctgagcctcagttttcttacttgttatatggggatcatagagtttttgtggggctgcttgaccagtgtcttgcatagggtaggytattgagcaccaaatgaataaacattgactatataaataaataaacaaatgagtcagaaaatatgcataaaagggttttattaacaagcaagtgctaaataaacatgaaggattagcgttatgattgcatgtgctttgtcacagggctcttctctgagatctgtcttctctgagtggaatccatggccagtacaagtaatgtgactgagttgattttcactggccttttccaggatcc

SEQ ID NO: 83601 - DNA, 1410 bp, Homo sapiens
tggaagaaggaaaagtaaggtgaataagagatacttcaaaataattttattttatttaatattttttgagacggagttttgctcttgtcacccaggctggagtgcaatggtgagatcttggctcactgcaacctccacctcccgggttcaagtgattatcctgtctcagcctcctgagtaggtgggattacaggtgcccaccagcatgcccggttaatttttgtatttttagtagagatggggtttcaccatgttggccaggccgatcttgaactcctgacctcagttgatccacccacctcggcctcctaaagtgctgggattacaggcctgagccactgctcccggcccgagatacttcaacatagttttgaaagcagagaaaatcttgaagtttttctctccttcttttcataaatgtgttgtttaatcatttgaagttacaagcctcttcaggctagaaccatgttccattctcctttcctatgtcctgagttgcctaggcctgtggtaggtacttaataaaatctttggtttaaagagttattttaaaagaaatcctgcaccttctgctgacaaaaatgtttgctaatggcaagcaaactggaagacagaaacaagcaaagtggtgttgtccatatgttatattcaaactattgtttgatagggagctattctccaaacaacttctggatgttcacttagctctcagctgccaacattttctcaaaatggttgtaaaattcatgaagctataggactgggcaaaaaccatagggtctgaaagaattcagaaacttacatagttcatgtaatgaaaacatcaaagatattccctaaaatggagatgtttcacttagattggcatttctggggagtaaataaatggaggaaacaaaagagtcaggagcagaaggtcactatacaatctctaacacaaagacatgaccagagaaaatggagaataggagaaatgttagtaattaatataaatggttttcatgctgaaagcggtaattttttttacttaaagtaatgtatgagttggaataatatgacctgggaggcttggctaattcacaaattctctgagcctcagttttcttacttgttatatggggatcatagagtttttgtggggctgcttgaccagtgtcttgcatagggtaggctattgagcaccaaatgaataaacattgactatataaataaataaacaaatgagtcagaaaatatgcataaaagggttttattaacaagcaagtgctaaataaacatgaaggattagcgttatkattgcatgtgctttgtcacagggctcttctctgagatctgtcttctctgagtggaatccatggccagtacaagtaatgtgactgagttgattttcactggccttttccaggatcc

SEQ ID NO: 83602 - DNA, 827 bp, Homo sapiens
ggatccaatgatgaaggcacacccatggcttagttctatggagaatgtggcagccagcctccaagatggcaccctgtggagagtggcagccggcctccaagayggcaccctccaaggagaccctcttaccttttggttttgtctgtggtgtgtgtgtgtgtgtgtgtgtgtgtgtgtgtgtgtgtgtagccccctctcccgctgaatagggccaacctgtgtaatcaataagatatatggaaatgatactctgtgtgtgtgtgtgtgactctgaaactaggttataaaagacaatgcatgtccgccttgctctctcttggatacttgttctggggaaagccaaccctatggaggcatccaccttgcaaggaactgaggcctcctgccaacagccgtgttgagtctgccagccgtgtgagtgacctaccttggaaatggctccttcagtcccagtcaatttttcacgtgattgcaaccctcgctgacatcttgactaaaacctcctcagagacctcaagtcggaattatcctgctaattcaatcctgaattccgtacctgcagaaactctgacataacaaatgtgtcttgttatgttaagccagtaagttttgaggttaagccaccagagataactagtacaggaagggatgttgggacctccagaggacaccgaaggaggctgtgggcaggtgtggtccgccttcttgtggcaaaccccagaggctttcccctctgcccacagacttcaccttccctcctggttctcattcacagcagcccaagaaaagactgagaagtatttacctttgccattctggccccattg

SEQ ID NO: 83603 - DNA, 827 bp, Homo sapiens
ggatccaatgatgaaggcacacccatggcttagttctatggagaatgtggcagccagcctccaagatggcaccctgtggagagtggcagccggcctccaagacggcaccctccaaggagaccctcttaccttttggttttgtctgtggtgtgtgtgtgtgtgtgtgtgtgtgtgtgtgtgtgtgtgtagccccctctcccgctgaatagggccaacctgtgtaatcaataagatatatggaaatgatactctgtgtgtgtgtgtgtgactctgaaactaggttataaaagacaatgcatgtccgccttgctctctcttggatacytgttctggggaaagccaaccctatggaggcatccaccttgcaaggaactgaggcctcctgccaacagccgtgttgagtctgccagccgtgtgagtgacctaccttggaaatggctccttcagtcccagtcaatttttcacgtgattgcaaccctcgctgacatcttgactaaaacctcctcagagacctcaagtcggaattatcctgctaattcaatcctgaattccgtacctgcagaaactctgacataacaaatgtgtcttgttatgttaagccagtaagttttgaggttaagccaccagagataactagtacaggaagggatgttgggacctccagaggacaccgaaggaggctgtgggcaggtgtggtccgccttcttgtggcaaaccccagaggctttcccctctgcccacagacttcaccttccctcctggttctcattcacagcagcccaagaaaagactgagaagtatttacctttgccattctggccccattg

SEQ ID NO: 83604 - DNA, 827 bp, Homo sapiens
ggatccaatgatgaaggcacacccatggcttagttctatggagaatgtggcagccagcctccaagatggcaccctgtggagagtggcagccggcctccaagacggcaccctccaaggagaccctcttaccttttggttttgtctgtggtgtgtgtgtgtgtgtgtgtgtgtgtgtgtgtgtgtgtgtagccccctctcccgctgaatagggccaacctgtgtaatcaataagatatatggaaatgatactctgtgtgtgtgtgtgtgactctgaaactaggttataaaagacaatgcatgtccgccttgctctctcttggatacttgttctggggaaagccaaccctatggaggcatccaccttgcaaggaactgaggcctcctgccaacagccgtgttgagtctgccagccgtgtgagtgacctaccttggaaatggctccttcagtcccagtcaatttttcacgtgattgcaaccctcgctgacatcttgactaaaacctcctcagagacctcaagtcggaattatcctgctaattcaatyctgaattccgtacctgcagaaactctgacataacaaatgtgtcttgttatgttaagccagtaagttttgaggttaagccaccagagataactagtacaggaagggatgttgggacctccagaggacaccgaaggaggctgtgggcaggtgtggtccgccttcttgtggcaaaccccagaggctttcccctctgcccacagacttcaccttccctcctggttctcattcacagcagcccaagaaaagactgagaagtatttacctttgccattctggccccattg

SEQ ID NO: 83605 - DNA, 827 bp, Homo sapiens
ggatccaatgatgaaggcacacccatggcttagttctatggagaatgtggcagccagcctccaagatggcaccctgtggagagtggcagccggcctccaagacggcaccctccaaggagaccctcttaccttttggttttgtctgtggtgtgtgtgtgtgtgtgtgtgtgtgtgtgtgtgtgtgtgtagccccctctcccgctgaatagggccaacctgtgtaatcaataagatatatggaaatgatactctgtgtgtgtgtgtgtgactctgaaactaggttataaaagacaatgcatgtccgccttgctctctcttggatacttgttctggggaaagccaaccctatggaggcatccaccttgcaaggaactgaggcctcctgccaacagccgtgttgagtctgccagccgtgtgagtgacctaccttggaaatggctccttcagtcccagtcaatttttcacgtgattgcaaccctcgctgacatcttgactaaaacctcctcagagacctcaagtcggaattatcctgctaattcaatccygaattccgtacctgcagaaactctgacataacaaatgtgtcttgttatgttaagccagtaagttttgaggttaagccaccagagataactagtacaggaagggatgttgggacctccagaggacaccgaaggaggctgtgggcaggtgtggtccgccttcttgtggcaaaccccagaggctttcccctctgcccacagacttcaccttccctcctggttctcattcacagcagcccaagaaaagactgagaagtatttacctttgccattctggccccattg

SEQ ID NO: 83606 - DNA, 1403 bp, Homo sapiens
acccgcctctgcctccgaaagtgctgggaatactggcatgagccaccactcctgggccacagtatttatatcagaaaaaagtcaaatactgtacatgagtttcaggagcaggagagaaataagggaaaagttgtataaagaagggcggtcaactgtcttgctggcgttcacattcccccatgtcttgagatcaggtgtggctgtgtgacttgctccggcaatgaaaggggagtagaggaggtgcgtgtgacccccaggcagatctaacagccaccatggaggcctccatgcttgttcccaaktctgctaaaagacggacaatgctactgatagcccaggttcctgagacaatattccagtagaatcacagccaatctgtgatacattgagtgagaaataaacctttgttgttagccctgagatatgggagtcgttcgctgctgaagcataactgagcccatctggactcccatcagagttttccaactcgaataaatgtccacaatgggccatgcagggttctaggtgggtaaccaaaatgtcatgtaagctgggcgcagtggctcacgcctgcaatcccaacactttgggaggctgaggcaggcagatgacttcaggtcaggagttcaagaccagcctggccaacatggtaaaaccctgtctctactaaaaatacaaaaatgagttgagtgtgctggtgggcgcctgtaatcccagctactcgggaggctgaggcaggtgaattgcttaagccagggaggtggaggctgcagtgagccaggatcacatcactgtattccagcctgggtgacagagccagactccatctcaaaaaaataaaacaaaacaaaacaaaacaaaaaaatatcatgtaagatgtgtcattctgagcataacttttccttaccttcctatccaagcagatggcaggttctgggttcattgtctcaggacgagtgttaaaggaaggagaatacattgttgaataaggtttatccatattaagattatactatgtgtctttgaatcaaatccatctttgtgataaaacagagagcctctgaggaaaaccaaaatgttttccctagggttcagtcctggggcagcctaattggatttgggtgcaaaaaatgtaaaatgttctctaactttaaccctcatcagcctgactttgtacaacagttgctagggtctccctaggccggtgggtggctccaatacttaaaactgtaaaaacggagcttcggtgtattccattgtttcctcagtggtgagttctctgaatttgttttcttcctgcactgttgggtgatcctctttgcatggagaccccctggctggacggccagccatgactgcttgagggtctcactaaacggagaggcacagtgttttcccagcat

SEQ ID NO: 83607 - DNA, 1019 bp, Homo sapiens
tcccaggtgacagtgatactactggcttatgatccacactaatatcaatttacttatgagcccacaatttactaataacagctctattagagaaatgcctacacgatacagaatgaacccatattttatcccattaaagagggctaacaagtgtcctaattgtagacagcggaatgggatcttcctaaggagattgctccagtatctttttgagtgctatgatttcgcagaggagaggggaaaggaaccttgccaaaaagcaaaggtagagggggacttggaggacacagaacaccaatttcactgaaaacacaattttttagcattgtcatcactcaaagaaattggatttgggctaataaggtaagaytaacaaaattatatttgtttagctattgtcacttttatctcttgaagtaaacaaacttttttttaagactcgagacgaactggaaaactttattttttgtatttttcatttgtggtttttcaaataattttttcttaagcattcaatgatattaccttatctatattgattactgtacaaattttaggctttatggaattaataatcatgacctgtgtttcacaattcttgtttccttgtcaatccaaaaaggaatgctcatggcctgtgttttacaactcacgaattatccatacagttttcccatgtggaacagaatatgtattttatctggtattgtttaactgtgaaaatatgtgccaaagattatctatatatcctttgagttacagatagataactcattctattctcatttcataatgaatacctaagttcaaacacattctaggataacaactgagatgtgagtgacttctacgggaatgagatgatcaaactgtatatatttttgccttttcaaaaataaaataactacagaaattcactagtattttttaaataatggaattaattctactttagttttgtacaattatcctacccccatcttgtctttgtaactcaaaattcaattttatttgatgca

SEQ ID NO: 83608 - DNA, 718 bp, Homo sapiens
aaggaaaagaagggattcaaaatgctttatatataataattaacttcaaaacctaattcttctttatgtattttatggcagtaaattctgtattctcaattatagcatattaatatatctccaaattaagtatatttattgaagcatgacttaagtgaggattgtttaaaatgcacaaggaggtattagtttaaatatgtttattcacgtaataataacatgtataaataggctagttttattcataaatatctgcagttataagtaaagttacttataattccattacagtgttggaatagaagccctgtgaggacagggattttgtctgtttttaatggctatttgtctagtgcctagggcatatcctaattgtggtagatatgtaataaatatttcatgactaaagcaagtaatatagaarcattatatatatttagattcttggaaaagaatttcagcattgctagtacaaatcgatttcatgtaatctcatgacaaaggaaagtttggttcccatatcttttgcttaggcaaatggcatcatgaatttatgtttcagtaagaaatagaggaaacagtcattattttcagggccccattctgttgactaacaattctacacagtcctgaggaaattatgccactagtttgtgacccctcagcagcagatcccgtgtgacgctgctaagcatacattgaaatacaaacactgctt

SEQ ID NO: 83609 - DNA, 864 bp, Homo sapiens
aactgggagttcatagatataattaataaggtaatggaatttgaaaacatattaatttgagatctagttataaaaaattctatgtgtgtgtattcgtgtgctttggagtttaattttaccattgtgtagagatatttgatagaatttttgacatacagtggaatattttaagtcctaaggttcaaaataaataataatggaataaaccaatcatctccatgtttttttrtgactttatcatgatgatagattttctagaaaaggatttgaggattcaccctgttccttggtctgttagtaaaccaggataatctgaatctcagtgctaccgttttcccttatctgaagtaagaaggagtgtgcgtatatgtgtgtgtccattatgtgcgcatgactgggtgtggttgtgtgggtattaaggctaggaggcacagggattgctgaggaaaactaaattcaataaggatacattccgagatctcagatcaaccatttttatccttggaaatccctagctgcaagtgaacccacagttgacgagccactacatttgtagaatttagatcattgaggtgcttccatatgcaaagaagttgccccttttgccatggtggctaaaccttgaggttgcaaccttaggctagggggaggacatgctgaataaaaggaaaggcctgcccctctgggtcaagtaagagtgggaagaagaatggggataagcagaggagaaaagcagacttaagcatctttgttcctcttggccccttgggtctttgccctttgtacccagataaacgtggggaagaagaacattgggctattgggctgggagatgtgctttattgagtgattgtgtgtgtgtgt

SEQ ID NO: 83610 - DNA, 864 bp, Homo sapiens
aactgggagttcatagatataattaataaggtaatggaatttgaaaacatattaatttgagatctagttataaaaaattctatgtgtgtgtattcgtgtgctttggagtttaattttaccattgtgtagagatatttgatagaatttttgacatacagtggaatattttaagtcctaaggttcaaaataaataataatggaataaaccaatcatctccatgtttttttgtgactttatcatgatgatagattttctagaaaaggatttgaggattcaccctgttccttggtctgttagtaaaccaggataatctgaatctcagtgctaccgttttcccttatctgaagtaagaaggagtgtgcgtatatgtgtgtgtccattatgtgcgcatgactgggtgtggttgtgtgggtattaaggctaggaggcacagggattgctgaggaaaactaaattcaataaggatacattccgagatctcagatcaaccatttttatccttggaaatccctagctgcaagtgaacccacagttgacgagccactacatttgtagaatttagatcattgaggtgcttccatatgcaaagaagttgccccttttgccatggtggctaaaccttgaggttgcaaccttaggctagggggaggacatgctgaataaaaggaaaggcctgcccctctgggtcaagtaagagtgggaagaagaatggggataagcagaggagaaaagcagacttaagcatctttgttcctcttggccccttgggtctttgccctttgtacccagataaaygtggggaagaagaacattgggctattgggctgggagatgtgctttattgagtgattgtgtgtgtgtgt

SEQ ID NO: 83611 - DNA, 548 bp, Homo sapiens
gacacatgcacatgtatgtttattgcagcactactcacaatagcaaagacttggaaccaacccaaatgcccatcaatgatagactggattcagaaaatgtggcgcatatacagcatggaatactatgcagccataaaaaaggatgagttcatgtcctttgtagggacatggatgaagctggaaaccatcattctgagsaaactatcgcaaggacagaaaaccaaacactgcatgttctcactcaggtgggaattgaacaatgagaacatctggacacaggaaggggaatatcacacactggggcctgtcatggggtgggggaaggagggagggatagcattaggagatacacctaatgtaaatgacgagttaatgggtgcagcacaccaacatggcacatgtatacatacgtaacaaacctgcacgttgtgcacatgtaccctagaacttcaaagtataattaaaaaaaaaaagaggaaaaaaaaaagaagttagctgtgagaaaggggaaacaccttgctatgcaactttctaaagtatttgagaga

SEQ ID NO: 83612 - DNA, 548 bp, Homo sapiens
gacacatgcacatgtatgtttattgcagcactactcacaatagcaaagacttggaaccaacccaaatgcccatcaatgatagactggattcagaaaatgtggcgcatatacagcatggaatactatgcagccataaaaaaggatgagttcatgtcctttgtagggacatggatgaagctggaaaccatcattctgagcaaactatcgcaaggacagaaaaccaaacactgcatgttctcactcaggtgggaaytgaacaatgagaacatctggacacaggaaggggaatatcacacactggggcctgtcatggggtgggggaaggagggagggatagcattaggagatacacctaatgtaaatgacgagttaatgggtgcagcacaccaacatggcacatgtatacatacgtaacaaacctgcacgttgtgcacatgtaccctagaacttcaaagtataattaaaaaaaaaaagaggaaaaaaaaaagaagttagctgtgagaaaggggaaacaccttgctatgcaactttctaaagtatttgagaga

SEQ ID NO: 83613 - DNA, 665 bp, Homo sapiens
atcgtcagcgacagcagtaacctgccccaatttaatacggttccttaagggctaaagacttgtttgttttcatttaaaatagccatatttacctttaaaaatacaaagtacttattaaattcatcataatattgattaaaattgaaagcagaagagaaattgttacaattttcttgaaaatttcaaaaatgcttaaccatttttattaaaataaaaagaaatttaaaaagcaatacatgttcactggaaaaattagaaaattcaaataagcaaaaataataccaaatattaaattcccaggatcacattgttaaagacgatcactttttctgtgtggccttttagacttctttctgtgcacacatataaatgtaggtaaacaaacacaaatacttgttatatattcatggcaataggaacataaggtatcattttgcaacttgctttttygccaccaacttattatgtatatctttttctattaataaataatcttctgtaacatcatttttaatagattgcctaatttatttaaccagtattttattggtagacatttagattgtatcacctttttccccaccttatgcagtactgtgatgaagtgcatatattctaactaaaagtttgcacagattctgaattgtttctttggaacaaattgc

SEQ ID NO: 83614 - DNA, 931 bp, Homo sapiens
tctaaaggtctgcaacaactattcttgatctgatcacttcctaaaattaaaattgaattatactttaaggtttaactacaattctttgatagagtgcatatttcatacatgtttttgaaaactgaaataaattaaatacacaaaatctcttcccatagcttacactaagaataatacaataatttaaagataataaacttaatgtagaggtaatattgacttccctttttgttattaataatagcaatttttgcatttaataacagcaagatttcaggtctgatttttttatcagtagactatgggaaactactggctgtttgtatttatatgtgttcaagtgttcattttagagggtggaaaaagagaatgaggcttgcccactactttgtattgtatgaatccaggtaactggattaagctatctcacaaaatagaatcctatttaatcaataaatttgtaggctgagtgcgatggctcacgcctgtaatccctacactttgggaggccaagattggtggatcacctgagatcaggagtttgagaccagcctggccaatatggtgaaaacccatctctaataaaaatacaaaaattagcmgggcatggtggcaggtgtctgtaaccccagctacttgggaggctgaggcacgagaattgcttgaaccagggaggtggaggttccagtgagccaagattgtgctactgcactccagcctgggcgacagagcaagactccctctataaataaataaataaataaataaataaataaataaataaataaagttgtggattaatatatattgctatttgtattattatgaaaatacatttgcaatatactgctaaaggtaaaaaaacttaattacaagagtaaagtataatttgcctctgttaagcatatatttatatgtgtttgcgtatgca

SEQ ID NO: 83615 - DNA, 931 bp, Homo sapiens
tctaaaggtctgcaacaactattcttgatctgatcacttcctaaaattaaaattgaattatactttaaggtttaactacaattctttgatagagtgcatatttcatacatgtttttgaaaactgaaataaattaaatacacaaaatctcttcccatagcttacactaagaataatacaataatttaaagataataaacttaatgtagaggtaatattgacttccctttttgttattaataatagcaatttttgcatttaataacagcaagatttcaggtctgatttttttatcagtagactatgggaaactactggctgtttgtatttatatgtgttcaagtgttcattttagagggtggaaaaagagaatgaggcttgcccactactttgtattgtatgaatccaggtaactggattaagctatctcacaaaatagaatcctatttaatcaataaatttgtaggctgagtgcgatggctcacgcctgtaatccctacactttgggaggccaagattggtggatcacctgagatcaggagtttgagaccagcctggccaatatggtgaaaacccatctctaataaaaatacaaaaattagccgggcatggtggcaggtgtctgtaaccccagctacttgggaggctgaggcacgagaattgcttgaaccagggaggtggaggttccagtgagccaagattgtgctactgcactccagcctgggcgacagagcaagactccctctataaataaataaataaataaataaataaataaataaataaataaagttgtggattaatatatattgctattkgtattattatgaaaatacatttgcaatatactgctaaaggtaaaaaaacttaattacaagagtaaagtataatttgcctctgttaagcatatatttatatgtgtttgcgtatgca

SEQ ID NO: 83616 - DNA, 717 bp, Homo sapiens
tcagtctttaccaaccatgacattattatttttacgataaccctgatctatttaagagacaccaataattttaattcagatgcctggaattcaagaacagaagagtgtatccatcttggtgcaaaacaaagggataygctaaatgtccacaaaggggaggtagaaattagggggatggtttcaatcaatcacctccggtttcagggtcattcaaatatttgatgaccttcatctcactgcataatgccaagaagacagggcagaaaggaagacattcaatatcatgtatgacaaaatccatcattattacagattattcagtgctcatttctgttttcgcagagaggaaaaaagaagcagaagtctttactgttgttattgttgtagtgttactgggtttgcgggtttggaagtgacagcatctgaacaagtctttagaaggcagtcctgcccagcattggggatgaccaccagcaaactagaggcagaatgacttgttggaggtgatgattctccctggccacacttggagtccacctccctattaataacaaacaatcttccaaaatcttgcgctatcttgaatttacattaggtatgctgcttatccaatgtcattggaacatacaattggaaataaccattaggcacacaaaatcggggtgtaaaaaacttttgagttcagcatctatccctatgatcagtaccactggaaca

SEQ ID NO: 83617 - DNA, 717 bp, Homo sapiens
tcagtctttaccaaccatgacattattatttttacgataaccctgatctatttaagagacaccaataattttaattcagatgcctggaattcaagaacagaagagtgtatccatcttggtgcaaaacaaagggatatgctaaatgtccacaaaggggaggtagaaattagggggatggtttcaatcaatcacctccggtttcagggtcattcaaatatttgatgaccttcatctcactgcataatgccaagaagacagggcagaaaggaagacattcaatatcatgtatgacaaaatccatcattattacagattattcagtgctcatttctgttttcgcagagaggaaaaaagaagcagaagtctttactgttgttattgttgtagtgttactgggtttgcgggtttggaagtgacagcatctgaacaagtctttagaaggcagtcctgcccagcattggggatgaccaccagcwaactagaggcagaatgacttgttggaggtgatgattctccctggccacacttggagtccacctccctattaataacaaacaatcttccaaaatcttgcgctatcttgaatttacattaggtatgctgcttatccaatgtcattggaacatacaattggaaataaccattaggcacacaaaatcggggtgtaaaaaacttttgagttcagcatctatccctatgatcagtaccactggaaca

SEQ ID NO: 83618 - DNA, 623 bp, Homo sapiens
cggatcctgaaccgtggtcttgggcaccttgctttattaggctttttggtggctgtgcatcttgtaagggtgtgtatgcatgtgcgtgtgtgtgtgcgtgcgacatgcgcttgtcctctcagacccaagttcttaaagggaaagagactggggcctacacagaggcaggcatgtwtattccacagaccagagtttgacaagaatgactggacacaagagtggagcccagtcccagctctatgctgaattcagagtagccttggacaagaccctcaccatctacaaaatggagattaataatccctgctttgcctttccaaggctagtcgggggactcagtgagatattagatatgaagctctttgaaggggaatagcacagggatgtgtgcttttgatgtctgggccagtgatgggtttgggggaagaatagggtgtgaagcattctctgggaggcaaaggctggcactggactgattggccaccctgccaaagctgcagcatgcacagcacaggcaggcaccccaccaccagcagccaaggtgagcagagatgcctggtgccccacctggattcctgcctgctgtaggtatctgtgtgtgcaccttgaagaaactaaagagg

SEQ ID NO: 83619 - DNA, 963 bp, Homo sapiens
aatatcttcctttgaaagttcagaaatgaaggtaacatcttagaaaaggtccgtgaacgttctatagattattttgatgtcttttctgaaattgaaaaaaaaatcgccttgcttctagtgtttgactagcatgtcatggtaaaggacaacctaaaagtgatttctccattactcttgtactgttctagaacacttacagggtaagaatctctggagtcaagtctgccttaggtytgaattctggttatggtatttccagatgtgagaacatggggaagttactaaacttctttgagcctttttttccttgggtataaaatgggaataatactagtatcctatggctcttagtatttaataggtatcaggtgtaacttttattagtagtaaacgtagactttgctagtgaatgatatatctttgttgtattatatttgtacttataacatctatttatatattatcttatttttatttattgttgatattcatctctacatgggattgtgcttctgcatatttacaggatttacatcttgcctgtgcagtgtttgctcttacagttgtttaccccaaagcatgagtcatctacaaagcacattttagttaagattgggcatatttatttctcaattctgttttcctttaaatgactcttttggccttcttaaattttggcattgattactgcttttcagtttcctccctagaatccaaaatgtaagaattatagaattgtagccttgcataactcaaaatgtgagaaatgtataaggccgaattagtaactaattaaattttttatcattagcgtaactttaaaaaattgcagtgcaaagatgctactatttcttattaagttgataaaaaatattggtgttatttgaagatgtaattttagacaaatggaaattttagttggaagattattagatacgtatcttaccccccacagcatacata

SEQ ID NO: 83620 - DNA, 963 bp, Homo sapiens
aatatcttcctttgaaagttcagaaatgaaggtaacatcttagaaaaggtccgtgaacgttctatagattattttgatgtcttttctgaaattgaaaaaaaaatcgccttgcttctagtgtttgactagcatgtcatggtaaaggacaacctaaaagtgatttctccattactcttgtactgttctagaacacttacagggtaagaatctctggagtcaagtctgccttaggtttgaattctggttatggtatttccagatgtgagaacatggggaagttactaaacttctttgagcctttttttccttgggtataaaatgggaataatactagtatcctatggctcttagtatttaataggtatcaggtgkaacttttattagtagtaaacgtagactttgctagtgaatgatatatctttgttgtattatatttgtacttataacatctatttatatattatcttatttttatttattgttgatattcatctctacatgggattgtgcttctgcatatttacaggatttacatcttgcctgtgcagtgtttgctcttacagttgtttaccccaaagcatgagtcatctacaaagcacattttagttaagattgggcatatttatttctcaattctgttttcctttaaatgactcttttggccttcttaaattttggcattgattactgcttttcagtttcctccctagaatccaaaatgtaagaattatagaattgtagccttgcataactcaaaatgtgagaaatgtataaggccgaattagtaactaattaaattttttatcattagcgtaactttaaaaaattgcagtgcaaagatgctactatttcttattaagttgataaaaaatattggtgttatttgaagatgtaattttagacaaatggaaattttagttggaagattattagatacgtatcttaccccccacagcatacata

SEQ ID NO: 83621 - DNA, 963 bp, Homo sapiens
aatatcttcctttgaaagttcagaaatgaaggtaacatcttagaaaaggtccgtgaacgttctatagattattttgatgtcttttctgaaattgaaaaaaaaatcgccttgcttctagtgtttgactagcatgtcatggtaaaggacaacctaaaagtgatttctccattactcttgtactgttctagaacacttacagggtaagaatctctggagtcaagtctgccttaggtttgaattctggttatggtatttccagatgtgagaacatggggaagttactaaacttctttgagcctttttttccttgggtataaaatgggaataatactagtatcctatggctcttagtatttaataggtatcaggtgtaacttttattagtagtaaacgtagactttgctagtgaatgatatatctttgtygtattatatttgtacttataacatctatttatatattatcttatttttatttattgttgatattcatctctacatgggattgtgcttctgcatatttacaggatttacatcttgcctgtgcagtgtttgctcttacagttgtttaccccaaagcatgagtcatctacaaagcacattttagttaagattgggcatatttatttctcaattctgttttcctttaaatgactcttttggccttcttaaattttggcattgattactgcttttcagtttcctccctagaatccaaaatgtaagaattatagaattgtagccttgcataactcaaaatgtgagaaatgtataaggccgaattagtaactaattaaattttttatcattagcgtaactttaaaaaattgcagtgcaaagatgctactatttcttattaagttgataaaaaatattggtgttatttgaagatgtaattttagacaaatggaaattttagttggaagattattagatacgtatcttaccccccacagcatacata

SEQ ID NO: 83622 - DNA, 627 bp, Homo sapiens
taaacaaatgaaaagcaatatgtgaagaagaaaacaaactctaagtaaagaaaaattgtatcagaaaagtttaatgtgttcctggggccatgaagatcctcaggtatatacatgcgttcatgaattaagttatgctggtagtttaacatkcacgtattttgctgcaatgtgcaaataaaagtatgtaagaaatttaaatgattcctcttaaaggagcatttcatcctactcagggaaacaaatttattttgacctcatatttcaacaataatactgtcataaacccttacacttactaaattaatcctcataataaccctataatacaggtactactgtatctcattttaaagatgaggaagctgttggccgggcatggtggctcatgcctgtaatcccagcactttgggaggccacggtgggtggaacatttgagatcaggagttgagaccagcctggccaacatggtgaaaccctgcctctactaaaaatacaaaaattagccggacgtggcagggggctcctgtaatcccagctacttggaaggctaaggcaggagaattgcttgaacctgggaggcgaatgttgccatgagccgagatcgcgccactgcactccagcctgggc

SEQ ID NO: 83623 - DNA, 998 bp, Homo sapiens
agggcttacatgtgagaaagtaaagtcaaaggattggggaccgtggcaagcagcaacagaacagtaaatgtggaaacagagagtcaggtgcagattctgatgaatgtctgacccatgagtgaaggaggagcagcaccttttgaatcatgctgtagctctgggtacttccctgggtcctgccatctctgtccagccgggctgtaggtggacttggttaatttaccgaaaatgccatgatggtgctgtcattctttttgcaggagccctgaagcttcaggtagcccaggactcccgacctctcactcccttagcacacattcacattcgagacacggccattactattcaatattaccatcctattaaggaaagtgtcagtaatctaatatttcatcatacactagaccaaaaatttcagaatgtttaaaaaggagaagatgacaactctgttcccatcttttctgggtcagtggactatttaataaaatttcagctctacctgtatcattacagtaataactgcatctacacacttcgagctcrtggcctcagcaggagaaagttgggggggggggcggttatttcagactaataggtccagctcttcctttctgccacgcatcagtatttctttcttgaattcagattgatttttgcaagggattttatgctatggagcatgaaagcctagttttctgccatgagcccaataaagtttatgattgggttcagcatggttgagcctcttcaggacataagacccatgacccaaatgaggaatcctcatttcattcatttgaagtcaataaagattgaatattgaatatatgtcaagtatttcattcacagcagttgggagtcgtgattggaattgctgtggggtcagcctataaagccagaaaaagctttgtggagggtggggaggggagaaagctttgaaactgtgatttggcctcaagtgggactcaaacagaaaacagagtaaggaaaggatgctc

SEQ ID NO: 83624 - DNA, 587 bp, Homo sapiens
agactgcctccaagattgtccctgaatccctggttctattatcttcatgtttccatcttttctttggctgtcaggaagctcagagctaaattgccaactcccctttagtaattatgtagtagtcctgggtcttgtacacctgtgttttaatttttcagctgaatcctgtctaagggagtgttggagaccagattctcygggtcatcagactctgagatagagatctgtgtgcagaaaagtcactggagtgtactgtcagtggtaagacctgtgggggaggaaaagaagcaggattgggcagatttagaaggtaaactctaatgcaatcacagtcaaagggctgggctgattcttggagagctccaaatcttggatggcccttcagagttttctggaatagggtaggggggctgggccctacatcgatctatcattgaatgggtagtgtaattcttttgaggcaagggactgaactgtcagcagctgccactctcctgagctgagagaataagtgtttcagtcctggacatgctggttctgggcagcacaccacagcatctactacagagaggagcctaatttcaggg

SEQ ID NO: 83625 - DNA, 587 bp, Homo sapiens
agactgcctccaagattgtccctgaatccctggttctattatcttcatgtttccatcttttctttggctgtcaggaagctcagagctaaattgccaactcccctttagtaattatgtagtagtcctgggtcttgtacacctgtgttttaatttttcagctgaatcctgtctaagggagtgttggagaccagattctccgggtcatcagactctgagatagagatctgtgtgcagaaaagtcactggagtgtactgtcagtggtaagacctgtgggggaggaaaagaagcagrattgggcagatttagaaggtaaactctaatgcaatcacagtcaaagggctgggctgattcttggagagctccaaatcttggatggcccttcagagttttctggaatagggtaggggggctgggccctacatcgatctatcattgaatgggtagtgtaattcttttgaggcaagggactgaactgtcagcagctgccactctcctgagctgagagaataagtgtttcagtcctggacatgctggttctgggcagcacaccacagcatctactacagagaggagcctaatttcaggg

SEQ ID NO: 83626 - DNA, 603 bp, Homo sapiens
taaattgtcagcaaatgctttcacacatcccagtgtttaaatgtgtcatgagatcaaagggggagatggtaagggctagagatgattaaaaataaatctttgcaagttacttcaaaaatttaaagcagcaaatgaataggaataactacttatttggattatcacagattcctcaaaaaccaaaacttacatgtagatggtagtagtttgtaatcaccacactcagaaaaagaagcatcatgttattttatttcttaaatttatactaagtctgactctttctccacaagccagcccctctttcccttactctagggtcttatatagttcagaacattctggaaggaacaatactggtcacagctgatatgccacttgtggttatatgcatggtcccttgaaagtgggaagttccatggattgtgtgcctgacttaaaatctattttattaatagaaaatttgaggtataagaaggccaacagatgaggagatgattaccatagaaaatacagtttatgacatactgtttctaagaggagggagcacaccatgycacagggtcacctgggatgcactgaggatggtggggagacagagggaga

SEQ ID NO: 83627 - DNA, 537 bp, Homo sapiens
tccccaaagccttatgttgaaatttkatccccattgttgaagatggggcctggtgggaggcatttggatcatgggggcagatcctcatgaatggcttggtgccattctcatggaactgagggagttctcactcttagttcccagaagaactggttgtggaaaagagcctggcacctcctcccctctctcttgcctcctgtctcgtcaccatgtgatctctgcatgctggctccccttcccctttcaccatgagtggaagcagcctaaagccctcaccagaagcagatactggcaccctgcttcttgtacagcttgcagaaccatgagccaaagaaacttcttttctttacagattacccagtctcaagtattcctttatagcaacataagtggactaagacaactattaatactattatttctattattgttttcagcctagcagacttattctgtttctaatatcagagcaagggtaagacaaaatctgcattctcaggccaattctgttggcattgaagttgttaatttgtccca

SEQ ID NO: 83628 - DNA, 1339 bp, Homo sapiens
gcataacatgggactgtcctgtgggcatcttgtggagaccatagaaataaatcacaatctggtgggtggggtgggatttttctctgaaaagggtaaaagccccaaaagccaatcatcttagatagtgtttataaattggtctttggtccagtggagaggggagcgcacccccagcctggtgcagttgggcctagacgctgagggaggtctgaagaaatggtggtggtggacatgacctatctctggccataaggaggcagaggggatggaacagcaatgtgatatagttagtgtcgggagcagcagcaatagcaacggggcagaaaggctgctcttatggcagctggcatccatagctgcaggcagtgtttgcagaaccaggcctctgaccacaaagggckcatgccccattgccaatgccattataaaaaatactgatgtccgggcctcactccaaaccagttcaatcagatggttaggagtatagcccaggcacccatttatttccaaactctccaggtaagaaccactgttttagcatctatacttccccaacacccctgggtgtcagactctcataactgcatccaatttggattgtgctgccctgcagattaatggtgggtaagagtttcattcttcaacaagccacggtccattagccgtggcgagctgccagcccttctcttccctctttgccagaaaattaatgagaccatttattgaaaggaagaaaactaaccactccattttgtagtgtcatgggtcaaactgtacacattctgctatacttaagcttccatcaggaaggggtaaaggggaaggactctgcttatgtgccaggcacactttccacaggttatttctcttaatcttcacaaaacaccctggagagtaggtaataccattagtttcttttgacaaaaacactgagacataaaatggctaagaaatatggcccaaattacataggtagtataagtggtagagtggggatttgaacaaggtttatctaactctagaattcattttttgtctttctctttattataaccctttcgctccttcagttcattgctacacataaagtatttaaaataatgtctggcaaattgcaagtgctcaataaatattagcaattcctcctgggagcttactgtgagaaggaggggaggcatgcaatctgaccctaaactgcagtaattaaactttgttggcaaaaaaatataggctagaagttggggctgggtgaagaaaatttcccagcctgtggctgaaatccttaatccaaggatgcaatcttaaccaactcatttataccaaataaaagattgagatt

SEQ ID NO: 83629 - DNA, 809 bp, Homo sapiens
ttcatttgtgatttgcacattacttagaagatgcaagttttctgggattttaatcaagaattgcaaattcctaaaaatgcagtctctgcaagcaaatattatagcagtggtgcagacaggaagagctctgtatttgttcatactgcaagtgtacattttcatgtgctttgtaaactcaaatagcaaaggatcagccaataaggtctataagagagagcacctgcctagttttgcaaagtcacactagacggacatctgctatgaggtaatagtcatggcctctgtgaaatggtagcataaagtgacaggagaggataatctgactaaaatacagttgaaacagatgtcaacaaagataactgagataagaatgaattacaaagaagctagaaatgcaggagatggattaaaatctttggaagatttacaagcagaaaaggtgttgcagaaaatcagaccaataaggtagagaacaaattgcagaaggtctcctagaattccgaggaaaaataatgaagagatagaaacaatataagagtaatatgatagccattaaaagagagaraagaggtctaacctaagaattagagatgttttttatcaaaaccaaacaattagaacagaagtaataattaaagatgtactggaaactttcctaagctaaaaatcaaataggccttttttttttaaaataaactttttattttggaataattttagatttacagaagagttgcaagaatagagttcctggatgccctttacccagtttcctctattgttcatggtttacatacccacaatgcatt

SEQ ID NO: 83630 - DNA, 636 bp, Homo sapiens
ttgcctggcgtctgagcccttcttgcctgagagcctctgtgcgcccagggacagtccaggtgcctggaaataaggcaggaggcgcaccctggctctgccccaccctggcatggtgttctccataaagcagcccccgggctcagaacaggccctccctccccttggaagctcccgcrgtctaatctgagtctgtatggtcgtcagggccctggccctggggcagctgggcagcttggctctgacccagggcagcgtgggggccgggtcggggcagcacgtggcgctcctctccaggcctcaagtgtcccttggctggttccagccaccacgagacctttgagttgaggcagcaacaggtgcttattaggccacctccaggggcagggacagcgtgctgcctgctcccagcaagtgtgctgaggactgtgaccggagcagaggtgcggagtacgagacaggtgggggcgcatctcccacctcgggctcagcctctatgtgagcccagttccccggaggaggcagctcaggggctctgcagcgccggtgacagcactcccactgtttgctggaagcgtgcctctcataagacatcacctccctggtgtccttctggaatcttctgtgccccctgacctg

SEQ ID NO: 83631 - DNA, 636 bp, Homo sapiens
ttgcctggcgtctgagcccttcttgcctgagagcctctgtgcgcccagggacagtccaggtgcctggaaataaggcaggaggcgcaccctggctctgccccaccctggcatggtgttctccataaagcagcccccgggctcagaacaggccctccctccccttggaagctcccgcggtctaatctgagtctgtatggkcgtcagggccctggccctggggcagctgggcagcttggctctgacccagggcagcgtgggggccgggtcggggcagcacgtggcgctcctctccaggcctcaagtgtcccttggctggttccagccaccacgagacctttgagttgaggcagcaacaggtgcttattaggccacctccaggggcagggacagcgtgctgcctgctcccagcaagtgtgctgaggactgtgaccggagcagaggtgcggagtacgagacaggtgggggcgcatctcccacctcgggctcagcctctatgtgagcccagttccccggaggaggcagctcaggggctctgcagcgccggtgacagcactcccactgtttgctggaagcgtgcctctcataagacatcacctccctggtgtccttctggaatcttctgtgccccctgacctg

SEQ ID NO: 83632 - DNA, 636 bp, Homo sapiens
ttgcctggcgtctgagcccttcttgcctgagagcctctgtgcgcccagggacagtccaggtgcctggaaataaggcaggaggcgcaccctggctctgccccaccctggcatggtgttctccataaagcagcccccgggctcagaacaggccctccctccccttggaagctcccgcggtctaatctgagtctgtatggtcgtcagggccctggccctggggyagctgggcagcttggctctgacccagggcagcgtgggggccgggtcggggcagcacgtggcgctcctctccaggcctcaagtgtcccttggctggttccagccaccacgagacctttgagttgaggcagcaacaggtgcttattaggccacctccaggggcagggacagcgtgctgcctgctcccagcaagtgtgctgaggactgtgaccggagcagaggtgcggagtacgagacaggtgggggcgcatctcccacctcgggctcagcctctatgtgagcccagttccccggaggaggcagctcaggggctctgcagcgccggtgacagcactcccactgtttgctggaagcgtgcctctcataagacatcacctccctggtgtccttctggaatcttctgtgccccctgacctg

SEQ ID NO: 83633 - DNA, 480 bp, Homo sapiens
ttttgctctcactctatggaagtgttgaaatgtcagctgtgtttgcatgtgtgaagggatcttacacagagggcccatgtctcagaacatgcacgtgatgtttttacagcaaaaataatgttggtttgcaggacctwcatacataggtttttactggagcacagaggccttagacaaacctcccaacccagcaaggttgtattttcttttcaaagaaatacaaaccaagcttaatttaaatcaatagagaaggtaacagtgataaaaggggaaaaaaattacctaagcacaggataacaaaaaagaaagtggcagtcaacatatatgaacctgggagagagaaaatgcaactagaatttaggaggaactattcctttttctcctagaaatgtgctgatttcccttcctgttaggaggtcctagctgagtgccttttcattgaaagggtagcatgtacactgtacacaccaatcacttgct

SEQ ID NO: 83634 - DNA, 783 bp, Homo sapiens
atgtcctccaaaggatgctggtgctgatgtgggtatgcatgctgtattttcaaaatcactggcctggtttactaggtaatggtaacccccagggctatgccttcctgattttatgctgccgataattgaatgcttgctgtcctttaatttaatttaagcattcccacaacttttgtggttggtactaatatttttcccattttacaaatgaggaaacagatattcagagattaaagagtactcaaaacactgacctagtcaatgtgagaataaggtttaaatccacagacaacactgtttacatgcattacgattctccacactggaactcctctcctatcagaaatatctgacttgcgaaaggaaactgtaagaatcaatgagacctaayacagaacatcagactgtaggcttgggagaaatgttagaatccacccttcaacttacatataaattctctacagtaatgttccgtaaaggatgttccagggaccactagtttcacagaatattaacaggcaggtacacacagagttccatggccaaataagtttgaaaaatggtggcttaaactttgctgagttaatttcttagcagcaggacttctcagtgctgttgatgaacgtgatcaggcatgaggtgacccaccacaggtacagtgcataccatatgtctcatgtttaattgactacggaactgtttgctcccagagcatttcttgattttgtaaggctgtagaataagattttggaagccccaacctacaatatgctttggaaggca

SEQ ID NO: 83635 - DNA, 783 bp, Homo sapiens
atgtcctccaaaggatgctggtgctgatgtgggtatgcatgctgtattttcaaaatcactggcctggtttactaggtaatggtaacccccagggctatgccttcctgattttatgctgccgataattgaatgcttgctgtcctttaatttaatttaagcattcccacaacttttgtggttggtactaatatttttcccattttacaaatgaggaaacagatattcagagattaaagagtactcaaaacactgacctagtcaatgtgagaataaggtttaaatccacagacaacactgtttacatgcattacgattctccacactggaactcctctcctatcagaaatatctgacttgcgaaaggaaactgtaagaatcaatgagacctaatacagaacatcagactgtaggcttgggagaaatgttagaatccacccttcaacttacatataaattctctacagtaatgttccgtaaaggatgttccagggaccactagtttcacagaatattaacaggcaggtacacayagagttccatggccaaataagtttgaaaaatggtggcttaaactttgctgagttaatttcttagcagcaggacttctcagtgctgttgatgaacgtgatcaggcatgaggtgacccaccacaggtacagtgcataccatatgtctcatgtttaattgactacggaactgtttgctcccagagcatttcttgattttgtaaggctgtagaataagattttggaagccccaacctacaatatgctttggaaggca

SEQ ID NO: 83636 - DNA, 623 bp, Homo sapiens
ctcctcattcctactgaccctgtcctcattgaggttctcatcacttcttacctgggttattgtaaccacartcatttcttaattgaccaccctgactccagtcttgcattcatcattcttccctctccccaaaaagaaaatggtatccttttaaatatactcactggaggggagaaactagaaagaggtagaaagagaagcaagtggagttgattagacattgaaggcaggaaatgaaaataaagttggtttgggaatttgttcttttagtttaaattcattctttcatttgattactgcaaaaagaatgttattaaagaccagaaaaagaaaacagctttcttaattcattccaaaatatctaacactttatctgtcaggcaccatcaagaacaagacagttattccttttgttttgtttttttaaacccagatatattactggttgtgcataaaatgttgctctatctcacacttgtatgtcagtacacagtaaactttaaaagcaacaaaatcaccctctgttttgcagaggtggtgaaatgcagtcttgctctcttcattttgaactcagctggcagacacagtgatctcatatacaaatatgtggcaattctattatg

SEQ ID NO: 83637 - DNA, 623 bp, Homo sapiens
ctcctcattcctactgaccctgtcctcattgaggttctcatcacttcttacctgggttattgtaaccacagtcatttcttaattgaccaccctgactccagtcttgcattcatcattcttccctctccccaaaaagaaaatggtatccttttaaatatactcactggaggggagaaactagaaagaggtagaaagagaagcaagtggagttgattagacattgaaggcaggaaatgaaaataaagttggtttgggaatttgttcttttagtttaaattcattctttcatttgattactgcaaaaagaatgtyattaaagaccagaaaaagaaaacagctttcttaattcattccaaaatatctaacactttatctgtcaggcaccatcaagaacaagacagttattccttttgttttgtttttttaaacccagatatattactggttgtgcataaaatgttgctctatctcacacttgtatgtcagtacacagtaaactttaaaagcaacaaaatcaccctctgttttgcagaggtggtgaaatgcagtcttgctctcttcattttgaactcagctggcagacacagtgatctcatatacaaatatgtggcaattctattatg

SEQ ID NO: 83638 - DNA, 659 bp, Homo sapiens
tgagaaactaggggttttaaagaaaaaattaatggattattttatccattaaaatattttaattttgcacagatttatatgaaatattggtgaaaataatgatgtgttaaaacctatctcaattatggaataagagtttgcacatgctgtgctttaccaaaagaaattatttctctttgtgtttctgtttgcttgtactctcagaaggcctatgactctagaaaggttaagaaccatagtgtgctgctggtacagacatacgctgattatctggcacaccaaagagctaggttaccttggacacatctgatggcaagcamaggacaattatacccagaaggctctgtcacagggtatcttgatgtccagtcagtatttctcttttaattctataggaatctggaatatttccatgattgggacagatggaaaggggccacataatggcccagaagacaaagaccctcagtttgccagctatttaagcatttctgtatccatctttgattgggagggtctgaactaattctatccctcaaaaccagcccttacaatttcatatgccctcctctttcatgatagtccctgagcctagaaagtgggtgcttgtgtagttttagcagagtgttggcaacaaaaagcagattgggttcaatggg

SEQ ID NO: 83639 - DNA, 397 bp, Homo sapiens
tttttttcaaatgctcactctgttgcccaggctggagtgcagtggcatgatcatggctcactacagccttgaccacctgggatcaagcaatcctcccacctctgcctcccaagtagctgggaccacaagtgtgcatcaccatgcccaacaattttttcttttatttcttgtagagacagggtatccttatattgcccaggctagtcttgaactcctgggctcaaatgatcctccagctttggcttctcaaagtgctgggattgcaggcatgagccactgcacctggccatttatctttttctactcactcagttcaatcactttaaataaatagtggtgtcctttagcmagacatcaaagcctcatcaatttttgccaccttagctcttcacagatt

SEQ ID NO: 83640 - DNA, 1150 bp, Homo sapiens
gggagccataattcgtttcctcttagagtaagttctctttcaaagctctcatggctctttctacagtctggcttaggttgggcccttctggcccattagattggctggtatgtctgaacatctgtggtgtttgtggtggaatgctttttttgttttccctccagaaggttttctcatccccaatacacatcagtagatgcaatcatccaaatgatagtagatgtaaatgtaggaaatgtaggatgaacgtatctaacttggggcacccaagaccattaccgactctgtcctgccaagataccccacactcttacatttgtagaattagaatattgtatgcccatttcaatgttgaatgtttcatatatagacactcatgtacattttttcataaggctaggaatatttttgtcatttttcttttagcaagcatttttgaatgttagcttacaaggtactagggtatatgctggtggtgcaaagatgaataaggcacgggccatgcccacaaaaaattcagtctgtaattagggaggcagttagagtactgtttgagaaacgttgtgatagagcacttgaacttgcttttcctattgtttgaaaaccaactttccattttctttgagsgggggaggtgggcagggggaaagctcctgtagttcacagctcagctgaattttcatttccctgaaaagtattccaggagaaacaagccaccactacctcttgccctccattttttttccctccacattttaaaccttggattatatcgtcttgttttatttttctaacaggacttgtgtctgcaattatcttgtctgcatatttgtagtataaacaaataaactgtcttgcgcactgctgagcccacagtgtttgtaaatgtgttttgaagaaaatcatgaataaaataacacagatacctagacacctagaccccccgccccccagaggaattagaacagccttgataaagctggagatgtggtttaaacactgagatggaaacagaagggtctaggagtacacgcaggtagataacagtatataaaatgctctctggggaatcaggaggttcagtgttgcaggcactgggacatacggtggctagcgaagggcaggaggctggccaagcatccaggagatg

SEQ ID NO: 83641 - DNA, 597 bp, Homo sapiens
ggatctccactatcgatacactagaatttcttaatcagtttcctcagtgctgctggttcagagtgagtaggactttatgtctcttcttgatcttttcagccacatgaagttcttaaaagattgagaaatctcggccgggtgcagtggctcatgcctgtaatcccagcactttgggaggctgaggtgggcagatcacgagttcaggagatcgagaccatcctggctaacacagtgaaaccccgtctctactaaaaatacaaaaaaattagccgggcgtggtggtgggcacctgtagtcccagctactcgggaggctgaggcaggagaatggtgtgaacccgggaggcagagcttccagtgagtggagattgcgcccctgcacctctagcctgggtgacagaacgagagtccgtytcaaaaaaaaaaaaaaaaaaaaaaaaaaaaagatcgggaaatctcttcacattccaagatcatcagcagggaaaacaccatttcagaactactttgtggttttgtcagcaatatgccctacatctaagtgctagtctgctttttgtttataccccttgtagaatgtaactttgtattacttcat

SEQ ID NO: 83642 - DNA, 1169 bp, Homo sapiens
cacgtacacatagttgattataaaaaactatattgccactatttcagtttaaatactgttaaaccattctacataccacaaaataataaagagcatattatgattcatctgaaagaaccagcccaaattacaatcagccaaagtgcattcaagcacagaagcgatcttcaataatttaaatacagcctttagttaaattaaaaatgcttatcaaaaaggttttgatgactcaattttaataagtttaataaattatctctaaatcattatcttttacaaataatttgattttataaaataacctttatcaaaactccctctgaattgcatgtgtctgaaaatagaagaaatgttaacctgtttttcatggtttagagagcctatatttttaacttcttcagcttttgagtctattagtctactgtatttttctacggcgcaccatggatagagcatggatgccatctactaggcagctatcatggcattgatagaaaatttctagtagaaaggaacaatgcccgtttaattgaaatttaacagcaastaaaaatgtgcaacatccaaatagaccctgaaaatccactgtgatccccaagactcagaggtgaggtgcaattctgaaaatagaaagccaatcagaaattgcttagctgaagaaagtggcttaagaggcttctgcttttaggctgagcttatcagaatgggaattacctttactggaaataaatcacattgttttcttcacaggtggctcaatttagctgtttaatctgagagaaatgatagacttaagagcagaggaaaaatctcttggttcatcaggtttggaggagtatgaaaaatactttatctctgtttcaatatttctatctgataatcagttgtgtagactgtaatttcagagtaatttgaagcatagaaaatagagtcttacaaataggtgtgtcttggagtgtcatatagatggcagcaggctaaggtatttgtttagaaataatattttgtttttactgtcaggtttaataacttgcccgaaatatatgtgtacatattttctcagacagttttccaaaggaaaaggtcattcaattttgatgactggccgcataatgtactctatttggtcaaggcaggaaactagctgaggtaggaaaaagatagtttag

SEQ ID NO: 83643 - DNA, 1012 bp, Homo sapiens
aatgagtattattttcctcattttataaaagaggaaactgatgtttgaggctactttgcttaagaccacagaactagcaaaggaaaagagaagtgaatgtatccctgatcccctttaacacttcttacacagcctccccacaatgtccagtattaacttcataaatgagccataccaccaatatgagaaaataagaaatgtccacatgtgccaattattcatgtatgatctcttagctccttctatattttgccctgtaatgttggcatygagacgctgtgaactgcctttccaagattcctttcttagctggctttttgatggattctgtcaatatgaggcactacaggaaaattggaatgagagagacgacagaagggacttctgacagctaccattgtagtaccagttgagcttcctggcagcagttatttccagcctccagcttcttcaggcattctcagaaccagtgttatcaaaccttctccaaggtatcagcaccaactagtcatgctcagtggggctcctcgtccaagctccttgttcttgaagttcaacacttctctttgttcactcagccctagaagtgattgatggctccgttcgttatcttggtttcttcggtgttcttttcttctctttttcttttctttttgcctcctcctactacaaaacctgtacagccaatttcaataagctctattcaaatatttggtttggtttctcttttcctgtaagaccctggaaaaaacagtacttggtaccatgaataagacactcaaaggagatattctaggattgatttggttatgtctttgcacatgagcacagccagtgaaaaataggatactgctgatccctgtcatgcagtgacagtgggatgaattaaattatcatctttgtttgcatagagtgaagcaccttttgaagcaagtgctttggaagaccaagtagctgatgtgcttactgttattatagtaataatgaccacaagaattacatggtgggttgg

SEQ ID NO: 83644 - DNA, 1012 bp, Homo sapiens
aatgagtattattttcctcattttataaaagaggaaactgatgtttgaggctactttgcttaagaccacagaactagcaaaggaaaagagaagtgaatgtatccctgatcccctttaacacttcttacacagcctccccacaatgtccagtattaacttcataaatgagccataccaccaatatgagaaaataagaaatgtccacatgtgccaattattcatgtatgatctcttagctccttctatattttgccctgtaatgttggcattgagacgctgtgaactgcctttccaagattyctttcttagctggctttttgatggattctgtcaatatgaggcactacaggaaaattggaatgagagagacgacagaagggacttctgacagctaccattgtagtaccagttgagcttcctggcagcagttatttccagcctccagcttcttcaggcattctcagaaccagtgttatcaaaccttctccaaggtatcagcaccaactagtcatgctcagtggggctcctcgtccaagctccttgttcttgaagttcaacacttctctttgttcactcagccctagaagtgattgatggctccgttcgttatcttggtttcttcggtgttcttttcttctctttttcttttctttttgcctcctcctactacaaaacctgtacagccaatttcaataagctctattcaaatatttggtttggtttctcttttcctgtaagaccctggaaaaaacagtacttggtaccatgaataagacactcaaaggagatattctaggattgatttggttatgtctttgcacatgagcacagccagtgaaaaataggatactgctgatccctgtcatgcagtgacagtgggatgaattaaattatcatctttgtttgcatagagtgaagcaccttttgaagcaagtgctttggaagaccaagtagctgatgtgcttactgttattatagtaataatgaccacaagaattacatggtgggttgg

SEQ ID NO: 83645 - DNA, 1012 bp, Homo sapiens
aatgagtattattttcctcattttataaaagaggaaactgatgtttgaggctactttgcttaagaccacagaactagcaaaggaaaagagaagtgaatgtatccctgatcccctttaacacttcttacacagcctccccacaatgtccagtattaacttcataaatgagccataccaccaatatgagaaaataagaaatgtccacatgtgccaattattcatgtatgatctcttagctccttctatattttgccctgtaatgttggcattgagacgctgtgaactgcctttccaagattcctttcttagctggctttttgatggattctgtcaatatgaggcactacaggaaaattggaatgagagagacgacagaagggacttctgacagctaccattgtagtaccagttgagcttcctggcagcagttatttccagcctccagcttcttcaggcattctcagaaccagtgttatcaaaccttctccaaggtatcagcaccaactagtcatgctcagtggggctcctcrtccaagctccttgttcttgaagttcaacacttctctttgttcactcagccctagaagtgattgatggctccgttcgttatcttggtttcttcggtgttcttttcttctctttttcttttctttttgcctcctcctactacaaaacctgtacagccaatttcaataagctctattcaaatatttggtttggtttctcttttcctgtaagaccctggaaaaaacagtacttggtaccatgaataagacactcaaaggagatattctaggattgatttggttatgtctttgcacatgagcacagccagtgaaaaataggatactgctgatccctgtcatgcagtgacagtgggatgaattaaattatcatctttgtttgcatagagtgaagcaccttttgaagcaagtgctttggaagaccaagtagctgatgtgcttactgttattatagtaataatgaccacaagaattacatggtgggttgg

SEQ ID NO: 83646 - DNA, 1012 bp, Homo sapiens
aatgagtattattttcctcattttataaaagaggaaactgatgtttgaggctactttgcttaagaccacagaactagcaaaggaaaagagaagtgaatgtatccctgatcccctttaacacttcttacacagcctccccacaatgtccagtattaacttcataaatgagccataccaccaatatgagaaaataagaaatgtccacatgtgccaattattcatgtatgatctcttagctccttctatattttgccctgtaatgttggcattgagacgctgtgaactgcctttccaagattcctttcttagctggctttttgatggattctgtcaatatgaggcactacaggaaaattggaatgagagagacgacagaagggacttctgacagctaccattgtagtaccagttgagcttcctggcagcagttatttccagcctccagcttcttcaggcattctcagaaccagtgttatcaaaccttctccaaggtatcagcaccaactagtcatgctcagtggggctcctcgtccaagctccttgttcttgaagttcaacacttctctttgttcactcagccctagaagtgattgatggctccgttygttatcttggtttcttcggtgttcttttcttctctttttcttttctttttgcctcctcctactacaaaacctgtacagccaatttcaataagctctattcaaatatttggtttggtttctcttttcctgtaagaccctggaaaaaacagtacttggtaccatgaataagacactcaaaggagatattctaggattgatttggttatgtctttgcacatgagcacagccagtgaaaaataggatactgctgatccctgtcatgcagtgacagtgggatgaattaaattatcatctttgtttgcatagagtgaagcaccttttgaagcaagtgctttggaagaccaagtagctgatgtgcttactgttattatagtaataatgaccacaagaattacatggtgggttgg

SEQ ID NO: 83647 - DNA, 1012 bp, Homo sapiens
aatgagtattattttcctcattttataaaagaggaaactgatgtttgaggctactttgcttaagaccacagaactagcaaaggaaaagagaagtgaatgtatccctgatcccctttaacacttcttacacagcctccccacaatgtccagtattaacttcataaatgagccataccaccaatatgagaaaataagaaatgtccacatgtgccaattattcatgtatgatctcttagctccttctatattttgccctgtaatgttggcattgagacgctgtgaactgcctttccaagattcctttcttagctggctttttgatggattctgtcaatatgaggcactacaggaaaattggaatgagagagacgacagaagggacttctgacagctaccattgtagtaccagttgagcttcctggcagcagttatttccagcctccagcttcttcaggcattctcagaaccagtgttatcaaaccttctccaaggtatcagcaccaactagtcatgctcagtggggctcctcgtccaagctccttgttcttgaagttcaacacttctctttgttcactcagccctagaagtgattgatggctccgttcgttatcttggtttcttcggtgttcttttcttctctttttcttttctttttgcctcctcctactayaaaacctgtacagccaatttcaataagctctattcaaatatttggtttggtttctcttttcctgtaagaccctggaaaaaacagtacttggtaccatgaataagacactcaaaggagatattctaggattgatttggttatgtctttgcacatgagcacagccagtgaaaaataggatactgctgatccctgtcatgcagtgacagtgggatgaattaaattatcatctttgtttgcatagagtgaagcaccttttgaagcaagtgctttggaagaccaagtagctgatgtgcttactgttattatagtaataatgaccacaagaattacatggtgggttgg

SEQ ID NO: 83648 - DNA, 1012 bp, Homo sapiens
aatgagtattattttcctcattttataaaagaggaaactgatgtttgaggctactttgcttaagaccacagaactagcaaaggaaaagagaagtgaatgtatccctgatcccctttaacacttcttacacagcctccccacaatgtccagtattaacttcataaatgagccataccaccaatatgagaaaataagaaatgtccacatgtgccaattattcatgtatgatctcttagctccttctatattttgccctgtaatgttggcattgagacgctgtgaactgcctttccaagattcctttcttagctggctttttgatggattctgtcaatatgaggcactacaggaaaattggaatgagagagacgacagaagggacttctgacagctaccattgtagtaccagttgagcttcctggcagcagttatttccagcctccagcttcttcaggcattctcagaaccagtgttatcaaaccttctccaaggtatcagcaccaactagtcatgctcagtggggctcctcgtccaagctccttgttcttgaagttcaacacttctctttgttcactcagccctagaagtgattgatggctccgttcgttatcttggtttcttcggtgttcttttcttctctttttcttttctttttgcctcctcctactacaaaacctgtacagccaatttcaataagctctattcaaatatttggtttggtttctcttttcctgtaagaccctggaaaaaacagtacttggtaccatgaataagacactcaaaggagatattctaggattgatttggttatgtctttgcacatgagcacagccagtgaaaaataggatactgctgatccctgtcatgcagtgacagtgggatgaattaaattatcatctttgtttgcatagagtgaagcaccttttgaagcaagtgctttggaagaccaagtagctgatgtgcttactgytattatagtaataatgaccacaagaattacatggtgggttgg

SEQ ID NO: 83649 - DNA, 965 bp, Homo sapiens
aaaggatatttaccctttaaggggacatttttaaccttgtgacaccataaaattccatgcatgcaaagttatttgtttttatttttctgacattcattcttgaccagatattttccatgggctttctcatgttactcaactagaggcataattttaatagtttattttaataccttgattaataggagcaatckgtttaaaaatagtattagtgttggcatttcgtaatgaattgcagaagctgagcagacatgctcttttgtgcctttttcaatttcctttgaaaatgtgttgaactcctcagtatttgttcaaacctaccaagttttaacatgaactaagcattaaatggatttggaatctgagaagggtgttcgcctacaatgtagcgatatggggagaaaaggtttgggttgagaccggcgactttcagaattataagtgctggcaagtaagaaccacagcccggcaattttggaggcccccagcatagccactgctgctaaccaaccaattttaaaagaccaaagactaggttttctcccaaagtgacagtagttgcaaatttgccatctaactcacagtggcactagcccaatcgaggcaatttcctgagaacttatgataatatgtccctgttacacaagacctaaaagatttttaatggcctgttcctacaaaactaaaataaaaatggctggcctgtacaataaaatatttcactggaaatgaaacataaacaaatgcactagtactccattttgaaaagaactttgtaaacttattgtttaaaattatgaaatatgttcaaatttacaacaataaaactctaggaaaaacagtgatgcaaatgtttaacatgagattcatacaatttgctttaccctatcttgtaaatagctagaccgatagcatctaaataccaaggatgaaaaagaaaaggtatatgtgtgttttttgggggg

SEQ ID NO: 83650 - DNA, 965 bp, Homo sapiens
aaaggatatttaccctttaaggggacatttttaaccttgtgacaccataaaattccatgcatgcaaagttatttgtttttatttttctgacattcattcttgaccagatattttccatgggctttctcatgttactcaactagaggcataattttaatagtttattttaataccttgattaataggagcaatctgtttaaaaatagtattagtgttggcatttcgtaatgaattgcagaagctgagcagacatgctcttttgtgcctttttcaatttcctttgaaaatgtgttgaactcctcagtatttgttcaaacctaccaagttttaacatgarctaagcattaaatggatttggaatctgagaagggtgttcgcctacaatgtagcgatatggggagaaaaggtttgggttgagaccggcgactttcagaattataagtgctggcaagtaagaaccacagcccggcaattttggaggcccccagcatagccactgctgctaaccaaccaattttaaaagaccaaagactaggttttctcccaaagtgacagtagttgcaaatttgccatctaactcacagtggcactagcccaatcgaggcaatttcctgagaacttatgataatatgtccctgttacacaagacctaaaagatttttaatggcctgttcctacaaaactaaaataaaaatggctggcctgtacaataaaatatttcactggaaatgaaacataaacaaatgcactagtactccattttgaaaagaactttgtaaacttattgtttaaaattatgaaatatgttcaaatttacaacaataaaactctaggaaaaacagtgatgcaaatgtttaacatgagattcatacaatttgctttaccctatcttgtaaatagctagaccgatagcatctaaataccaaggatgaaaaagaaaaggtatatgtgtgttttttgggggg

SEQ ID NO: 83651 - DNA, 965 bp, Homo sapiens
aaaggatatttaccctttaaggggacatttttaaccttgtgacaccataaaattccatgcatgcaaagttatttgtttttatttttctgacattcattcttgaccagatattttccatgggctttctcatgttactcaactagaggcataattttaatagtttattttaataccttgattaataggagcaatctgtttaaaaatagtattagtgttggcatttcgtaatgaattgcagaagctgagcagacatgctcttttgtgcctttttcaatttcctttgaaaatgtgttgaactcctcagtatttgttcaaacctaccaagttttaacatgaactaagcattaaatggatttggaatctgagaagggtgttcgcctacaatgtagcgatatggggagaaaaggtttgggttgagaccggcgactttcagaattataagtgctggcaagtaagaaccacagcccggcaattttggaggcccccagcatagccactgctgctaaccaaccaattttaaaagaccaaagactaggttttctcccaaagtgacagtagttgcaaatttgccatctaactcacagtggcactagcccaatcgaggcaatttcctgagaacttatgataatatgtccctgttacacaagacctaaaagatttttaatggcctgttcctacaaaactaaaataaaaatggctggcctgtacaataaaatatttcactggaaatgaaacataaacaaatgcactagtactccattttgaaaagaactttgtaaacttattgtttaaaattatgaaatatgttcaaatttacaacaataaaactctaggaaaaacagtgatgcaaatgtttaacatgagattcatacaatttgctttaccctatcttgtaaatagctagaccratagcatctaaataccaaggatgaaaaagaaaaggtatatgtgtgttttttgggggg

SEQ ID NO: 83652 - DNA, 683 bp, Homo sapiens
acagattcttcatggtaaaaagcagtttcatgttctgctctttaatttcaagaatcactgacttaagagaaagaaacagctgtttttgtcacttccatgctgaccctacagtgttttcaatggtctgggcatttctacgtcatttatgctatgkatgtttatttggaggttcactttagggaatttcatacttacctcaatacccctgacctcagagtgattcccacattgtagttccctgtccccttcatgcagcacataactgcggggggatggacctgaccctgggagggaggcaggtcacacttggctgcctgcctatcggatcagctgaatccactctggagaccttgcagctgacacagtaccagccaggctgcctgcacttccccatcacttccaacagtctatcaagatcattttgcaactgcatttgacataatcccttgtatatcttgagtgttggctcacagaaaaaatcagaacgattcaaaactgggaagagtcaaaggaattctagttgggtctgcagctgaaactgaaaaaccaaagaaggcatgtgtatgaaggaagcaagctgggtaaaggaagaacaacaaagggaagcaagaccttacttgcacctgatataaacaggagtctaagtttacataggcagagctggctgctgctagagttactca

SEQ ID NO: 83653 - DNA, 1540 bp, Homo sapiens
agaggagaggaggcagttggaggaagtgggctgtgttgggtttgatgtcgtgagtcctcaagccagggatttctggatttctgctttagatcgtgggtggccatgtggcttcctgattctaggttctgtggcttggcttcctccaccccatatcctccataacctcagggtgctgctgtagtccttcttcctcagggtgaatcttttgtccgttcctggcctcttgggtgggggtgggtggtgtcagatgatcaccagaggactctagattcttcacctgccatttgtctatctctgtcaacctcaggaatcatggcgtttctgcattatggtcttcagcaagacttgtcttatacaacttagcttaggagacatatggatgaagcgaggcctgtcccttaagcytgaggctgttggctcatgctttggcgtcagggcaaacccttggtgctcacaagcagagctttctcctgtcaagaagtggaggtgagactcacctttgcctctatggggttgggtcacacttctcaatatgggtctggtggaagcaaattccaagctagaggtgggtgtggggtggatgttggtgcttcaaagtgggtaaattaaaataccacacatttttctgacttgccgtgtacagcctggtcaatgggatgttttcctttaaaaagtctctttaaaggatcaagtggcctccctgctactgaggagggatcctttgtttcccaaacacagaagcaatcagtgccaggaaatcagtgcccttacgatgctggaatgtggctttaggggagaagacaatgaacactgtgaggtgatgaatgggtgctctgaggtctgtagaacccagaaatggattcaagtgtatctctttaaaagagaggtttcagcctgccgcgaagcgttctgttcacaatccggccagcatgtatgttgctgttgtctgatgctgtgatgctgtttctgtccccttcctcttaaaaaaaaaaaaaaattaaatgggacctctgtttggtgattttatttgccaactcgaagaaagtgatggtttaaatgtggacgtgaataccacagttaatccttgcttgttgtcgtccagtgtttagccggccaagtaaatgagcccagcaggttataaaagctttgccatagagcctggacgatggcttctgtgggatggagatcccaaatagcaagactgtccgggtgccggggagcccgcatctgaaacagtcgtgcacacattaagcatgttgccagctgataagctttggactgggataacctattttttacggtctttgttgtttttgcttttgcccggctttgtggggagatgcactgtcagatggattaaatgacatgggttgttcttcctcaaccgaacaaggtttgttttcatacatcttgtccttccgcagctatggagagagaagcgaggggtttttatattttaaaaggaggcacattgagctgatgtgtgagtttgggtgcctgattagccgacgaaggaatacttggatactgttgctaggtt

SEQ ID NO: 83654 - DNA, 995 bp, Homo sapiens
gcatgtgtytaggttgtgtctaggctttctgtgcaccgtttagtctgagtcggggcttgaaccccttgacctaccatctactctttttttttttaatttttcagatccaaaaaccttggtaccacattaaataactttgacactttggaaatatacacatgtaactgagtattgtgttggcgtaacacatttgagaaatttaagccttggccaaaaggtaaacccttactttttcaactccctttagagattactgggctcccccgactgggctaacaaaataagaaggtaaggaattgtgcttgagctcctttgtgttggcttggctctctgagtctatccagcaggatcaagcaggggaggtaggaaagcagtggtcagactctgccgaaagactgataaaattccttcagaaacagttctcaggtttccctccgagcagctccctctaccttccattgacttccaacacttcttccagaatgaagcagtagttgggggcatttgtcttccttcctgttcctcggcaaagacaatcagcagcatcggaatcatagaaaggggagaggatcctggagagagattgaacacgagcactagatacaagaggctcatgaattgggtcagaactcactggaagtaggggtctatgcagaggaggttaggtgtggtacatctgtgtggagttttaccctggatcctcttatcctgtggttttgcccaggccagtctcctcaggtatcctgtcaagaggtgagagggaagttgaactcttgttacatcactgccattatctactcaagcttacatcatcatgtagggagactttaagctggtaaacgagatgtttgtgttggaggcaataatgccagcctgtggaggggacaggctttaccaaagagctaatgaaagagctattgttcaggcccacctggccttggctctgctttctcctccagaagaaatcttgattgaagcaccagcaagtatgtttc

SEQ ID NO: 83655 - DNA, 899 bp, Homo sapiens
ttttgtcatggtgtaagatgattcctttagcttatgtcaacttccattcattcaagctggaagaaatgaagcaagggaaagaagaggctatatttcatgacgtttgaatcaacracaagacatagtacccataaatttcactaattccctgttggacaaaacctggtcatatggccaaagctagcttcaagtcaagtgataggaaaaacaaacaaaaactttagctggactgacaggtacccaactgaaagttctgttactgtagaaaaacgggagatggatattggggtgatcaccacagtctctgtcacagtcttggaaagtgcctgacagatttatctctggcaacttgaagtggtagtagactgttaagtgactttgtcatccaaagaaatttttctagttattcttgtcagctctgatcccatttctacattctatatgaatataataagcatgtgtactgatgtagctgttgccctagtattctgctgcataagcttgcattttaactctcaaatttatcccagtttagtacaaaaatgatatgtcatcttatctgtggcctttatgcaacaccatttcctacacccctgccctcccacagttcccaagttgtaaagggaaatggagtaaccatctatgagatgtaaacctgcggcataatttttagctctttccagagaagcatgaccttcttatcaacagaaaattttatttatagggaaaagaaatttgcagaagtccctgtgcagtgtagtaggcatcataagatcctcacaattaattttttattgagttaagaaggttggcaaggttattttctttcgagagaggacatggtttttatttttattttatattgttaaatgatcttttcttttttcccaatttttgtt

SEQ ID NO: 83656 - DNA, 727 bp, Homo sapiens
gaacagaagagggcttggcaccgctggggtaactccttaacaccatgtgcaggaacagaagcagcacaactaaaaaggaggttcgggcatgaagtgggtgtgtctctctattttcttcctgccttgtatttagaagcaggactgactccattggatcaaggaaaactctggataagaagcagctctgtggctctcttgagstcggccttgtcatctgctggtcccccaagctgttgaagtggtcgcactactcacccgcttcacttgatttaacacatgacataacaaacaatgccataaagcaaggactgctggactccaattcctttctaaatccagccctagactcttcccaaattctagctccatcttcaggcgatgatgaagggttaaaggctgaaaactcaggtataaattaaacaataggcagctttcttgtcttaacaaatataaaatattcagagaagagtaggcctgactctacttgaaatgcaagtaattaagtagaggcctgaaaatccgcgatttgttcactgcggtcagggctggggagggctcttcctgctcttcagaagccgactccggtgtggcacttgtcaggcgagtcagccaactgcagacgcaccagaagggctgcaatctgtccgggtgctggagagaaaactttggcacttaagtctgacgtttgccactggcaatgaggtctgtatttgcatgcaagggatcc

SEQ ID NO: 83657 - DNA, 687 bp, Homo sapiens
attcttaagaaattctgaatagtaaataatataaattgctttgataattggtatttgaagcatttggattgctscagggaggtgtaacttgatgctagccttcaatgttggagaggtgctgacctctcaatacaaaagcatcaatatctacaggacaccttgagtgttttttgtagcatatagggaaaaattatatacttgcttctagtctggttattttacacataacttaaataacaaataaaagtgtacatatatgtgcactgagaaggaagggcatcaataatggcattaatattttataatacatttattagttttattaatgtttctgtgctgcacttgggctgatttcagagtagatggtatggccataagcaagaaccctttactgagtgtacatgtctaactgaggtggaaggaaaagaggtggtacctgaggagagattcttaagcaggaagagagggcagcaggaagtctctggatgtgacatgaggggtggctatagtattagtgggctgtagaatctcttctgttctacacacatttgggcttcatgaatagttaaaaatccagtgcttttagggtggctgaaccatacccttagtagtttcactccaatttgacaggcagtatgaaaaagtcatttttcatttaatatgaaaaacaaattttccattggagaa

SEQ ID NO: 83658 - DNA, 817 bp, Homo sapiens
acagcagtattatttctaatagctcaaaactggaaacaattcaaatacgtataatagtacaatgaataatatgtaaattatgtatacttatgcaatagaatactacatagcaatgaaatactataccattaaatgcaacatagatgactctcacacacaatattgagaaaaatgagctatcacaagagtctactgtctgattccaacaagaaggcacaactaatctggtagaaatcagaatattggtttcctttagagttgtttaaccaactgaagtgggcatgagggaagcttccatagcactagtaaaacatgtggtgaagtgttcacagcataaaaattcatcaagctctataactgtaatgtgcccttgtctgtatacagtattagactttattttaaaagtttacaccaaataatcgattcattctctcagcttactayaacactcaaccatggaaattcttatctccactggggcctttcagacactctcctgtttccttcctctgactcttgctggtttacttcctgctataatcctctaaatatggacttgacccagagctcagcacacaattaactgctcttgctttacattatatgcctttgctttacattatatgccttagacagcttgttctgttccattccaaatgccactctcaacactcctgcagagcgggaggcatacagtactcaatgcacgtgagtctctttctttcttcacccataaactatgacaatggttttttagtgtctcccaccttccctttacatgtcaaactgagcttcctaaaatactcctttaaatgca

SEQ ID NO: 83659 - DNA, 712 bp, Homo sapiens
catggttccaaactttccattaaataacccaccctaattgatatctggagaatctagggcaggtgcaaagaatgtcttattaagtattatgataataataaaatgaattatgacttacatgactattggttcatagttttgttataaagataagtactctaatcttacctttcttctatatgtatggatttagagcattttatgtaggcttttattgctataaacttccctcttagaactacttttgctgtatcccatatgttttggaatatagcgtttctattttcatttgtcttgagaaatttttacattttcttctcgatttcttcaytgactcattcattggtcagaagcatgttatttaatttccatgaatgtatacactttcttgttttgattgatttctagctttatttcactgtggttagaaaagatacttgacattattttgatttttaaaaatgtaataagacttgttttgtgacctaacctatgatccatcctggaggatgtttcatgtactgttgagaaaaatgtgtattctgcagttgttggatggaatggtccacaaatgtctattaggtccatttggtctaggctgaactccaatatttcttttttgattttctgtctggaggatctgcccattgctgaaactggagtgttaaagtcccttactattcttgtattgtagtcaattctttccttttag

SEQ ID NO: 83660 - DNA, 585 bp, Homo sapiens
cacttacaaaatactaaagtaaaatattaatttttcttgaaaccatcagagagctgatgtcacagtaaccacgtaacctgaaaactaaggtaacatggatctctcccaggagtgatggaatacaaatactggctcacctgtggcatcagaagaaaaatagcacctctctgaaagcaggtaagataaattaaactttttaacaaagtgctaaatgttaagtgtaggctaatgagagagaggagagaaacttcaggtgtggcagatcaaagggaaatttcactctcttacaggctctttttcatgaacgtctactgggtgctcataagaaagaatggtggtgcggagaagattggacagtatctccttggtgaggcaggctagagagaagaagaaccaccagtgtagaaagaaatgaaatgcactaaagaccctacaaaacaaaaccccgaawtccctgaggaaaaggtagtacatctcagcatccctagaacatggtgaagacccattgtagctgcaatatatgtcgaagaaaagaaacccggcactgtagaaaggaagaaatgcatcctgtgcccagaccatgag

SEQ ID NO: 83661 - DNA, 652 bp, Homo sapiens
ggctgaggcgtcttaggttgctcatccaggcaaaaaagtgcttcaaatgcctagagattggcctgggtggagagtggagaggaccctgtgttagcacaatctccactagaagggtcagggaggctcaggctactgattcaggtgagcaggtgctctgactgactgaagacctacttggaacatgaaaatggagtggaaaaggcctcgctaaaccatgatctctgcacaagaaggacgggatagctcaggctgctggttcaggcatgtgggtgcttcaaatgcctggagttatccctgggcattgagcagagagggcctggttgtatcacagtctccgtgcagaaagggtggggcagctcatgctgctgaactagcaaggggctgctctgactgcctggagtagatctagttttgaattctttcttgacacttaatgtgtgtctctgagaaagttgcttaattctgagtaatggtttacttagctttaaagtgagggaggctacttgtgaagtttgaaatgacaaatgtgtctktatcagttatctgaaaaaaaatggacattaccatctcagcttttggcagctagcatgaggttggagaaggtgggttggataagcaatcagccctatcgccatagagtcggctgagaaga

SEQ ID NO: 83662 - DNA, 546 bp, Homo sapiens
gtgtgtgtacacatatatccagtgtgggatggtatctcaacgttaaatgatttcatcaacaagaataatacatgtcttagctccctcacaaagattgtgtttaggaagtaaaagcattttataaatttcaaaacatgcagatgtaagttattggtctcattattattatgattatctcttccagtgattgggaaataaatgcatttccttaatggcttccattttccctcatcttacaggattttctagctcatatcatccaccacctggctgctattagtctgatgagcttctcttggtgtgctaattatattcgcagtgggaccctcgtgatgattgtacacgatgtggctgacatttggctggaggtaaaygtttgccattaaaaaactaatgacaataccatgtcctgggtttccgtaactgctcacagaagtaattgtgagcaatttagcagagctctgtgtcctgaaaacacccaaattctgagaatatctctagattcccagatcctccaagattacagaaatgaaacctcttagtttt

SEQ ID NO: 83663 - DNA, 820 bp, Homo sapiens
ccgaggctagggaagcttgagcaggattcagactttcattaggcacagaggcgagagagcagctcatggcaagggcccagaagctgcccactgttgtgtctggaatctagtgggaaagggcaaaaggaagtcctggagcagcaggttgcgagcaggccattgtgccaaggagtctggtcttgatcctataggtagaaggtggctggtagagtttaatcagcagaagaaaaagaaatgagaatgggaatrtgagttaggtgacaattggatgaagatggaagcctcatgtcaggaaaccaattctgcagtggtctcctggcagaaggtgaggcagacctgaactgagcctacctcggttagtggccaagtctgctttaaattcatcccttctgccagatggttttaaaaatgcatgagcccattactgaaaaacagaacgtcttcgaagagaaaggcagaccgggaagccctgagtgagaagtacccagtgaaaggaagggcgtttatcaatcctctctctttgaactaaattcattagtgaaatctgagaaactttggagctttaatgaatttgaaactggtgtttccctttatctgcatctagtccatttttaatttgcggtcatctattagctgatgaaaaaagaaaaatgtctttcagcagttgaagacagctaatgagaatcaggctctcagtgtgggcggtactgctgatgtttggtttgtgagagatacaggaatcaacttgttgaagctctctacttgtcagagcacctttaaataatccaagcccagagttgtttcatcttcaggcaagaga

SEQ ID NO: 83664 - DNA, 652 bp, Homo sapiens
tcgtataaagcttagtccacagaccgatatgcagaaataatacattaacttctacattttttaaaaaaaagttttttttaaactcggtaataatttcacgtggtgcccaatgggaaagatataaaaggatctgcaaagaaaatctcctttttttttttttctttgagacagggtctctgtcacccaggctggagtgcagtggtgcaactacagctcattggagcctcaaattctcaggcttaggtgatcctccaagctcagcctcctaggtagctgggactacaggcatgcaccaccagacccagctaattttgaagggcttttttgtagagacagggtttggccatgttgtccaggctggtctcgaattcctggactcagttcaagggatccactcgcctcagcctcccaaagtgctgggattacaggtgtgagccacagcgcctggcccgaaaatttccctcttaccccatyctttggccacccagtttccctctgcagaggcaaccgctgttcctagtgtcttgttgaaatatcacatttctttatttccttaaaacaacctaatttccaaggacctgctgagctggagataatgtaagctcagcccttcttggggcagaggagcctggatctcacctggcatcaagac

SEQ ID NO: 83665 - DNA, 718 bp, Homo sapiens
gcatataaatgaccctctgttgagttaatttttccctgttgatggacattgaggttgtttccaaactttttgatcgaataaacaatgctgcagtgaataatcttatacctatatcatgaaaactcttgtttaagatccttagaagccaggcgcctgggtcctgcccatagtcacatctactcaggaggctgaggcgggaggttcccttgagcccagcagttcgaggctgcagtgagctatgattgtgctactgcactccagcctgggtgatggagtgagatcctgcctctaaaataacaataataaaataaaataaagatccttagggattgtgaggtctgcaaggaatggcactcccttttgcccacaccaaccccttcctgggagctgaggcttgaatgaggagggcagtcccagagtgggggaagagcattccaggcagagggagctatagtgcaaaggcctggggtagaaatgagctcaatctatgggagaacagcaagaaggccaytgtggctgcatgggaccatgtgagagaagggtagtaggagatgaggttgagaggactttgggggacaggtgagatttggtgagatgggagggaatgaatgagtgaagcctccaatacgataagcgaaaaaacatgatattccaagagataggcgtggtcctcccccaaattttggttgctgggaagactggcagtccctccccagct

SEQ ID NO: 83666 - DNA, 718 bp, Homo sapiens
gcatataaatgaccctctgttgagttaatttttccctgttgatggacattgaggttgtttccaaactttttgatcgaataaacaatgctgcagtgaataatcttatacctatatcatgaaaactcttgtttaagatccttagaagccaggcgcctgggtcctgcccatagtcacatctactcaggaggctgaggcgggaggttcccttgagcccagcagttcgaggctgcagtgagctatgattgtgctactgcactccagcctgggtgatggagtgagatcctgcctctaaaataacaataataaaataaaataaagatccttagggattgtgaggtctgcaaggaatggcactcccttttgcccacaccaaccccttcctgggagctgaggcttgaatgaggagggcagtcccagagtgggggaagagcattccaggcagagggagctatagtgcaaaggcctggggtagaaatgagctcaatctatgggagaacagcaagaaggccattgtggctgcatgggaccatgtgagagaagggtagtaggagatgaggttgagaggactttgggggacaggtgagatttggtgagatgggagggaatgaatgartgaagcctccaatacgataagcgaaaaaacatgatattccaagagataggcgtggtcctcccccaaattttggttgctgggaagactggcagtccctccccagct

SEQ ID NO: 83667 - DNA, 634 bp, Homo sapiens
ggaatgaaaatattggctaggcacatggctttccccttcaggaggaaaaatgcacttttaggcactctgtgtaatccaaaataccggcctaattttgagagcagtcatctagttatataatttcgaaaactttaaaaatctaaccaatatttagaaccctgaaatattattgttcagagtgttagaaatcacagagtatgtaaatagataagaactatctggtatttcattattcagatctgacagtttcctgaattaccggccttcccccattaaaatttataatagtgcatttctttgtrttgtaatgtgtatctaaagtttaaaattgtctgaatttaatcttctagaggttttatgtgtctagaatgaaagtatttaggaaccctagtgtcatgctcagacctccttgattctaaccagtttatcaagaaatgagaccttttatttactcttaccaacatctttattattggacagaaagggtctatagtcatgcctcctcaaacagggtattatgttcaatgttatggattgatacaacaatgttaaaggcctcattcatgtttgaaaggacagtatgagcttacagtgaaattagacattcacaaataatgacagcagaaatcagcaa

SEQ ID NO: 83668 - DNA, 2110 bp, Homo sapiens
ggcatgttaaataactgggatttttaataggctgtgtgccacaaaagcctggggtttttttttttttttttttttttttttttttttttgagacggagtttcgctctgtcgcccaggccggactgcggactgcagtggcgcaatctcggctcactgcaagctccgcttcccgggttcacgccagcctcccgagtagctgggattacaggtgcccgccaccgcgcccrgctaattttttgcatttttagtagagacggggtttcaccttgttagccaggatggtctcgatctcctgacctcatgatccacccgcctcggcctcccaaagtgctgggattacaggcgtgagccaccgcgcccggccaagcctgtgttttttagtcattgcctacaaccccgagaggcagaaggggcaaacattctactcccttctcatttcacagagatggaagctgagtctcagaacatgtcaagatcacacagctggtctgtaggaggaccacgcctgcaaccagatcccagtaaaagcagccaagccagagtcatttcaggcaccaaaaggttgagggagtatcttctgacttcaaaagcaggaaggaaaagaggagacactttgaaatctgggaggggaatttatagtattcacttagagtctttttggcagagtccataaaatatctgtggagacagggatggagttgtccctgttcctatcctaagttgtccctgttcctgcacatgcatttgaaatgcatatgtaaagtgtactgaggtttacagttgggaaatgcacttcctatcagggaagacttcctagagggatgcattttcaataatcctcaaaggatcaatacaaaattgaacaggcagagttgggggtgcctggatacctggcaagtgtatagtcctgacatcaggccgacacatactagatagttattatgagcaaggcaagacagtagtgcaccatttacatgcttagtgatgtgatttttaagctgtccttaatgtttaagattgtgtttgcttatgttattttattaggtgagtaaagggaagaattatcatctagcaggggtgtccaagggagagaatacagttatgggttcttagtttctgtttctggttgagtcagtaaagccccctcctcagtcctcttttctgcttatcactagacacagaaaataaaaactatggcttcaggctgctaaaagcctaaaacaaaacaaaacaacaacaacaacaacaatgacgacaacaacaaaaaaataaggtgggttggacaagcttgatagagttcagacctaggctcgctcaccaccctgaacctgaccttcacaatctccttgcaatagaagccctctaattttctaagcagaggtttccaagacagtctccccatgaattcctgttgggaatataacttctttatttagtcatctgctttaggattcataaagtgttttccatccattatgtcatttgatccttacactgtccttaagagatagatgtgcatggactattcttatttacaaatgaggagactaagagttcaatataggggtgtcaaatagggttaaattcacaattacttcctgaaacattatattaagtattctggggtcaagtccaggggtttagcaaaagctagtactgtggccaattagcaatgtcttcctcgggcacagaaaaggaggataatggcacacactctggcaagttaagggactcagttctctgattccctgcccagggtctttttctcgctgcatgttcctcacagaaggcttgtgggaggaggcacaggtatgtagatcaagctgaggaaatggcacagagtaaatgctcagtgtggtggattgaaaaatggccctccaaaatacctccatgtttttatcctagaatctgagcattgctttatatggcaaaagaaaggggataagtctttgcggatgtggttaaattaagattcttgaggtggggagatgattctggattatccaagtgggccctaaacacaatcacatgtatacatagaagaaggaggcagagagggatttcacacacagagaagctgatttgatttgaagatggagcagagagattt

SEQ ID NO: 83669 - DNA, 1088 bp, Homo sapiens
ctgcttaatgatgagggatccagtaaatcagagactcaccrctcatttattaactgggaaatactaggacaattaaagttggcttctcttggatgtattgttagatcctttctgtcaccccacccacaggtagttctttttttctttttctcacacgtactttgtcttggactatagctgctactgtttagcttggtggattctagaaaatgccaatgacttgcaaattttaaattacaagatatatacattaagtaatatccacattacatactccctcaaactggaattttactttttgtgtattgtaggaacataagacaataaaaaattggtattaaaaactgagacaagacaatgcaacaaataacaataacacacagtgtgtgtcacttaattctgaagcaaatctccccttcccttatattaactggcctatttgatgtgaatgagggtattggtaacaatgcaattttcaagccaggagcggaacaacattcaaaccaacagctctcctaaggaccctaaaactaatggactccctgtcaatatctaaatctttgcaatcttttcccagagaggatgttaaaggtacaatgagagaattaattgaatgaggaagtaaagtaggataagcagtgtaacattgaaccaacacactgtttcaggggttatgaagcattgcaaatacagtagtcatccgtgttggtaatagggcattacatgtgatattcctatattgcagaagaaaataatattcaagggacagtttgatgggacttgatataggtttattttctattcctagaatattataaaatatttatttgaccttcagaaaactattaaatgaaaattatcaaagataccttgtagtcagtatatttggctggtaaagagtcatagctattcttctgagttcctaacaaagatgatctgtttttagtacagcattcttaattttctatcctagacaatttcctcatgtatgtattttattaccctttaaattgctgaggtctggctttctttctgattcctttaatttctgtttctaacactgagcagacaatattaaatgaatgtac

SEQ ID NO: 83670 - DNA, 1088 bp, Homo sapiens
ctgcttaatgatgagggatccagtaaatcagagactcaccactcatttattaactgggaaatactaggacaattaamgttggcttctcttggatgtattgttagatcctttctgtcaccccacccacaggtagttctttttttctttttctcacacgtactttgtcttggactatagctgctactgtttagcttggtggattctagaaaatgccaatgacttgcaaattttaaattacaagatatatacattaagtaatatccacattacatactccctcaaactggaattttactttttgtgtattgtaggaacataagacaataaaaaattggtattaaaaactgagacaagacaatgcaacaaataacaataacacacagtgtgtgtcacttaattctgaagcaaatctccccttcccttatattaactggcctatttgatgtgaatgagggtattggtaacaatgcaattttcaagccaggagcggaacaacattcaaaccaacagctctcctaaggaccctaaaactaatggactccctgtcaatatctaaatctttgcaatcttttcccagagaggatgttaaaggtacaatgagagaattaattgaatgaggaagtaaagtaggataagcagtgtaacattgaaccaacacactgtttcaggggttatgaagcattgcaaatacagtagtcatccgtgttggtaatagggcattacatgtgatattcctatattgcagaagaaaataatattcaagggacagtttgatgggacttgatataggtttattttctattcctagaatattataaaatatttatttgaccttcagaaaactattaaatgaaaattatcaaagataccttgtagtcagtatatttggctggtaaagagtcatagctattcttctgagttcctaacaaagatgatctgtttttagtacagcattcttaattttctatcctagacaatttcctcatgtatgtattttattaccctttaaattgctgaggtctggctttctttctgattcctttaatttctgtttctaacactgagcagacaatattaaatgaatgtac

SEQ ID NO: 83671 - DNA, 1088 bp, Homo sapiens
ctgcttaatgatgagggatccagtaaatcagagactcaccactcatttattaactgggaaatactaggacaattaaagttggcttctcttggatgtattgttagatcctttctgtcaccccacccacaggtagttctttttttctttttctcacacgtactttgtcttggactatagctgctactgtttagcttggtggattctagaaaatgccaatgacttgcaaattttaaattacaagatatatacattaagtaatatccacattacatactccctcaaactggaattttactttttgtgtattgtaggaacataagacaataaaaaattggtattaaaaactgagacaagacaatgcaacaaataacaataacacacagtgtgtgtcacttaattctgaagcaaatctccccttcccttatattaactggcctatttgatgtgaatgagggtattggtaacaatgcaattttcaagccaggagcggaacaacattcaaaccaacagctctcctaaggaccctaaaactaatggactccctgtcaatatctaaatctttgcaatcttttcccagagaggatgttaaaggtacaatgagagaattaattgaatgaggaagtaaagtaggataagcagtgtaacattgaacmaacacactgtttcaggggttatgaagcattgcaaatacagtagtcatccgtgttggtaatagggcattacatgtgatattcctatattgcagaagaaaataatattcaagggacagtttgatgggacttgatataggtttattttctattcctagaatattataaaatatttatttgaccttcagaaaactattaaatgaaaattatcaaagataccttgtagtcagtatatttggctggtaaagagtcatagctattcttctgagttcctaacaaagatgatctgtttttagtacagcattcttaattttctatcctagacaatttcctcatgtatgtattttattaccctttaaattgctgaggtctggctttctttctgattcctttaatttctgtttctaacactgagcagacaatattaaatgaatgtac

SEQ ID NO: 83672 - DNA, 1088 bp, Homo sapiens
ctgcttaatgatgagggatccagtaaatcagagactcaccactcatttattaactgggaaatactaggacaattaaagttggcttctcttggatgtattgttagatcctttctgtcaccccacccacaggtagttctttttttctttttctcacacgtactttgtcttggactatagctgctactgtttagcttggtggattctagaaaatgccaatgacttgcaaattttaaattacaagatatatacattaagtaatatccacattacatactccctcaaactggaattttactttttgtgtattgtaggaacataagacaataaaaaattggtattaaaaactgagacaagacaatgcaacaaataacaataacacacagtgtgtgtcacttaattctgaagcaaatctccccttcccttatattaactggcctatttgatgtgaatgagggtattggtaacaatgcaattttcaagccaggagcggaacaacattcaaaccaacagctctcctaaggaccctaaaactaatggactccctgtcaatatctaaatctttgcaatcttttcccagagaggatgttaaaggtacaatgagagaattaattgaatgaggaagtaaagtaggataagcagtgtaacattgaaccaacacactgtttcaggggttatgaagcattgcaaatacagtagtcatccgtgttggtaatagggcattacatgtgatattcctatattgcagaagaaaataatattcaagggacagtttgatgggacttgatataggtttattttctattcctagaatattataaaatatttatttgaccttcagaaaactattaaatgaaaattatcaaagataccttgtagtcagtatatttggctggtaaagagtcatagctattcttctgagttcctaacaaagatgatctgyttttagtacagcattcttaattttctatcctagacaatttcctcatgtatgtattttattaccctttaaattgctgaggtctggctttctttctgattcctttaatttctgtttctaacactgagcagacaatattaaatgaatgtac

SEQ ID NO: 83673 - DNA, 1207 bp, Homo sapiens
ccctaaatgaaaagaagatggatcccaaaatttggaggggaaattgtctctttcagtttcttggaccaacgtgaaagaggactgtccgcctgcaaattttagtatccacttttcacttgctgtaagtagggaattttcccatgctttttcttcctccttttatattcttgtcaggtacattttaaaagagaaattaattagtctccagttagaaaacatctaaacataggcagaataatatatttgcataccattcagaaagtctcttaaacttttcttgccaaaagcaagagttaagaaacagtagcaagagttaagaaacagttgcaagagttaagaaaaattttcaagtttgtaattcatgctttcaacagacatttattggttatctaatatattcaaaatgctaatctaggtgctgcaggagtttcaaaaaacaaacaaacataagacaggatctctaacttcaaaaggcctagggttagtatgggaaataaaggtaaagtaaatgccatgagatatttcaaaawttgataaatgaaacagtatacctgatgaaaagaaagaaatagtatatcttggaaaacaaatcacagagggctctatggaggaggtaacatctgagctcatcgttgatgggtagaatttggaactctgagatagaggaaagattatctcaaggagagaaaattaagagacttctgttgggaagatttcttgactcagcagaaatgagtgcctcattgactaatgataacggccatgggatagaagaggcatgctggcacacattaattgctaaatctgaaagataaataaactcttacagaaactagattaaagagaagttattggagataaagatgggctaagcagcaaatcctttctctctgatttttcttctgcctgatccagtttggcaattagatcaaaaatcgttttgatgataatgtccacagatacatattaatacattcaaccaatggataataacatatctttacagcctcagctcccaccaccactgctggtcatatcaaaacccgagttagacaaaatcatttctttttgggaacatatgtttcaccatgtattgacttattcacatgctatctgtatcagttagttattgttacatcacagagcaaccaaaaactctatagcttaaaatgacaatcatgtgctattataacttacttatctatgc

SEQ ID NO: 83674 - DNA, 864 bp, Homo sapiens
taagtatctaactgcaacaaaggtagagcttactaatcaagcttcaagaaaaaaatagaaggggccttagtagaaagtgctcatggtctctctctatctgagtcacactgctataagttactttgttttaactgctttttttcctcctatgtaccaactcaagattcaaatttctaagataaataatcgttttggcattgctgaaattatttttctactcctattatctgaggatgaggcaygttttgagctgggcagacatactgaagagtgtgcagtgggagagacaacattcctgtagatgaataaaatgaagtgtatctgcaaagtgaaaaaaggaaaaagcatgaatttactgtgtaccatctagtcaattattttaaatatttgattaaagaaaaaagctattctgttgacatttcaggtccttgattacaaaccttttataatatttgaagttaatgtggagacatttgccattatgaattcaagataaaactgatttatgtgtgcttttgaatctcgagagtttcaagtcaaatctttaagtttatttttaaacactgaagaaagatcaaagcaaaggaaaagtcaatgtaactaagaatttttcatgcattttaaaaacagatactgagttttacaatgactcttgaggaaatgatataatgctgatgaaatggcaattcaggaaagctaactcaattctacaaatacttgttgagtatttctagtctatgcaagccactaaggccacacacaaataagtgaaatctgtcgctgtcctcaaggagcttaaaacataatgaggaagataaactaaaatttcagataactataataccaggtaataagaccagaacc

SEQ ID NO: 83675 - DNA, 864 bp, Homo sapiens
taagtatctaactgcaacaaaggtagagcttactaatcaagcttcaagaaaaaaatagaaggggccttagtagaaagtgctcatggtctctctctatctgagtcacactgctataagttactttgttttaactgctttttttcctcctatgtaccaactcaagattcaaatttctaagataaataatcgttttggcattgctgaaattatttttctactcctattatctgaggatgaggcacgttttgagctgggcagacatactgaagagtgtgcagtgggagagacaacattcctgtagatgaataaaatgaagtgtatctgcaaagtgaaaaaaggaaaaagcatgaatttactgtgtaccatctagtcaattattttaaatatttgattaaagaaaaaarctattctgttgacatttcaggtccttgattacaaaccttttataatatttgaagttaatgtggagacatttgccattatgaattcaagataaaactgatttatgtgtgcttttgaatctcgagagtttcaagtcaaatctttaagtttatttttaaacactgaagaaagatcaaagcaaaggaaaagtcaatgtaactaagaatttttcatgcattttaaaaacagatactgagttttacaatgactcttgaggaaatgatataatgctgatgaaatggcaattcaggaaagctaactcaattctacaaatacttgttgagtatttctagtctatgcaagccactaaggccacacacaaataagtgaaatctgtcgctgtcctcaaggagcttaaaacataatgaggaagataaactaaaatttcagataactataataccaggtaataagaccagaacc

SEQ ID NO: 83676 - DNA, 1051 bp, Homo sapiens
caagggtacaagtagaagtagtccaaagaaaagagcttttgaagtaagttaaatcctctgcaaaattcaggtcctgttaatatatacaaagtctgaagtttaaagaaatacattagaaaaaaatgtatcttgcatatgatacagaaaagaacgtctatcactatttcttctaattaaaagatgacaaaactagcaaaagcaagctaggtgctgaatattccacagtatgttcccacagttatattaaatactaatagttattaaacttgtggcttaaatcacctctcctaccctagtccaatctgtatgctgcactctgccagcagctctcacagcttagcaacaaaaaacagggtcgtaacacttggggatgttcaagaagaacttgtttggcccatcatttttcaaatcagttcatttacactcagttcacagtcgctactgatgaatgtttgtgtcatctaagttcaatacccaaacagcaagcacagcatctctgtgggaaatgactggtaaacctccaggaaaaaaaaccctcagtgttcttttcatggcttatagatgctctctatagacctccaaatttgaaaggcatctatagatacaaggcttgcatttattgaatagataggcactaagagtaacctgtggttctttttgtgggtaggatttatgctgaactatatggcattggttaactacttctaagggactggctaatgtctcagttcaatatttacctattgagagtgcaaccactccatgcaagctttaaattagttctgcatatgatstgcaattataatttttctagctatagattaatatttttaaaatgtacttatttttcacagatcccatccagtgtacaaaattgatttttattttatattttaggaacagggtttcatcatgttgcctagagtgcaatgaaactgaactcaagtgaccctcttgcctcagcctcccaagttaggtgggaatacaggcatgcgccaccaagtttggctttgcaaagtgatatataacttcactctttttcagaataagg

SEQ ID NO: 83677 - DNA, 602 bp, Homo sapiens
ttgctggaatttctaggaacagcagcttcctctttcatctgtaaaaggtacaggaagagactgtcctcttcactaggtttgaacctgggaacatgaagctctgaaagcttctggcagccatcttagaaccctgaagagtaagcctgtcaaggacatagccaagattaaggaagaggagctaagaaattgcaatggaaactgcagtgcaactggtcacatgggtgtgagccctgaatcaggtcctgcttagagtcacatagagctcccggctccacttacrcagtcatgaatcatgtctctcttttttttcctcaagaaacttgagatcaggctttatgattcttgagagtaaaacagttggaactaattcaagcataaatgatcacttgcaagggcacagctgaagtgtggtggaattagcagagtacaaggacaaagagggtgccagacatcatgctagcatctttacttgcttatgtcaccgaatcatcacaggaatcataacctataatccggtggatatgattcttaaaaagtagtaaggtagaaagtaatttgcccaatttttttgtagctaataactgaggaacagagatttgaat

SEQ ID NO: 83678 - DNA, 705 bp, Homo sapiens
agacaaaggaagagcaaagcattttaagcagcaatacagcaccccaacacaaagaaatatgtcacgttccatgcactgcaaagcattcgatattgaagttttctttgcatcagaaataaaggtttggaaggttaaaactacaaatgtatttcctttgcaccatgacaaatcaatcaggaagtatgaagtagctacatcacttgagttgctgcagatcttttgaataatgactgcagtaaatataaatcaatrtgatctcagtgaagaaattcccattagaccttggatttatttgctggtatgttttcaaccatcataactaccttgtttgtccattcctttaacatgttcaacatctaaatccaaaagatctcagttaagagggaaaaaatgctacatcatttctgtgtgctttaccctgatcatggttcaatttaagatatgtctctcattgacctaggcttctatcctcaggccattatttctctcagttctgtatattgtcttttctcaacagggagtccgatgtagaattctcccttattaatcattctattgctagctaatgtgtctgctcagattcacaggagtgctcaagctggtcacagtggtgacgcaatggcttttggtgaataatttcaggctccctgggagggcattgcatgacctcacatgccatctgccaggccatctgtgtcttactct

SEQ ID NO: 83679 - DNA, 2191 bp, Homo sapiens
tttgtaaacagaatctcctagtggttctgtttttctggagaacactgactgacaaaagtgtctagtayaccaagcataaaaccagtgtgtaatgtatacaaagaaaggcaaaaaatatatacaagaaaaaggaaacaatcgcagagacaaaatgagaagtgatacagatgttagaattaataagtaacttaaactaggcattataaataggtttattgatataacagaaaaaaagaatattatgagtaaagaaaaggataatattaacacagaaataaaaagtttaaaaatgtatcaagtggacaatgtaagtgggaaaaaataaaatatctgaaacaaaaataccattagatgcacttagaaaagattaaaagctgcatgagaaatgatcaattgcataggaaatagaaaatttgcaaacaaaagcataaagatgtaataaatcttttaaaaagagaaataaataagaaaaataaagtaaatgaacagcgtctcaatggctcatgggattatattaagacgtctaacactttgtaattggagtcctgaaagaaaattagagaagtaaaatattggtacagaaaaatattgaatgaaataatggctccaaagttttcaaacttgtttagaaatgttaacatacagatctaataaggtaactgaacccaagactgtacaaacataaatatatataatccacaccaaggcatatcagacccaaattataataagcaaaagagagagaaaaaaagaaaaaaaaaacaccaataagagaaaaaagaaaccctgtaaagaggggaatgataaatatgactgttgaattttcatcagaaacaatggaagtaagaaaacaaccaatgccacctcttagcttctggtcgggaggacatcaacctagaagtttacatgaaaccaaaatatcagttttcaaaaagtgaaaaataaagatgcattatgataaacaaaatatgaatgaatttaaaatgagagaaaaaagttgaaaaactgttcatattaaagggtgtgatactagagagaaaataagatttactgaaagaataatatttactagaaatgatacataggtaaatataatgcagtttttttctcatcttaatttctttaaatgtaaatcaacattgaagaaaacataagaatgtacttctaggtgtataatgtgtgtgaaattaatgtatctaagagttcccttttccccacattctcaccagtgtctattttgtcttttaaagaatagccattctaactggggtaagatgatatctcactgcagttttgatttgcatttctctaatgataagtgatgttgagcattttttctcatgtcattcttgaacatttgaatgccttttttggataaatgtttactcatatcctttgtccactttttaatggaattatttgtgtttttttttactgttgagttattttgtatagtctgaatattaaaagtctatatgtaaatgaaaatgacctaacacaatatctgaggccttacactgccttatttcaagaattattgtgtgacagagtaatcagattgtgtggtattggtgcaaaaattaaaaaatagatcaacagaactaaaaaaactaagtagataatacagagatagatcagcaccatatagtcagttcaaaagcactaaccattaaacaaaacaacaaacaatttaaaattaggctatatctcattataaaatttcttgtcattagaaaacaccattaaaataccatatcttagggaaatatttattgtagcttttcagactatatagagcgaaaggtgcaaatagatattatgcaaagttatatatgctatgtgagtttatcatttgacatcagggaagtgcaaattaaaacacaatgtgatatattataaaatctgtagaaaggctaaaattatttttaaatgtctagtaacactagatttgtttggtgagattatggagcatccagaactctcatatacagctggaggtaaggtaacatgtgcaatgactctggagaaagtttaggcagagttttgcaaattagatgtaaacatcctttataagacagccattcagtcctagaaattcatccaagaaaaattaaaacacatgttccaagcatattcaagaagattaatactgtctcttctcataacagatgcaagctagcaacaacacaaa

SEQ ID NO: 83680 - DNA, 726 bp, Homo sapiens
ctacaatattgtgcttggtatagatgtcataatattttaggaactttgaaaagattgtcacataaaaaaggactttgatgtagctcaaaaatttcacccaaagttttcaaagactgttgcaagaaggaataatttgactcagtaaaatattttaaaaaatgcaaaactttaactttgtggaattggaatttttaaagattcataaataatgtttgaatctgtaaattatatttaataagattttaaatttaatatttaaaaataacccaggaacccaaaacttgaagagaattaataagactgcttatgtacctacagagaattagcattccttactcataaaactttttccatgaatctcaacatataccgtacataattgaaatgtacgtaaaagatctatggttatcaagtgatagatttttccatttctatgttgttctaatgttgagtamaactgggaacttccaaatagttggcaaaacacttactgtcaagcacacaggtgtaacaataaaataaatccagaaaaaattattattgcattcacagaaatacattacaatagatggtgcctgcaatactttttacttaagaattgtactatatgtcattaaatgctatgctaaacgtagtatttgagagcaagaaacaccaatggagcaaatataagaatacatcaaagtaaaaaacaaactagaataacactgcataatatatagaatt

SEQ ID NO: 83681 - DNA, 1138 bp, Homo sapiens
  misc_feature (1)...(1138): n = A,T,C or G
tgcatgagccacctcacccggcccattttaaaactttaaaaccctctctgttccccctgccaacacctccagcatctctggtaactgtgatgacatggactccccccagtctcctcaggatgatgtgacagagaccccatccaatcccaacagccccaggtaagtctgcccctccccctccacccactgtgcccacccaggctgggggtgccagagagacaggatccggggccctgcaggaaggagaaagaatccaccattcctggggattgggacaagtggagtcatgggtccatggcatgtaggacgtttacggggaaggagtggagtattgaattctataaaacccatttgttatgaaacattcaaacagcaggatgcagtggaaaaagaactgtagcacgacaccatttatgtgaactaaaaatacatagccaggtgcagggctcatacctgtcatcccagcactttgggaggctgmggcaggaggatcacgaggtcaggagttcaagacaagcctgaccaacatggtgaaaccccgtctctactaaaaatacaaaacttatccgggcgtggtggtgcatgcctgtaatcccaacactttgggaggctgatgcaggaagatcatgaggtcaggagttcaagaccagcctgaccaacatggtgaaaccccgtctctactaaaaatacaaaacttagccgggcgtggtggtgcatgcctgtaatcccagcactttgggaggctgcggcaggaagatcacgangtcaggagttcaagacaagcctgaccaacatggtgaaaccccgtctctactaaaaatacaaaacttagccgggcgtggtggcgcatgcctgtaatcccagctactgaggaggctgaggcaggagaattgcttgcaccctggaggtggaggttgtagtgagctgagattgtgtcactgtactccagcctgggtgacagagcaagactctgtctcaaataaaaaaaagaaaaaagaaacaaaaggagacatcaacgcgttaccatggttgcttatctggagtgggaggacagggaaggatagattttaaaagttcaaacaacataaaatatgaaatcttatattttcaaggtaatgtctttaataggcatagatcc

SEQ ID NO: 83682 - DNA, 593 bp, Homo sapiens
ggtctgattgctcttatttccccatgtgtgcagctgctgctgctgctgctgctgctgcttctttttttttttttttttttttttttgagacagagtttcactctgttgcccaggctggagtgcagtggcacagtctcagctcactgtaacctctacatcctgggttcaagcgattctcctgcctcagcctcccragtagctgggattacaggcgcccgacaccacgcccggctaatttttgtattttttttagtagagatgggatttcaccatgttggccaggctggtctcgaactcctgacctcaggtgatccacctgccttggcctcccaaagtgctgggattacaggcgtgagccacgcgcccaggccagtacagcttcttcataaggagatggaccaggaaaggtccctgcccaggaggaggtcacagggtgcgggagagataaatcagtgacagatagcaattgctggaccacatggtaggctgtgtgggacaggcggtcagtgggctgggccactgtgtggaggacagcggggagcatgagcagggcagggatctgggggcttcatggaggaggcggcatcagtgct

SEQ ID NO: 83683 - DNA, 593 bp, Homo sapiens
ggtctgattgctcttatttccccatgtgtgcagctgctgctgctgctgctgctgctgcttctttttttttttttttttttttttttgagacagagtttcactctgttgcccaggctggagtgcagtggcacagtctcagctcactgtaacctctacatcctgggttcaagcgattctcctgcctcagcctcccgagtagctgggattacaggcgcccgacaccacgcccggctaatttttgtattttttttagtagagatgggatttcaccatgttggccaggctggtctcgaactcctgacctcaggtgatccacctgccttggcctcccaaagtgctgggattacaggcgtgagccacgcgcccaggccagtacagcttcttcataaggagatggaccaggaaaggtccctgcccaggaggaggtcacagggtgcgggagagataaatcagtgacagatagcaattgctggaccacatggtaggctgtgtgggacaggcggtcartgggctgggccactgtgtggaggacagcggggagcatgagcagggcagggatctgggggcttcatggaggaggcggcatcagtgct

SEQ ID NO: 83684 - DNA, 536 bp, Homo sapiens
ccaggacccaagactctctctgtgaggtccacagggcagaggcataagccattcttcttttttttcttttaaagtcagggtctcaactctgttgcccaggccggagtgcagtagtgtgatcataactcactgtagccttgacttcctgggctcaggcaatcttcctgcctcagcctcccaagtagctaggactataggcacgagccactgcatatggctaatttttaaaaattattttttagtagacatgggrtttcactacgttgcccaggttggtctcaaactcctggcctcaagagatcttcctgccttggcctcccaaagctctggaattataggcgtgagccactgctccagcctgagccagtctttaagatattatcccaggttgttggagctctaccgtttgactttgagaatcagctgcatagtctgaccttaagaaccagctgttcactttggtacagaaaggtacagagataccagggcagaaggccaattatatgtggaactatctggctctttgcagaacacct

SEQ ID NO: 83685 - DNA, 1275 bp, Homo sapiens
aaaagcatgggctttgaagcccgacaagagccatttggaattgaagttctgccactgtgatcttagagaaaatatggagtccctcactttcctcatagcatattgggaataatagcacccactctgcagggctattttagagtagagataatatagacgactcgtggagcatagtgcctgtcaaaaagtagatattcttattgatgagaaaattgtgtcttttgtttagggaagtagcagggttaaattaagttttcagcaatatcttaggcaagatacaaatmcaaaaaaaaaaaaaaaaaaaaaaaggaacatacacttgcacacatcctcctgcctccagccctaagaactgttgctctcagaaccagaaggggcctcaagaaatctggaaagcttggcaagacgcttggtactgtgctccaatgccactagtggaaatgatacaatgcaagttctttgggggcaataagggaaattggtacatatcttctatcccaaatatttaccctgtgacgagaagtcaaataatgccagatgtatatgaagaaagttgcagccatccaggattgagaactcagatctttccagttgttggtgagtagcccactgaggaaaaggcctcttttccaatttctttacaaatgcaagccaagtactaaattttgctgttgtcaaatggcatgggcacaaataaatacgcacagcatggcttctctgtgccaactggtatgtagatgtaatcatttccacagcatgccctccctcagcccaagggtatcaagcaaaatgtagcaactgagagacaggaaggctatggagcagtccaaagggaaagaaagagacatgcgggaacagagtcatccaggagtgctcctttcaacctcacatggagccattctagagttatcatcgaaccgatgagacagtaggtaagtcattggtagaatgccctgagcagaaaccactaaactaggagtccaatccttggatcagatatttccaatcctcacagtaccctaagacacccaagacatacaacattctctcatggaaacagtgactaggaaaaggaggggtcagggaccaccagtcagtgggagtcactgtggagttcaaggcaggtccccacataattcaagtttaccccagtcttggttccaatctttactaactaggagaacttaggcaaatcacttaactgttctgaagcttagtttacataattgtaaactagacaaagtattctcataccgttttgaacattaaatatga

SEQ ID NO: 83686 - DNA, 743 bp, Homo sapiens
aaaatagagaataaataaccaatggaacaaataaccaatggaactcctttctatgttgatgtattagtctgttcagattaccatttttaaaaatgccatactgagtagcttaaataacagaaatttatttctcacagttcctgaggttgggaagtcccagatcaagctgacagccaatttgggttctggtgacagctctctttctgacttgcagataactgccttatcactgtgtctgacatgtaagagagaaagagctctggcctctcttccacttcttataagggcacaattcctattatgggatcttcacgctcatgacctcatctaaaccaaattatctaccaaaggccccaccttcaaatatcataacattaggggttagggcttcaatatatgaattttgaggagacatatttcaatccacagcagttcatattatccaacagtaagaacccacttttcgttttsaagctttggggaaatggaataagctccctctgagccataagaggcaatgtgattgttgctatatttattctgtgagggctcgtgtaaaccagtggtccccaaactgtttggcaccagggactgatttcatggaagacaatttttccataggatgcaggtggtgggacaagggtgagagatggtgaggtggtttcaggatgaaaccattccacctcagatcatcaagcattagttagattctcgtaaggagcacgcaacatagatccctcaca

SEQ ID NO: 83687 - DNA, 1936 bp, Homo sapiens
atattctctttgactccttgattttgcaagcaaatcctgtgatagcttgcattggggccagaatgactgcatggatctatgattcaactggagtgtatattttatgcactcaggtaacagtgtttggccagttatctttttgagaatttatgtcagaaatttcttctacaaatttgataccattacaatacaaataatgagacagtctgtagggttaatactcaggagaggtcagattccagagattggccaattctatgcaggctgttttatttttgcagaaatattcaatgtatgtcttattaacttcaacgctgatgagacagaaagtagtattcaaacagtaaattacactcacacactgatatggctggcttttaatttacaaatatcggtattaaaataagaagatagaatacccatatcagctctagacctctcagcagaataagaaaccagaatccccagctgaagagagatccaccctgaacagagacagataccctcttgcattgggatatcttaatgcagacttgataaccagggatgttcaccccagcaaagtggagaaaggtgtgaagtctcctgcttatatttaagttcatttatcctttcttcatattaaaaatacaactttgcttggtttgttgatatcaattttggtccaatagagttgtcaccaaagagtttcaaaatgaacttcatacataaattattcttacagtactatattattatttaaaatgcttcaaactgtagtgcttaaatatattatacagctctaaaaacgagccacaaagtagcttcttcagactagggtttcatttatgaaatttaaatatatggatttggcttttaattaaggaaatattatacaaaaaaaagtaaaatacttctggtgtatatctctccacttatgcatattaggtatattatttttcttattaagtgcatggatgaaatatattataaactctatgtgtatatgtcatacacattttaaccctgtgatataatttagctcatggttttgaacatattagatattaattattgctgagttcattaaatgtgtttacaaccatctaaaatgtatgactggaaacccagatgtctactattatttttagttcttattgatattgccaatttgaattaactatatccccacccacctctcccactctcagccccaccccacaccgccccctaccctgcccccgaccaccacaaaccaggcaaatagcatctggaatatattctttttatcatttgagataatcttatagcaacagcattcactggtaaatccattgcctttaataatcatacgatgaattttgttgagagtcaaaattccgaacaggagcaatcacagattctaccagaggagaaatctttctggtaggttaacatttgtaaaaggatctgtcatacctcttgggctggaaaaatatttttttcttttccctgttgtgtcaactgaaaatttattccatttttagacagagtatattaataattttttttgtactatacatgcaaagatggtaatcactgtcctttctggcaagaccaacaatctaaatcaaatagaagagactatgtaaattaaatggattgaaagacaccatctagaagatattatcacatttctggaaagagcaggagcacaattttgagaatcagagattcagagatatgtaaaaaatagttttgactactgttgttaatggtgttattttaagccttttcacaaattttaggaaccacattgaaaggaatatatgctgtggtactgaattaagggatatgtaattcctatttcaaatgaatctcattttaagacmgtatatataacattcctccacgcaaaaacatgctagtgcccactatatacaatataattaattacacaggaaaatagagcttttta

SEQ ID NO: 83688 - DNA, 1497 bp, Homo sapiens
tcctgcctcagcctcctgagtagctggcattacaggcacccagcaccacactcagctaatttttgtaatgttagtagagttggggtttcaccatgttggacaagctggtctcgaattcctgacctcagctgatctgctcactctggccttcccaaatgccgagattgcaggcatgagccaccgcgaccagccacgaaggagaattcttaacaaggatcttaattgtctaaaatgatgttaataaaaccctactagcaaacctgagaggagtttgaatattctttatcttggatcatttcttattcagtggcaaaatgaatagggtgttttgcttgaattggagttgcatgaaacatgaaaatcaggaaaattcattaaaactctaagtttgacagtgcgtgtagcactataactaagcaaccaaaaaatatatttatccaggaaaagggaaattgagttaaaagacacgtgtgtcctaaatagttgtatacagaaacactagcagacacacacacaaaaaaacaagggtagcctggaatatatttagaagaataaatgatgttataaaaggcaaccatccaaaagaactataaaaggaattttatgactcatgcatctctctaattgtgactttggagttacagacacagtttctgatgaggaaaatatataagaaatctaccactaaatggcatagaaggtcaaatgatgaggcactagcaaaatataactagacacattaaaaagaaaagtcaaaaacttaaatgcagtcacctcactcctttctaccctatgttcccaacactattcctatatgtcacattcatgctcacacaggcagatagaggtacaagggtcattaacttcactttgagagagtaaaataacaatgtgttgataacatataggacagcacattaagaaacaagttttgttttgctttgttttgtttcgccatagagattgtgtggtatactcatttgcaatcataatacatttggatgacttctctgatttacacagattttactgatttactcagttactgcttattgaaatcctrctagacaggccaagtcaaccttgaaaccaaagaacagcatatccaatctctatatggctctataagaaggacagttcagaagagtacagtttttaggctattctttcctggtctccctaacacctagcaaaatcttcaaaacagttcataaaatggccagaacttaagttgtctcaatgtcaacaatctgtatgtatttgggggttgctcaggtatataacaaatgtgctcatgatcaagttttttctagctgctaccactggtcatctttgccaatgttccaccataaagagcaatgaaaaagctctggtctctgctggcatcacctatgagtgctgaaggactcgtggccaaagctgtgtgcttctgtggaaatgtctggtggcagaatggggttagtgtaccccatgttttactcagcttagtgaaatgca

SEQ ID NO: 83689 - DNA, 1497 bp, Homo sapiens
tcctgcctcagcctcctgagtagctggcattacaggcacccagcaccacactcagctaatttttgtaatgttagtagagttggggtttcaccatgttggacaagctggtctcgaattcctgacctcagctgatctgctcactctggccttcccaaatgccgagattgcaggcatgagccaccgcgaccagccacgaaggagaattcttaacaaggatcttaattgtctaaaatgatgttaataaaaccctactagcaaacctgagaggagtttgaatattctttatcttggatcatttcttattcagtggcaaaatgaatagggtgttttgcttgaattggagttgcatgaaacatgaaaatcaggaaaattcattaaaactctaagtttgacagtgcgtgtagcactataactaagcaaccaaaaaatatatttatccaggaaaagggaaattgagttaaaagacacgtgtgtcctaaatagttgtatacagaaacactagcagacacacacacaaaaaaacaagggtagcctggaatatatttagaagaataaatgatgttataaaaggcaaccatccaaaagaactataaaaggaattttatgactcatgcatctctctaattgtgactttggagttacagacacagtttctgatgaggaaaatatataagaaatctaccactaaatggcatagaaggtcaaatgatgaggcactagcaaaatataactagacacattaaaaagaaaagtcaaaaacttaaatgcagtcacctcactcctttctaccctatgttcccaacactattcctatatgtcacattcatgctcacacaggcagatagaggtacaagggtcattaacttcactttgagagagtaaaataacaatgtgttgataacatataggacagcacattaagaaacaagttttgttttgctttgttttgtttcgccatagagattgtgtggtatactcatttgcaatcataatacatttggatgacttctctgatttacacagattttactgatttactcagttactgcttattgaaatcctactagacaggccaagtcaaccttgaaaccaaagaacagcatatccaatctctatatggctctataagaaggacagttcagaagagtacagtttttaggctattctttcctggtctccctaacacctagcaaaatcttcaaaacagttcataaaatggccagaacttaagttgtctcaatgtcaacaatctgtatgtatttgggggttgctcaggtatataacraatgtgctcatgatcaagttttttctagctgctaccactggtcatctttgccaatgttccaccataaagagcaatgaaaaagctctggtctctgctggcatcacctatgagtgctgaaggactcgtggccaaagctgtgtgcttctgtggaaatgtctggtggcagaatggggttagtgtaccccatgttttactcagcttagtgaaatgca

SEQ ID NO: 83690 - DNA, 603 bp, Homo sapiens
tgaattttttctggattttttttgttagataatttgaccaacactacaacaggttctcctattttcttaatactaataaatacatagaaactgaatcttcactcttaagtggatctttatacatctatagtgctcttttatyttctttagaacgacttaccactgcctaagtttgtctaaattctttttttttttttttggagacggagtctcattctgtcgcccaggttggagtgcagtggcacgatctctgctcactgcaacctccacctcctgggttcaaggaattcccctgcctcagccttctgagtaactgggactacaggcatgtgccaccacgcctggctaatttttgtattttcagtagagacgaggtttctccatgttggccaggctggtctcaaactcctggcctcaagtgatcttccggactcgtcctcccagagtgctgggattacaggcctgagccactgtgcctggccagtttgcctaaattcaattcatattgaactaagagtggaggcaattaagaagagaaaaccattaacatgaacactgtctgtaacccgtaataattatctatagcaagattaaccaggaatt

SEQ ID NO: 83691 - DNA, 2316 bp, Homo sapiens
atataaataccctatgtctgtatttttatctgtaaaacacaagttctcacttttgaagagagatcatttatacttctatgacttcttgtcaaataactaagacacatatgtatactctgaccaatctcaagttattgattttctgtgcacagtaattggcagtataattgtgcaaagtaaaatctaggcttcttaatatacattagtgcatctacatatgtacaaaagcacacattttgtacttagattataagtggatcttatagctttctagcatttttatagtgaacaaaagtccatttgtatcatatcatcattttggaaaactaatcttgtttgaatttacaaattcctttttgtaatccttcctcttaatttttattccattaattattgagtcatttgactttatttagtcaccttattatccaagtacactatatccaaaggacctagaattctttacatactaacaatatcttttgccatgagtgcctcaatctgtgacctgaccagtgatcttggaagcataagggataaaaaagagagcatccttgattaaatcaatcatttaatcaacaagtattaagagctgtgagggagataaaaaaaacacagaagataattatctctgctatcaaagagcttacagtcttgttagaaatgtaatatgtgcaagaggcaattagagagtaagacagtatctaatgaagtgtttaatcggggtgggggtgcagcatcagcttctattcttgtgaactgaagggttagtcaagatggactcttagatccctttcagaagtatgatctctataaaagtgkcatgagtagactactatgaaggttaggccttaaagaagtaatttatctctttgccaactgtgtttattttttccatttcactcatatctctgaatattgaagaagtcttctctttataagatcctaagaagtgcaatttaattgatcatacttcttgcccataaatctaaactttctttagccaacaaatgttatcaactaaaatagaataagccactaaaaataccagtgcctaaaatttttaaactacttttgcagaaagtagacatacaccttttcaatgaaagcaaatattctaaaatactaaaaacaatgactgctatgcatccatgtatcaaactccacttgtataccttaaatttactcaaaaaaacccagcaatgcctgggtgggtttgaagctcatcagcgttagaaaacaagaggctactcatgtcatgcagagataaagcagttactaaaattatcatctgagaccacccagaaagaagtgtacactgaaggcaaggcatacgacatgactccttcagtggaccattatggaaataatggggaatacagaaactggtgtagagtagctgcttctaaatattcttgtgagtttttaaaagaaatgaatatttagagttataaattatcacatcaaaatgacctcagatgaccaggatcatccatggacttcctaaaacaatcatcactttatcaactctaactgaaattgcctaaatagatgatgaccaagtctgactctgagtgctgaattacaacataggttatgctctgaacctctccaagattcttgtaaatttgggagtgtttattgggaaagagtgaccccaagattagaagaatattacaaggattcaggtaattgtgagtattccacaccacaacccagccacaaggccagtctttgtctgaatacctggcaaatgcctcacctgatgaaaaaagtttttctgaaatatttttcaaggtctctggacttgaaaaattgtggctgaatctgatggagagggataagtaaggtggggcaaaagcagaaggtcaactcttgaaggccccctcctacttctgggtcatcagttttttagctcctaccccaggtctgtgtgtactaatgtggtcattagataactgcccctccccgtgctcagcaatggatgattacacatttagtgatgtgttagctccactgtcaacaactgacccagaaattgtttctttactgaagcacatcaaaccaatttctggcaccaggcatgttaatttatctagtaaatgtagtttttctgttccaagaaacaggactccagaggtaatttgtttttatctttcagtgatggtagtaaaactccactgtattactttattatgttatttatctggtttaatttgttctgcaggaacctcagtcaattcaccattacatgggatgtcatgtgggcccaatttattgaggtcagtatgcaggacataactatgatctacatgt

SEQ ID NO: 83692 - DNA, 499 bp, Homo sapiens
cccagaggaaacaaatgtcaagactatcctaggtatcagttgggatttttgaggaaaatagagggagagctataaagagaaaaagtggacactggaggagatctttttaggcccctttctcatggaaagtctgcagtggcttgtttctatttatattactttgcttacgagtaaatgtataaagagtttgaagctcagagactaaatttgcagatatcatttagaccttaatttgatatttatatcttggatcatgtagagaagtctggttttgacagaaaattacatgcttgctatccatttatgatactgcattcattataatgtaatctttgctatgttgtatgcattacattgttgttatattttatgtatgatataaycaataaagaaataataaaaataattctgaatgactgtcttgaactgtttgtacttcagctggactatttagcagtgagttaaagcctctttattttggatgtataacacaacaaaa

SEQ ID NO: 83693 - DNA, 646 bp, Homo sapiens
ttttgtactacaaatccttattgcctcctcaaatcctttttggaataaggctgggaataaattagtttaattaaattctttgggtatttctaattaatatctactgcaagatacccaggaaagaaaaggaaggggtgctgcygaaatgccaaaatcaattgatctgttgatttttatcattgtagttgttgcttttctagccatttcaagactgtatgtgttcatgaagtcttaagtagagaaacacctgtttccccattgcttctctctccttccccacacccctgcacctgccccaaccccaggcactagagggaacagtaacagagggagattggcactgcattgccagtacttcacccatctatacccctccaccacaaaagaaggaaaaaacaaattagaaactatttttttaaaaaaggaaattgtagtacttcatttgaaagcatactgttttcaactcaactcgattaacagatagcctgacaacgtttttgtaacctttcttttgtgctataattgacattcttggctcaatctttaaaataattgcaatttcaattaagtgaacagagaaaaacaaagagagggaacaggacaatgtgatgggaccaaatttgatacaggtctggattcctaaagc

SEQ ID NO: 83694 - DNA, 898 bp, Homo sapiens
tgcatataaaaataattgcaaaggaatgatctggacatatacatgttgcacaagaattgtttggggtggctcaaggaggtttcaaatgtgttagtggtattagttgcatcttttgagaaatgaagaactactggcgtatgcctcagtttcctgatacacagtgtttgcttattcctacccacttcattactcttaaaccttagtagattctcacttaaaaaggttcctggacatgaattagaaaaataatgcttagggatattgcctaakcttagaaactattggacaaatcaagttccatattttttaaatataattttactacaagaagattccatcaaaatgaaatttgtcacaatagactttaggttgcataaggcagcatgtatcacttgctacatattcactaatttggattggtaatacctgcctacagtataaataattttcacaaatgagtttttggattgtacttcagtgtgctctattatgctaatatttcaaatatcttttgaaggaaaatactaactcaatcaaagaatgtctctttaaaaacttgcccatgcaaatatccttgattattaattcattgaatcataaataaaatataagttaaattaattttgactttgcattcagtttcatcttaaggccacattctgcccttttgcgtaccagctgatgtccccgggaaaggtttgcatctgtttccataaccagcactataatgactcacctgctagacctgtgctgcactccgtgtgagagcctgatggcaggatattgacttctttaaaggctattaacattctcaatgatgtgtgtgtgtgtgtgtgtgtgtgtgtaggataaagcaagaagagatagatgaagaaacctgagaaatattcagataagt

SEQ ID NO: 83695 - DNA, 898 bp, Homo sapiens
tgcatataaaaataattgcaaaggaatgatctggacatatacatgttgcacaagaattgtttggggtggctcaaggaggtttcaaatgtgttagtggtattagttgcatcttttgagaaatgaagaactactggcgtatgcctcagtttcctgatacacagtgtttgcttattcctacccacttcattactcttaaaccttagtagattctcacttaaaaaggttcctggacatgaattagaaaaataatgcttagggatattgcctaatcttagaaactattggacaaatcaagttccatattttttaaatataattttactacaagaagattccatcaaaatgaaatttstcacaatagactttaggttgcataaggcagcatgtatcacttgctacatattcactaatttggattggtaatacctgcctacagtataaataattttcacaaatgagtttttggattgtacttcagtgtgctctattatgctaatatttcaaatatcttttgaaggaaaatactaactcaatcaaagaatgtctctttaaaaacttgcccatgcaaatatccttgattattaattcattgaatcataaataaaatataagttaaattaattttgactttgcattcagtttcatcttaaggccacattctgcccttttgcgtaccagctgatgtccccgggaaaggtttgcatctgtttccataaccagcactataatgactcacctgctagacctgtgctgcactccgtgtgagagcctgatggcaggatattgacttctttaaaggctattaacattctcaatgatgtgtgtgtgtgtgtgtgtgtgtgtgtaggataaagcaagaagagatagatgaagaaacctgagaaatattcagataagt

SEQ ID NO: 83696 - DNA, 898 bp, Homo sapiens
tgcatataaaaataattgcaaaggaatgatctggacatatacatgttgcacaagaattgtttggggtggctcaaggaggtttcaaatgtgttagtggtattagttgcatcttttgagaaatgaagaactactggcgtatgcctcagtttcctgatacacagtgtttgcttattcctacccacttcattactcttaaaccttagtagattctcacttaaaaaggttcctggacatgaattagaaaaataatgcttagggatattgcctaatcttagaaactattggacaaatcaagttccatattttttaaatataattttactacaagaagattccatcaaaatgaaatttgtcacaatagactttaggttgcataaggcagcatgtatcacttgctacatattcactaatttggattggwaatacctgcctacagtataaataattttcacaaatgagtttttggattgtacttcagtgtgctctattatgctaatatttcaaatatcttttgaaggaaaatactaactcaatcaaagaatgtctctttaaaaacttgcccatgcaaatatccttgattattaattcattgaatcataaataaaatataagttaaattaattttgactttgcattcagtttcatcttaaggccacattctgcccttttgcgtaccagctgatgtccccgggaaaggtttgcatctgtttccataaccagcactataatgactcacctgctagacctgtgctgcactccgtgtgagagcctgatggcaggatattgacttctttaaaggctattaacattctcaatgatgtgtgtgtgtgtgtgtgtgtgtgtgtaggataaagcaagaagagatagatgaagaaacctgagaaatattcagataagt

SEQ ID NO: 83697 - DNA, 1549 bp, Homo sapiens
aaaaactgccaagatcttacattcctataatcagagtccaaaaagaagagaatattttctcttgtggatatggcaaaggccacatctgtagggacaatggctcagaatgtttcagaaatgatgagagacattaattcttaggttcaagagacccaattaatcctaaatttgattaatacaaagaaatatacactttgaaatcatagtgaagatgaagaaaaccaaataaaaagagaaacaatttttaaaagccagcaaaaagagaagaaaaaaagaaaagcaaaagaagtaaaagaaaaaggataagaaaaatagagaaaaattatttccaaaggaagaacagtaaaataactgatttctcaacagtgataatgaaagcctgaagatagtggaataataaccttactatgtttaagaaacacaacttccaatctaaaattccgcaagcatctttcaggatgcttgataaataaagacaaagtagataaataaaaacaatgtgtttatgaccaacaaactttcatgaaggaaatagtaaaactgtactttagaataaaaaaaaaatgttcttagaagggagacctgaaatataagggaaaataaaattttcctttaaagatttaaaaagccaaaaatagtaaatataatcaattatctatgcattaacatataagttaaggtattaaagagcagttgagttgtttatccaaaaagtgggtaaaatttttatgtatgcattttttagtatctacaatatcacttttaaaactgtacaactttcagactagyagcgggtttcaaacaacataataaaaagtaatgcaaatagggacaagaagggggagaaaaggaacaagtggcaaaagagaaaagacaaattagaaggtgaacacacacaaaaaattattattattatttttggagatggagtttcactcttgtcacccaggttggagtgcagttgtgctatcccagctcactgcaacctctaccccctaggttcaacagattctcctgcctcagcctcctgagtagctgagattacaggcgcctgccaccacacccagctaatttttgtatttttggtagagatggggtttcaccatgttggccaaactggtcttgaactgctgacctcaggtgatctgcctgcctcagcctcccaaagcgctgggattacaggcgtgagccactgcacctggcctaaaaaagttattaattgaacataaatgaacgaaatataccagttgaaagtcaaagaacttcagcgtatggaaatcaatgatcaaatataaaagacatgtttaaaacataggatatagaaaagttgaagtaaaaagtttgtcaactttcttttgattactgcttacatatcttttttgtccttttatcaatattaagaatgtaaaaggtgatattatagatataatagactaacagaaaagagagagatgttataccaatacttttgaaaatttagacataataaaaatattctggaaaaatatgctgtacccaactgacttaaaaaaaaacctcaagaatccat

SEQ ID NO: 83698 - DNA, 1549 bp, Homo sapiens
aaaaactgccaagatcttacattcctataatcagagtccaaaaagaagagaatattttctcttgtggatatggcaaaggccacatctgtagggacaatggctcagaatgtttcagaaatgatgagagacattaattcttaggttcaagagacccaattaatcctaaatttgattaatacaaagaaatatacactttgaaatcatagtgaagatgaagaaaaccaaataaaaagagaaacaatttttaaaagccagcaaaaagagaagaaaaaaagaaaagcaaaagaagtaaaagaaaaaggataagaaaaatagagaaaaattatttccaaaggaagaacagtaaaataactgatttctcaacagtgataatgaaagcctgaagatagtggaataataaccttactatgtttaagaaacacaacttccaatctaaaattccgcaagcatctttcaggatgcttgataaataaagacaaagtagataaataaaaacaatgtgtttatgaccaacaaactttcatgaaggaaatagtaaaactgtactttagaataaaaaaaaaatgttcttagaagggagacctgaaatataagggaaaataaaattttcctttaaagatttaaaaagccaaaaatagtaaatataatcaattatctatgcattaacatataagttaaggtattaaagagcagttgagttgtttatccaaaaagtgggtaaaatttttatgtatgcattttttagtatctacaatatcacttttaaaactgtacaactttcagactagcagcgggtttcaaacaacataataaaaagtaatgcaaatagggacaagaagggggagaaaaggaacaagtggcaaaagagaaaagacaaattagaaggtgaacacacacaaaaaattattattattatttttggagatggagtttcactcttgtcacccaggttggagtgcagttgtgctatcccagctcactgcaacctctaccccctaggttcaacagattctcctgcctcagcctcctgagtagctgagattacaggcgsctgccaccacacccagctaatttttgtatttttggtagagatggggtttcaccatgttggccaaactggtcttgaactgctgacctcaggtgatctgcctgcctcagcctcccaaagcgctgggattacaggcgtgagccactgcacctggcctaaaaaagttattaattgaacataaatgaacgaaatataccagttgaaagtcaaagaacttcagcgtatggaaatcaatgatcaaatataaaagacatgtttaaaacataggatatagaaaagttgaagtaaaaagtttgtcaactttcttttgattactgcttacatatcttttttgtccttttatcaatattaagaatgtaaaaggtgatattatagatataatagactaacagaaaagagagagatgttataccaatacttttgaaaatttagacataataaaaatattctggaaaaatatgctgtacccaactgacttaaaaaaaaacctcaagaatccat

SEQ ID NO: 83699 - DNA, 958 bp, Homo sapiens
tttacatatggtaaaattttctctagtgaattaaaatgctgttaatcttttcgttgaatataaatatgggctcccctctgatgtaattaatataacctatactattcagtagagaacagaaatgttaaatcatacattaaaaagtggcaaagagtatttccttagcaaaccagttttgcaatttccatagacttatggaaaatgttattcacctcttggggaaagcttttggcagaaagctgagttttgcttgccatcctatttgcatcagtttagtctctggttagcctactcttgatgtcaattgtgtatatgctcttcatgtgttgaaaaaacaattttagttttcaaccagtatttattttttctactggtatttaatctctgtgttgagtttaagatttagcattccaatgtgatagcttaaatatgtactgtttgcaataatgactgtttgcaattgatcatacgggattctgaagctttgatgcttatcctattagacgctcttcatctaaacatccctgtggtataaaataaggacattatatgaagtatggttatgttacttatgcacaataaaccttttagaattctcagccatccaatagcatacatgcagaatgcacactaaaaaacaatttctaggtaagagtagaatgatagttaccggaggctgggaaaaggtagtggagggggaggcagataaagagggaatggttagtgggaacagaaatacagctagatggaaggagtatgatctaatgtttggtagcacaatagggcaactacagttaaccatttttttgcatatttcaaaataatgaaaagagtggaactgaaatgtttctaacaaaaagaaatgayaaatccttgaggagatagctctcctaattacttggatttgatcattgcacaacatatgcttatatcaaaatattacatgtacccccccaaa

SEQ ID NO: 83700 - DNA, 744 bp, Homo sapiens
ttgcaagacgcaacatgattaatgctacaaaaaattaaataaataaaaacaacctttattctcaaacactctctcatgccttaaagttaccactttctatgtttagcggccctgccctagtaattacacctcgtcccatgctgtgaggaacaaaatgatacatgaatattcttcttgctatgtcaaggttactaaatggttataagcaaggactgtggtgttttaggcttctccatgaatgtttttgttttccccccaacacatgaaaaaattatttttggtcattactttggtttttatttctgtctgtcacccaccactaatgactgctcccttctcaggtttcctcagacagtatccmagctggggttaaatgaattctttcagttctcaaaatattattgagggcctatgttagagtgatcctataaatgtacctgtttctgagcctcagtttgtatatttgtatgcctcatttttgggaagcatgtaaagagggatttggggttatgactaagtctcctatattctccagttcaaatacgatgggaaagaaagatgaattctactacagtgtccctgatgatatccttagtggactcaggagtcctgccaggtaaaacagatgccgatgattttatgtttcttttgctcttcacaataaaaatattaacaatagtaactgttctctatttcttgagtgctcagtactttctataagttgtttatagcttatttaatgca

SEQ ID NO: 83701 - DNA, 564 bp, Homo sapiens
cctattaaaatacagattctaattcagtaaagtgtgaggtggaggccaatgatgtgtaaataagaccatagagcaggagtcagcagcctctggcctgtggaccaattctgaccctatgcctgtttttgtacagcctgcaagctaataatgactttcacattttaaaatgattatttttaaaaagaagaagatgtaactgggcattgaaggtccacaaagcctaaaatatttactatctggccctatacaggaaaagtttgctaacccatgatctatcttcataaggttccccataaccactgaaagtctcttctcagtattatcccactttattggatcytatagcctcttgtcttaggaattcccatacttaggaatttgtttttatataaaagaaatgaggtctgggtatagtggctcatgcctgtaatcccagcactttgggaggccatgatgggctgattgcttgaggccgggagtttgagagcagtctggccaacatggcaaaatcctgtctctacagaaaatacaaaaattatccaggtgtggtggtgtgtgcctgta

SEQ ID NO: 83702 - DNA, 859 bp, Homo sapiens
ctgaaatttcaaccattgtcaacctgcaaagtaattccaggctttctggtcatgagggcctagaatcagacaaagatgctctgtatttgccaactttctccccacagtattaagatctactgagaggggcacctttctggaatatgcacaaagacgtcatgtgtactagttcrcctgacaataattccaatactaggtttcaatgattgaagttaataacttactaaaataagttagaaagaatagaattgcagtttcaaaataattacaacaaaataacaactattttaacacttgacagtttgaaaaactcttttccattttcaagtagatattatgattattcttattttatagatgaggatgctgagatccaggtttaaatttaaccaattagaaaatggtggatttgggttttccaacccatgtctgcttgattccaaaaatgtgcaatgataataggaattgttctctccctcttcttcctcctttcttcttttttttccttctactgagtttacaggttttttttttttttttggtagcaatactaaaatatttttatagtaatacttatttctttttcttttttttttttttgaaatggagtttcactcttgttgcccaagctggagtgtgatggtgtgatcttggcttcctgcaacctccacctccgggttcaagcgattctcctgtctcaacctcccaagtagctgggattacaggcgcctgccaccacgctgagctaatttttggctaatttttgtatttttagtaaagacggggtttcaccatgttggccaggatgactttgaactcttgacatcagatgatccactcactttggcctcccaaatgg

SEQ ID NO: 83703 - DNA, 859 bp, Homo sapiens
ctgaaatttcaaccattgtcaacctgcaaagtaattccaggctttctggtcatgagggcctagaatcagacaaagatgctctgtatttgccaactttctccccacagtattaagatctactgagaggggcacctttctggaatatgcacaaagacgtcatgtgtactagttcgcctgacaataattccaatactaggtttcaatgattgaagttaataacttactaaaataagttagaaagaatagaattgcagtttcaaaataattacaacaaaataacaactattttaacacttgacagtttgaaaaactcttttccattttcaagtagatattatgattattcttattttatagatgaggatgctgagatccaggtttaaatttaaccaattagaaaatggtggatttgggttttccaacccatgtctgcttgattccaaaaatgtgcaatgataataggaattgttctctccctcttcttcctcctttcttcttttttttccttctactgagtttacaggttttttttttttttttggtagcaatactaaaatatttttatagkaatacttatttctttttcttttttttttttttgaaatggagtttcactcttgttgcccaagctggagtgtgatggtgtgatcttggcttcctgcaacctccacctccgggttcaagcgattctcctgtctcaacctcccaagtagctgggattacaggcgcctgccaccacgctgagctaatttttggctaatttttgtatttttagtaaagacggggtttcaccatgttggccaggatgactttgaactcttgacatcagatgatccactcactttggcctcccaaatgg

SEQ ID NO: 83704 - DNA, 516 bp, Homo sapiens
tccaaggaggttgaggctacagtaagctatgatggcaacactgcactccagcctgggtgacagagagagaccctgtctcaaaaaaaaaaaaaaaaaaaaccgaaaaaagaagataaaataagagaaaaaagttgactastagttagtgaaggaaggtaacacaaaagaatgttacaggcagaggaaactgtgcatacaagttcagtagtggaaaggagaatggcactcgaaacaagggcaaggtcaacagtgctggagtgaaagaggcacaggatgaggctgggggcggtggagcagcaagaggcaaaaccaggcacgctgtaggcaagtcgggggttgtggcttaccccaggggctgtaaaaagccatctcacatttgagtctcggggaagcataccagcctccataaaaccagaatcatatagatcccctctttgaggtaaaaaaaaaaaaaaaagatacatatatatatatatatatatgtgtgtgtgtgtgtgtgtgtgtgtgtgtgtgtgt

SEQ ID NO: 83705 - DNA, 1549 bp, Homo sapiens
tgcattgtgattttatgatgttttgtgaagtttattcagaaaaaaaaaaaagtatttccccaaccaaactgcctaacttgggagctgataaaaccattttccccacctgaaattctttcccacagttctgtaaacccaaccaaaatgaatattaagaatgccctgctcagaagagtttgactctgcagccagcttttcacctttcccttttcctcctgagattctctttatcaaacattgactttcagcatcaagagaggacgacctctgttggtgtgaggaaagatgagaagttgccctgaggtatgtatagcacagaaaattaatatgtcaaacaaacttcctttaagattaggaatgttgacatttgagttgaatctatgtacttaacaaaatttacttcattatgcaatgctctaaagttactccatgacttaaccaataacatggaggatatatacatatattcttcctaagcaactggaaattacaattcaattaagattattatgctgcatctacaatccatttttataacatattaggcattttctaaatagcagcaagcagctttccccaaatgtaattttgttaaaagattttacatgctagcagcctaaacagcaccagaagagagatctgggggaagaaattccaaaagaatgtttgacataggaagaagactaggatcctttaaatgtcctgccaggtaaaaagcaagattcttaaagaccttcgctgttgaaaatatggccacaggatgtttccaatataaaaagaacagactccctcccatgtagcagtgaggggagattaaactggatggtcttggtagttacttctaatgctaaaagcaaacaaagaactaaactctgaagttgtgtgttgctcactgccaaacttaggtatctgctaaattaaaatgagtacaactcggcactcagatgtaactttaccagaccccaggtcaccactagattaagtaaatagcattaactagaaggattccaacgctggatgaaatttggactaaagtcaactcaattcaattcaacaaacatttactgatccccttctctgggttaaacactgctccagacacaagggctagcaagctaaataacatgyaggactcaccttccactactagagtttaaggaatgcccatgaacacaaatttgagtctaattatgagctaagtggacatatgtggactcttcaactgattttatagtcaactatggtaacatacaatctctcccctcctacaaattaaataaatcgaagttaaatgtctaagctaatttctgccttttgaaataggtacgaaactctactaaaatcatgagagttgtatgcatgcacaaataccacgaactattgctccaaaaatgcaaccctgactcaagtgaagctgctgaaatttcaagttgcatattttaaccaaaaaaaaaccattttaacttcattgagaatatccacatagaaagacaaatagttacttcgtgagaattcatctctaattctttcttcttgttatttttcccca

SEQ ID NO: 83706 - DNA, 814 bp, Homo sapiens
ggaaagatatttcaaaaaataagaacagaaagataggaggactgcaaaagattcgtagctgacttgatcgcatgaagcttccatccgcaaagcattcagcttttcccgtggcaaagccttcgactgctagaaactccagtgccactagtctttgcaaatttgtgttctcctaatatctgtcttacaaaatttttgcttctgtacagctaaaagaaacagtaccaagccaatttatgtgttgccaaaatcagatttgaagtgagaagactgtggtaatggagaaaccacatcttggaatttaatggaacgtgagaggttcttctgaattcttcaatgttatttctgaaaacaactgagcctttacttgaacagttcagctttctttgctctgttttcttaatcaagatacgtggagcaaatagggccctcctatctctaccttacagtaaaagtagacaaaagaaaaagagccctattttttttccttgtycttcatagaatttcattatcaaggcaaagcatgttgaacatgtgaagtgttacccagattaaaaataactattatcactgtatattacacttagggaaatagaaaatgctaatgatgaacctaaaatgccacataattctgaattgcttttagaccaaaagtgtttccaattattaattttaagcaattgtaggctatccttttaatcccactctatattagtgccaaatatagaactgtatcattttaaagatgccctgaaaagatgttcaatgcgggaaagcaggcagtagccaggcaaccaatctttttcagctgggcctg

SEQ ID NO: 83707 - DNA, 1175 bp, Homo sapiens
atatgagcagcaaaatataacataaaagcgttaagtgctaattgaactaagacatttgtggataaagtcctgggagcgggatgtatatgagagagatttgcttgttggtatgtttgctttcctaaatggagcacctgcttggaaagactttagaaaaggtgttatatttaaatagaacttcagaaacatcacgtttttggacaaaggaagatggtggaaaaggacatcacttggaaaaaaaagtgaacatatatagcccccccaaaaaaaaggatataaagagaaaaagaaatggtgaatagttgaccttggcttgagggtttgtgttttaaagatgagtgctagagataaagttcaaaatacaggttaaaaatgaactgcaggagctttgttctttcctccagagaaaatagaaatgtattcatcataaaacatatattaaaattgttctcaggaaaattaatatggcaacaaagaggagaagtaagataaaatcctcgtggatctcatctggctccttgcactcgtcatctgatacccacacttttaaccattgccttgccttagtccaatgcacgacttaaaactttgcaactaaatagtatgaaagactaaaggtaatagaaatatctagcatttcaggggcagtgttgttaataaaaagaaagatggatggctaaactctcacatttattcatgaaagatagatgggtagagaaaaacattttaaagacaagaaatgagtgtgcctctccatgataaaaactaggaaactttcattggtcacgtacttctgtatacatttatacttcgaaggaataagaacttctgctgcattattttccatgaagaattccagtgaaaaatagaacataaagtaacactactaataaaaactacagtatcaccagaaattaataaacataacagcagcaggaataaaatagaaacatttttcatcttgagatttgttttaaagaatgggaattgtatcctgtgacacatttttaagaatttcgtataactacataccaatttgyctattcttaaacgaatgttattttaaactattttaaatgttatcttctgcaagttgaaaaataaaatgtagcttgtatgataaatataccaaattacaaacataatagaataaatgtaataaaatataatactac

SEQ ID NO: 83708 - DNA, 511 bp, Homo sapiens
gtcacagtcatctgaccagcagttaatccctttctcccattggctattagaggaggaagagtttatgggcattctccagccatgtctgtgattggtcctgaccttgaagacctgccaatgagatccatggagaaatttgaaagactgttttgtaagcagccttctcttccttgcagaattttctcatagcagacaratctaagggggttatatgcactaaaacagcacgaatttaaatcagtgaagatggaaggctgccatcatgccattatgctgtagctggaccttatctgacatgtggtcagcttgcttttattggaataaatctaaccaaatagatttgtctacaatttacagacttacagattgttagtagtggaagggacttctgaaatctagctcagctcccagatttaacatgtgagcagagggttctataggatatactacccatgtatccagtctctctggaatccaattgtcccaaagttaatctcatttaggactttat

SEQ ID NO: 83709 - DNA, 708 bp, Homo sapiens
ttttacaagagacttagaatgtacatgaatcaatagggggcaataatgaatggtgatcatgaggagtgtgttatcagatgagcttaatccaaaggagcaaaggccctccccatttaatttgatttctagagtttgatgagggaagtagagggcagtcggctagacttgggtttaaatgttcactctgccctcactggaaatctggaactcgctgagtctcaggagcttcacatgaaaaggtgaccccactacacccctcgtgagtactatgacagctgcatccaggcagtgacaccaggacaggcctggcatctcatggggcccttgaacatattggcaatgatacatgtccagtgcccacctttccaggtggattgcccacgctcagatatctgaacatcttcttttgtccagctggtctcattcctgggcttataatgtgccttaggacagcttgactctctttttagagaccatttcctccatcagctgcatgaatgtccctttaccattgtctgatagcaagcatatacacacatgcacacacatgcacacatatatgtatgtgtgagtatatctataaatttgtgtgtgtatatatgygtgtgtatttatgtatgcacacatgcatatatacaaactaaaataaaatatctctacatttctttccagactcattgcaaaagccatgagcagaaatatacaaaa

SEQ ID NO: 83710 - DNA, 888 bp, Homo sapiens
tggaccttagcactgaccccatatcttgaggacagtggatctctcgtatggcttgttcaaattagggactattcataaaggtgtgaatatataaaaggaatttatagtgtagggactatagcacagagatactaacagagtgggaaaaaggcacatgttcagaagctgtgcctctggagatctgtggccccctgtgtgggaagcagccagctcaatccagtgaccactttgacctcagtctctcgttgctccttctaggctcctttctatgctcccctctgatgaaacccaactagaatcgagaatgcaggagtgcgtattgatagaatgcttttagtcagccttcctgcgcacagagaaggctggagatgtgcagaaagtggaactggtggggcaagtggaagatttccatattgacctgcttaaaggactgaccaaaaacgtctggggaaaatgattaaaattcataagaattaaggatggtggtgagggtaggggctgtaagtggaattcacaaaccatccaaataaatgaagcgtagacttgttaaatcaattttaacctgaacaagaaaagaccactctttatgggttaaatggcactaaggttagaatgaatgtaagaaacacacactgaataagatatttagaaaatgacctactccaagatttaatacaggtactcaatttataaacaacctagaaacaagtaaataagtaagaaaaactgtgacatgcttaaacgtaatattttgtcaaaaggtagttctcggcttcatacctccatcggatgataaaaatctggaawggatgcagagcatttcagccaatgatgtaggagtttgtgatcatcctttgctgcaccaatctaattgggtcggtagggaaa

SEQ ID NO: 83711 - DNA, 888 bp, Homo sapiens
tggaccttagcactgaccccatatcttgaggacagtggatctctcgtatggcttgttcaaattagggactattcataaaggtgtgaatatataaaaggaatttatagtgtagggactatagcacagagatactaacagagtgggaaaaaggcacatgttcagaagctgtgcctctggagatctgtggccccctgtgtgggaagcagccagctcaatccagtgaccactttgacctcagtctctcgttgctccttctaggctcctttctatgctcccctctgatgaaacccaactagaatcgagaatgcaggagtgcgtattgatagaatgcttttagtcagccttcctgcgcacagagaaggctggagatgtgcagaaagtggaactggtggggcaagtggaagatttccatattgacctgcttaaaggactgaccaaaaacgtctggggaaaatgattaaaattcataagaattaaggatggtggtgagggtaggggctgtaagtggaattcacaaaccatccaaataaatgaagcgtagacttgttaaatcaattttaacctgaacaagaaaagaccactctttatgggttaaatggcactaaggttagaatgaatgtaagaaacacacactgaataagatatttagaaaatgacctactccaagatttaatacaggtactcaatttataaacaacctagaaacaagtaaataagtaagaaaaactgtgacatgcttaaacgtaatattttgtcaaaaggtagttctcggcttcatacctccatcggatgataaaaatctggaatggatgcagarcatttcagccaatgatgtaggagtttgtgatcatcctttgctgcaccaatctaattgggtcggtagggaaa

SEQ ID NO: 83712 - DNA, 1044 bp, Homo sapiens
ctgatccaagagaatttgtttgttgatgagtatcccagattttgtcaggatctaggtgattcaaaagcattcactgctgttgagaggatttcattctccttcaggagaaaaaactccaacctccttgaatccgttaatgaacagtgaatgcactgtgcaattgagtgcacaggactgcctgtaagggggaatgcttcttctgggagggagagatctgagcaggctgaactggatgtgagaaagtcttcttaaaaggaaacagcagayactggggtctacctgagggtggtggggtgggaggagtgagagaagcagaaaagatgagtattggttactgggcttaatacctgagtgatgaaataatctatacaacaaacccccatgacacgtgtttacctatggaacaaacctgcatgtgtacccccaaaccgaaaataaaatttaaaaaggaagaaagtcttcttaaagaagagattggacctgggcataaaggctggacttggggagtcagataggtgtcaggaggatgtttttcaagggtggatattaaaataagaaccaaaaataaggatgagcacaggggatgtttggggttcacccagtgctctagcctaaggggaaaggaatggacatttgttgagccctatgtaagtgccgtatgctttactcagtggtgaatacatgtcatctcacattctcagctctagccctgttagactccggcggctcttcaaacaactagaccttcagatttgcacatctcttggccacaaagacttcttaccactgtcttttcctgaagaaaatctgtcaactgatgcaagaaatctgagcggaccttttgcagctattacttctttttgctcctttagcattctctcacatagcacttattctaccgtataaaaattgtctgcttcttgtttttccttgcaaactgccacttttctatgcatttctccttgcatatttggcacctagttacacatagtagacaatcactgaatgtaaacattcttttatggccaaaatgcttaaagccac

SEQ ID NO: 83713 - DNA, 1755 bp, Homo sapiens
  misc_feature (1)...(1755): n = A,T,C or G
ctgtcgattcaccagtgagatttccatcccatcgaggctgaatgtgatgcygcttgtctccgttttttgcacccctctgtgtccctgcccagtgccactccccagctcctcatgctgagcctccttgtctcccagatctgccggtctgccctctgccacactgctgccgtgctgggctggtcaaagctgaaagcagtatttgcagagaaagatgtgtggaacattcttggagccctggtaagccagcagcttgctcactgtctgcccctatgcgagggagggtggcatccccagcggtctaggtccttttcctgcagctctggggtttgcagcagtagtggcagcgggcagcagcaacagttcaacgatgagagactcattaagcacctactttatgctcagcacctagatatggttcctgccctccccttgtttcctgtctgaattggggagctaggcacacaagtagacaatcccagaatactttgggaaaggcaaaggaggggtacccagcacagtctgggagttgaaggaaggcttcctggaggaggtgtcatcttcagaaggagaaatagaaggcagggtaacacttaggcaaagggacggaatcaagagtgcaggccaaggtgatgctgtacacaggggtgtggagcaaagcactnnnnnnnnnnnnnnnnnnnnnnnnnnnnnnnnnnnnnnnnnnnnnnnnnnnnnnnnnnnnnnnnnnnnnnnnnnnnnnnnnnnnnnnnnnnnnnnnnnnncttgtaccattttatattccattatcgattctgcataacttttggatctgacgcagctaagagattaagtctaatggctgggcgtggtggctcacacttgtaatcccagcactttgggaggcctaagtgggaggttcacttgaggtcaggagctcaagaccagcctggccaacatggtgaaaccccgtctctaccaaaaaatacaaaaattagccaagcatggtggtgcatgcctgttgtcccagctactagggaggctgaggtgggagaattgcttgaacctgggaggcagaggttgcagtgagctgagatagctccgctgccctctaccctgggtgacagagggagactgtctcaaaaaaaaaaaaaaagattaaatctaacaagttaacaagtcatgcagtaacaagtcacagccatgattaactccctgaaggaccccaactctttgaggtctccaataaagaccacaccaaaccaatatcctcctggaacggcctgagagcacctagaagtagttcaggaattatcctaccttgccagaatgttgtagatacccagaggaagagtattatttggagagtattaatggcaagtcctaaaacaactagccaaaattcagggtgagccaaacatgtattataaagacaattgaaaggaatatttgaaattagaactattccagaaaatctggactgcctaggttggcccctttgtcggtagaaacttaataaaagttttttcacctgttatccatgggttttaaaaaaccctttgtttcttgcctggtggtcctgataaaaagaaaaaaaaaatcaaaaaacctttgtcctcgtggttatttacatcttaaaacaggatttgatgttgcagtttgcctaattcttccctgaaaaccaaaaggatagttgctgatcacttcagaaatggcgttattcttcagcaaggaacttatgctatgtatttgagctttttgaagcatacgtatataagt

SEQ ID NO: 83714 - DNA, 710 bp, Homo sapiens
cagggcgcctgtggggcctgtgtggaggtgacgctgggtgtggagagttcagatgaccatctacctgattttgcatattcacgggccacaaaaaaggttgcagctatttctgacgctaagccagtcctgggttagtgaccccctgacacggagtgtgtgtcaggaaagaagatycccgaaggaagctcagctcctgcgaaggatgagctcagctttccatgtctgggctggggggcccacaggcgaccccacacccctccacaggaccttcctgaggggaggtccaggctccttgcatcctcactcccctgccctgatggtggaggaggctcaaagtgaagccccagccagatgtctatgggatgcccctgccccacacccggcagctctggggggcccctgcctccaggaggaacaaggtggccaaatgagggagaccttggtgagtttgtctgatgagcacattcattcggcctggctgccttctccttttcagctgtttgtttcgcattccccagaactgcacgttcatcagcccttgccttgtgaaggatctctctaattgttacagcgtgaggcaaaaatgcattctgggatgtgcaggctgagaacaaacgtgtgcatctctgagcctgcgtgcccgccccagttccccacgtgcctgcctcagcttcccgcatgcccgccccagttccctgcgtgccggcccc

SEQ ID NO: 83715 - DNA, 735 bp, Homo sapiens
caagtggctccgtgttccaaataccacacctgagatttcagttctctcacaaaaaattagcttttacttttaatagggcacacagtgatagcttcttgccttatttcttagagtcacaaatgtgtgtatgtccagctctatgatcaaaagcccatcagtcatcttccaggccagaattggaattggaaaccccagtgagtctgtgacagtgaacccaggtttccccggtggctgagcagccacaactggccctcaccagagggagtttgtattagtcattttcatgctgctgataaagacacacccgagactgggcaattggcaaaagaaagaggcttattggacttaacagtttcacgtggctggggaggcctcacaatcatggcagaaggtgaaaggcacatctcacatggtggcaggcaagagaagagagcttgtgcagggaaactcccctttttaaaaccatcagatctcatgagacttattcaccatcacaagaacagcacaggaaagacctacccccatgattcaatcacctcccaccggctccctcccacgacrcatgggaattgtgggagctacaattcaagatgagatttgggtggggacacagccaaaccatatcagggtttaaatgggacccgagtttctgcagcagcaggggtggtaacaggggctggaaagaccctggaatgcaacatggtgggggctgtgggacctcaggggtggggatcc

SEQ ID NO: 83716 - DNA, 1632 bp, Homo sapiens
ccttggaacatttggaagcagaaaaaaaaaaaaagaaaaaccacccacaacaaaaccagtgcttactgagcctgacaaagtaacaaattgtggaaatttccaaagctaattattgctgtttttctaaaaaattcctttgatatgctaagagttgtaattagagtcattaaatacagaaacccttgggttgcaaagaacataggaataacccactgatgtgttgattatgggtgggttgctatttatcaacagaacttagccgtgacatacaaaatgagactgtcatgcagtggggctgcctttgcaaactttcatggagttaactccaatgccagacatctattggaaaattctatgacagataaaaagaaggcactgtgggaacatataaggagagaagttaattctcactgagggaattgggatcagctttagagaggagatagcatttgaacaaattccagaaggccagtagggatttagacaggagatcttggagagaagatatcctagtctgggagkgccaacatggcttgaaggcagaggacaggcaataggaggtgttaggagttagcttggctgtggctggtaaatgtgcagaagcacagtggaaggtcagtccagagagggagtgacagcacagcctggaggatggagggtgatgcatgccagcttaagaagctgtgctttttactgttagttctgaccagtttttagaaaaactaatctactaataatatggaggcaggggtgaggatggaagaaatattggaagtcgactagaaggaggtgagtgcacagtttgttcaggaggtgatgacacactgattagcgctggcagagagatgtgggggagatattaagacacccctagagtgtgaggaggactttttacagcttccggagaggaaaaagtggttatcacaagtctgcagggctctttgagccttccccagatgtggaacagagaaagtttgaagtagatgccattttaagagccaggacatggattctccctctctgcaaaacgtccttgcaaactctcgagggaaaccagtgcttcatgttgttaaagttttacaagttatggcataaattgttcttcaagtgccgaatgtagtgaccaataaatcaccgagaggattctctgagatttgcaattgtggaattacagattttgtacctagtcttggatgcactgagctgggtctactctgaggcagcaagctgcaaccctgccctgtccagtcacctcactgtcacctggaagaatcctgttctttagtggaaataagtcacagacgtcctcaaaggcgaacgctccaggtgcaccccagagagctgccccactagctctgactggctgatgctgtgtttggctccaagcacttcttgctataaatccaccacaggtgtccttactctccatcacccagtcctttgttccgtcattgcctcatattcatttagcaagacttcactgagaacttagaggctcgctgcttccctgtggggctacaacagtaaacaccacagacaggcgctggtggcgaagacagccaaacagaccaggaattacaaaacacttcgaaaagtgctctgatgggagaaacacagagtgccgagggaaca

SEQ ID NO: 83717 - DNA, 608 bp, Homo sapiens
ggcagtgtgatgattaactttatgtgtcaacttggtcggactatgatgaccaatcgtttagtcaaacactagtctagatgttgtataaagatatttttaaagaagtgattcacattcgcaatcagctgactttagcaaagcagattacccatgaccatgagattgggcctcatccaatcagttgaaggcccaaacaaagactaaagtttcccaaagaataacaaggaattttccttaccactgtaatatagtaaccctgcttgagcctccagcctgctgccctgcagaatttgtactcaagacatcaactctgacttgaatttctagcctgctgatctgccctacaaatttcaggcttgccagtggccacaaccccttgagccaattccttaacataaatagttctccytgtatatatcccattggctcagtttctttggagagccctgactaatacaggcaggaatgatgacctccacccaacagatgagcaagcagaggctgagagggtccatccacatcctcctaggagcccagactctaaaaccaaagctctttccgttgccttgccttgcaatattattaaaactcaagataggatattcaca

SEQ ID NO: 83718 - DNA, 2052 bp, Homo sapiens
atagcctctgaaccacttatgaaacaatactgatgatatgtcagtagctatgtttgcagctccttcaggaatgcttatatcttttactgctggtaaagaagaaatttatagtaatagattttttttttttttagatagagtctcactctgtcgcctaggctggattacagcggcttgatcacggtttactgcagcctggatctcccaggctctcctactgtagcctccccagtaactagggcccccacacaggcatcaccacacccagctcatttttttatgttttatagagacagggtcttactatgttttccaggctggtctcaaacttctgggctcaagcaatcctcctactttggcctcccaaagtgctgaaattacaggcatgaaccactgcacctggtttatggtcatcttaagtagagacttatgagtgcgtatcattgtatcaccaatctgagactcaattttatctttctgttaatagacaatgcagtttttctgttaattacaatgaaaatcaagggttgcttagcaagtttttactcataactccaagttttgtgacttatagtgagaaatgggtataattctttgtgatttgttaaaatgcagtatttcgaggagggataacatataaaatttaacagtttcctatcattatttttatccttttgaaccactgtatactacagatagacaaaggcagctttggccacttactcctcagtgtgactaagttgaccagatgttttccagaccacaggttctgtcaagagacagtgtggagagaaatgggtaggcaggtatggaaagaagagtcagaaacagatagtgagctaatctctacaaatggctcgttatggcctgagctgtgttctcctccccgcaaaaagatatgttggagtcgtaatccccagtacctcagaatgtggccttatttggagattcgatatttacagaggtaagcaagttaaaatgagatcactatagtgggtcctaattcaatacgactggtatccttacaaaaaaggggaaatttaaccacagatacagacacacacatagggagagtgctagtgaaggtgaagtcagagattggaatgatgtagcagaagcctaggaatgccaaagattgccagcaaaccaccagaagctgggagagccacatggaacagattctccttcacagtcccctgaaagaaccaactctcctgacacctcgatttcagacttctagcctccagagctggggtcaatgagcttctctcattaagccatcatccagtgtatggtactttgttacagcagtcttagcaaatgcatggttcctcactggaaccatgaatttccatgcatttatttcatttaaataataaaacggatcccctttgtggcttgtagttctgttccatttcaaaaatccagaaaaaagatttgttcagaagctagaaatgatgaactggatcttgcccaaggtcataaaaccacaaaaccctttacagagcacaaaagtctgatttttcaaagcttstctcaaaagatgggtcactccttagtcatttaggccactgacaactgccctggactctttatttatttatttatttatttatttatttaatttttttgagacagagtcttgctttgtcgcccaggctggagtgcagtggcgtgatctgagctcactgcaagccctgcctcccgggttgacgccattctcctgcctcagcctcccaagtagctgggactacaggcacccgccaccacgcccggctaattttttgtattttgtttagtagagacagggtttcaccatgttagccaggatggtctcgaggtcctgaccttgtgatccacccgccttggcctcccaaagtgctgggattacaggcgtgagccactgcgcctggcctggactcttacatataataagcttgacttatcgtacaacttataattgatgctttcacgtcatgggaagatcaaattaatgcagagagcgactacgtttctggtgggagagcagcaggggtcttgagaggaacagca

SEQ ID NO: 83719 - DNA, 683 bp, Homo sapiens
ctcactgcaacgtctgcctcctgggttcaagtgattctcctgcctcagcctcccgagtagctgggattacaggcatgtgccaccatgcctggctaatttttgtatttttagtggatatggggtttcaccatgtttgtcaggctggtctcgaactcctgacctcatgatccgcccacctcagcctcccaaagtgctgggattacaggtgtgagccactgtggccggccctgtgttttattttaactggctttcctttctcttttttgttttcgttacatttttgtctatcataaactctcagagttggaagtcatgatatctaggattgccaataaagtcaggcaaccttttctctaggtacaacaatctctattttcaagatagtttactgtggccttttgatgcatcattagtagtcttttggcttggtgaaattgagagagaaggctatcagtcactcagcaaagctgctatgggacagataggctcataccacctgatatatgaaccactacatgtgattaacttcgacaggtagctcctggccrgctggcaagctgaagagcattttaagtacaaataatagttctggggtatgtcttgagtgatagaatgatgactgagtggaacagattcccttaattttagctcatgaaaacacatttggtttccttcagaagctg

SEQ ID NO: 83720 - DNA, 719 bp, Homo sapiens
atgtcttgtcatgtattccaatcacgcatcctcattccacaggttgttgagcttgtgtcctcagtcctgagattatgatttggaaaggtagtcgttttcttaaaaaatgtatatatatggttgggcactcttataggactaaaaatgaaagggaaaaagccagtgtgcttgtcatgcaaagcaggatgcagagtgactattcactaaatcacagtattatgcacttaccacaaaaatcattttcaaatctgatattcatccttcaagtcagagaaggcaggcactaaatatctctgatgcaaacctcacatcaggatggcagcagagtggtaaggaaactttaaggcattttctcacatgctttactctaagggtgrgtagttatttttcatctcctcgtagctgtatgttataacaagatgaatgggcctatggcttgccggaagccataactctctatgtagttgacatgactagattcccagttttggcctttgagagcttgagagtagaataaaaacattgactcctcctgacctttcccctgtgtcttctctgggcagaatatctcgatgcataatgcagttggtggggccatgacggggcccggaactcaccagcttagcagcgctcggctgcccaaccatgacaccaacgttgtgattcagcaagccatgccgtcgcctcagtccagctctgtcatcactcaggcaccttcc

SEQ ID NO: 83721 - DNA, 784 bp, Homo sapiens
ctgaaataccaaaaacagctggaaaacaggagcaccttgagtcagtcacactgtatgacactccacatcaatcctgctttcttcctaggaacaaatgttgtttattaattatattagttaaggccatggccaatttgcacttcgtgtttctgaaacaaagcaaatatttatctcaatacatctgtcagaagggcaaggggacacacacaataataacccaacacacattcaccaaaaacacactctcgatttattttcttcaaagatgcctggttctactttcaaagcaaggatgcaggtaggttatccccacatgtggctagctgttgggaaggaattgcatatgcaatttggagctaagaatttctttctttgggagggatattgcatctttcattatcttatttgctcatctgcaaaacagtgccattgtagtaaaacactgtagaacaggaccattcaaagaggtattatgtgaaaacataactattggaagctaactgtaaattaagagaaaagtaagccctctggatttcaaatatatctttatttttcaaacctgaatattgtaactttccacagaaaaataaacaccttgaatttcagtccaagaaaatcaattactttgtgtttgtcttggtatctttctgtgtgtctgtgtgtgtctctctctctttstgtgggcatcttccctctgtctctttgcatgtctatttctccatgtgtgcctttctctcctctctttgtgtgtttgtctccttatgtctgtctgtctgtctcacac

SEQ ID NO: 83722 - DNA, 765 bp, Homo sapiens
taaaagagggtgataggctcagggggcttaagttcattcattaaagttaggatgaccaatacattsttacactattctcaaaaactttatggacttttctcccttttcaaaataatgttgacttgtgctatctgaaaacacttcctgcgtttcagactcagcctgcaatatgttaacagccaacagttgaacaatattctgtgtgtgcatttgtagcgcagtaaaccatttactcaaagaaacaaaaacccaaaacaacttcccgcctcccccaatgaagacagcagaagagaactaactgatttgtctgttgtctttcctgtcaagatcgccctcgcctttgctttggtcagcgggaaggactttatgtatgagtcatacaaatgttttgccagggcccggaggtcagcggactctggattcagctggtcgatatcactggagatctccgccaacagcttctccttctcggcctgtggcatccgcccaaacctgatggctatagaggaagaggaatgacaggatgaatcattggattactactgctctgaacacacactgtgctctcccagccctcgttcccacacagtagaagccctcctcctccactgctcttgagtcctggtttctgtctaccactttgctcatgtttttatttcacaaaagtagcacagaccatcagtaaaaattaaaccgttaactttcatttttaaaagttaatgcatactcctgctgagaaagtgaaagaattcgagtttagcaaag

SEQ ID NO: 83723 - DNA, 587 bp, Homo sapiens
aggtactttttttgcttgtcttcaaatgtgcacactcttactccctagttgtactattaacttytataagattaaggcaacagtgccctgtattacagatatctctctcactcctgtggtcatcagtctctgctctagaatcggatcactgatcccttgctttactatagttataaagtttctctagtaacattcaataaatattttcaactgttttgtttctaatttaataaacaaagggacaaacaaaagcaacaaattttactgatagtgccaaccactagaaaacggaaattctaaagatttttgttgcaatattttaacttgtttttcctacagggccatgtagtttttttgaaatctgtgcatttggatgttagaatctgaaagagggtaaagagaaacctttggcaagtgtttggtcttctttctgcaatcttggcaaatcttgatctgtctatgtgattatagctgacacaggccacagtctgattatatggagatttcttttttgacatcaactggcatattcaagctagaacctgcttttgatatggataagaaaaaggggcagggaaagctataat

SEQ ID NO: 83724 - DNA, 504 bp, Homo sapiens
cagtgagccgagatcgcaccactgcactccagcctgggcgacagagcgagactccatctcaaaaaaaawaaataaataaataaaataaataaataagtaaaaattaaaaaaatacttgtgatttaaaaaaataacgaggataaatcctaatggtgaaatgagatgatctaaaaagagagagtgaccagaaagttatggaattgggccaaaaagtattaaagagctgctatccagatggcagatggagtcaatgtaatatagtgtggtggttagtgggaaaaaagaaaaaacttttcatatttttattcccaataatttgtgatttttcagtgtactcattaaattttcaaaagagaactgttatttcccctactctgtttcagtaaagggatcccattcagccagttgctcaggcctgaaatctctgttgcattcttgactcctctctctcccacaacatccaatccatcagcaagtcttcttggttccaacctcaaaacatgt

SEQ ID NO: 83725 - DNA, 540 bp, Homo sapiens
aactgggaagagatactggattgctttgtttcgtttcattttttgcttttgtttagatgttcttttctgttggaaagtggagaagtaaagggctatttatgagcctctgcagcagcccaagatacattctcattccagggttctcacttccactgtctcatcttatcctcataatgatgctactctgagtaaagccggtaygtgtgtcctggtctacctccccagtctttcttagagcaactttccttctagctacaattttcccactacactggaatattctgttcctcaaagtatcaaattcattcccatgtcataactttgtgtttgctgctacctcaccctcaaatgtcttcctcatcccctcccccaggtcactacatggacagtcttccttcaggtctcagccaaactgtaaagaggagatgatttcgctgtctcaagtggcccacaaaaccaccaatcactatcacatttcttggttttattttattttgtgtgtggtgcaacatataagtagaattatcttctgtatttact

SEQ ID NO: 83726 - DNA, 2515 bp, Homo sapiens
ggaagcaataatacaatttgatgcatatgcataaaagagctgagcctcctcaataaagtaatcacctaagtacgcttatagctattttggaggtaaagtaagaaaacccaaaagataataggcagatagaggcaggagagatgatgaggtgtgggggtattagaggcatcacaagaaagagcatttagattgggtgatgtgatcagttataggcagatattttatttacagttaattacaaaatggtaaatcagccaaggagattttagttttaaaattaatatctaaagtcaaagctatagatgatggataaaaataaaactatctttcagaatacaattcagagcttgcataattcatgatttttcataaaaagattgaaggtaagagcagcatgttttcttttgtgtttcatgctcgcctgtgatgtcaaaataaactgggagtgaagatcagggaccagttcgacagactctcagatgggcctcctggatatgggaatataacccaatagataataagggaatgaaagacacagggagaaaaggcaatgcttggaaataaaaatggtgatgacttcagggaagagcaattgagtataactgtgtaaatgacacagtggaagtatgctgctaattttcccctgctgcacatataaattatgcagagaacattggattggtagcttctctgtagtgaaaactgtctattcgctttcagggcctggcagaggtgaaagcagtggtgaaaggaattagcatgcaatgaagaaagaaggaacataaaaaattacgtatatcacagaggatcctggaagactacaaaatataaacatgcaacctgacagtcatattagggaagatacacatttcacttaacctgggatttcaggttggcaggtataataagaagctctttaaataattaacaactttagctaattgctggttcataatgaagttaacgggtcttagctgatgttttatttgcaagctttaataaggcttacttaaaccctttattttttcttaaaaaattgccagcaatgcataagaaaggcaataatgtacagaacactggcaaataaatgtctgcaagacttatgtggcctcttgacartagctttgacatatatttttcatgttttagaatgataaatgcaacatcttcttggagcataatttgctaaaaaaaaaagagagacagatgaggaatgcaaaatgtccaggaaagctgcttgtctgaggttactgctaggtttttactttttacaaaactttggtttggttcacgctccctagttgctttttcttagtggaagtagaggtgtatgttaaacattgagaatattataaacacttcacaaaagaggctattatttcctgaaagtgattctttgattctttatataaaaacatttgctaactactatatataaagcagagggctatgttacctctatccaacagaaatgtaatgagaactctaaatgaaagacatttgttcaggggacagtagtctgatgcaggccttactgggctaaaatctaagtgtcgggagggctacacacctttctggaggctatagggaagaatctgtgttcttgcctttccaacttctagagattaccaacattccttggctcatggctcactcccatcttctaaaccagccatgataggttgagtcttttgcacaaggaattactccaactcctcctctttctcccttttccacttttaaggatccttgtggttacactgggcccagtagataatccagagtaatttccttattttaagacctgttaattatcaattttaattccatctgtgaccgtaattctttcttgatatgtaatgtaacatatgcaatggttcaaggaactatgacatgtgaacatcttaaggactcactattctacctatgcatataaggtattgtatattctattagcactactgtgaggattaaaagaagcactttgaagagggcctggcacataataatagaggtaatattatgataggtagtgggaatgaatggggcaccatgcttggttttatgctattctgcagccatcttgaaacactaaataatttcatctttgaactggtgttttattgaagtcctatgggaaaagagagcctgtgtgtgagcagagaagatatgcacaaaacacatgtacacaacttttttccatgcatttcccacatagcatttgcaatatgtcatgatcccagaattttggtagacccacaatgcatgaaagtacagcctgacttaaagtgaatgtaaaataatcatgttacttgtgtttacaactgtgtataagtgcagaagctggcagccaagagaggccacactctccatatggaccaaaactttcttcaatcataaaaaggcataatgactccaagatacacagatgacaaaggaacaacatcatatcctttcttactcatgttacttgccaggtattagcaaaccactaacactataaatgatgacacag

SEQ ID NO: 83727 - DNA, 561 bp, Homo sapiens
aaagaaagaaagaaagaaagaaagaaagaaagaaagaaagaaagaaagaaagaaagaaaggagggaggaagggaggaaggaagggaggaaggaaggaaggagagagaatgaaaaagaaagagaaaggaaggaaggagagagagagaaggagggagtgagggaaaaagaaagagagagagaaagagaaagagagagaaagaaaaagaaagagaaagaaagaaagaaaaagaaagaagagaaaagaaaaagaaaagaaagggaaagaaaagaaaagaatcaaaggcaggcttttggatgagtgaggagggattccatyggcagtctgtctttgagatgttcatttcattgtatttccttggcttttaaaacatctacgtgggtagtgataagcaaacgtaaggaaaaaccaattgtagacagcttcatgcacccttgaaatagatattacttgatttttcagctcacataataagtgatagaaaagaacactttgcttttgtaattaaaattttaaaaatgaagtaagtcctttaaaaaattctgaatataaactgttcaccc

SEQ ID NO: 83728 - DNA, 886 bp, Homo sapiens
cattttggagactctatttcttatccggagatcagcaaaaattataattcttcagccgaattttgtcctcacccgagtccagagcaattttttmtaggtaaactgtggcatttattaacacttcctggggccaagaagagttcataagttgttctttaaagtgttctgagggccagtgtcagttgtttgggcttcggaccaagtacagttttgcagtgtaacctaccctactccttcataactagaagctgccaaaatgatgtctcctacctacaatataaatgtcacattgcaagatcatcagcaggctccttccttagaggccagctgttgagtgggctatgtctggtagcagcatggaacaggaggcaggcagtgccagagatgattaaagaaaggaagtaccaaaagaagaaatacacaacagctggaaaatgtgcaagaggcctttagagatggtgtgcaagtctttcgagaaagtatcttaataaaaaacacatagctgagcttggaaccctaaaaggaatgaaagaataaaagaccatggcaacaatttaaactccctttcaagaattatgtcaaaaaggcccatcaagaaataggagatatttgaagagaagatgtttgtgggttttttttattttctactttcaagtcctcctacaactttaaacttaatgttttcacactatggtgaaagtacctaattgcttcccctcagcaggagagaagcctggtgcctttagagtgtaaaagcaggaggcccccaagaacctcggatgaagggactggtgaagagtcacataatatacccctacgtacaaagaacatgagaaatacagtgtgacctcatcaacagggcccctactaaggaataagactacca

SEQ ID NO: 83729 - DNA, 886 bp, Homo sapiens
cattttggagactctatttcttatccggagatcagcaaaaattataattcttcagccgaattttgtcctcacccgagtccagagcaattttttataggtaaactgtggcatttattaacacttcctggggccaagaagagttcataagttgttctttaaagtgttctgagggccagtgtcagttgtttgggcttcggaccaagtacagttttgcagtgtaacctaccctactccttcatractagaagctgccaaaatgatgtctcctacctacaatataaatgtcacattgcaagatcatcagcaggctccttccttagaggccagctgttgagtgggctatgtctggtagcagcatggaacaggaggcaggcagtgccagagatgattaaagaaaggaagtaccaaaagaagaaatacacaacagctggaaaatgtgcaagaggcctttagagatggtgtgcaagtctttcgagaaagtatcttaataaaaaacacatagctgagcttggaaccctaaaaggaatgaaagaataaaagaccatggcaacaatttaaactccctttcaagaattatgtcaaaaaggcccatcaagaaataggagatatttgaagagaagatgtttgtgggttttttttattttctactttcaagtcctcctacaactttaaacttaatgttttcacactatggtgaaagtacctaattgcttcccctcagcaggagagaagcctggtgcctttagagtgtaaaagcaggaggcccccaagaacctcggatgaagggactggtgaagagtcacataatatacccctacgtacaaagaacatgagaaatacagtgtgacctcatcaacagggcccctactaaggaataagactacca

SEQ ID NO: 83730 - DNA, 1073 bp, Homo sapiens
tgctttccctcctcttccccctatccccctgacaggcccctgtgtgtgatgttcccctccctgtgtccatgtgttctcattgttcaactcccaacagtggggcctttcttaaccaaataaatggcgtctgccccaacagtacaggaacatgcctgaaggctactgggaaggaaagggacagctttcatggtgtgatattaatgtgttcccttaaaatcaggaaaaagatatttgattgaacaggaatgtttggaagatccaccccagctccctgggagctggaaactggatgtaggggggcggagggggggggcagtgttttttgtcttttgtctcctgcatagttttaattttttcaacaaacaaaccactcagaaaagaaaaaataccgtgtggcacgatggccttgaagttaggagacccacatgtccacatgtgagtcttccctctaccgcatgggaatgagcaggcgtttctgagaggtcagcacgaggggtcagaggttaggtgtttaggctgagccacccagatgccagcacatgatgtagctgcctgaaaacatgctgttcagctcatttctttaatagtgacaaaggcatgagttccgcctgcgtccccattgcaagmcttgacccttgagccttggtgccctgtctgactcttaattatttaaaagagataccttaaagagataatcgctttagggtgatggatactttggtgttctttcaaactcactgtgtaggtacattccagttttaccctgggaggcagggctggttctgcttttgaactatagaaatgagagatggaatcaaaggtacgaaccaagatcaacaatctcatcattcattcctttttcattactattcactattaccagcacaagtgattgtaaattaggctctgaggagagctctacctctcctttcaatagtgttagaggccgagagtggtggctcatacctataatcccagcacttggggaggcggaggtgggaggatcgttggaggttaggagttcaggagcagcctgggcaacaaaacgagtctttgtttctatgaaaaaatta

SEQ ID NO: 83731 - DNA, 1174 bp, Homo sapiens
tttgggatttaccatgttatttcatttatcaggtttttgtcccttttcattgctgagtagtatttcattataggaatgtactctcgtttgtggatcattctgatcaactcagcacatgtggattatttccagtcttggcaatgatgaataaagtcactctaagcattcacgtacaggtttttgcatgaataaaatacctaggagtgagaaagctggactcacagtacatttttattccctcaatgctttcctgccccgtttagggctgatttcatcatgctttgatctcatcttagtcaactgatgggtcagcattgagcccacaagaggcttcatggcttcctggtaaagcgagagacccctggaagactgattctagaacagggtatgtgcattcctgctgccaagccctgctgcaccgttcctcattactcaattaatgtctggtgtcttctctgcctgtttaattactcccattaccgggacaggtcaagttccactccttcagggaagctccttctggccacctcacagcacataacatgccgtctctttccaaatcactttgcatctgtcttctgccacgccatcctgctttgtgacatctttgagattggtgtctgtgtttttctgcattaaaccttgagggctttgtaggtacaggactgggatccccattgcacatatgtggaaattgaggccagagaggctaagtgactaagatarggtagcatttgctgatcacccactatcatatgccatcaggcctcccattaacagtacacagtccgctcttctttagatgagaacactgatactcagagaggtgcagttatttgcccaagtcacacagctgggcactgaaagctggtttcatttggcttcaaacttagatctgtctgtggcatatctgggctttgagcaccctgtagcatgaggctgtagtgcactcggctttagaatggacaggggcctgtcttcccacacgctccaggctgcaccaccttttggtttttaggctaactcctgacctgagccctccccaccttcctgggcagagagtgaaccaggctgactgatgttctaggcaagaatgtggggtacccagggatgaccattgtgctgggtatgggagccagagttcagccctgactgctatggtctgaatatttcc

SEQ ID NO: 83732 - DNA, 1267 bp, Homo sapiens
atccttgacaacagtggcagttatctgcttttttgattgtagccatcctcggagaggggcgtgaggtgataatctcattgtgcttttgagttgcatttccctggtgattaatggtgtggagcatcatttcatgtgcttactggctatttttatattgtttttggagaagtaatctgttcatattcttctctcatttataattaatttgtcttgttgttgagtttcaacagttctttgtataacctagatacaaatcccttatcagatatatgctttccacatttttttattctgaggattgttttttcacttgatggtgtccttggaagcacaaaagacttccaaattttgatgcaatcccatgccaagttcaggtggtaaccccgagtgcagggcttttccactccagtgcttgcttttgagcctgggacccttagctcttggcattctaatggctaatgttgtcttctttattgccgtttctcattttttcctgcagggatggttgcagaagagtacaatgcctttttctactcactggtatcccaggacacacaggaaatggcttactcaaccaagcggcagagattcttggtagatcaaggttatagcttcaaggtacatatccatttggcttctggttagactaggaccaaggccttcttgataccctggcctccaggagaagcgagggccactgtcagcaggcaggcaccaagcattaggagattagaggccttgcctcaaactccctttatctctgcatgaatctctgagggcagctgttggtggaaagtgtgccgtcctggcaggactgaggtgccatggcactatgaccagcactgtgtgaatctgagccccgcagggctgctttctcagggatgcctctctaggtagctaggagagctcttcctttcatcagctggtaagctccaggccttagtttgcctcagtttgcctcccagacatcagagctatcctgtactacaaatcaggtattttaataattgggaaattctaaagctttggctaactttcactggctgaggcatttgctttctttcctgttacacaaatattacgtttatgtcagtatttggtgtccagagggctttatattttggggatagatggagggttctagaagtaggggaattaaattccccctatggtccactaaaaggacatccctagaacattagactcccaggttcttgattgcaaaagacygcaatccaggctgccttttgagatacgtttttaatgt

SEQ ID NO: 83733 - DNA, 1542 bp, Homo sapiens
cctggaccacctgcctttgatgtggcacggcagctgcatacattttcctgtgcaggcacttgggtggcctgagttgcctccaaatttggacatctggctgcttcttggtgcccccacctgaaacccaatccacctcttccgaagccagcagatagtgaattgctcagtaagaaaaaggtctgtgcaaaacaggagactagaaagaaacctcagtgcctccaggaacctcacgtgagctccgtttgactctgcagaagcaagttccttgcttttagaggagtgactgtggctgggcatcatccagacctatgtgcaattattggtcgaaggcgtctctcccgctagacggaagcgctcagagaaccaggcagtggaaggtgcatgactgggaggaatgaaggatggccatcctgaagtggaaggtgtgtgactgagaggaatgaaggatggccgtcctgaggctgcgctcgaatggaggcttatttaacatggagcctcgtgcaaaacaccccggagcaggcccctataggattgagatcgctccctgtgatctgctgcttccctctccagtggtttttatctttgaacagagcaaatcctggctccactcagacctgctccgtgagagccgaatgcagtcactgcacctggtcggggctgaggagcttctcagccattccaacaaggcctggtcatcgaaaagccatgattttcttgcattctgggccttgtgacttcttgagacgggaaaaatgaagcgctgttccacgattttgttctcaatctaaaggaccattgctttggaaagtggtcagattctgcttttggttgattttaggatccaaaactatggcgatgggaaaaaggaaatgcattttaggatttcaggtattgtctaaaatttgcacatgattatatcctgcaatcttaatggttcatgcgtctcatgctcaaccaagagcctctgctggcctaaatgatcaaagcatttccaggaattattcaagaaaaaaaaatctgctcccgtcactcaccggctgaaaccccctcagtggctcccactgccctcagatgcagtcaccctccttactgagcttagtgagggctgcactaagcactttgcattattctctcattgaagtatcacaacaatcacaaaaggaactatcattaaacccattgcatggatgagaaaactgatccttagagaggtcagggactggttcaagctgactgtgctgtacagtgtcagagcagggatgaccccaaacccaccaaggccattcttagcacccgcaatctccatgaccatctcctaactctctccctccccctcatctatttcctacccatggatgaaactgtttgtgtctcacctactactacagtgagccccttctgcttacctccctgggccccaggctggccccmctgggtgctcctggcagcaaagtccatgtctgattagggaacttcttattaggaggcttccttgtttgctttacccaccttctccagactgggacccctggagacagagcc

SEQ ID NO: 83734 - DNA, 2166 bp, Homo sapiens
atggaaactaatctgaacgtagcagataaagggtggcataaaggagagattattaagcagaagcatataacaggaccccaggtgcagcacttcctcattatacctattcttgggcagcaatgtcctgagtgtacrgtaaaccaccgcacccccaccccccgaaaaaaaaaagaaaaagaaaaagaaaaaaaaatactccaaggaataattttacacggttgctacacttgagatgaacaagtacatgttttttggaagaaagaccatagcaacttggtttttacttccaaaatacagcagcatgttaattgcttgatcagccaaatgaaactaaatgtaattaagactagtgtggggttaatttgatccataattatgttatataaagtaaatgaaaattgtttctttcctaaattgcaattcattaaaattacagatattaaaataagatactataaaattacatgaagcatgtacacattaatagccattagtaatagcttgatatttctatctaagcaacagtttattaaaatgccaaaaggtgatatttgaccactcacatgactggtttttttactctgtttttccatacttctaagaaatatttcttttctttttctttctttcgttttttttttttttttttggctaatgaagtaaagtgttctagtcttagtttgtttttaccatttttcaaatgtctataatctgctaataaaagtacaaatcaattctcattgaacctttattaaaataaaaacacaggtacttcatattcgaaatgacatagaggtatgtacatttcataagatgtcaaatgcatacagtataagtaaagtatttgggagatttttgttttcaaagccagattctgaatcactgattaaaatgatagtcatactatatgttatatttacgtaacatttgggttttaagctgataaaacaggattgggcataaaaacattaacttaagaaaaatgaaaggaggtaacatttattgtatgctgttttgagcattgtgctatgcgctataaactatttttatcccctggtgaagctggtgttattgtctcccattaacaggtgagagaactgaggctcaagagatttaaggagcttgcctgaagtcactgagctacttgtggcatttactgtgaggtgggggaggagttcttttctcttagacatgatgtcaaaacacagagaagcaattaatttgcctgatacaacaacatagtattttaattccaaccttatattcttattcattgaagataatgtgtttatttctgtgaaactaaaaaacagaatatcgtagcatattatcttcgtgcccattcacatgatattaaatacaagttagccaaataatcttattattttgagtccctaaacatctacagggcctacttagtggtggagaaagaaatacagatggcaagtggaactatcttattgaatagtaataaacatcttacatggagttccactgagtacacatagaaaaggcctatgttttagggtaagaaagcgtaggctgattattatactgttgaattggaaggaaaagaaggagtgagggctgggagaaaggagtgcaaaacagtagaaagtgtttctagattctgttgaagagcgctggcctccctgtatgtgataatgctttttacctttactcctttcaggcctgaggaaaaaagtgatgacttgaaaatttgatgttgtaaagaaaaagcatttgtaatagaatttaggtgcaacactcagcaatagcagtctatcagttacagaaccagagatattcaaaccaagtctaactggaacttcaatataccgcaatatatttatttattgctatgaagcaagttatctgcacattcttgagaatcttatatactttctttgtacaacaaactgtcactatattactattaaaaatagtatgcaaacattcacaaacaattctctgtagttgattgtactgcactaatgacaaccatccttaaattttttggaaatcacctgcatttctcttacagttgaagccatgtttcataaaagaaaaaataaaacaaacaaatcatacttaagaagttgccagaacacattatttacagtaagcatgtatgcttaacaaaccaaatatttaatatttcatgca

SEQ ID NO: 83735 - DNA, 2166 bp, Homo sapiens
atggaaactaatctgaacgtagcagataaagggtggcataaaggagagattattaagcagaagcatataacaggaccccaggtgcagcacttcctcattatacctattcttgggcagcaatgtcctgagtgtacggtaaaccaccgcacccccaccccccgaaaaaaaaaagaaaaagaaaaagaaaaaaaaatactccaaggaataattttacacggttgctacacttgagatgaacaagtacatgttttttggaagaaagaccatagcaacttggtttttacttccaaaatacagcagcatgttaattgcttgatcagccaaatgaaactaaatgtaattaagactagtgtggggttaatttgatccataattatgttatataaagtaaatgaaaattgtttctttcctaaattgcaattcattaaaattacagatattaaaataagatactataaaattacatgaagcatgtacacattaatagccattagtaatagcttgatatttctatctaagcaacagtttattaaaatgccaaaaggtgatatttgaccactcacatgactggtttttttactctgtttttccrtacttctaagaaatatttcttttctttttctttctttcgttttttttttttttttttggctaatgaagtaaagtgttctagtcttagtttgtttttaccatttttcaaatgtctataatctgctaataaaagtacaaatcaattctcattgaacctttattaaaataaaaacacaggtacttcatattcgaaatgacatagaggtatgtacatttcataagatgtcaaatgcatacagtataagtaaagtatttgggagatttttgttttcaaagccagattctgaatcactgattaaaatgatagtcatactatatgttatatttacgtaacatttgggttttaagctgataaaacaggattgggcataaaaacattaacttaagaaaaatgaaaggaggtaacatttattgtatgctgttttgagcattgtgctatgcgctataaactatttttatcccctggtgaagctggtgttattgtctcccattaacaggtgagagaactgaggctcaagagatttaaggagcttgcctgaagtcactgagctacttgtggcatttactgtgaggtgggggaggagttcttttctcttagacatgatgtcaaaacacagagaagcaattaatttgcctgatacaacaacatagtattttaattccaaccttatattcttattcattgaagataatgtgtttatttctgtgaaactaaaaaacagaatatcgtagcatattatcttcgtgcccattcacatgatattaaatacaagttagccaaataatcttattattttgagtccctaaacatctacagggcctacttagtggtggagaaagaaatacagatggcaagtggaactatcttattgaatagtaataaacatcttacatggagttccactgagtacacatagaaaaggcctatgttttagggtaagaaagcgtaggctgattattatactgttgaattggaaggaaaagaaggagtgagggctgggagaaaggagtgcaaaacagtagaaagtgtttctagattctgttgaagagcgctggcctccctgtatgtgataatgctttttacctttactcctttcaggcctgaggaaaaaagtgatgacttgaaaatttgatgttgtaaagaaaaagcatttgtaatagaatttaggtgcaacactcagcaatagcagtctatcagttacagaaccagagatattcaaaccaagtctaactggaacttcaatataccgcaatatatttatttattgctatgaagcaagttatctgcacattcttgagaatcttatatactttctttgtacaacaaactgtcactatattactattaaaaatagtatgcaaacattcacaaacaattctctgtagttgattgtactgcactaatgacaaccatccttaaattttttggaaatcacctgcatttctcttacagttgaagccatgtttcataaaagaaaaaataaaacaaacaaatcatacttaagaagttgccagaacacattatttacagtaagcatgtatgcttaacaaaccaaatatttaatatttcatgca

SEQ ID NO: 83736 - DNA, 688 bp, Homo sapiens
tcaggaggctgaggcaggagaattgcttaagcccaggagatcaaggctgcagtgagccaagatggtgtcactgcactccatcctgggcaacagagtgagaatctgcacctagaaaaaataaaataaaaatgttttaaaagaatacgtaagtgcatattattggtgtgagtctatgtgccaaattctgactgtgtggaagagctaatggagctgaagtgacccagatactcactgtggtaggctaaacaatggccccaaaagatctccccatcctaatccctggaatcaatgaatgttacttttcatagcaaaaggagctttgaacatgtagttgggtttttttttggtgttggtgttgtttgttttgttttgtttgtttgttttttgagatcgrgtatcattcttatcacccaggctggaatgcagtggtgcgatcatggctcactgcaactgccacctcccaggtccaagcgaacctcctgcctcaatctccctagtagctgggattacagacacctgccaccacacccaactaatttttgtatttttagtagagaaggatttcaccatgttagccagggtggtctcgaactcctgacctcaagtgatccaccagcctcggcctcccaaagtgctgggattacagatgtgagccacagcacctggcctaaagatgtgactaagttca

SEQ ID NO: 83737 - DNA, 729 bp, Homo sapiens
cattcaagaaagggaaggatcatgtttatatgtgtgacataaatcacattacatatgtatgtatatatgtttctatgtgtatatgtatttatattttaatataagtaaacatacatgtatatatgcataygtgcattccttaaagtatacgcatatacatgtatattcttttatgttttattataaggaaaatacatgtatatgcatattccttaatataaagaaatatacatatatacatgtatatttccttaatataagaaatatatgtctatatacatatatatacacatatatatatatagaaaatacatgggctggacacggtggctcacgcctgtaatcccagcactttgggaggcggaggcgggcggatcacctgaggtcaggagttcgagactagcctggccaagttggtgaaaccccatccctactaaaaatacaaaaataactggtcatgtgcctgtactcaggaggctgaggcaggagaattgcttgaacccagaaggcagaggttgcagtgagctgagatcgtgccattgcactcaggcctaggtaatgagtgaaactccatctcaaaaaaaaaaaaaggataagaaaatacatataacatttctttacatgtatatatgtatatttccttatatatgtgtgtatgtatacatagatatacatgtaaatgtccttatattaaaatatataaactataaaattaaatttaataaaaag

SEQ ID NO: 83738 - DNA, 729 bp, Homo sapiens
cattcaagaaagggaaggatcatgtttatatgtgtgacataaatcacattacatatgtatgtatatatgtttctatgtgtatatgtatttatattttaatataagtaaacatacatgtatatatgcatatgtgcattccttaaagtatacgcatatacatgtatattcttttatgttttattataaggaaaatacatgtatatgcatattccttaatataaagaaatatacatatatacatgtatatttccttaatataagaaatatatgtctatatacatatatatacacatatatatatatagaaaatacatgggctggacacggtggctcacgcctgtaatcccagcactttgggaggcggaggcgggcggatcacctgaggtcaggagttcgagactagcctggccaagttggtgaaaccccatccctactaaaaatacaaaaataactggkcatgtgcctgtactcaggaggctgaggcaggagaattgcttgaacccagaaggcagaggttgcagtgagctgagatcgtgccattgcactcaggcctaggtaatgagtgaaactccatctcaaaaaaaaaaaaaggataagaaaatacatataacatttctttacatgtatatatgtatatttccttatatatgtgtgtatgtatacatagatatacatgtaaatgtccttatattaaaatatataaactataaaattaaatttaataaaaag

SEQ ID NO: 83739 - DNA, 564 bp, Homo sapiens
tgcaacactgtttcttcagatcatatttgttcctcaatttattttaatacagtgtctaccccattaccattctgaaaccgttctaacaaaggtcacccatgacagctaacctgttaagggccagatcttacatgaatcattttcagcacttatccttttttacctctctgtagaaaggggtgcctccttcttgaaatcctctccttccctgatttctgtgacagagactttcctggactttttgctgttctctggctaggcctgcatcagattgtcattgactttcagcctgccacccacactctgcctggtcttctgccctcctgccaaaaaagctgtgttctgcactcycttattcatctcatcttgttggttttgagatggaatgtcattagcatctgtattttcggccaagactaggacatttagaagccataaaaatggaaatcatatcttccatttgatgtaattcaaaataaaaacaatatggagtcattaaaataagtttaaggaagtttaacaaagttcttaaaatttccatgatgctgatacttctttggaaaa

SEQ ID NO: 83740 - DNA, 867 bp, Homo sapiens
ctcaatggaactttagttcattatggcagtgagaaggtaacaaggaaataagagcaggtctttgcccttcctgttgctccgtgtctcttgcctgatgccaggtttccctcagaccggatatgagacttggacctgtggtttaggtgtcatttgcagaacagtaagtctcaggtagagtcttatagttcctgattgtaaaggtcaatccaagtttattaaggctactgtacatcccagctttcctgacatagccttgaattgaagggcttttattcttcatcataaaaatgatctcttaatgtgtgccatcttcccttgtaagactatttgatacctttgcaaacaagaaagcctcttgtcaaaatatataatgtgatttttctatttggagggtctcaagaagcataagcagaactgagtgaaatatggagggcctccctttccaccagatgtgtccacacggagtgattgagtggtatgccctgtggcagcaagagtgacaagtcttaggcctacttctgctttcactttttcttttgtctattgcttaaaataactgagctttatattttgttcccctcatcatgtgaaattgcagatgtttactggtttcattctttcttttgatgaactaactccccctctaatggatggtttttgttttcaaaacaaagctstacatttcagtttgaatagctccctctgatataataaagttgttcttttaacccatgtaatcaagatttcctttcattttaaacttaaaaataatttggaagatgtgagtgataaatttccatgcagctgatttaaatattctggttcattttcattcatgtatctctactcccatgggagaaatgtcaa

SEQ ID NO: 83741 - DNA, 610 bp, Homo sapiens
tgtccctgtagagttcatagtctaataggcgagacaaatactaaacaaatcagcatcaaactggctatgattagaagcacagagtgcatgaaagcatagatctttgatgatccctaaggaaataaggaaggagtcaaagtcttcataacaattaggaattaactagaaaagaggggcaagaagaatgtcaaggcaawagaactagttcagggccagtggtgcacataaggtcactctggctgcaacccagaaggcatggcatgacaagagtctggcgagatggaggggtccacgttctggacatctgccttgaccttaaaaaaacagttgaaacctctagaagcatttaagcaaaggaaacacatgaccagatatgcctcttgaaaagatcatttaagtctagtgaggggaaggaattggaagagggcagatggatgtgggtggacccaggaggcaactcaatctccagatgtgtaggtaacatacatactcaccagctgaccctcaatccaccctcacctccaaacactgtgtctctctggtcacctggatattttctggacccaacaatatcttccagggggaggcatttttggatgtccttcaatct

SEQ ID NO: 83742 - DNA, 1335 bp, Homo sapiens
  misc_feature (1)...(1335): n = A,T,C or G
atgagtagtgaaggagaaacagcatgtaaaatgtatagagccacaagctagtctgtagaaaattcttccaatcatcaggtatctaaaattgtaaacaaaggattcagtttccatcagtggctagactaaacgaaggctctctcctgtcagaaacatattcaataatgcagtatatgcaattacaaatgcaacaaacctgtggcagtgctacaaatagcaaatttgtgtgcgtgagaattttcaggttttatgcaactattaacaataaaaaatagatttccacctaccatgatagaggacttatctttcctgtctttttgtagaaaatagtacaaaaccatcgtcacatgaaaaggcaatcaaagagtaaccaaaataatataataaataaaatagaggagtgtcagaaagtcaattactaaaaaatgttaaaaacataatacatgcattctgttcaagggcaaaatacagagaccagttaggagagtgttcccatgatccaagagagacacgatggaggtttggaccaaggcactagcagcagaggtgacaagaagttgcaaatgtgttttggtctgtagtagtcaatggacacagatgaatgatacattctgaggcagtcagagcacagctgttaagagccatgccctggagccagactgattcccaagtttgcctcatagagatggattttgtgatgtttatggtatttaccaatttcataaaaatttgttgtgattttttctcattcgaactaaatatttaatgtcatacctaaatttgtatttataactttgggatccttttttaaaagaactctctcccttccccagttgcataggcttgggctccacaaaccctgtatctgcctttggtcacagaktatgtagattttaaattttgacatgcatcgcttaatttcccattggaaagattatgcccattgccactcctgatttccttaaaacttaaccaacattggctattatcagtttttctcaatttggccaatttgataggtgaaattttaatttgtgatcctttgattaccagtgatactgaacatattttcatgtatgtattggtgatttatatatcgctcctcacagactgtccaatccagtcctttgtcatttttctgttagaaagctggtctttattatttggctggcatacaaacaaatgcaaaatgtatcaaatattgttactgttactgtgtgtgtatttacacnnnnnnnnnnnnnnnnnnnnnnnnnnnnnnnnnnnnnnnnnnnnnnnnnnnnnnnnnnnnnnnnnnnnnnnnnnnnnnnnnnnnnnnnnnnnnnnnnnnnaatt

SEQ ID NO: 83743 - DNA, 1335 bp, Homo sapiens
  misc_feature (1)...(1335): n = A,T,C or G
atgagtagtgaaggagaaacagcatgtaaaatgtatagagccacaagctagtctgtagaaaattcttccaatcatcaggtatctaaaattgtaaacaaaggattcagtttccatcagtggctagactaaacgaaggctctctcctgtcagaaacatattcaataatgcagtatatgcaattacaaatgcaacaaacctgtggcagtgctacaaatagcaaatttgtgtgcgtgagaattttcaggttttatgcaactattaacaataaaaaatagatttccacctaccatgatagaggacttatctttcctgtctttttgtagaaaatagtacaaaaccatcgtcacatgaaaaggcaatcaaagagtaaccaaaataatataataaataaaatagaggagtgtcagaaagtcaattactaaaaaatgttaaaaacataatacatgcattctgttcaagggcaaaatacagagaccagttaggagagtgttcccatgatccaagagagacacgatggaggtttggaccaaggcactagcagcagaggtgacaagaagttgcaaatgtgttttggtctgtagtagtcaatggacacagatgaatgatacattctgaggcagtcagagcacagctgttaagagccatgccctggagccagactgattcccaagtttgcctcatagagatggattttgtgatgtttatggtatttaccaatttcataaaaatttgttgtgattttttctcattcgaactaaatatttaatgtcatacctaaatttgtatttataactttgggatccttttttaaaagaactctctcccttccccagttgcataggcttgggctccacaaaccctgtatctgcctttggtcacagagtatgtagattttaaattttgayatgcatcgcttaatttcccattggaaagattatgcccattgccactcctgatttccttaaaacttaaccaacattggctattatcagtttttctcaatttggccaatttgataggtgaaattttaatttgtgatcctttgattaccagtgatactgaacatattttcatgtatgtattggtgatttatatatcgctcctcacagactgtccaatccagtcctttgtcatttttctgttagaaagctggtctttattatttggctggcatacaaacaaatgcaaaatgtatcaaatattgttactgttactgtgtgtgtatttacacnnnnnnnnnnnnnnnnnnnnnnnnnnnnnnnnnnnnnnnnnnnnnnnnnnnnnnnnnnnnnnnnnnnnnnnnnnnnnnnnnnnnnnnnnnnnnnnnnnnnaatt

SEQ ID NO: 83744 - DNA, 723 bp, Homo sapiens
ctctaaaatggtaacaatttatactaccatcagcaataaataagaattgctgtttcctcacatcaccaccaacacttgatgtaaacccactgattaatttttgtcagtttaatggttgtgaagttatatctcattgatattttaattttgtctgactactaatactattgagcatatatttttatattttattgactatttacactcctatgaattgcttgttcatatcctttgctaatttcccttctgactttatgactttatgtcttcttattcttgttggttttcaagacaaaggttgcaaaatatctttctatgtcagtcttttcatcttacaatgtctttttcatgaaactgcttttattttaatgggcttaaatttattgatattttcctttatgatttttgcgttttgtattcygttaaagaaatgcttcttcacataatgccataaaagttttctctaatattttcttttaaaagatttacaacttttatttttatatcattattattattatgtagagatggagtctcactctgtcactcaggctgcagtgaagtggtgcgatctcggctcactgcaacctcagcctcccaggttcaagcaattctcctccctcagcctaccgagtagctgagactacaggcacatgccgccacacccagctaatttcttttgtattttagtagagatggggtttcatcgtgttgcccagactg

SEQ ID NO: 83745 - DNA, 1793 bp, Homo sapiens
attgtactttgcacagatactgcatttttaaaaaattgaaggttaatggcaatgctgcatcaagcaagcctatcaacaccattttcctagcagaatgtgctcacttcgtgtctctgtgtcagcaattttttttggaatgatgtattctaaaattaacatatgtaaattgtttttaaggctttatgttattgcacamttaatagactacagtatagtgtaaacataacttttatgtacactgaggaatcaaaaatgtgtgtgacttgcttcacagagatactttattgtggtggtctggagccaaacctgtaatatctccaaggcatgcctgcacaatattttttaaaaagtgtgccacaaatgataaccaattaatgaatgtaagacaatcatcacatacgcaaacttggacttttcaaggtaaatgttcagtttttagtgcttctccccagagccctcccatttccatctctacacatagttggaccataggggaaagcttatctcagtatggaaacaggagtggggatctgggctgtgtgttagcttctttgctggttcccaccaacttctggcctaagggtagctcatgcttcctggtctaggctactataaagtctaaaccttggactctactctcagagctgctgcgtgggaggtatctgctgctccttgctgtgacttctcccagaagctcagccatcttcccctgatgagtggaccctccgtctctgctcttgcttcctttatgaactctctgacattcctgcattgttcatctgactggattctttgggcttttccatcctgtagcctcctctacagagggcccttgccccatgctccttgaacacggagtccagtctctcacttctcactaccttccttgtcccaaacagggtcacctccgaacttggagattccttccatgtcacccaccgtctttgaggaaaattggaggtgaccttgtagataccctttttagcctcaactgaactccacttttacttgactactgtctccttttatgcattttagacactcagtcattctctttctaaaatttcaaaaagaaattgaggcaagctgtttttctttcagcttctctctcagcctatcaataatatgtctaacatgttacccaacttgattagaaattcaaggagtgaatattgctttagaaagccctaggcagcatcttcatccccatctcctggctctcttccccgtgttagcatggttcttcctttcctattggaaataaacatacatattctttcttatcatccctacacaatggctaaaggcaaatatagctcagaaattcagcctcgtcttttatacataaaattgggaaatttaagaaaaataatctctctttatgaaaaggagactgtcaagactattatctcactatgcactttaaaaaatctactatgaaactcaaaattgagcaatgaattctttgttctggttggtagccacaatctcctgaaaggaatgaatggcattgattcattgagcaggggaaactgctaggcaacacagtttatggggaaggaaaataccttgttttaatatttttttgaaaatattatccctgctgcaaacataggaaagtatacctgaaaaggggaacagcaaaattccagtgagacagcagtagaaagttttaactgtggctaatgccagtggggaggctgcaaaaaaataaagaaaatataaaattgggggaggaaaagtcgtcgacaaagactccaaaaagtggaattcagaatggaatctgtcctact

SEQ ID NO: 83746 - DNA, 1793 bp, Homo sapiens
attgtactttgcacagatactgcatttttaaaaaattgaaggttaatggcaatgctgcatcaagcaagcctatcaacaccattttcctagcagaatgtgctcacttcgtgtctctgtgtcagcaattttttttggaatgatgtattctaaaattaacatatgtaaattgtttttaaggctttatgttattgcacaattaatagactacagtatagtgtaaacataacttttatgtacactgaggaatcaaaaatgtgtgtgacttgcttcacagagatactttattgtggtggtctggagccaaacctgtaatatctccaaggcatgcctgcacaatattttttaaaaagtgtgccacaaatgataaccaattaatgaatgtaagacaatcatcacatasgcaaacttggacttttcaaggtaaatgttcagtttttagtgcttctccccagagccctcccatttccatctctacacatagttggaccataggggaaagcttatctcagtatggaaacaggagtggggatctgggctgtgtgttagcttctttgctggttcccaccaacttctggcctaagggtagctcatgcttcctggtctaggctactataaagtctaaaccttggactctactctcagagctgctgcgtgggaggtatctgctgctccttgctgtgacttctcccagaagctcagccatcttcccctgatgagtggaccctccgtctctgctcttgcttcctttatgaactctctgacattcctgcattgttcatctgactggattctttgggcttttccatcctgtagcctcctctacagagggcccttgccccatgctccttgaacacggagtccagtctctcacttctcactaccttccttgtcccaaacagggtcacctccgaacttggagattccttccatgtcacccaccgtctttgaggaaaattggaggtgaccttgtagataccctttttagcctcaactgaactccacttttacttgactactgtctccttttatgcattttagacactcagtcattctctttctaaaatttcaaaaagaaattgaggcaagctgtttttctttcagcttctctctcagcctatcaataatatgtctaacatgttacccaacttgattagaaattcaaggagtgaatattgctttagaaagccctaggcagcatcttcatccccatctcctggctctcttccccgtgttagcatggttcttcctttcctattggaaataaacatacatattctttcttatcatccctacacaatggctaaaggcaaatatagctcagaaattcagcctcgtcttttatacataaaattgggaaatttaagaaaaataatctctctttatgaaaaggagactgtcaagactattatctcactatgcactttaaaaaatctactatgaaactcaaaattgagcaatgaattctttgttctggttggtagccacaatctcctgaaaggaatgaatggcattgattcattgagcaggggaaactgctaggcaacacagtttatggggaaggaaaataccttgttttaatatttttttgaaaatattatccctgctgcaaacataggaaagtatacctgaaaaggggaacagcaaaattccagtgagacagcagtagaaagttttaactgtggctaatgccagtggggaggctgcaaaaaaataaagaaaatataaaattgggggaggaaaagtcgtcgacaaagactccaaaaagtggaattcagaatggaatctgtcctact

SEQ ID NO: 83747 - DNA, 1793 bp, Homo sapiens
attgtactttgcacagatactgcatttttaaaaaattgaaggttaatggcaatgctgcatcaagcaagcctatcaacaccattttcctagcagaatgtgctcacttcgtgtctctgtgtcagcaattttttttggaatgatgtattctaaaattaacatatgtaaattgtttttaaggctttatgttattgcacaattaatagactacagtatagtgtaaacataacttttatgtacactgaggaatcaaaaatgtgtgtgacttgcttcacagagatactttattgtggtggtctggagccaaacctgtaatatctccaaggcatgcctgcacaatattttttaaaaagtgtgccacaaatgataaccaattaatgaatgtaagacaatcatcacatacgcaaacttggacttttcaaggtaaatgttcagtttttagtgcttctccccagagccctcccatttccatctctacacatagttggaccataggggaaagcttatctcagtatggaaacaggagtggggatctgggctgtgtgttagcttctttgctggttcccaccaacttctggcctaagggtagctcatgcttcctggtctaggctactataaagtctaaaccttggactctactctcagagctgctgcgtgggaggtatctgctgctccttgctgtgacttctcccagaagctcagccatcttcccctgatgagtggaccctccgtctctgctcttgcttcctttatgaactctctgacattcctgcattgttcatctgactggattctttgggcttttccatcctgtagcctcctctacagagggcccttgccccatgctccttgaacacggagtccagtctctcacttctcactaccttccttgtcccaaacagggtcacctccgaacttggagattccttccatgtcacccaccgtctttgaggaaaattggaggtgmccttgtagataccctttttagcctcaactgaactccacttttacttgactactgtctccttttatgcattttagacactcagtcattctctttctaaaatttcaaaaagaaattgaggcaagctgtttttctttcagcttctctctcagcctatcaataatatgtctaacatgttacccaacttgattagaaattcaaggagtgaatattgctttagaaagccctaggcagcatcttcatccccatctcctggctctcttccccgtgttagcatggttcttcctttcctattggaaataaacatacatattctttcttatcatccctacacaatggctaaaggcaaatatagctcagaaattcagcctcgtcttttatacataaaattgggaaatttaagaaaaataatctctctttatgaaaaggagactgtcaagactattatctcactatgcactttaaaaaatctactatgaaactcaaaattgagcaatgaattctttgttctggttggtagccacaatctcctgaaaggaatgaatggcattgattcattgagcaggggaaactgctaggcaacacagtttatggggaaggaaaataccttgttttaatatttttttgaaaatattatccctgctgcaaacataggaaagtatacctgaaaaggggaacagcaaaattccagtgagacagcagtagaaagttttaactgtggctaatgccagtggggaggctgcaaaaaaataaagaaaatataaaattgggggaggaaaagtcgtcgacaaagactccaaaaagtggaattcagaatggaatctgtcctact

SEQ ID NO: 83748 - DNA, 747 bp, Homo sapiens
tctagccacattcaacttcccaggtgcaaggcagaattcagtctaactggggcttgggtttttccaggtgactataacagaggccaggagagcaaagaagctgaagacttctgacttagcctatggaggttaagttaggctagaaggctagatgggaactgaggaaactgcaaagaatcactggagaatggacactagagacagtgaggtgagccattgggaggcagagggcaggaggaaattgagactagaaaggggctacggcaattgatcaggatagggtctcaagatgtttgaggtagatggaagacaagatcttggaggagaagaggctagggaatggagagacattattagaaggactatttttggggataactgacaagaattatgacagtaatgctaggaaaacagcaagccagaagccaatctcatcaagaaatggttaggagtgggagagagtagtcccaagggtctccaaacgatgggatggggttggtgtgtgctgatggcgtacatttccaggcaatggtggggtgtaggggaagagaaggagacaatgatttgaagtagcaataaggaacaaataggacacctactcctcctttakccctagagggtttagtagagaaacagccaccattgagcagactgcagggaaagcaatgcggtgtccttagggaagagccaggccttagttagagcaaaagacgtatggaatgttcagagaagaagcacagttatagg

SEQ ID NO: 83749 - DNA, 544 bp, Homo sapiens
ttgtcaagtatcctttcttccaggctggtgagtgaatcagaatctgagaaggttatcacgtggtttcataaaggacattttgtttacattttggtatgttgaatgtagtaatgcagaaattaataaaattacttatattattaaattgattactaacttctttttactttacagaccagtttgtcacagcagatcacaaaatgcttgagaatatagctagataaccaagttttgttcatgaagaatttttaggaaatggttttgggttaattataaaagttctgattayattgtagagttttattgtagagttcattatttaataaggaaacctacatgttttttctaataaacatccagttcaaatgatggggttatttaagtaggtgataaaaagcaaaaattattcattttgattaggagaaagacaataattctgaattttagcaacatcacactaccaggtaattttatcccacttcccatgcactggccagagagtaaggaaagaagcaagctctagctttcaaacgaagatgcagac

SEQ ID NO: 83750 - DNA, 715 bp, Homo sapiens
agagttataagatccatcaactcttacccagtcaccaggctttagggtcaagtattaaatgtgcaggagaaataactggggtacctctttagcttccagactctagcccaactctaggcctgtggacacagtcacagatgtggtagtagagccccggagtcccaccctctctgcaccagccacactggtcttgtttgctattcctcagacttacctgtgacctcaaggcctttgcactagctgttctcccaacctggaatgctccttccctacacagtaacaaggatctctcctcttcatttggttctctgttccaatgccgcctcctaaaggagaccttctctaaccacattatataaagcaatcgcatcttactccctttaacatgcttgactttcttcttagcactaccactccctaaaatattaattacctgaaatactctttacttatgaatattaatcctygtgtcccatgacaccagggaggtgtcttttctgtttgctgctatgtgccaagcacctaggacagagcctggcacatagtaagtatcccatagtcattgactgagtgaattgatagatgtttcacaaaagctccaaggagccccatagagctagtccctgaaccacactttataagccactggccttagatcatcagggtacattttaccccttggagtttcagttccatttaatcacgactgtgtcct

SEQ ID NO: 83751 - DNA, 1575 bp, Homo sapiens
taaccttaggtatcttctagtttttccagttaggtatactgacaaattcaaataaatcatttcagcttgatggaagaaaaacaccctcaacagaaaccttccctaggattaaaactcggttaggttctatgaccacactaaattaatgcaaattactaaagtgccacaaacttgggtggcttacacaacagaaatatatatcttacagttcttgaggatagaagtctgagaccaaggtgtcagtaggttttgtttcttttgagacctttctctttggcttgaagatggctgtcttattgctgtgtcttcacatggtctttcttctgcacacatatatttctagtgtcttgctctctatgtccaaatttcctcttcttagaaacacactaattatattggattaggcttccctctagagacctcatgttaaactttattacctctttacagtcatttgtctaagtatggtcacattctgaagcactgagagtcagatattcaacataaattttaaggagagcaattcagcctgtaacaactagaaatacagtttcaactttataattaaaattccaagccctagagagtaatcaaaacactaaatatgattcaaggtcaaatttttctttacggtctcccttcctgggccttgtcgtccagaggaagcctatataaggaaagaagagggacaagattaactgttcttgtctctcctctttgtattttacttctttttccaaatttcttacttgccactgtttcaggtctttcttggatctagctgaggtagggtggagaagatataaaaggactgacccaggcctaagacctaagatggctacatgttctctggtcctgacatttaagctaaytttgtcatgggatgtccagggccttttaagtgattgaagctgggcctttctcttctgggattccttattccagatggatgcatctaaatggacacttgcccgaattagtcccttgcccctccatatcccagtctccttctgctaaggtagttctacctctcagagggcctggttggatagaccccaaatgacctcattttatcggtatcccatgatcctccttgataaaacaggttacacattattgccccgagaagcacaaaaagaccaggcttatcccaacacagatgctctcttttctctcactctctagatttccttgactggtggcttatttctgtatgagtttgcttagaattttttcagacatggacaccagtcctttttgtgtgccaactgcaaaaaatacatcctatagcagggcaatcccattaaagcccaccctactaggctggtgctaaaaggtatcactcttccactactttttcagaaaggctgttagaagggtcctcaccaatctacaagggctctctgaaacgaaatatttccaccagtcttcttttaactctgttcttcttttaaactcttgctgtgcctgaagagtccaaaagtctgtcaacttgaaataaatacatatagagacaaatcttcaagagtaaaggacttgtttgggaagaaacaaagtaataggattttaatccag

SEQ ID NO: 83752 - DNA, 731 bp, Homo sapiens
agggaatgcccaggaagaaagatctagagaggggatgcccggtgaagcctgggcggcggcccgtggtgaatacagctggataagggccctttcctcctctccctggcgccctcaggtgggatcttagctcctcactcctagataggaaggcacaaagggcgcaggagggacacgtcgcccccggggaaatggagaacaagaagatgctccraggaacctgggacattgtcagaagaaaacgatggaaaagcaaccacactgaggccactgggtttgtgtcttgtgagacaggagggggcctttgagggaagaatgatcttcggcacgggaaagggccctcaggtccgtgccagtctcagctcatttccatccacaggtccctttgcctgagggggcaatttctggggttccctcctgtggtaaaaggtgccagagaataagggggacacacaggtcagcctcaggggcaggatgtggttcccaggagcatgagaaccccacccagggctctggggctccttcctgtgtcctccagtggctgctgcaggagctcccaggacagggctgtgaggctgcggcctcaggaccctccagacagggcggcatccatgcaggccccagggcaggggcagccttgagtgagaggagccaatgatgggggggtccaattccccgtggggaagagcgagttagacccaggcgggacagtgggcacccttcagtatggatcc

SEQ ID NO: 83753 - DNA, 731 bp, Homo sapiens
agggaatgcccaggaagaaagatctagagaggggatgcccggtgaagcctgggcggcggcccgtggtgaatacagctggataagggccctttcctcctctccctggcgccctcaggtgggatcttagctcctcactcctagataggaaggcacaaagggcgcaggagggacacgtcgcccccggggaaatggagaacaagaagatgctccgaggaacctgggacattgtcagaagaaaacgatggaaaagcaaccacactgaggccactgggtttgtgtcttgtgagacargagggggcctttgagggaagaatgatcttcggcacgggaaagggccctcaggtccgtgccagtctcagctcatttccatccacaggtccctttgcctgagggggcaatttctggggttccctcctgtggtaaaaggtgccagagaataagggggacacacaggtcagcctcaggggcaggatgtggttcccaggagcatgagaaccccacccagggctctggggctccttcctgtgtcctccagtggctgctgcaggagctcccaggacagggctgtgaggctgcggcctcaggaccctccagacagggcggcatccatgcaggccccagggcaggggcagccttgagtgagaggagccaatgatgggggggtccaattccccgtggggaagagcgagttagacccaggcgggacagtgggcacccttcagtatggatcc

SEQ ID NO: 83754 - DNA, 2288 bp, Homo sapiens
agaggggcttcaccacagtccccctcagctcctgcacagcagtcaccccacttctcttatttcattccgtgactcttttcatctctgacttttatatttcttctggaatttatgcatgtatttttgcatctgtttatcatttctatyccccgcctggaatatgagctcaatgaaaacagagctccttgcctgggtgttcacggctggactccaatgccaggtcagtgtctgatacaccagaagctcccataagtatctgctgaatgtaaaaataggtgaggacccccaggcgtgtccctccttgacctggtggactcatgggaatcatctgcctcacaggggtcttgggtgtggcatccctggaaccgaaacgatggtcagctgataacgtcttcctttgtctggataagcagacatggtctgcactagtgagcaaaagactcagttaactaccacattaagaagtcacggccctcaaccaatttccatatttgagtcagttaaaagccacagccctggaatgaaggggaggtcaggtccccttgaggaaggaggaaggaaaggcctggctaccatgccacaactcacactgataatcttctaccagccctcccgcagggaccagaagacactggccaggatgtgtctacataaggaacggaattgtcaggttttggggggaatcctggatcctcttctgcagggaccccagtcctgagaggcccagcctggggcttagtccactattctgagcaaaggcctgtggagatcagggaacaatggagttttcacccaggtctgacttagtgggcatgataggtccagaatctatgtattgtcatttcttaaagttcgaaagcatcattgaattgacacactcagcaaatggaagcagccacatattctgcactcctggacccggggagtgtgggccattatggtggcaaaggtgcaggggagtcctggacctgctcctccctgtgaaaacgttgaaggaagcaatgccaagctcctggagaaatggaaaggtgcagagagggcatcaggcacttagaggtgttggtgacagctcgaggttcagctggccggggcgtgcacatgagacatggagtcacagctcagggcgtctgtgtccatcaggttcacgtgtgattcatggatcaggcacagggaaaaggctgaaggaggctcacagagaattccaggagatgtggagagagcagcccgggagggagtggtcaggaggtcattccagtcccgcaaaggggttctgtcgcagtgcagggccttgatggacagtagatgctactggttctcaccctctggccaactctgcctgcttccagagcttctctgaggtccgttcacccagacgacggcacccagcatgctcaggagcaggggcagctccaggaccaggagcaggacgtaggggctgctgaacagggagctgtggggacacggtgatggcagtgagtcatctccccaggggaagcccaggtgccctccaccttctgcctgtctgtgaacccaggtcctgtggccacacaaatccctgtgaggacaaactctgtatatgacaactcctctaaagagatcattagaccctgaccttcagcctgagggtccctggagtctcaggactgcctataaggaagcacgtggccgtgaaaatggtgcatgaggacagggagggatccaggtgagaaccacacccacaagatctctacatcccggggttattcactggcgcatggaatcagtcatgtagtttgatgcctgtatggccatcatttcccgagaaggtgaggactattcatgttattcacaagtaactggtacctgccctctggttgcaaatatcagcctgtaaaattcatggttgttgaaggaatggaaggaatgaatgaatggcccagctcagctctcagctcctcagaggactgggctcatcaaacaggatgagactcgggccagggctgcaagggaggccaggggagagggccggggtcaccgggcaccaaaacatctgccccctgccctggcctggccgggtcccaggactcccttgcaggacatttgcctcactcctccctctgcctggacccctcttcccccagaccccagagcgccctgctcccaaatcctgcaggtctccacgctcatgtcctctaatccacaaaccctcttctgatcattgtcagtgaaatagcgactccaacacccacacacatgctccccaaacccaaggcacaaatatctcttcccagcagtcatcaaacttcgct

SEQ ID NO: 83755 - DNA, 520 bp, Homo sapiens
tttgattccacatgaytcaaatttagaaaaaattaagaaagctaacgctgttagtcatctatggcaaattcatggagagtcccgagaagctattctgcctacctggagcactggatttcccttcacctcctgcccccttcctatcttcccatattcctttctcctttgcctgactgctttatccttcaaggctcagcttaaatgtcacctccttagaaaagccctctaagttaacacccacctctaccattacatgctcttataacactctggaatattaccttatgacaattatcaaaaatgtagtaaataaaagttattcatgtttaccctcattctagactggaagcaccatgaaggcaagacctgtttcattcatcactgtggctctgaccccagtaagtggctgcccatagggagcactcagctctgtagatggttgttgaatgaataaatgactacatggctaaataaatgggtgctatttctctaagtactttgggttgcagctccttatccc

SEQ ID NO: 83756 - DNA, 744 bp, Homo sapiens
cagttaattaaaggtcagtctttatgatgtaaaagtttgctaataaaagccttgccagttctttttttcttacaactgtgtaagcaatccctagatgatctatttcaaatgtgattttaaattctgaaatgggaaaaatcttctaaagccaataatcagatgtataagatatatgggatttagcatttggagggatacgcactactactgactcatattctcaggaccaaattggatcctcaataaaatgccttaagtagcaccttgaaatttgattcagtgtgatttgtacatattcaatrgctaatatgtgctagattccatgctattaaaccgaggcttcatttcaccacgctctcatttcatcaccatcaaatgaatatgtatagggtacttcctatgtctatgccatttaaaagcataagaagaaatacaagaaaacagaatacctgccctcagggaactgtctcagagcaacatgtaccaaaaatttttaattaggattgatgtctgattgggcaagagatctcacctcattcatctttgtcttctgagcaagtgacacagcaccctgtccaagagcacccaaagaatgtttggggacctgaatggtattatgagtaattttgtactgtatagatagaaagatttcccttctaaagtttgtcctagttctaaaataattcccaggagggaaaactgatgctttacacattgattactcctcttcttaattcccaaggg

SEQ ID NO: 83757 - DNA, 744 bp, Homo sapiens
cagttaattaaaggtcagtctttatgatgtaaaagtttgctaataaaagccttgccagttctttttttcttacaactgtgtaagcaatccctagatgatctatttcaaatgtgattttaaattctgaaatgggaaaaatcttctaaagccaataatcagatgtataagatatatgggatttagcatttggagggatacgcactactactgactcatattctcaggaccaaattggatcctcaataaaatgccttaagtagcaccttgaaatttgattcagtgtgatttgtacatattcaatggctaatatgtgctagattccatgctattaaaccgaggcttcatttcaccacgctctcatttcatcaccatcaaatgaatatgtatagggtacttcctatgtctatgccatttaaaagcataagaagaaatacaagaaaacagaatacctgccctcagggaactgtctcagagcaacatgtaccaaaaakttttaattaggattgatgtctgattgggcaagagatctcacctcattcatctttgtcttctgagcaagtgacacagcaccctgtccaagagcacccaaagaatgtttggggacctgaatggtattatgagtaattttgtactgtatagatagaaagatttcccttctaaagtttgtcctagttctaaaataattcccaggagggaaaactgatgctttacacattgattactcctcttcttaattcccaaggg

SEQ ID NO: 83758 - DNA, 704 bp, Homo sapiens
tttttcagaagagggaaaacaggaggaagaacagtttaggcaaaatatagcgatttcagtgctggtactataagaatcttcatgccatgtacccaatgactggtcagtaaaaactgtgtgatagtaatggcaaaacattatatatgagatatttttcaataaaatagcaaagcacgggcctgattaagctatttaagatatgttttctttacacatttatatctacaacttatataaagtgaattgwtttatactacgagaaattgtgtatgtatagccctcctgaggaaaataccttcttaaaaccagtaaccgcaagtgaatgtatctttgtactaagtctgtacttccatgtatactgatttttaaagctgagacagagtactggtaggtcttttgataatgtcatctcacagttaatatccctccattatagctgatattttgataactgttttgatgttcatctagaagtctaatttcttcacattctaagaatgaagtgatatttctttatcagatatgcaaaatgggggaacggaggtatttggtcattacgtgttaaattgcattgtgagatgattttcttgtactcattcagtaagtatttatgcttcaagaatgcacatctgaaggtttccaccatctaaaaagtaccaggattttatattttctaagagtggataaaaggctaaaatcatgaa

SEQ ID NO: 83759 - DNA, 573 bp, Homo sapiens
tcagtcctgtgagatagatattattattcacattttgcaaatgaaaaatttgargcttggagtagttgataacttacctaaggatgcacagtgcatagttagtaaagccaaaaatgaaattgatgttctctttcataaaatgccattcttgttctttactccctaaataactaaagtaaagaactttactccctaaagaactaatttattattaaaatattcagaatctcatctatagatttggaaggattgcaaatatcaaggatccaataactaacatattaacagatcattaaagcagctggtagaaatggagagaaaacaattgtagaagccaaatttggaggtcaagaatgtgaccaagtttctatatggcacattttcctgataattgactgttgttcttaccatattgccctaaaatgcttcctgtgactgataattgacattatggtggcatgtgaggggcttagagaaaatgtcacactgttccagggcttaatcttgctactgggccttcctatagtatcccattctccacacttgtaggaataaacaacaaccatacaggtt

SEQ ID NO: 83760 - DNA, 573 bp, Homo sapiens
tcagtcctgtgagatagatattattattcacattttgcaaatgaaaaatttgaggcttggagtagttgataacttacctaaggatgcacagtgcatagttagtaaagccaaaaatgaaattgatgttctctttcataaaatgccattcttgttctttactccctaaataactaaagtaaagaactttactccctaaagaactaatttattattaaaatattcagaatctcatctatagatttggaaggattgcaaatatcaaggatccaataactaacatattaacagatcattaaagcagctggtagaaatggagaraaaacaattgtagaagccaaatttggaggtcaagaatgtgaccaagtttctatatggcacattttcctgataattgactgttgttcttaccatattgccctaaaatgcttcctgtgactgataattgacattatggtggcatgtgaggggcttagagaaaatgtcacactgttccagggcttaatcttgctactgggccttcctatagtatcccattctccacacttgtaggaataaacaacaaccatacaggtt

SEQ ID NO: 83761 - DNA, 727 bp, Homo sapiens
agctttcatgaactgaatgcctccccaaaggccccaccttccaacactgttgcagtgggattaggtttctaacatatgaattttgggagacacattcagaccatagcagcaaagctgtagactaattgaagaattagtctgtaggcaaataagtacaataagatgttctgagagaaggttgtgtatgacactgcaatgtaggaartgtgttgaatttgtgcttgttgagtaaaaaagtaaattgtatttgctaaatattttgtcttcattatcaactgatctgtataaacaataaaagtattctattatcttcattgtacctatgaaaatatattgagtagctgcatgctaatctttagatttactaattctaacttctgcccaagtttaagcactataattctgatatctaactctgttaccttaattatttgaaatgaaattaacaattaacatctgttttatgtggttatactgtcctctccacagccgtaattttacttaaaaacataaaccatatcttggcagaaaaagctattgcattgaacatattatgggcttaagacattgtacttaatttcagtttgtagaattatttatgatccaaaatgtctttaaacaagatatgttagtgtccttcccagcttgagattctatgattctaagatacacaaagaaacttttactatagcttgaggatagtggaaattagtgcacagaatttttt

SEQ ID NO: 83762 - DNA, 955 bp, Homo sapiens
gaatagttctctattaattttttaaaygtaatacaattttactttaaaaactgaaaaatcaacatatttcattaagaaaaaaatataaatgttgcaaaatgatgatgaaaataccgatagtaacaattcccaactataacaattttgttttatctaatactggtcagctttccatgtgtccaagcattacaggacttttcattaagcctaatcctcacaagaacattgctttgagtgatattccagagtggtagtcctttaaggcattcgaacgatttgtgaaatcactaaaaatactaggggaaatattcaaaaaatgacaatagtgccattattcctcctcctcaaagagactatcagaactaaaactctttgcttcatgttcctgtttacttctgtccctttcaagtcacagaggtattatcagactttcatcattatatgactctgcttttccaacagaatcaattacctatcccttatctcacatcttgatagtgatagatattgaatgcttatgttctgattagcaaactctttttgcatttttagtaacaacttgaactcctgatatgtctggaaaatataaccccttcaacagccctttcaatgggttgctactattttgctcaccccatcttcacctgcctaatcatgaggaggcggggtatatacaatttcggttaatttgtagttatcagtctattatagttctttccttctgaaaaccaacaagtaaataaaccagcaagcatcaccaataaactttgacagtttatggttcataacgtacgtctacaccaaactttccattcaaatgctttttcaaacctttggtttctttctctattaagacaacttttgcttttggctttcaaagacattctctccattataaactctgtcattattctctattgtgcttacctcaaactggtaactctttcaaatctta

SEQ ID NO: 83763 - DNA, 955 bp, Homo sapiens
gaatagttctctattaattttttaaatgtaatacaattttactttaaaaactgaaaaatcaacatatttcattaagaaaaaaatataaatgttgcaaaatgatgatgaaaataccgatagtaacaattcccaactataacaattttgttttatctaatactggtcagctttccatgtgtccaagcattacaggacttttcattaagcctaatcctcacaagaacattgctttgagtgatattccagagtggtagtcctttaaggcattmgaacgatttgtgaaatcactaaaaatactaggggaaatattcaaaaaatgacaatagtgccattattcctcctcctcaaagagactatcagaactaaaactctttgcttcatgttcctgtttacttctgtccctttcaagtcacagaggtattatcagactttcatcattatatgactctgcttttccaacagaatcaattacctatcccttatctcacatcttgatagtgatagatattgaatgcttatgttctgattagcaaactctttttgcatttttagtaacaacttgaactcctgatatgtctggaaaatataaccccttcaacagccctttcaatgggttgctactattttgctcaccccatcttcacctgcctaatcatgaggaggcggggtatatacaatttcggttaatttgtagttatcagtctattatagttctttccttctgaaaaccaacaagtaaataaaccagcaagcatcaccaataaactttgacagtttatggttcataacgtacgtctacaccaaactttccattcaaatgctttttcaaacctttggtttctttctctattaagacaacttttgcttttggctttcaaagacattctctccattataaactctgtcattattctctattgtgcttacctcaaactggtaactctttcaaatctta

SEQ ID NO: 83764 - DNA, 955 bp, Homo sapiens
gaatagttctctattaattttttaaatgtaatacaattttactttaaaaactgaaaaatcaacatatttcattaagaaaaaaatataaatgttgcaaaatgatgatgaaaataccgatagtaacaattcccaactataacaattttgttttatctaatactggtcagctttccatgtgtccaagcattacaggacttttcattaagcctaatcctcacaagaacattgctttgagtgatattccagagtggtagtcctttaaggcattcgaacgatttgtgaaatcactaaaaatactaggggaaatattcaaaaaatgacaatagtgccattattcctcctcctcaaagagactatcagaactaaaactctttgcttcatgttcctgtttacttctgtccctttcaagtcacagaggtattatcagactttcatcattatatgactctgcttttccaacagaatcaattacctatcccttatctcacatcttgatagtgatagatattgaatgcttatgttctgattagcaaactctttttgcatttttagtaacaacttgaactcctgatatgtctggaaaatataaccccttcaacagccctttcaatgggttgctactattttgctcaccccatcttcacctgcctaatcatgaggaggcggggtatatacaatttcrgttaatttgtagttatcagtctattatagttctttccttctgaaaaccaacaagtaaataaaccagcaagcatcaccaataaactttgacagtttatggttcataacgtacgtctacaccaaactttccattcaaatgctttttcaaacctttggtttctttctctattaagacaacttttgcttttggctttcaaagacattctctccattataaactctgtcattattctctattgtgcttacctcaaactggtaactctttcaaatctta

SEQ ID NO: 83765 - DNA, 670 bp, Homo sapiens
atactgtatatactacagttatgtaaaaagttaccactgggggaaactgggtaaatggtagggacctctctgtaacatttttgcaaagtcctgtgagtctgtaactatttcaaagtaaagagttaataaaactaacttaaaggtttatagggccaatattcaaaggaaactatactactctaactcagacaagggatccatacttttctagcatactaattattttattcacttccagtccatagtctagaaatctgaaaaacctactatttaataatacagtcatatactgcacaatgacgttttggtcaacaatggaccacatatatgacagcgatctcataaaataatactgagctgaaaaattcctatcgcctagcgacatcgtagctatcataatgtcctatcgcaacacatcactcacatgcttgtggtaatgcaggtaatgcaggtgttgcggtaggacatagatgtaaacaaaactactgtacttgataatgacaatacatagctgtgttactggcttatgtatttataactatatatttttttattcctactttaaagtacatcsccctcccccaaaaagttgactgtaaaatagtctcaggcaggtcctttgtgaggtattccaaaagaaggcattgttaacataggagatgacagctct

SEQ ID NO: 83766 - DNA, 3406 bp, Homo sapiens
tctaaattcaactaactccttaaatgtttctaattcctgtctcttacaatttttcaaaatatattttgatattgagtttacttgtatagaatgctcattgcggagatgattactttttatttataaggtactcctaacttttgtcttaattagttttagattatatatagtcaaccaataagaaaaatgtttaataaattagattttcagatctgtaagtgcattctataatgctaaaattcaacttttgttcataaaaatcagggagaaggtaaaaccaaaatagatacttattaaacaataaacaagtttaaccataatataaataatgcatcctgtgtgttcattttgggtgatttctctgcatgaaatatcttaaagtacaaatccagtgagcttggaattataacttgtatttttctgtatggttgtcccttaaataagcatttatgtcatttactgtattggattttttttcaaagacttgtttaaaaactcaaaaattgtcttatctgacccaatataaatttttgttcaaaattaactgaaatatctgtaaatggttaatatggtaggataaacagattatttctcttcagtgagtttttaatccttatttcacctaatttaaatatttattacaaatctgcctcttccaacttttcagctaacttttctgaaaaacagcttaatattttctccattgtagtttctctctctctctctgtatgtcagtccctttttctgtaacatattattttagttccacttgtctcatgttacatttgaattaaaagtttctatttttagtagcaggaatttaattgacctctactgactacattttatgtaggtatcagcccataattgaaaggttgaatatatgagtttggttatttttatccagatacagttaaagcaataaaagtgaagtcagttagcattcaccaaagttctaagaaatacattaatttcttttattaaacaaaatattatttgttaaygcaattgctttcacttatgacatagatgattactagcaaagaaaaagattatgtgggtgtcccttgatgaaacatgattaagtctatagtcagcaaaaattcaaatttcaattttccacatcctagttgcctgacattggcaagatacttagcctttttaaaatatatattttaaaggtttagaatattgtggattgcatgtgatgatatgcatagctgccttcgcacactatcttcgcacactataaaatatgtactcgataaatttcctaagattcaaatcaatgaaaaggatgcagtagataagcaagaacttctttttaccaaatttgttcagttattttcaaccatctgaaacacagcttgacctgggtttacacatagtctatattctaaaatatgtccttacctttctggaactcattgatgtggatattgtatatcctgatattatctaaaaattaataataaagcaaaaatattactaaaccctgaaatacccttgatgatagtccacattggactttagggattttattcatgaaggaatatttttaactcatataagttcctgattttacattagatacaatgaccataagcatataagaagagaatgcctgtatatagggagttataggaaattgctgtaaaaagtagaagtaatattaaaacaaaacagaacagaacaagtgaaacactaacttatgaaaaacaagcagtattctgtgaccaaggtatgcagggaatatttaatgcaggactattgaaagtttgtatagaagaatggactctgatggcatcaccaaataattacacagcacctcaattaataaaaataggaaaacaactaccttacttacagacataagaacatttatgaaaccatccattcaaattttagtcaacattttttaagaaatacactgtatgtagttgttcatgtattttatcagagaggtaactagtgttaagaaaattttattgtgtagaaattttcaatctgtttagagtatcaaatgtttaatatttttgtgtatttacaaatgtgtttacaaatatattttatatttgtctggctgtttaaattatgcttttgataaagcttcagtgctgctataatgtctaaggctcatcctactgtgtgaaaatatgaaatttctctctcatctgtaatagaaaaatgaatgtgtgatcctccttagaacaggatccataaaatgtctgctggcaaaagaaactcagaaagataaacataaaccttaactttagacaaacagttgaaagcctctcaatctgctttgttttgtcagcaacttctagcggtcatgctaagaattaaaaacatgcatattgctcagcaaaatccacatgaatattttacgtgtgtgtgtgtgtgtgtgtgtgtgtgtgtgtgtatgtgagtatgagtaatggaattttaagagtacagcactctggaaagtatgtagcagatataaactgaggccaaattttatatacatatatatatatatatatatatatatatatatatatatatatatggcatacattatgtattaatctgttctcatactgccaaaaagaactgcccaagactaggtaatttagaaaggaaaaagctttaattgactcacagttctacatggctagggaggcctcaggaaaattataatcatagtaaaaggcaaaggggaagcaaggaaccttcttcacaagatggcaggagggagaagtgccaagcaaagggggaagagaccccccttaagccacaagatcttctgagaactcactcgctatctcaagaacagcatgtgggaaaccgcccccatgattcaattaccttcaccttgtctctcccttgacacatggagattatggggatttgggggattacaattcaagatgagatttgggtggagacacaaagcctaaccatatcacattggtactcaatctttcaattaagtaaaaaaccaaaaaaagcaaatttaaagttattacatgtatttttgatgtctaaatatataatatcagattttttgtttttatccctaaatgtgtaaggatttaaggatcaagccgactttagtgagatcatgctaattcttttaagtgttattacaccaaggtggaatttctaagtgacgcctgtcttgattctcctaggcaaaatatttaattactgatctatgcaattacagctatccttatgatctttcattatagcatttaccaggttgcactggtagctattgactagcctgtgcttcttctcactattctcattattgttattctgtctttgagcaagagaactctgtctctttgtttgcctagttctagagtgtaaaaaaaaacaaacataatcattaacacccattgaatgtttacattga

SEQ ID NO: 83767 - DNA, 3406 bp, Homo sapiens
tctaaattcaactaactccttaaatgtttctaattcctgtctcttacaatttttcaaaatatattttgatattgagtttacttgtatagaatgctcattgcggagatgattactttttatttataaggtactcctaacttttgtcttaattagttttagattatatatagtcaaccaataagaaaaatgtttaataaattagattttcagatctgtaagtgcattctataatgctaaaattcaacttttgttcataaaaatcagggagaaggtaaaaccaaaatagatacttattaaacaataaacaagtttaaccataatataaataatgcatcctgtgtgttcattttgggtgatttctctgcatgaaatatcttaaagtacaaatccagtgagcttggaattataacttgtatttttctgtatggttgtcccttaaataagcatttatgtcatttactgtattggattttttttcaaagacttgtttaaaaactcaaaaattgtcttatctgacccaatataaatttttgttcaaaattaactgaaatatctgtaaatggttaatatggtaggataaacagattatttctcttcagtgagtttttaatccttatttcacctaatttaaatatttattacaaatctgcctcttccaacttttcagctaacttttctgaaaaacagcttaatattttctccattgtagtttctctctctctctctgtatgtcagtccctttttctgtaacatattattttagttccacttgtctcatgttacatttgaattaaaagtttctatttttagtagcaggaatttaattgacctctactgactacattttatgtaggtatcagcccataattgaaaggttgaatatatgagtttggttatttttatccagatacagttaaagcaataaaagtgaagtcagttagcattcaccaaagttctaagaaatacattaatttcttttattaaacaaaatattatttgttaacgcaattgctttcacttatgacatagatgattactagcaaagaaaaagattatgtgggtgtcccttgatgaaacatgattaagtctatagtcagcaaaaattcaaatttcaattttccacatcctagttgcctgacattggcaagatacttagcctttttaaaatatatattttaaaggtttagaatattgtggattgcatgtgatgatatgcatagctgccttcgcacactatcttcgcacactataaaatatgtactcgataaatttcctaagattcaaatcaatgaaaaggatgcagtagataagcaagaacttctttttaccaaatttgttcagttattttcaaccatctgaaacacagcttgacctgggtttacacatagtctatattctaaaatatgtccttacctttctggaactcattgatgtggatattgtatatcctgatattatctaaaaattaataataaagcaaaaatattactaaaccctgaaatacccttgatgatagtccacattggactttagggattttattcatgaaggaatatttttaactcatataagttcctgattttacattagatacaatgaccataagcatataagaagagaatgcctgtatatagggagttataggaaattgctgtaaaaagtagaagtaatattaaaacaaaacagaacagaamaagtgaaacactaacttatgaaaaacaagcagtattctgtgaccaaggtatgcagggaatatttaatgcaggactattgaaagtttgtatagaagaatggactctgatggcatcaccaaataattacacagcacctcaattaataaaaataggaaaacaactaccttacttacagacataagaacatttatgaaaccatccattcaaattttagtcaacattttttaagaaatacactgtatgtagttgttcatgtattttatcagagaggtaactagtgttaagaaaattttattgtgtagaaattttcaatctgtttagagtatcaaatgtttaatatttttgtgtatttacaaatgtgtttacaaatatattttatatttgtctggctgtttaaattatgcttttgataaagcttcagtgctgctataatgtctaaggctcatcctactgtgtgaaaatatgaaatttctctctcatctgtaatagaaaaatgaatgtgtgatcctccttagaacaggatccataaaatgtctgctggcaaaagaaactcagaaagataaacataaaccttaactttagacaaacagttgaaagcctctcaatctgctttgttttgtcagcaacttctagcggtcatgctaagaattaaaaacatgcatattgctcagcaaaatccacatgaatattttacgtgtgtgtgtgtgtgtgtgtgtgtgtgtgtgtgtatgtgagtatgagtaatggaattttaagagtacagcactctggaaagtatgtagcagatataaactgaggccaaattttatatacatatatatatatatatatatatatatatatatatatatatatatggcatacattatgtattaatctgttctcatactgccaaaaagaactgcccaagactaggtaatttagaaaggaaaaagctttaattgactcacagttctacatggctagggaggcctcaggaaaattataatcatagtaaaaggcaaaggggaagcaaggaaccttcttcacaagatggcaggagggagaagtgccaagcaaagggggaagagaccccccttaagccacaagatcttctgagaactcactcgctatctcaagaacagcatgtgggaaaccgcccccatgattcaattaccttcaccttgtctctcccttgacacatggagattatggggatttgggggattacaattcaagatgagatttgggtggagacacaaagcctaaccatatcacattggtactcaatctttcaattaagtaaaaaaccaaaaaaagcaaatttaaagttattacatgtatttttgatgtctaaatatataatatcagattttttgtttttatccctaaatgtgtaaggatttaaggatcaagccgactttagtgagatcatgctaattcttttaagtgttattacaccaaggtggaatttctaagtgacgcctgtcttgattctcctaggcaaaatatttaattactgatctatgcaattacagctatccttatgatctttcattatagcatttaccaggttgcactggtagctattgactagcctgtgcttcttctcactattctcattattgttattctgtctttgagcaagagaactctgtctctttgtttgcctagttctagagtgtaaaaaaaaacaaacataatcattaacacccattgaatgtttacattga

SEQ ID NO: 83768 - DNA, 632 bp, Homo sapiens
gtcacgaggtcaggagatcgagaccatcctggctaacacggtgaaatcccatctctactaaaaatacaaaaaaaattagccgggcgtggtggcgggtgcctgtagtcccagctactctggaggctgaggcaggagaatggcgtgaacccgggaggcggagcttgcagtgagctgagattgtgccactgcgctccagcctgggcaacagagagagactccatctcaaaaaaaaaaaaaaaaagtatttcttcatataattccagacagcaaaggagtctccatattctattccttattccatttctcaaagtataaatgcttaattttttaagcacacacacacaaataattattgctgtttttgtcttcactgaaatatttgtcaagctatagtccaagaagctatgaaggtcaccaratatctttcagggggtccataaagtaaaaaccattttaaaactattgctaagaagttattatcttttcaactgtcattcatttatgaatgcagagttaagttttctagatgctaatgatgtgatgatatcattctaatagtttaacaaaatgtggacttgtgcattcgtgtttttaaattttctatttttaatttaatatgaaatatatatgag

SEQ ID NO: 83769 - DNA, 582 bp, Homo sapiens
atcaggcacaaatgtaggccagtgaaaaactaagctctcatacacatagtatagaataaaaatctaagttgattttagtggaattaatttatatgaattcaagacaatatttaattttagtaaattagttaaacagaatataatagagataaaattctgtaataacatttgataaataggcaaaaaccatttatcatgacctaattyttacctttaaatctgataattttcttaataagttcaactgaagatctagcataaaaaaatctgtaagagttctctagggttatagtggtaaaattcatgcaaatgtactatagaatgcatacaaaaattttcatttttagaattatcatttcccatttgaactcccctaagatcttaattctttacaaataaggtatgcaaatatgcataatgccagtttcacaaatccttttctttatagcatggaacacatctggaatgcacttatttgaaataatcaatgatttttttaaatactattttggtggccagtttaatagttatagtgaaaaaaaacttcattaaaacattttataaaaagatgattgtcatgct

SEQ ID NO: 83770 - DNA, 747 bp, Homo sapiens
tactgtgtatccccacgccaaaatgggtttccatagatggtgattccttcctaaacttagactacattcatcttaggataatgtgtaaagttgctttccacaccccttagagcacagcctatagtggggaggtcctagacatttttctggtttataccacccatgatctaaccatctgcaaatctcaattgagttaagactatggaattgcattatgaatatttgactaawgaagtaaagctcctttcatttaacaatttcaatttctcaatttcaaatcaatttaaacatatatatacatttgtgtatttcatttagttttactattttttcattttatgtagatattactaatgtaattttatgtataaattcatatatatttgatttggacagaaaaaagtatggttcctgtattgtttcctcaaaagttgataattcatacgtaagagcatgaatgcttatttagcattggaactaatctttctggcttgtttgatcaattaattttcttttctaaaaacatttttattattttattttattttatacagatggggtcttgttacattggccaggcttgtcttgaattcctggcctcaagcaatcctcccatcttggcctcccaaaatgctgggattataggtgtgagctaccatgccagcccagttaactctatttaaccactcactggtaactgttttaagaaactcagcaagttgtgtgttgtttgggtacacctagaag

SEQ ID NO: 83771 - DNA, 759 bp, Homo sapiens
atatccaacctggctctttggctgggactctgattggcataattgtcaatttctagaataagtaggaataaatttatttacagcagctacatacaaaatatgcttcttatatggtctttccagtctaagcaaaaattattttctatcatttgaaagtccaacctaatactaataaactatgaagatggtttcttaacttggagttaaataaaaagtaatcagtgcacattgttacattgggagaaaagatatttctgatgtgatgaataaatttttggagataaattagcagcattacaaattttgccattgctgtcagtcaccttgagacaagtaaaagaaaaaagataatctcataattaataatatgttagccacttttgtgtctgacaatctagcagactatatttcctagaatatctttttaaaaaacaattaaaaatagtataaccatgcaatgggttcattttgcccattttccagatagagctgatttatcaagacagaggaattgcagaagagtttagttcatgcagagctgagtgaacmcaagaccagagttttattagtactcaaatcagtcttcccagaaattcagactgggttctttaaagattaatttagtaggtagggagccaggcactggggagggctgattggtcagatccaagatgtaatcatagaaagtcaaagctgtcctcttgtgctgaattagttactgggcgggggtcacaagaccaaatgagccagtttatcaat

SEQ ID NO: 83772 - DNA, 370 bp, Homo sapiens
agtggttgtcttacctcgagataagctgttgtacccctagctgactcagtcattggctagaggccacccagcagggagaaggcataacttcccaggggtttcccactggggcagctccatttgccatggacaagcctctggggaaggctggagttgcaacagctgtagaatgggtgcaacggccaaataacaggaatctggtcaggtcacccaaagcatctgatatatccaaattctgaccacattctatattcggtcattccaatcaaattacagatgtcagtttgtagctaggayattcgcatatttagtcaaggagctagaagtaaaagaattagataatattttcactaagtatttaagaccagca

SEQ ID NO: 83773 - DNA, 960 bp, Homo sapiens
aagtatttgtgtacctaacataaaaaagtacaataaaaatgtggtatcaaacactaaaaatggtgcacctatataaggcacttttcatgaacagagcttgcaggacttgaagttgctttggatgagtcagtgactggtgagtgaatatgaatgtttaggatgttactatacactgttgtagactttataaacactttacacttaagctacactaaatttattttaaaaataaagtaattgtgctatgctattctgtcagctacgaccatgaaaccactgttatataggcagtcaatcactaactaaaatttcatgtcattatgtgactatatataactatatatatatacacacacacatatagatacacataattttatttagtgtattgcatatatccacaattttaagaaaaattccacataaaaagtctaaactcttattatgacaaagattcttatttaaaactctttgtcagcttttcagttgcttctgaactgaccttatgacattttatcttgcttcttcaatattctttcttgctcatcaatcactgtttttttcttctgttcaatgtcatgataagactagtgatgcagtcacaaataatggatcatgagcaagattttgccatttatatcataaatatgacagtgcagtgcctgcagacagtgttatttccggtctgcatttctggacactgaggtcaataaaattgctactagccataaagcacagacatgagacatgctggtatgcagtggatattctaactggagaatgaattactgctttaggatgacaaaatcagggcatctaggggtttctggtagaaacttgattctattatattttggaatttttcccttgcacaccctcctatgattttctataaacctctatgacttggtctatttgcttmtttcaccactcctaaataaagcttttcctaaatttctc

SEQ ID NO: 83774 - DNA, 748 bp, Homo sapiens
agactgcatgctgaattatttcatttatgtaaatttctagaaaatgcaaagtaacttatagtgacagaaatcaaggcagtggatgcctaaggatctggtgggaggagtgaaggggagggatttcaaaaagggatgtgaaaactgaagggtgatggatctgttattaccttgactgcggtgatattttcacaggtatatacatatgmcagaatgtatcatattgtacaatttaagtatgtgcaatttatcatatgtcaattatacttcaataaagctgtaaagacagcaagttttaaatgttaaaaaaacagaaagaaagaaatgcaccccatattgtgcctcctttcctcatgtgtaacatagggctgataatagtacgtaattaacaaatgtttgtaaagataaagtgagtcaatatctgtaaggcagctagaacagggcccgttctcccactatgcaaatgttagctgttgttattggtggtggctgttgtgatgctgttgatgacattttttcacaggaagcacatacttctgactcacatcaatgttgatgaagcacagttttttttagcttttgcaacagaaggagattttaaagcccctttgagactgtagagaaaagagtgtttttagaaaagcatgtgtactggagaagaaaaaggcatctgagcaaaacttcattgaaatttatgaatgattctgaatacaagagataagccctcctttcttattcatttacatatgca

SEQ ID NO: 83775 - DNA, 748 bp, Homo sapiens
agactgcatgctgaattatttcatttatgtaaatttctagaaaatgcaaagtaacttatagtgacagaaatcaaggcagtggatgcctaaggatctggtgggaggagtgaaggggagggatttcaaaaagggatgtgaaaactgaagggtgatggatctgttattaccttgactgcggtgatattttcacaggtatatacatatgccagaatgtatcatattgtacaatttaagtatgtgcaatttatcatatgtcaattatacttcaataaagctgtaaagacagcaagttttaaatgttaaaaaaacagaaagaaagaaatgcaccccatattgtgcctcctttcctcatgtgtaacwtagggctgataatagtacgtaattaacaaatgtttgtaaagataaagtgagtcaatatctgtaaggcagctagaacagggcccgttctcccactatgcaaatgttagctgttgttattggtggtggctgttgtgatgctgttgatgacattttttcacaggaagcacatacttctgactcacatcaatgttgatgaagcacagttttttttagcttttgcaacagaaggagattttaaagcccctttgagactgtagagaaaagagtgtttttagaaaagcatgtgtactggagaagaaaaaggcatctgagcaaaacttcattgaaatttatgaatgattctgaatacaagagataagccctcctttcttattcatttacatatgca

SEQ ID NO: 83776 - DNA, 597 bp, Homo sapiens
aagaattaaaaattttaaatggaatctggtgtgtaaggccaagaaattgtcttgtcttagatcacccagctgatccccacgatatttctgctacgctagacccttgggacagagatgagatcatggcattgtcatttagacagacttactgaattgactctcaattttggaggaaggggtgcayagtaactgattctcctccctcaccatggagaaaactcttggacattgtcttcaggtcctggtcctttttcccttagccaagaattactggggaattagaaagaggagttctggatttttagcttcagctctattagtgactagaaacagttattaacttccttgggactcatctgtaatcatttatttctttgtaaataaaggcaatggtttccaaatctgggtactggaatccttttgggacctttataaaaatacagatttctaagccccacctccagattcagattcagattcagattagggtcatttataactgcctggtaataataattggggccccagattatgctgccagcttcaaaataaagccaataatttaattaccgacatgaacaattagaaagctgttac

SEQ ID NO: 83777 - DNA, 1352 bp, Homo sapiens
taaaaatgctgatcagactcactaaactgacttcacagtgtgctagtttgaaaagcaccattcttgaagggcacttaatgattactatgggattactgtaactatttctctcatttaaaaaataatttttaaaaatgtatgtggcctttggggtctgtttagcctgtgttcctgagttacttgtttgttcagtcygttttttacactatcatatgtttgccttttggagtcatctaggacaaataaatacttagaatatacactctttgtcattcttttcccctgagccctattctcataaaaataagaatccttgaatttttataactcatttctacataattcaaacctctattccctcattctctctcttatttttctaatatgcaaagtaggtggtagacatttgtagatgaaatatttgagccaaaaataattaagacttttccccctttaagcagcctattgtaaattaaggtaaatataatttctagatatttgaagaatataaatttgggtaatctgaataccatagatcctcaaaatgaatgcattcacctaaatcacccagataaaatggtttactgaccagatgagttggcaggccttttggacttcagtttgtaggtggatcctgctgccctctccattctcgtcttaccatctttatgtactcacactgtttttcaaccacctggagctatgtattttccttggtctctgcttattttggtccccgtgccaggaatgtccttccctctcttcttcactgggctaggtcctctcatctttcaggtccatgggaaactctccttattctctccacctctaccctggcctccacagcaccctgtcagggcactccaccagcggttgctggcagtgtccctcccaagttttgcaggctgagactatgtcttgtttattcttctattccacaatctaggaccatgtccagtccaggattaaatatatgttgaatatatcaacatatattcatgaaaaagtgaatgaatgagtgcataaagggcaggagcagctgccaatgaaagagctcaaataagagctgtggctagaatcatgtgtcctccttctctgagcccaacattttataattttgtgattccaagaccaatatttccgtgtttcctgcaagctgcagattttgcaactggaaattcaaacagtgaaggatagctggatctaaatatagtcttttaagtatgttgaggcataattaagaaaatgttgcaggaacaaataattaagcatattgggcaatttttttgaggcaattaaaacactcaaatttcaaaacagcttgctggaatccagcctgccctccaattgac

SEQ ID NO: 83778 - DNA, 1051 bp, Homo sapiens
tctcaaccatttaaatctgcagaacacatttttcaaatgaaattttgcatcataacaaagcagataactgctgaatgagtagctctggataaatagttgagggagtagatagtctcttcatcaccctttagatgacactcagcattattaaaaaatatattaaccaatttatgttaaaaaaagattaaacttcaataagtgtagttttggcagttgagtcaattatcttrtattcttactcttcacagattggttaacatgtacatcaggtttatgtccatagttaactttttcatgttacataagttttaaatttcatgttttaagtgtggaataaaagattatttatacctgataaattttgtggatgcacgcacacacacgcacatacacatagactcaataaaccaaaacattatattacccagaatttttcatgcctattatgtataaggagaattctatgtgcagttataattttaacatacaacttcataaagataaggcaaaattcaacttgcctcttactaaatcaaaacaacctgcacttaatatcacatgctaagctcctaaacatgaaacgatttactagatgaggcagttactggttcagttactatgaaccagtccctcacagataatctgtaggccatttcgtggttttaaaaaatgacagactaaggtcagattcagagggctgaacaaagtatatacgaggttgaaagcaaaaatctgtacatattacagaaatagttgtcagttaaaagcagtagaagtagaattatcaaaaacataaggtatgattttgtcactttcatttttagaaaaaaaaagggaaatttataagtgtttgttttaccactgaaatatcccattagagccccatctcatggatatcattattctttaagaaaaaactgttctctttgtgaattatagacatgaatacattcacagcaaaatgcttgtcagttgaaatatatgctatagtttttctcaccacttgtactggtttctctttaaaacagcaggacatgctcttgaggggatc

SEQ ID NO: 83779 - DNA, 1191 bp, Homo sapiens
attcactaataattatgtaataatgatgaaaataaatatattgcaatcaatttttatattgaaatactgagccttgggatcactggaaactgttgtggacatatcttaattctctcctaaaggacagtagcaccacctagtactagggattgctgtgagaataaaacttggcacatgctaatgtgaagctgattgactgggcagagtccacagtgaacttacttcacattgccaacttgtctgagtccagtgagacataatacccatgcacaataagctgcatgaagtggatttattatttgcagctatgcagcaagaaacaacagatacctagagtttattgtgattctgttccccaaccctcaagaaagcagcccagggtggatggaatttcatctgtgtgtctcccacttgcactgaagctgagggacagcaaaaagcggcccactctgagttctatacccctagacaatatgggttttcttggttaaagtattgaaggacattgtgtttttagggggaaaaggaacagagtcaggctgttaaggtcaatttctccttatctcaggatccatccaaaacattctaatgatcagcaaggaagggaagagaactgggtgggtccaaggccacctggagaaatgtcctgcagttaagtgctcaatatatgttatatatacttatggtcaatataattattaacacatactaaggtacatgtgatatagaaaggaaaatactgagctttacaataaaatacaaggccaaaaatttaatgtcataaaaactatattcattagagattacattattagtaagagtgtagaagaatggagcctcctataggttttccttgaagctggccaatctaactgttcactctacctgtgaaagcaataatcagggctttggggttaacatttcagaacagtctccttctggcgtcttctgtagtagacattaccactgcttacaaaacctaaagcctgtcccattataygacagagaaaagtaaatggcacatggttttccctgttgattttttaatatatttgctcttttatacaaaagtaaggtcaggattttcattaattagggtttattttccttttattttcttttcaattggaaatctctagtatcttttaaaccaacattcgttacagatccttagtcccatgtacaaaaaat

SEQ ID NO: 83780 - DNA, 784 bp, Homo sapiens
aaagaaattaaatggcccataaagcctaaatatttactcattgtcactttacagaaaaaagtttgccaactattgttttagaaaaattttactactaattagaaagcaccagatatttaaagtgcttttttaattcttttaatttttaactttaaaaggaaaagatctkcgttgaaggtgtgaagtaatgcaattaattgctctccactgtacttcatcctcttagcttctctcaaagcgacattaattaaaactatgccctcttttttaagatctgtaaaaaattattataaatctgtttcattaatgaaaatacatgcttcttcataattatttcaatattatttgaagtagataaagtaggttaatctagagagaaagttgttgtcaccactaaaattgacacaagatgctttaagtaaaagaaaagtgagaaatacaaatattaaagtaattttagtgttttccctcttgaggcagcataaggtatgttttcccattaagattgtttgtgtcaatatgaaatcttgcttttaacaatatatttttgcagcactaaaacccaagcagccctttatgaataatttagtaatttcatcagaatatttaattcactttgtacattactcatagtctttccttttgcatttcagtatgtgcatttcaatgattaaaatttatatttaaaatagtcataaagagtagtttgttaaacaattgtatactctgaataaaataggagagctccttcaagttaacaccatagagtagggaagtttagaca

SEQ ID NO: 83781 - DNA, 784 bp, Homo sapiens
aaagaaattaaatggcccataaagcctaaatatttactcattgtcactttacagaaaaaagtttgccaactattgttttagaaaaattttactactaattagaaagcaccagatatttaaagtgcttttttaattcttttaatttttaactttaaaaggaaaagatctgcgttgaaggtgtgaagtaatgcaattaattgctctccactgtacttcatcctcttagcttctctcaaagmgacattaattaaaactatgccctcttttttaagatctgtaaaaaattattataaatctgtttcattaatgaaaatacatgcttcttcataattatttcaatattatttgaagtagataaagtaggttaatctagagagaaagttgttgtcaccactaaaattgacacaagatgctttaagtaaaagaaaagtgagaaatacaaatattaaagtaattttagtgttttccctcttgaggcagcataaggtatgttttcccattaagattgtttgtgtcaatatgaaatcttgcttttaacaatatatttttgcagcactaaaacccaagcagccctttatgaataatttagtaatttcatcagaatatttaattcactttgtacattactcatagtctttccttttgcatttcagtatgtgcatttcaatgattaaaatttatatttaaaatagtcataaagagtagtttgttaaacaattgtatactctgaataaaataggagagctccttcaagttaacaccatagagtagggaagtttagaca

SEQ ID NO: 83782 - DNA, 738 bp, Homo sapiens
atatcttggtttcagcttttagtattatattacttctggaacaactgcaatagtctccaaatttatctccctgcctcttttgccatccaagtatatactgtatactatttctaattatcttctgaaaacatacatagaawtataccatcctgcttaaaaacgtgtataacttgcctgcgctaacaagacaaaatgtaaattcttagcatgactttaaagattttgcacaacctggccataaaccactcttctatcctcaacataggttattttctttcctaagagaaaatgtttctttcctactttcaagataaacattacccaatagcactttctgtgatgacaatgttctacatctacactcttcaatatgatagccgtaagtcacatgtggctattgagcacttgaaatgcgactagcgctactaagatactgaatattatattttgtttaattttaattaatttaacccaacctatctatatgtgcttagtggctattatattggacagcacagcttgggacgtatgctagtctactttttgttctcacatgtaaggctcagcccagctgacatagttccctctatcttaaatgttctttctaatttgttatcttgaaaactgcaactttttcttcaaaaaattacttcagtgaagccacactttctctggaattttccttgccaaacttccatcagtttatatgttttatgaatgaattatttacacatgaaa

SEQ ID NO: 83783 - DNA, 994 bp, Homo sapiens
tgaattatttcaaaatgagctgcagacatcatacttaacctccacatatttcctctcctaagaaattatattatcttgtataattaccaaagctttctaatacctaagaacaataattccatattatctaataaaaaatctacatgaacaattgtctcaaagatgttcaattgtttttgttatttactgtaatgcacgcaaccactctaaaacttaaaacaactattttattatcctacatgattctacaggttgactggggctcagctatatagttctattccatgtgatgttggctggggctatagtatattgggctggaacattcaagacgggtcgctcacttagctcataattgttgctggttgtcatttggtagttcagctaagaccagaataactatatttggccactccatgtggcttgggtctcccgcaacaggactgctcagttccgagagggaatgtctcaagagcaagtggtctaagagagaagaagcggaagctggcagttctcttacaaagagtaagcctggaactggtcacagcatcattctccagcattctattcactaagctgccagagggcctgcccagattcagggaaagaagaaataaattgcgaattttgatggcactcttgatgcagttatcctgaagccactacatttacactttaaaaaaaatccagaatcggccgcaggtggctcacgcctgtaatcccagcactttgggaggccgaggcgggcggatcacaaggtcaggagatagaggccatcctggctaacacggtgaaaccctgtctctactaaaaatacaaaaaaaaaaaaaaattagccgggcctggtggcaggcgccygtagtcccagctactcaggaggctgaggcaggagaatggcgtgaacccgggaggcggagcttccaatgagctgagacactccagcctgggcgacagagcgagactccgtctcaaaaaaaaaaaaaaaaatccagga

SEQ ID NO: 83784 - DNA, 607 bp, Homo sapiens
actcctgacttcaggtgatccactcatctcagcctcccaaagtgctgggattacaggagtgagccaacgtgcccagccagaccatgcttttttgatgacaccaaacaatgttcaagaatggctgaccaacaatgtcgactgctccaggcactgttagaactgarctgtcaccttcaaaaatgcttcaggccatgcatggtggctcatgcctataatcccagcactttggggggcctaggagggaggattgcttgagcccaggagttcaagaccagcctgggcaacatagaaagaccttgtctctacaaaaaagtgaaaaaattagccaggcctgtagtcccagctactcaggaggctgaggtgggaggatcacttgaggccagaaggtttagtctgcagtgagctgtgattgcaccactgcactccagcccagacgacagagcaagaccttgtctcaaaaaacaaaacaaaataaaaaatcaaaaaggcttctcacatccctgaggacctggcagagggggaatcttctcagaaccaaaggggtgtgtgtgtgtgtgtgtgtgtgtgtgtgtgtgtgtgtgtgtctgtgtgtgtgtgtgtgtgtgtg

SEQ ID NO: 83785 - DNA, 607 bp, Homo sapiens
actcctgacttcaggtgatccactcatctcagcctcccaaagtgctgggattacaggagtgagccaacgtgcccagccagaccatgcttttttgatgacaccaaacaatgttcaagaatggctgaccaacaatgtcgactgctccaggcactgttagaactgaactgtcaccttcaaaaatgcttcaggccatgcatggtggctcatgcctataatcccagcactttggggggcctaggagggaggattgcttgagcccaggagttcaagaccagcctgggcaacatagaaagaccttgtctctacaaaaaagtgaaaaaattagccaggcctgtagtcccagctactcaggaggctgaggtgggaggatcacttgaggccagaaggtttagtctgcagtgagctgtgattgcaccactgcactccagcccagacgacagagcaagaccttgtctcaaaaaacaaaacaaaataaaaaatcaaaaaggcttctcacatccctgaggacctggcagagggggaatcttctcagaaccaaaggggtgtgtgtgtgtgtgtgtgtgtgtstgtgtgtgtgtgtgtgtctgtgtgtgtgtgtgtgtgtgtg

SEQ ID NO: 83786 - DNA, 607 bp, Homo sapiens
actcctgacttcaggtgatccactcatctcagcctcccaaagtgctgggattacaggagtgagccaacgtgcccagccagaccatgcttttttgatgacaccaaacaatgttcaagaatggctgaccaacaatgtcgactgctccaggcactgttagaactgaactgtcaccttcaaaaatgcttcaggccatgcatggtggctcatgcctataatcccagcactttggggggcctaggagggaggattgcttgagcccaggagttcaagaccagcctgggcaacatagaaagaccttgtctctacaaaaaagtgaaaaaattagccaggcctgtagtcccagctactcaggaggctgaggtgggaggatcacttgaggccagaaggtttagtctgcagtgagctgtgattgcaccactgcactccagcccagacgacagagcaagaccttgtctcaaaaaacaaaacaaaataaaaaatcaaaaaggcttctcacatccctgaggacctggcagagggggaatcttctcagaaccaaaggggtgtgtgtgtgtgtgtgtgtgtgtgtgtgtgtgtgtgtgtgtstgtgtgtgtgtgtgtgtgtgtg

SEQ ID NO: 83787 - DNA, 607 bp, Homo sapiens
actcctgacttcaggtgatccactcatctcagcctcccaaagtgctgggattacaggagtgagccaacgtgcccagccagaccatgcttttttgatgacaccaaacaatgttcaagaatggctgaccaacaatgtcgactgctccaggcactgttagaactgaactgtcaccttcaaaaatgcttcaggccatgcatggtggctcatgcctataatcccagcactttggggggcctaggagggaggattgcttgagcccaggagttcaagaccagcctgggcaacatagaaagaccttgtctctacaaaaaagtgaaaaaattagccaggcctgtagtcccagctactcaggaggctgaggtgggaggatcacttgaggccagaaggtttagtctgcagtgagctgtgattgcaccactgcactccagcccagacgacagagcaagaccttgtctcaaaaaacaaaacaaaataaaaaatcaaaaaggcttctcacatccctgaggacctggcagagggggaatcttctcagaaccaaaggggtgtgtgtgtgtgtgtgtgtgtgtgtgtgtgtgtgtgtgtgtctgtgtstgtgtgtgtgtgtgtg

SEQ ID NO: 83788 - DNA, 775 bp, Homo sapiens
tataaaaaatatagaacaaagtaaactgtgtcatcggaatgtatgatgcatctgcagagatttccctacaccaagaatgtgagttctragaccttttcctcttcctcatcactaactgcgtattccattaactaaacagcaacctcgaaagaaatcaatactcggaaggtcctgtagtagcagccattccatggatgggacaccagaggtggggcaggagcaagggaggggttcctcaccctggcaggaaagctagaagcctagcctttgtcagtgaacacagcaaaccaagcttcttttctgaaatcttcttggaagcagatgaagtgcacacaaaagagggttcttctccacccccaggaggtgcattctggtggccaatgccagggaataatttcaaaggactgataaacctactaggaacaagacaggtcagtggccatttatgacctcccatacagaagaaaacaaacaaacactgctcctggaagatccagctcagaggatataagggcaaaatccaatttgccctgttttccataaggtgttgttatatatggatgaagggtttcagtttattttgtttcagccccataaacaaacatcgaaagtgtgtttacctagcgcctgcttcccatgtcttgctagagaacataagcaagacaaagaagaggagggactcccatcccagcacacctcagggtcctggatcctcaaggcactctgagtcctgagttgattctaggtatggggcctcttcacgggaaggaggcaa

SEQ ID NO: 83789 - DNA, 775 bp, Homo sapiens
tataaaaaatatagaacaaagtaaactgtgtcatcggaatgtatgatgcatctgcagagatttccctacaccaagaatgtgagttctgagaccttttcctcttcctcatcactaactgcgtattccattaactaaacagcaacctcgaaagaaatcaatactcggaaggtyctgtagtagcagccattccatggatgggacaccagaggtggggcaggagcaagggaggggttcctcaccctggcaggaaagctagaagcctagcctttgtcagtgaacacagcaaaccaagcttcttttctgaaatcttcttggaagcagatgaagtgcacacaaaagagggttcttctccacccccaggaggtgcattctggtggccaatgccagggaataatttcaaaggactgataaacctactaggaacaagacaggtcagtggccatttatgacctcccatacagaagaaaacaaacaaacactgctcctggaagatccagctcagaggatataagggcaaaatccaatttgccctgttttccataaggtgttgttatatatggatgaagggtttcagtttattttgtttcagccccataaacaaacatcgaaagtgtgtttacctagcgcctgcttcccatgtcttgctagagaacataagcaagacaaagaagaggagggactcccatcccagcacacctcagggtcctggatcctcaaggcactctgagtcctgagttgattctaggtatggggcctcttcacgggaaggaggcaa

SEQ ID NO: 83790 - DNA, 681 bp, Homo sapiens
tgcatgctgaagtttgagaaccactggcctagatgggatgcctcaggtacttcaataatagcacagtagtgtgcacttaccacagactgctggctctataagatatcctgacaagggacaacaaagacagtgagggtggcacttctgtgttcaamaatgtgtgaacattgcatattctgcttcccccttggaaattcttaaagatattggcatacttaagaccagaaagagtcttgcaataggaagagctgcttaactttactcaatcactatctcctaaattgagttttaattttaattatggagtttttctacttttttataatttcaacttttcaggggatacatgtgcaggtttgttacacaggtatactgcatggtgctgaggtttgaggtacaaatgatcctgtcacccaggtactgggcatagtacccaatatgtagtttttcaaccctcaccctctagtaacccccaatgtctgtgttcccatctttatgtccatgtgtacccaatgtttagctcccacttgtgagaacatgtggtatttgattttctgtttctgcattaatttgcttagaataatggcttccagctgcatctatattgctgcaaaggacatgatttcattcttttttatggttgtgtagtatttcgtggtgtgtatgtaccagattttcttt

SEQ ID NO: 83791 - DNA, 613 bp, Homo sapiens
tcccacccaagatgttgactattttcctactgatgggggaagttaccaaytaatcattcctaggcatcagtttcctcatctgttaaatggttataataccatcctcatgtatgagaagtgaaagaatgtccccaaagcactcagcttggagcctgccacatgcaatagatgttgcttacatcatcatcatcatcatcagaggaatgctcatgaatttggaaagggcgcttagccacaattttgggcaggggagtggaaaacagggctggtccattgattcataggagaaggatggtaaccctgactttcactttcctggtctgggctttgtggaaatggggaggaagtggcagaacaactatatgagaaaggaagtcagggaagatgggtgttaggaaaaaagagaaaccgaacttctccaaggcctggctagtgccagagtctgggctagaaacacaagatacttcatttagtcttccccagagcccagccaggcaggtaaggtttctgtcattttgcagaagaggaaactgaaggttagtgatcataagagacatgccccaagtcccttggctggttaggagattatgctgagacctgaacccagctctgg

SEQ ID NO: 83792 - DNA, 854 bp, Homo sapiens
aatatttactgagtactctgatcggagagtctgactttggctccaaacggctcacccacatctctcccacaggcgagacaggcaccagcccacgtgcactgagggaaaacccacagggagatggtggagttgcagctgcaagccaggacggccgctctgagaaggaacaggaggtgccctgagctctgagtttctataatggaagcacctttaattattcataaacacaagggtttaacattatttatagtattaaagttaatcatttatttagcacagtttctccaaacgagctcaagataacctttataatgctcatttagcagcaacttataataattagtacttgttccttttctgtctgcccagctagaccatagacatcccaaagggagggccagtatctgactggttgtctgctttatttcgtgtttagaacagtcttttacatagtaggtgcttaatatgtattggtagatgaaatacgtcaattaagaccttggcttttcatttgacttccaaaaaggcacttagaaaatcaaaaaaagatactatttcaaggcttccttcagttcaggtaggttcagctcccaaatttggatcaccttacgtgtctttctctggggtcgtctaaagagccctgtacagagttaggaggcctggtactctttccaccactgaccagccatgtgagtcaggcctaataaccttaaaaatgaaacacaaacccaccgctctagtaatatcattgcatttttaaacaggtcttagaaatggaaaagtctggacttgaagggccagcattgacttagacaggcactgacttaggtcactgatcaakaatttttcatgtg

SEQ ID NO: 83793 - DNA, 756 bp, Homo sapiens
ggtcatgagtgcatgtatggctctggggattcaggctgctcctctatcaagtcataggagagttctccatgtgtcctgggcatagaaatttgacccgaggtggctgccaaagctgggggctggggggttgctggtcttcgaaggggacccagttttttggcagccttttctgtcctctgtacatctacacagaaccagagaaatgggctgactttttaataaatccaaatcagtttcattttttaaaattgaaatttcacaggtcatcagcctaccccatggcccactgcccttggagaggatggaaaaataattggaatcatatgagccagtttgatcagaaaagtgaatgtggtttggagtgaaggcctggattccctgtccttggtgactaacttgacctcaccttccccaagcctaaaccctgtagagatgaagctgccttcctgcctggggaaattagctcaacttaagaggcaagaggtcacctacttccccagaggccaagattgttcaccaccagaacaaacagttgaaaagtgaaaaattcagctacacaatggagtgkttccaaacctttgatggatggctgtccccaccctccagctcactgaagtgattatttgtttgagtgggctgtagacacagttgtagacaacacaactttatcagtgtcgccaatggtcagagtttgctgggagaaactattatatttcaagcttgcaaatggctctaaaaaccatgacgtgggaaagg

SEQ ID NO: 83794 - DNA, 756 bp, Homo sapiens
ggtcatgagtgcatgtatggctctggggattcaggctgctcctctatcaagtcataggagagttctccatgtgtcctgggcatagaaatttgacccgaggtggctgccaaagctgggggctggggggttgctggtcttcgaaggggacccagttttttggcagccttttctgtcctctgtacatctacacagaaccagagaaatgggctgactttttaataaatccaaatcagtttcattttttaaaattgaaatttcacaggtcatcagcctaccccatggcccactgcccttggagaggatggaaaaataattggaatcatatgagccagtttgatcagaaaagtgaatgtggtttggagtgaaggcctggattccctgtccttggtgactaacttgacctcaccttccccaagcctaaaccctgtagagatgaagctgccttcctgcctggggaaattagctcaacttaagaggcaagaggtcacctacttccccagaggccaagattgttcaccaccagaacaaacagttgaaaagtgaaaaattcagctacacaatggagtgtttccaaacctttgatggatggctgyccccaccctccagctcactgaagtgattatttgtttgagtgggctgtagacacagttgtagacaacacaactttatcagtgtcgccaatggtcagagtttgctgggagaaactattatatttcaagcttgcaaatggctctaaaaaccatgacgtgggaaagg

SEQ ID NO: 83795 - DNA, 756 bp, Homo sapiens
ggtcatgagtgcatgtatggctctggggattcaggctgctcctctatcaagtcataggagagttctccatgtgtcctgggcatagaaatttgacccgaggtggctgccaaagctgggggctggggggttgctggtcttcgaaggggacccagttttttggcagccttttctgtcctctgtacatctacacagaaccagagaaatgggctgactttttaataaatccaaatcagtttcattttttaaaattgaaatttcacaggtcatcagcctaccccatggcccactgcccttggagaggatggaaaaataattggaatcatatgagccagtttgatcagaaaagtgaatgtggtttggagtgaaggcctggattccctgtccttggtgactaacttgacctcaccttccccaagcctaaaccctgtagagatgaagctgccttcctgcctggggaaattagctcaacttaagaggcaagaggtcacctacttccccagaggccaagattgttcaccaccagaacaaacagttgaaaagtgaaaaattcagctacacaatggagtgtttccaaacctttgatggatggctgtccccaccctccagctcaytgaagtgattatttgtttgagtgggctgtagacacagttgtagacaacacaactttatcagtgtcgccaatggtcagagtttgctgggagaaactattatatttcaagcttgcaaatggctctaaaaaccatgacgtgggaaagg

SEQ ID NO: 83796 - DNA, 756 bp, Homo sapiens
ggtcatgagtgcatgtatggctctggggattcaggctgctcctctatcaagtcataggagagttctccatgtgtcctgggcatagaaatttgacccgaggtggctgccaaagctgggggctggggggttgctggtcttcgaaggggacccagttttttggcagccttttctgtcctctgtacatctacacagaaccagagaaatgggctgactttttaataaatccaaatcagtttcattttttaaaattgaaatttcacaggtcatcagcctaccccatggcccactgcccttggagaggatggaaaaataattggaatcatatgagccagtttgatcagaaaagtgaatgtggtttggagtgaaggcctggattccctgtccttggtgactaacttgacctcaccttccccaagcctaaaccctgtagagatgaagctgccttcctgcctggggaaattagctcaacttaagaggcaagaggtcacctacttccccagaggccaagattgttcaccaccagaacaaacagttgaaaagtgaaaaattcagctacacaatggagtgtttccaaacctttgatggatggctgtccccaccctccagctcactgaagtgattatttgtttgagtgggctgtagacacagttgtagacaacacaactttatcartgtcgccaatggtcagagtttgctgggagaaactattatatttcaagcttgcaaatggctctaaaaaccatgacgtgggaaagg

SEQ ID NO: 83797 - DNA, 1059 bp, Homo sapiens
ataaatgaggctaaatattaatggcaggtaaatctgtttttaaaaaacatgtgatccttgtttcttatataataaatgtgataagcatgtgatgagactgagccaacattagtgaaatatgggctttaaaatgttttccagaagcagttattctatcctgtgatgtcctctgtgaccaaaaactaaatgaaggatgtctttggaagactctaaagctaactggacaatttggaaactgacctctaactatactttgattaataccactggcgaatcattcatagggtatatacaaatacaaatttggcctcttgtttaaagggtttctgtagttcaatcattatgaactcctaactgatacttagtagaacagcatataggtccatatttataattcaaatcattggcaattaaaagcgttactatcrgccgggcacagtggctcatgcctgtaatctcagcactttgagaggccgaggcgggcagatcacctgaagttgggagttcaagaccaggctgaccaacatggagaaaccccgtctctactaaaaatacaaaattagtcgggcatggtggcacatgtctgtaatcccagccactcggcaggctgaggcaggagaatcacttgaacccagaagtggaggttgcggtgagccaagatcacaccattgcactccagcctgggcaacaagagcgaaactccatctcaaaaaaaagaaaaaggttactatcagtaaatgctagctgaaactacagtaacaatttataaacagtaattctctactaaaatttaccaaaacataattctttctgagaacattattgtcacaagttttattacatgcttatattataaacctaccaataatatatttattaatatgataaatactaatttaaatctgttcttaatatgacaaaactgtgttattctaaaatccatgaagatgagctattccaaatgagaactttttctaaataactgaagggctagtaacactgtattccttctaaaccacaaaggtatagtgtggtatgcagaatgatgctccctcccaa

SEQ ID NO: 83798 - DNA, 1059 bp, Homo sapiens
ataaatgaggctaaatattaatggcaggtaaatctgtttttaaaaaacatgtgatccttgtttcttatataataaatgtgataagcatgtgatgagactgagccaacattagtgaaatatgggctttaaaatgttttccagaagcagttattctatcctgtgatgtcctctgtgaccaaaaactaaatgaaggatgtctttggaagactctaaagctaactggacaatttggaaactgacctctaactatactttgattaataccactggcgaatcattcatagggtatatacaaatacaaatttggcctcttgtttaaagggtttctgtagttcaatcattatgaactcctaactgatacttagtagaacagcatataggtccatatttataattcaaatcattggcaattaaaagcgttactatcggccgggcacagtggctcatgcctgtaatctcagcactttgagaggccgaggcgggcagatcacctgaagttgggagttcaagaccaggctgaccaacatggagaaaccccgtctctactaaaaatacaaaattagtcgggcatggtggcacatgtctgtaatcccagccactcggcaggctgaggcaggagaatcacttgaacccagaagtggaggttgcggtgagccaagatcacaccattgcactccagcctgggcaacaagagcgaaactccatctcaaaaaaaagaaaaaggttactatcagtaaatgctagctgaaactacagtaacaatttataaacagtaattctctactaaaatttaccaaaacataattctttctgagaacattattgtcacaagttttattacatgcttatattataaacctaccaataatatatttattaatatgataaatactaatttaaatctgttcttaatatgacaaaactgtgttattctaamatccatgaagatgagctattccaaatgagaactttttctaaataactgaagggctagtaacactgtattccttctaaaccacaaaggtatagtgtggtatgcagaatgatgctccctcccaa

SEQ ID NO: 83799 - DNA, 632 bp, Homo sapiens
catgcttgggagacatgagaccatatcctggagagacaaattttataactcagatgcaaggttccagtctgaggtagcacactcaccacaggtaagttcatatcccatacatggagatttggattccacacaagtattgccaagttgcatgtttgtggggccaagttccttgactgaacattgtgtttccactagyggagtggcaagtccatgcttgtagggtcaggtgtcatactctgagatggaaattccacacatcagtttttatgattatagtgctaaattccatgtttggagattaagattacatatgtgtagtgcaaaattggcgaggttttgcatgttggatagtcaacatgtattctatacctagatgtctatgagccacatgtagaagtcctggttccagacctagaaggccaaattctatgcctagaggagtaggattcatatttggagctactttctgtgtctggaaagtcggatgctgtacttagaggtctacgttccatgactgaatggccaggaaggacagatttcatgcttagagggctggtttccactcctggagatctaaattcatgcttgtaaggctggatcttatgtgaaaaaccatattttatgcttggaaa

SEQ ID NO: 83800 - DNA, 657 bp, Homo sapiens
atcataaatttttaagttgccaacttcaatttttatacttgatttgcaaagagatatttgaatcataagcaggatgagtaaagtttctgaaatagcattaaagtgatgctatttttctgatgctagacattcccaaatagttgaattatatttagaccagaagatggcataagagttatagcaatagaaaattatacacaataggatggactcccttaaaggactgcattgcaaaccrgaatctacattatataattctcctttctcattaaagaaagcttttttccctgtgcaaatttctccttccttttaaattacataatgactgcagacataaacaacacacacacacacacatacaaattaaagttaaaagtatccaatctcacaatctagagacagctatcaccaacatcctggggcctgtgtatccatgctttttccgatggaatcaaatatataaactgctctaccaactgccactttcatttagcaacaggtaatgggtatttgggggttaaaaatgttctgtgtgatcatttaagggcagcatggtgttccagtgtagcatgtaccctaatttatttcatcactcccttactgttagataagtaagctgtttccagtgttttattatgatacacaattatgcagtga

SEQ ID NO: 83801 - DNA, 670 bp, Homo sapiens
gtgtgggaatgaaaaaaaaaaattaaaataaagaaataaaggccrggtgtggtggctcatgcctataatcccagccctttgggaggccgaggtgtttgagtccaacctgggcagcaaagaaagaattagtccctacagaaaattaaaacagtgtagtattccactctttgaatgtaccagtcccctatttttggaagttttgtttttttccagtttggggccattataagcaaggctgcagtgaataaatttgtgtatacattattttcctttattccagtatttctgtaagatacattctaaaaagtggaattcctgggtcaaaggaaatgtgaatttggccaagtcagttgtgaagaagtgcaaagggggagacttgccccagaagacaataagacaagtcacagaaaaatagaatagtaccagacaagtagacaaatagacaagtagaacatgttaaagaacccaggaacaggccgggcacggtctctcacgcctgtaatcccagcactttgggaggccaaggcaggtggatcacctgaggtcaggagttcgagaccagcctggccaacatggcgaaacctcgtctctattaaaaatacaaaaattagccagacgtgggggcgggtgcctataatcccagctactcgggaggctgaggcaggagaat

SEQ ID NO: 83802 - DNA, 591 bp, Homo sapiens
tcagcaagatggggggtggagctgcggggggcatgaagacaagacctggtggtcagggaggggtgactcaccttgcgttatacctctgacctcagaaagtccttaatcttgttcctgtgctgccccctgtaattctagtccacagctgttggttctgagctgaaaaatgagctttttgtgggtactctgagtctttttgtgggagkgggcctgaaggctcagactctaagaaaatggcctcctcccccacgctggcctctgggtagtgggtgggaggctgagggtggaattgacagatggtgcggtgtttaacagatgacgggaaacaaaattactcagctgccgtgtctctccatcttccccatggaaggagatggccttcggactggaaacagacaatgacctcaatcaggaggctgtcagaggacagggaaagagagaagcgacggggtattaggggtattagggcaccatgaacaggtgtacaaaagacctgactcagaatcccatccctgccacacaccagctgggtgatcttcagcagatctcacagagtctctgttttctcatctgtaagatgggtcaatgaaa

SEQ ID NO: 83803 - DNA, 591 bp, Homo sapiens
tcagcaagatggggggtggagctgcggggggcatgaagacaagacctggtggtcagggaggggtgactcaccttgcgttatacctctgacctcagaaagtccttaatcttgttcctgtgctgccccctgtaattctagtccacagctgttggttctgagctgaaaaatgagctttttgtgggtactctgagtctttttgtgggagtgggcctgaaggctcagactctaagaaaatggcctcctcccccacgctggcctctgggtagtgggtgggaggctgagggtggaattgacagatggtgcggtgtttaacagatgacgggaaacaaaattactcagctgccrtgtctctccatcttccccatggaaggagatggccttcggactggaaacagacaatgacctcaatcaggaggctgtcagaggacagggaaagagagaagcgacggggtattaggggtattagggcaccatgaacaggtgtacaaaagacctgactcagaatcccatccctgccacacaccagctgggtgatcttcagcagatctcacagagtctctgttttctcatctgtaagatgggtcaatgaaa

SEQ ID NO: 83804 - DNA, 587 bp, Homo sapiens
ataaataaaagaaagaaaaaatattttaaaattcactgagcagatattcctttctttgtttacaaagaagcagaaattttgccctcacctcactttaagtaaaatgaagggttaaaagaccatttaatcacatctaagattaatacraatagttactctgaaggcactgaccactgcaatgcaactaaaaaatataacaatttaaatatattactatgctttaagaaacaaattttaatggtgaatacattttttaaaataccaagaagagtatgagcttaaatcagagttatagggtggttattagaaagccaaagtgaaagtctgtgcttctatatgaattctagtcctagaaaattagccttggaacctcagaaacacaagtgagtgaaaccttacacttctacagaggaatagagcaggatgttcaagtggtactgtattaattgttccttcctggaagaagccaacaaaatctttggagaaaagcatcccacaacagaggaaaccaatggctcaattacaacatctctagtcactgaacacattcactcttcataatgcctctctcatagctagacaatgga

SEQ ID NO: 83805 - DNA, 1082 bp, Homo sapiens
acatttaattaaacttttttgggcttggattttcctgtatgcaggaagtgtgaattgaaccctagatctgctggagagcagatttaggattgcaaattcttagtgagaatcattattgttttatctcatttgtagcaggatgaaaaggacaggcaactatgtatcagtcagaataggctgagtaatgctgagtaagaaacaacagccaaatctcagtgacttacccaagaagagttcctttttctcttgtgcaaagcctgatacggatctgaaaatctcttttggagagttgtcctccatgcaatggctttcaaaacacacggcttcaattccatggtgtttttaacttaatgtgatgtgttagaatttaccacaacaggaagaagagagcttgggggaattaagcaccaagaaatctacatggaagtgacacatgttattttttcttccaaatgataattgagagaagaaaatttactgaagaaaaaaaagtaaatgagaaggaaaaaatgattgtaaaaagaagtaagcagaaggaaagttctaggaggtgaagtagagtcttcctttgtttaagacattagggacccagctgaggaaagcatttctcaaatatggcatcayggtcactatttttactagaactacaagctcctgttgctttggggagtagtaggtctagaaggttcatatttccctaccgtagaagacaaacaactttcatacattgctgcttttgagtcttggttatttccatatctatccagtgcagattcagggagagggctgggaagtgattgattcagcaccaatgactaatttgagtaattcaggatctcaaacatgacttcttatttaattaactggatgttgcacataaagctgtcgcatgcccttaattttgattattcttttctctctccaaatttttattccctgcctcctttttatcccccttctttctattcataactcagactagccattggccaccatcagtttttacaaggttattactgttaaaagtatttattaaccattcaatatatgattagccattttctatttgtccaattgtttta

SEQ ID NO: 83806 - DNA, 1333 bp, Homo sapiens
caaactgcttcctaaaacatcggatcacccagccctggtgtgcttacccacaggaagtaagaggtcaggctccgtcccagccagtccatgatgttgaagaggaggaagcagcagatggggttgaagaactgacctgggagggaaacggctgcagctcatactggtctccaactcccctctcccgtcctctcccctttgtaccccctgccctgccgtcttctccaccctgacactcactccacttcccaggactggtggagctggtcaccatggctgtgatggcggggaagacggacagggtgactgtgaagaccaacacaaggcacagcgctgtcagccagatctgggagccagaggcaggggtgtgagcaggcagggcagtcccagggccccaccctcttgcccaagccccatgtgggagcaggacacttgggcctggcccagctgtgtccctgacccactgtgaccctatgaccttggagtcaatgtgagccccattcttccccaaagatggtggttgggggctgtatccaagccaaaccttctggaagacagtgaagactgaaggttttcctggcttctggggctcatctggctctgattccggctccttctccaggtcaagatccagggtcagagctactttctggggactactgggaatcccgttctcatctggggtgaggggggacggggaagggtcatgcttgtgacccaggtttcccgacagccaggcccaacgaagggagattcccagcagttaaaacaagtgatcctcagctcagcatggtcgtcacgcctgtaatcccaacattttggaaggccgaggcgggcatattgcttgagcccaggagttcgagaccagcctgggcaacatggtgaatccccatytctacaaaaataaaaaaattagccgggcatggcagcctgcacctatagtcccagctactcgggagactgaggtggctcacttgagcccaggaggtcgaggctgcagttgagttgtgatagcactgcagtgcagcctaggtgacagagtgagatcctgactcaaaataacaacaaccccctcaccccaaaacaaaaaaaggtgatcttcctccagcctaagctgaggctgcaggcgaagggaattcatgatggaaatatgcatagctaccaggaagcgcgtgcatgggtcgggtgatgagcgaagcaccttagatggattatctcattaccattgctttacaaatgacacattgaggttcagaggggtgcagtggctaagtggtttgtctcaggccacacagctgggatgttgtgaaactagtattccaattcagaggtcttc

SEQ ID NO: 83807 - DNA, 804 bp, Homo sapiens
agatagaatgtatgaaaggaagatagaaagaatgaaaraatatagagtagagaaagactgactatggaacagaaaacaaacttaaaaaacttcaactgtaaaatgacttgttggtttacctctgcattacttcttgatatgatttggctctgtgtcctgatccaaatctcatcttgaattataatccccacatgtccagggagggacctggtaggaggtgattggaccatggggacagttttccccatgctgttctcatgacagtgagtgagttctcatgagttctgatggtttaaaagtgtttggcagttccccatctctctctctttctctcattccaccacataagatatgccttgcttcccattcgccttctgggatgattgtaagtttcctgagacctcctcagccatgtggaagtgtaagtcagttaaacctcttttgtttataaattacccagtctcagggagttctttacagcagtatggaaatgctcatacacttcttttgtttcaattattaattgaattataactcatactgtaaataccaatgtcagtttaaaaaatctggaatattctaaatacttttatcagaataaggacaatatataagggtggcaaaagtcatacatgtccactagaagaacagatctcacctagccatttctaatgacacagtctaggaacaataaaactcagttctaaatataaacaatagtagagaagtactcttggtctaataagatacagctgtaggctgaaaacacatactgcctaccagttgtattataacagttctaaa

SEQ ID NO: 83808 - DNA, 804 bp, Homo sapiens
agatagaatgtatgaaaggaagatagaaagaatgaaagaatatagagtagagaaagactgactatggaacagaaaacaaacttaaaaaacttcaactgtaaaatgacttgttggtttacctctgcattacttcttgatatgatttggctctgtgtcctgatccaaatctcatcttgaattataatccccacatgtccagggagggacctggtaggaggtgattggaccatggggacagttttccccatgctgttctcatgacagtgagtgagttctcatgagttctgatggtttaaaagtgtttggcagttccccatctctctctctttctctcattccaccacataagatatgccttgcttcccattcgccttctgggatgattgtaagtttcctgagacctcctcagccatgtggaagtgtaagtcagttaaacctcttttgtttataaattacccagtctcagggagttctttacagcagtatggaaatgctcatacacttcttttgtttcaattattaattgaattataactcatactgtaaataccaatgycagtttaaaaaatctggaatattctaaatacttttatcagaataaggacaatatataagggtggcaaaagtcatacatgtccactagaagaacagatctcacctagccatttctaatgacacagtctaggaacaataaaactcagttctaaatataaacaatagtagagaagtactcttggtctaataagatacagctgtaggctgaaaacacatactgcctaccagttgtattataacagttctaaa

SEQ ID NO: 83809 - DNA, 2106 bp, Homo sapiens
catatgaatatataatgaaactggtaaaatatgtccatgctttcatatacaaaaaattaatattataggacaatcttagtggaatcttaaaatagttgggttatgattcttaaaagtttattgtagtaagtaactttagcaacatattttcaagggactgctgtcaattctttctcttcccaaacatgtatgtagtttcctcataagaaatagtgtctatttcttcctttatcttgaatcagtgtctgaatacggactaaacatggctaaatgtagtaggtagtatgttctgggactagatcatargaatcttgaagttcctatctgagcactcactcttgtatccccaggagacttgataggaagcctcaatatccttgaaagaagaatacatggagaggccccgagactacactgagggaagatagtcccatccagtcctgaccatctacttctagccatcaaaatatagaagttactttgtttttgaccctccataccaaaacaggcaccacatgaataccactgagtgaacctaacttttgccacctggtatagaactgtccagcggagtctgctcaattttctgacacatacagttatgaaatatattaaatgactgctattttaattcaaaaagtttgtgagtatttggttctgcagcaattagtaaccaaaacattaacaaagcaaaattcttttgataacttttacaatccacattcaaactaaaaaattaacgggaaaattaaatgaattggcttagatctgcaactcaagctgatatgggtaagtagtttaaccacaatatccaaatgatctctttgtttaattatttatctttaacatttatttataatcttacatgaaacagtttccagctagtcaatattaattatgttaacatgtgatatgatagaagatgaaaacattgatgtattataataattttatgctataataataaaagctgggtttctgtttaatatgtaaaaacatgcatctctatttttatttattcataatgtactcatttatttcctgatgagatcttaactcctagtacaggatttcataaaacttgagatatttagcatataaaactgccaattgcttcaaatagtgttctaaattagaatgtgcatttttgaagaaattgtattcagcctttgtttattgactgtagagatgagatcctggaaaatctactgagggaagtacagttcaaattggtaatcaccagggagaataaatcattttatggatcaaaataaataaagtcatattagacctttggtgaaaacagtaaagtagaacatggaaatgcacagcagggaatgtgctatatgagagatttctcttactgtatgatgggtaggtaagtccactcagcttactgcttctcaatctttttatctacataaatttgcccacacaaatttagattattatgtgactaaaatactaagaaatatagtaattctaagatgccccattctaaaacagtgccaattctattgccagagggggaaaaatgtataattgagaaatctgaaactcattttaaaaatattgattttatttgcatagaggtgtttatagaaaatctagaggaaatggacacattcctgggaacatacactctcccaagactgaaccagaaagaagttgaattgctgaatttaccaataacaagttctgaaattgaggtagcagtaaacagactaccaaccaaaaaaagcccaggatcagatggatttatagctgaactctaccagagttacaaagaagagctttcttctattcacaatagcatcacaatacatatcaatgatagattggataaagaaaatgtggtacctatacaatcatggaatactatgcagccataaatagaacaagatcatgtcctttgcagggacatggatgatgctggaagccattgttctcagcaaacaaatgctggaacagaagaccaaacaccccatgttctcacttataagtgggagctgaacaatgagaacaaatggactcatggcagggaataacacacactgggggctttcagtgggggttgggagagcatcaggaagaatagctaatgca

SEQ ID NO: 83810 - DNA, 2106 bp, Homo sapiens
catatgaatatataatgaaactggtaaaatatgtccatgctttcatatacaaaaaattaatattataggacaatcttagtggaatcttaaaatagttgggttatgattcttaaaagtttattgtagtaagtaactttagcaacatattttcaagggactgctgtcaattctttctcttcccaaacatgtatgtagtttcctcataagaaatagtgtctatttcttcctttatcttgaatcagtgtctgaatacggactaaacatggctaaatgtagtaggtagtatgttctgggactagatcataggaatcttgaagttcctatctgagcactcactcttgtatccccaggagacttgataggaagcctcaatatccttgaaagaagaatacatggagaggccccgagactacactgagggaagatagtcccatccagtcctgaccatctacttctagccatcaaaatatagaagttactttgtttttgaccctccataccaaaacaggcaccacatgaataccactgagtgaacctaacttttgccacctggtatagaactgtccagcggagtctgctcaattttctgacacatacagttatgaaatatattaaatgactgctattttaattcaaaaagtttgtgagtatttggttctgcagcaattagtaaccaaaacattaacaaagcaaaattcttttgataacttttacaatccacattcaaactaaaaaattaacgggaaaattaaatgaattggcttagatctgcaactcaagctgatatgggtaagtagtttaaccacaatatccaaatgatctctttgtttaattatttatctttaacatttatttataatcttacatgaaacagtttccagctagtcaatattaattatgttaacatgtgatatgatagaagatgaaaacattgatgtattataataattttatgctataataataaaagctgggtttctgtttaatatgtaaaaacatgcatctctatttttatttattcataatgtactcatttatttcctgatgagatcttaactcctagtacaggatttcataaaacttgagatatttagcatataaaactgccaattgcttcaaatagtgttctaaattagaatgtgcatttttgaagaaattgtattcagcctttgtttattgactgtagagatgagatcctggaaaatctactgagggaagtacagttcaaattggtaatcaccagggagaataaatcattttatggatcaaaataaataaagtcatattagacctttggtgaaaacagtaaagtagaacatggaaatgcacagcagggaatgtgctatatgagagatttctcttactgtatgatgggtaggtaagtccactcagcttactgcttctcaatctttttatctacataaatttgcccacacaaatttagattattatgtgactaaaatactaagaaatatagtaattctaagatgccccattctaaaacagtgccaattctattgscagagggggaaaaatgtataattgagaaatctgaaactcattttaaaaatattgattttatttgcatagaggtgtttatagaaaatctagaggaaatggacacattcctgggaacatacactctcccaagactgaaccagaaagaagttgaattgctgaatttaccaataacaagttctgaaattgaggtagcagtaaacagactaccaaccaaaaaaagcccaggatcagatggatttatagctgaactctaccagagttacaaagaagagctttcttctattcacaatagcatcacaatacatatcaatgatagattggataaagaaaatgtggtacctatacaatcatggaatactatgcagccataaatagaacaagatcatgtcctttgcagggacatggatgatgctggaagccattgttctcagcaaacaaatgctggaacagaagaccaaacaccccatgttctcacttataagtgggagctgaacaatgagaacaaatggactcatggcagggaataacacacactgggggctttcagtgggggttgggagagcatcaggaagaatagctaatgca

SEQ ID NO: 83811 - DNA, 1190 bp, Homo sapiens
tgtgcctcattcagttggaaaatgcctatcagcattctcttttctgacacacagtaattagaaagttaattttgcaaatctcataagcttagcactttaaagatttatctgcattatttaaatggcatattttataatatttggagcattctaagcaactttattaaattcaaataaattattattttagctaaaaatgacattgagtttctttcaaaataatttctatttttgccatcatgaattttaaagaagcttttaaccttgaaagatcartaaagagaaaaaaaagataaaattataatggtttaacctcataatatatttttatcaagatattgccataatttcagaggagaagctgtggtgtttcaggtagattttcttttatattttatcagtatcagtaatagtcttttaaaattcaatttatttcttctggcactcatacactctataatattatattataatgtcaatttttttgagaaaatagagtcattaaaataacttccagctaagtaatttaatttatcattggaatcatgatattggagtaaaacaaagacattaaccaaaataattcataaatttgaagtgtttcttaacattgatttgttggcaaaagttgtgaagttggctttggaaataaaaatttatattatacacataaagagaaattatgtaaactatatatatattaagttttgcaatgtgaaaagagctaatataagataaaaacacagatacaataatctattatttttataatttatacttgctattaattgaaaatctcagcaaaaataaaccttttatattagattataattacattatcactcatgaataaataaggtcagtttcatgaaatgatcatgaattcaatcagatacttatatattttgttatattttcactctttgtatattgccggtgactccagcattgaaaagctcatttatctattattattgtcagtgcttattaaaggatttaggtcagacattgaatgctgggtcattagttaatagtgtaacagccagcatttccagttactatgtatgtaagctaaaggtctccaacactgcaaatctttccactatatcacaaagaaatatattgctctcagcaaaatgtactttgtaggagttttaaactcactatttattataatgttcatcacttcc

SEQ ID NO: 83812 - DNA, 1081 bp, Homo sapiens
ttggacttggacttttgggttaatgctggaatgagttaagacattgggggactgttgggaaggcatgactggttttgaaatgtaaagatatgaaattttggagcrgccagaggtggactgatatggtttggctgtgtccccaccaacatctcagcttaactgtagctctcataatccccatgtgacataggagggacccagtgggaggtaactaaattgtaggggtaggtttttctcatgctgttctcatgaccgtgaataagtctcatgagatctaatggttttataaaaggcagttaccctgcacattctctcttgcctgccactatgaaagacatgactttgatcctcattttccttccaccatgattttaagacctccccagccatgtcgaactgtgagtcaattaaacgtctttcctttatgaattacttagtctaggatatgtctttactagcagcttgaatacagactaataaagggcaatagaaaaaaaataataaaggtgagatatttcaaaatactgtatcttcaaatatttgctgtactttattttaatttcttgatttattaagagtatctcttatataatcaggaaaaaaatctacatctcatttaatgttttattgacagaggcagagagtgaccaaaaataaatatcagttgattaactgaatagctcatgactatataatggaatatatattcatggttttataacttaagtgactaaagaccccattttattccacatttggaagatccacacaacttctttttttcacccattccttttaaattttatagactgcttcttcttgaatgcatatttactttgattcctctaggaatgagaacgttatcaatcaggcaatgggctctgttcagtagtctttaacttaaaatgtgaaattcaagcaaagttcaagaagttttttccctatatctgcccttcagtggacacaaatggaaactgcaactttttatagagaactttaagcttaggaatcatttaatggaaaaactctccaggctgctatatctttgggttcagagaatttagcctgtaataaaataata

SEQ ID NO: 83813 - DNA, 1081 bp, Homo sapiens
ttggacttggacttttgggttaatgctggaatgagttaagacattgggggactgttgggaaggcatgactggttttgaaatgtaaagatatgaaattttggagcggccagaggtggactgatatggtttggctgtgtccccaccaacatctcagcttaactgtagctctcataatccccatgtgacataggagggacccagtgggaggtaactaaattgtaggggtaggtttttctcatgctgttctcatgaccgtgaataagtctcatgagatctaatggttttataaaaggcagttaccctgcacattctctcttgcctgccactatgaaagacatgactttgatcctcattttccttccaccatgattttaagacctccccagccatgtcgaactgtgagtcaattaaacgtctttcctttatgaattacttagtctaggatatgtctttactagcagcttgaatacagactaataaagggcaatagaaaaaaaataataaaggtgagatatttcaaaatactgtatcttcaaatatttgctgtactttattttaatttcttgatttattaagagtatctcttatataatcaggaaaaaaatctacatctcatttaatgttttattgacagaggcagagagtgaccaaaaataratatcagttgattaactgaatagctcatgactatataatggaatatatattcatggttttataacttaagtgactaaagaccccattttattccacatttggaagatccacacaacttctttttttcacccattccttttaaattttatagactgcttcttcttgaatgcatatttactttgattcctctaggaatgagaacgttatcaatcaggcaatgggctctgttcagtagtctttaacttaaaatgtgaaattcaagcaaagttcaagaagttttttccctatatctgcccttcagtggacacaaatggaaactgcaactttttatagagaactttaagcttaggaatcatttaatggaaaaactctccaggctgctatatctttgggttcagagaatttagcctgtaataaaataata

SEQ ID NO: 83814 - DNA, 976 bp, Homo sapiens
ggtgtgtgtgtgtgtgtgtgtgtgtgtatgtgttggaggagacaggaaagaaagatgatctttgaaaaaaaatatggactttgaaattagacagacttgattattctcaacgtgaacttgataggacatagatatcaatatatagacagaaacctaaaatccataattctttcccagatgtctatctaactagctctatgattttgggaaaactatatcacctttctaagtctcatctgtaatattgaaataaataatcatacctaaattggaaagttattgtgagatcagagggttaaacaagataaatatttagcagtaagcatttaaactcactcaataaatagttactgggaatgtctgcactgcttcttaagaaacagcaggctggwcccttcgctgacagtttagccttgtccccaagtacctatgtgaagcttttctttatgttaagatgtgctgaaccactctattcacattagccaggatatggaataaactaagtgtatatcaacagatgaatgaaaatgatatatgtgcatacagaatggatattattaatctgtaaaagaatgaaattctgtcattctcaacaacatggatgagcctggaggatattaggttaaataagtcaagtacagaaagataaatatcacgtgttttcatatgtgagagctaaaaaaaattgagctcatataagtagaaagtagaattgtgattatgggagattgggaaaggttggggattggagaggattggaagagattggttaatgggtacacaatttacagttatatgggaagaagtatttctagtgtttttgtagcacttttgggtgaatatggttaacaataattgagtgtacattttcgaaaagctagaagaaaggattttgaatgttcacaacacaaagttataaatgtttgaggtgatggacatgctaattatcccaatttgatcattacgcattgtatgc

SEQ ID NO: 83815 - DNA, 758 bp, Homo sapiens
caaagtatctatttcatcagttctatgaggaaaaacagaaccattcacttcataatgaaaaacagtggttagcatgtttttgaatgggattttctgtattttaaagccttttcatgtattttagctcattgaagaggtgggcacagcaaaggcatcattattacttctgttctacagctgaggatgttgaaattgacatgcccaatgcaaggctacacagcttgtctaggaacggaagccagatcttggatttttgtttgtttttgagacagggtctcactctgtcacccagggtggagcgcagtggcgtgatctcggctcaccgcaacctccgcctcctggattcaagcaattctcttgcttcagcctcctcagtggytgggattacaggcgtgcaccaccacgcccagctaatttttgtatttttagtagagatggggtttcgccatattgaccaggctggtctcaaactcctgacctcaagtgatccatccgcctctgcttcccaaagtgctgggattacaggcatgagccactgagccccgccagatctcggatttcttactgctggacagggaaaagtgactggagagtaaattatggtctctgagcccatttagaggcaaggcttggataaaaaaagaagggaagagaaaattctagatgagagctgaagctggagaaaggatgagaacgggaaactcggctgtgccaagaggcagagaagagaaggcatgaggtccaacttagctggagtt

SEQ ID NO: 83816 - DNA, 1525 bp, Homo sapiens
ggggtgggcacagtggctcatgcctataatttcagcactttgggaggccgaggtgggaggattgcttgagcccaggagtttgagaccagccggggcaacccatctctacaaaaaaatacaaaaaattagtcaggcatggtggtgtgtgactgtagtcccagctactcaggagtctgaggtgggaggatcgcttgagcctgggcagtagaggctgcagtgagccatgatcgcaacactacactccagcctgggtgacagagagagaccctgtcacaaacaaacaaacaaacattgcaatggatgggatgaccagacragattctcctgtcttcagccaaaagcattcatttccctgtgtgctttggtggctgctgcccttcccccactgcccaagatggccttccttctactttccagttgccaagcacaattccaaatacataatgaataccctcagactcaccgatggacaaaaagtccatctgcatcttcttagtatgtgccatgataatataccctgggggtgctggatacgattcactaaggctgatggttttcctgcccctaatgtctgtctatccttttcactaagtctgggaccttttcaggatcccaaaggactagatgggaagaaatagaaaaaggagattctaaaagaacattcggtcccatttatttcacagtgagctcctggaatggtgggtccaaatactataatctaggactccccaacccatgggccatggactggtacctgtctgtagcctgttaggaaccaggccacgcagcaggaggtgagcagccagtgaaggcagcttcatctgtatttacagctgctccccatcactcacattactgcctgagctctgcctcctgtcaggtcaccaggggcattagattcttataggagtgtcaaccttgtgaactgtgcatgccagggatctaggctgcacgctccttatgagactctaatgcctgatgatctgtcactgtctcccatcacccccagatgggaccgtctagtccagaacaacaagctcagggctcccactgattccacattatgacgagttatataattatttcattatatattaaaatgtaataataataaagtgcacaataaatgtaatgcacttgaatcattctgaaaccatccccctgcaatgccccctccccagtctgtagaaaaattgtcttccatgaaaccggttcctggtgccaaaaacgttggggaccactgctataatccatagcagcaatgtggtccctgcccaggccactcacagcagctcagcaagaagctccagaacccaaatgcgattattgtgctcatctcccctgacaggctctaggaccaggagcctctggaatggctcaaatcctggctctgctgcttactgcactgtaaactctgccaagtgcccgaatggccctgaggcgcagttccttcacctgtaacccggtgcaaggagatgtcggtgccctacctggtacagctggggtggggatcacatgagatgac

SEQ ID NO: 83817 - DNA, 1301 bp, Homo sapiens
tggtcttttatgatctggccttggaagccacatacttgcttgcaccatatactgttgattgactggacaccaatcaatgggtccaaagctctcaatgggctgtcacagaatttgcagacatttttaaaaaccaccacacatcccccaaggatgtgcctttcattcgttaactcattcatcaaatatttattggttctcatgccccttccttttgtataatttgtgccctgcacaaggattcccagcctggagattagagggtgaaatgcagcctacagactcttcaccaaaccatatgcctggcttggggttgtgtctgcctagaggaaggggcatttttttccgtttgcaccaaggtgctatctatttgtcaagctatctgccctgagaggttactattttctaaatcaytggctcagaagaggcatctttttctaattttcatataggcactgtaaagattagtggggctgggtgcagtggcttgcacctgtaatcccagcactttgggaggccgaggcaggaggatcatttgagcccaggagttcgagaccagcctgggcaaaatagtgagacttcatctctgcataaaataagaaaattagccgaacatggtggcacacagctgtagtcccagctactcaggtggctgaggcaggaggatcacttgagcccaggaatttgaggctgtggtgagctacgatctcaccactgcattccagcctgagccacagagcgagacctccatttctaaataaaataaaataaaaattaaattaaaatttaaaagactaataggaacactggttgttcacccactgtgtgaagacattggtggaaaagccacgggtaagatagatgaaacctctgctctcggtaagcttgtgttctattggggaatgaagacaataagcaagaaagcacacacttgaaaaaatacaaatctaattacagattggaaacagcattatggaagaaaagcccctcacgtgagcatctccactgtgctggttgctgaaggcagaggctggagtctggaggctgaggctgccttatcttggacccccacctctcagaggacatcaaacaacggaggaacgaacaagagcaaacagacatagcctgtgtccaagaggattttaatcccacattacgagggaattccagaatgtcaacatataaggcctttaaaatcaagaatctcattcatccagaatagtttacgtaccttcctgccaggaggagagaatggggaggaattcctaggcctcctcccgccacatcattctttgaattttgaa

SEQ ID NO: 83818 - DNA, 1666 bp, Homo sapiens
gtggagtgggaacagagggacatggtgggtgagcagctggccaaggcctttgcaagcatagcagcttgctcaattctaggcatactcaagacccattattcttcctttcgcttctgaagtcctaggatactgaggttcagagaaggtcaatgacttgcccaaggtcacacgttaatagacaaattatcaaatttctctctcaacttgataagttccaaagctcaggtcaggactcactctctccaaccaccttcccagatgaggtcgaagcccccatgataggtacagtcttgtgtgtccccctcctccttcccatgtaccatggttgcaccattccatttcttcctttgaaaatttgatgggtgccaggagcggtggctcacacctgtaatcccagcactttgggaagctgaggtgggtggatcacctgaggtcaggagttcaagacaaggctggccaacatggggaaaccttgtctttaccaaaaatacaaacattagtcaggtgtggtggcatgtgcctatgggctgaggcaggagaatcgcttgaacccaggaggcagaggttactgtgagccgagatcgcaccactacactccagcctaggtgacacagcgaaagtccatctaaaaaaaaaaaagaaaatttgatgatgggcctctaaagtcacagaagccccagtgtctccttttgcccactcctctcttcccaaccgtagcacagttccttgcccccagttagagctccataagcatttgtgaaaaagagccacagcagtgcagagcagcagccccagccacaaagattccagaaagcgccccttcattcatctgcaaagagcaggagaaactttaaggctatagtgcccaaaccgtttgtaacactcaagtgaactggcattcacatcatcttcctgctttcattaaacagttccacatcactcacctagtgaatgggcctttttagcagggaagatgatcatccattaagcctggaagggcaggaggcctgcggacacctctgccccctctgccagctccgtggatccctctaaataatacaaggcttgtttgcaatcaagttagaacatgtttaatggtgaataaatctgatgctgaatcgggataattgcactggcgtcacagagctgactcaatacctggccaaggcatcccatatttagaagggtggagacatttttagctcgcctttgtgtgtgtgctgctcattatacaaacgtggctccaattaaaggccctgccacctgatcggggccccctggtctccggctgcaggtgcacgtttgtggggctggaagacaaggcctgggacaggtgctgtgatctccctttgtttgctgaaaccaacaaacagcaaggtcagcaccttcaggtgaaggccaggtgctggagggagtgaagggagtagggagagtgacatcagtatgacctggtgtcgggrgcatgcccaagctctgtccttccatggcctttggcatggtgcataatgcttctaagtctcagtttcaacatctgtgaaatggggatttcacagactatggtagtcaggattcaagatggcccccaagacttccatttcctatagaatcccctctcttgagtgtgggcggcaactgtgaatatgatgggataatttgcccccctgag

SEQ ID NO: 83819 - DNA, 1666 bp, Homo sapiens
gtggagtgggaacagagggacatggtgggtgagcagctggccaaggcctttgcaagcatagcagcttgctcaattctaggcatactcaagacccattattcttcctttcgcttctgaagtcctaggatactgaggttcagagaaggtcaatgacttgcccaaggtcacacgttaatagacaaattatcaaatttctctctcaacttgataagttccaaagctcaggtcaggactcactctctccaaccaccttcccagatgaggtcgaagcccccatgataggtacagtcttgtgtgtccccctcctccttcccatgtaccatggttgcaccattccatttcttcctttgaaaatttgatgggtgccaggagcggtggctcacacctgtaatcccagcactttgggaagctgaggtgggtggatcacctgaggtcaggagttcaagacaaggctggccaacatggggaaaccttgtctttaccaaaaatacaaacattagtcaggtgtggtggcatgtgcctatgggctgaggcaggagaatcgcttgaacccaggaggcagaggttactgtgagccgagatcgcaccactacactccagcctaggtgacacagcgaaagtccatctaaaaaaaaaaaagaaaatttgatgatgggcctctaaagtcacagaagccccagtgtctccttttgcccactcctctcttcccaaccgtagcacagttccttgcccccagttagagctccataagcatttgtgaaaaagagccacagcagtgcagagcagcagccccagccacaaagattccagaaagcgccccttcattcatctgcaaagagcaggagaaactttaaggctatagtgcccaaaccgtttgtaacactcaagtgaactggcattcacatcatcttcctgctttcattaaacagttccacatcactcacctagtgaatgggcctttttagcagggaagatgatcatccattaagcctggaagggcaggaggcctgcggacacctctgccccctctgccagctccgtggatccctctaaataatacaaggcttgtttgcaatcaagttagaacatgtttaatggtgaataaatctgatgctgaatcgggataattgcactggcgtcacagagctgactcaatacctggccaaggcatcccatatttagaagggtggagacatttttagctcgcctttgtgtgtgtgctgctcattatacaaacgtggctccaattaaaggccctgccacctgatcggggccccctggtctccggctgcaggtgcacgtttgtggggctggaagacaaggcctgggacaggtgctgtgatctccctttgtttgctgaaaccaacaaacagcaaggtcagcaccttcaggtgaaggccaggtgctggagggagtgaagggagtagggagagtgacatcagtatgacctggtgtcgggggcatgcccaagctctgtccttccatggcctttggcatggtgcataatgcttctaagtctcagtttcaacatctgtgaaatrgggatttcacagactatggtagtcaggattcaagatggcccccaagacttccatttcctatagaatcccctctcttgagtgtgggcggcaactgtgaatatgatgggataatttgcccccctgag

SEQ ID NO: 83820 - DNA, 689 bp, Homo sapiens
tatgttgatcagctcaatttagcctttccatcatgtttacatatttcaaaataatgtgttgtgcacaatatatatgtgcaatttttgtcaattaaaaataaattaaaaaaattaaaaaatggctttcccacagcctgtcgacttccatccccatgtgtggctctccccagggcctcccttcttgttctccccagttgcagacctcagacaggagtctgcttgtcttcctaggcccttgtcagagtggaaggtggccctccaccacaccagcccactttccagttatcaaaaaggatctttgatttaatatttccagagcaattttggtgatttccattcaaatctgttttttgtcataactaccttgcttgcctatgggacatgttcccatttcagtgcatacttgacctttaccataaatcacatatttgtaaactgtaccctcctgctgttttattrggcatggagaagcagtcttttctttttcttgatggcctgggttgaccagatcctgacttttgtggagacattaaagtgctagaaatgataatggtgaaagattcagaagttgaaggagatataaggagagaaatggacaattcttttggtaattgaatgaaataagactcttaggaaaattctccccagtggcaatgttgtaagaaacaccaggccgggcacagtggctc

SEQ ID NO: 83821 - DNA, 660 bp, Homo sapiens
acccaggctggagtgcagtggcatgatcatggctcactgcagcctcccgggctcaagctttccacccacctcagcctcctgagttgctgggaccacaagtatgcaccaacatgcctggttaatttttgtggttttttttttttttttttttttcctgctgagatggggatttcaccatgttctccaggctggtttcaaactcctgagtccaggtgatccacccatcttggcctcccagagtgctgggattacaggtgtgagccaytatgcccaataccccctatgtagacttttaaagaaatacaggaaacagccaagactggtgtcattcagatttagcttgggagagtctagtgggtgttaggttcccacaggatgaaggatcaccatgaacggtcaggacctgacttaggaggactcagaagctggagactgcagaggatggcacagagttccaaatctttggggtgtgtaagagtaggagaggcaggatgggagaggatgggagtgatgccacataaatcaactctgttgcagcctccggggccacatcagtagctgcaggaggaggagggaacagggagacagggagcctttcttcctttcctcacccccagttctgtgtttatacttctcatttagcccataccccactatatt

SEQ ID NO: 83822 - DNA, 656 bp, Homo sapiens
caaacatgcactcccatcccagcctcacaccaagctcccatctgggaagcagcagacacacataaaagcaaggaaacttcaaggacgctttttgttttcccctacttttaaaaaattgaggtgaaattcacataatataagattaaccatttcaaagtagacagttcaatagcagtacattcacaatggtgtgtaaatacygcatctatttccaaaatatttgtatctccccacaataaaagtctgtaccaattaagcagctactacccattcctcttccctaccattctaccttctgtctcagtaggtttgcttatttgggatattttatttaagtgggatcatacaatagcatcatgtgttcaaggttgacccacattgtggcatgtatcagtacttcattcccttttatcactgaatagtattccactgtatattgataccacagttggttgacccattcatccatccatgggcatttgggttatttccacctttttgctcttgtgaatccatgctgctgtgaataattgcatatgagtatttgggttcctgtttttaattatgttgggtatatacctaggagtggaagtgctgggtcacgcagtaattctttttaactttttggggaaatatcaaaccgttttccacagtgg

SEQ ID NO: 83823 - DNA, 656 bp, Homo sapiens
caaacatgcactcccatcccagcctcacaccaagctcccatctgggaagcagcagacacacataaaagcaaggaaacttcaaggacgctttttgttttcccctacttttaaaaaattgaggtgaaattcacataatataagattaaccatttcaaagtagacagttcaatagcagtacattcacaatggtgtgtaaataccgcatctatttccaaaatatttgtatctccccacaataaaagtctgtaccaattaagcagctactacccattcctcttccctaccattctaccttctgtctcagtaggtttgcytatttgggatattttatttaagtgggatcatacaatagcatcatgtgttcaaggttgacccacattgtggcatgtatcagtacttcattcccttttatcactgaatagtattccactgtatattgataccacagttggttgacccattcatccatccatgggcatttgggttatttccacctttttgctcttgtgaatccatgctgctgtgaataattgcatatgagtatttgggttcctgtttttaattatgttgggtatatacctaggagtggaagtgctgggtcacgcagtaattctttttaactttttggggaaatatcaaaccgttttccacagtgg

SEQ ID NO: 83824 - DNA, 599 bp, Homo sapiens
gtcaaggatcagactggcactttcaagaagtcattcaatagaagcaacgcttgtttccacctttcaatgtataagttaaaaacatcagttaataacgataatgaaagagtccttcatgcatgctgagcactgtgctagccgcttacctacacacatcaaagtcatctaatttttactattacacctattgtatatactaagaaattgagtcttaactacatcgattaactcctctaasagctcccagatcataggtggtagagccaagatttgaacacagaatgacttcaggtgtggccaatcccctctgtttctatttctcttagtccctcagtgaaaaaatctttaaaactgactgtcttccaagttccttctacaaacacatgtggagcatcttctgtgaaggcagtaggctctgctctgggcccgagtacaaagcgtgaaaacccacagacccttcactcaagaagctcagagcccagtggagaagggagaagagcagccaacaccttagatcagagagaatgaactgatgtgcagtccaacatgtcctgggtcccagcagaagagaaaaacgtccccattttactcatggtgca

SEQ ID NO: 83825 - DNA, 709 bp, Homo sapiens
tatgcctgaactcacgtctacccctggacttcccacttacttatctaatgcacttgcttttcctccctgaagctattttaagttgagttcagttctgtctctcatcctcaatgttggtcttaattttatcctcagaatccacaaagaacaaatcaaaatttcctgcagaaaaatttttcataaatcaaaaaccatttttttaaycctaatttctgctaccatgccaaccacctctattcatctggtagaggtttaattcacgaagctcattgtaaagtttcctggcaccctcacaggaaacaagttatacatagatttttttttcatttaaaaaaacactcatgtggccattcaaagctacatctctcttctcttcagctgcaagtaggcaaagtcagcacctctcacctgcccacgtgtccaggaagcatctaccacagaggaaatggcagtgcccaggtatgatgggaactcttgatgacaggagagcctgtcccattacatcactgaacagaaaagctcaaagacaagaccaagagtgaatcttagcagacagtcaagaaggatgagaaatgagggcatccacaggcatttgctcatcatgaaattctgatgcatcacttaaaatccagggacacatgaatagaagcaataaaagctattttaattaaatttgagctataattctgggtttcttgttttgttttgg

SEQ ID NO: 83826 - DNA, 663 bp, Homo sapiens
ggaggaagctgcaccataggagggtttgtcaaaggcctcacatgtcatgaatgatgcagcaaatgcagatacttatatggaggtcaacgggcaataattctatgaggcaagaatgggacttaaattacaaagttgaacataaagggtactgtctaatgaatgcaggaagagtgatgagttttcgatttttcagccaaaagaggtgccatctgatgggcattatctggtgggagtcagggcaaaaagtaggccccatggcatggttgacagastggggagaaagctgtagtgggtatactgtttgagacgctacttgaagagggtgaaacctgacccaaggaaatctccaattcctaaatccaaggtatttcatagagagtgaaagatagcccagggtgtggtgaatgagaaatggagagagcaggaaaacagaaagaaaaccacagagagaccacagaggtggactgtgctgagtatgctggaaggaggaacggaaaagatagattcttaagccaagcaaaaagccaagggatgctggtggcaatgtaggcatggccttctaagatcttgagacagtctgaggcagctcctttaagaagctgaattcttggctgggtgtagtggctcacgcctgtaatcccatcactttgggaggcagaggca

SEQ ID NO: 83827 - DNA, 1048 bp, Homo sapiens
ttgcttcacaacatacataaaatccaggtgggccaagagctgaaatatcaaaaaaacaagtcttaaaaatatataagtgaacatctttccgggaggaaagagttaaaaataagacacaaaaagtaatacatataaaagaagggattaataaacttgatgatattaaaattaataacagaaaagataaactaggccaggcatggtggctcacggcccataatcccagcactttgggagggtgaggtgggtggatcacttgaggctaggagtttgwgaccagcctgggtaacacgacaaaaccccatctctactgaaaatacaaaaaaaaaaaaaattatccgggcttaatggtacgtgcctatagtcccagctaccctggaagctgaggtgggctcaatctcttgagtgcaggaggcgaagattgcagtgagccaaggttgtgccactacactccagcctgggcaacagagccaagactctatctcaaaaaaaaataataataataataattgaactatgggtatgtacaatgttagcattaggggcagctggctaaagggtataaaaagaattctttactctttttgcaacttttctgtacatctaaaattatttcacaactacaaaaaattagtatcaggagtctggaattttttcctatagcacctcccaccccaagcactgcaggactgccagccccctcttccctcctcagtgcagtgagagctgtggccagtgcctagacggggactgaaggcggaacaggatcctaccagcagctttccagatctagaacatcttggctctttaggaaacttgattagatgccaaaagaaaaaggttggaatttaaaggttattccttaactgagaaaaataagtagtcgatgccaggtagatgcttttctaccctgggttatatgatggtaagttaaatactaagacaggtattgagttggccacttggaggaagactcgggcacagacacagtgcagtcacagtcctttccccaaagtcattttttaagccctttattgagatagaattc

SEQ ID NO: 83828 - DNA, 655 bp, Homo sapiens
aagtccttaggctgtagggaacaaaaggggcaacttgaacacatcccgccattttttttttgaacctcccccctttttcctgattacctagctgtcatccccaaaataagtatcaacttgcctgccctgagcagctgtgagcacatctttccccttgatcccatccatatgtagatagcaatccctcccctggaagagaggtcttaaagtcaaggtatctgaagcgggaaagtgagttctcgcccctgacttcaatccttctcgtataattgaaggkcatcttttcttgcatcatcccccatggagatacagcacagcaggtcactctcctccaataacctcggaaatgtgatgcccactccagttgtctcctcagcagacaattctctgtattcgtataaacttaattccccaccctgcttttaaatttttttaaagtgctttgaattttacaacagctttagatctgcagaaaaatatgtgaaaatggtatagatatttcctgtatccccttcactaagtttccccttttattaacatcttacattagtatggtttatttgttataaataatgaaccgatattaatacattattattagctaaagtctacactgatttccttctttttaacctattttcctttttctatttca

SEQ ID NO: 83829 - DNA, 693 bp, Homo sapiens
ccaaggagggcggatcacgaggtcaggagatcgagaccatcctggctaacacggtgaaacccsgtatctactaaaaatacaaaaaattagctgagtgtggtggcgggcgcctgtagtcccagctactctggaggctgaggcaggagaatggcatgaacccgggaggtggagcttgcaatgaaccgagatcaggcccctgcacttcagcctgggcgacagagcgagacttagtctcaaaaaaaaaaaaaaacaaaaaaaaaaaaaccagtaaatttcatgaattatactctaatataaatgacttccagattttacactaatgagtctagtcctcaaaagtttatacataataagttgtgtttaaattcagccgattggtctctgactcctagatcctgaattgaatcactataggtgattctgggatggcactgggagaggagagaggtgactgctttccctgacctgggcaaatggagagagaatggtaatcctcacttaatatcatgccttgatgcactgctcactggaaaatttgccactgagtcactttgaggaactttcatagagtttattagacacaacacaaattactccttatccacgtttgccagggggaaaaataccccagaaacttatgggaatgaattttgctaagaaggagaaaaacaagtttcttatgaaaggcctgca

SEQ ID NO: 83830 - DNA, 588 bp, Homo sapiens
aaggtgcattcagtgttctggaaggaccaaacagagcactacactgagcattctcagattaaagtcaaagctctattaagttcagtttccttgcatgcatggtagctttgggtggtctgctccattaggcctgtgctctagtcatgccatctctcctaagcactcatcaattgagggaggtagaagccagtgagaagaaactaattattaacagtaaaaattgtagctaatccttacagaacacttaccatgtgtcaaatgctattaaaagtgttttcatrtatcattttatcattgcaccaccttatgaggtagtgtattagttgttttcacactgctgataaatacatacctgagactgggcaatttacaaaagaaagagatttaatggacttacagttccacgtgtgtgggaagacctcacaatcatgagggaaggtgaaaggcatgtctcacatggaagcagataagagaagagggcttgggcagggaaactcccatttttaaaaccatcggatctactgagactcaatatcaatgagaacagcatggggaaaacctgcccccatgactcaattaccttccact

SEQ ID NO: 83831 - DNA, 588 bp, Homo sapiens
aaggtgcattcagtgttctggaaggaccaaacagagcactacactgagcattctcagattaaagtcaaagctctattaagttcagtttccttgcatgcatggtagctttgggtggtctgctccattaggcctgtgctctagtcatgccatctctcctaagcactcatcaattgagggaggtagaagccagtgagaagaaactaattattaacagtaaaaattgtagctaatccttacagaacacttaccatgtgtcaaatgctattaaaagtgttttcatatatcattttatcattgcaccaccttatgaggtagtgtattagttgttttcacactgctgataaatacatacctgagactgggcaatttacaaaagaaagagatttaatggacttacagttccacrtgtgtgggaagacctcacaatcatgagggaaggtgaaaggcatgtctcacatggaagcagataagagaagagggcttgggcagggaaactcccatttttaaaaccatcggatctactgagactcaatatcaatgagaacagcatggggaaaacctgcccccatgactcaattaccttccact

SEQ ID NO: 83832 - DNA, 588 bp, Homo sapiens
aaggtgcattcagtgttctggaaggaccaaacagagcactacactgagcattctcagattaaagtcaaagctctattaagttcagtttccttgcatgcatggtagctttgggtggtctgctccattaggcctgtgctctagtcatgccatctctcctaagcactcatcaattgagggaggtagaagccagtgagaagaaactaattattaacagtaaaaattgtagctaatccttacagaacacttaccatgtgtcaaatgctattaaaagtgttttcatatatcattttatcattgcaccaccttatgaggtagtgtattagttgttttcacactgctgataaatacatacctgagactgggcaatttacaaaagaaagagatttaatggacttacagttccacgtgtgtgggaagacctcacaatcatgagggaaggtgaaaggcatgtctcacatggaagcagataagagaagagggcttgkgcagggaaactcccatttttaaaaccatcggatctactgagactcaatatcaatgagaacagcatggggaaaacctgcccccatgactcaattaccttccact

SEQ ID NO: 83833 - DNA, 858 bp, Homo sapiens
tgcatgattacagttattattattaacatgataaaagaaggagcattagaattagtctcagggatgaggtccctaggaacaaaaaagccagtcttgtatacaggaaaatgcagggtttcctgagagacatcattagtcctgtagaatttatggtttctttttatctttctttgtgataatcgtgttgagttcttgcttctcctcccttctctctccacttggccactggcaggcgccaggcttctgggagggaatgtcacttgrttgccaaattaaatgccccagatctattcactctagagggtggtgtcatttctggaaaacagaaagagaaggctctgctctctatcttgatatttgacctgtttaatataatttgaaatgaacctttagtgtgataaatggggagacagaacaattccttgcagggccaacgtctccactgtgctttggcccctgggtggcagcttgagtcagagagggcaggtgcctggcactttgatttaggataatgggggccaggctgcggtggagcagtcacactgaggaaggcaggaacaagtctggagacagctgaggccccagaaacgcacccagaaagtggaggccgtgagggcaaagctgctcaacaccaagtgtgtggcttcggcatgatagacacaaagtaaccacaaaacagtcaagaccatccttaaatgaagctcctctgtgttctctactgaattgggggccaatcctgggttcaccccagagtgaaatcaggccccacctggcactctgtaccactgtatgccagatggaaggacttgatggttagtttccatccatccatccatccatccatccatccatccatcc

SEQ ID NO: 83834 - DNA, 858 bp, Homo sapiens
tgcatgattacagttattattattaacatgataaaagaaggagcattagaattagtctcagggatgaggtccctaggaacaaaaaagccagtcttgtatacaggaaaatgcagggtttcctgagagacatcattagtcctgtagaatttatggtttctttttatctttctttgtgataatcgtgttgagttcttgcttctcctcccttctctctccacttggccactggcaggcgccaggcttctgggagggaatgtcacttggttgccaaattaaatgccccagatctattcactctagagggtggtgtcatttctggaaaacagaaagagaaggctctgctctctatcttgatatttgacctgtttaatataatttgaaatgaacctttagtgtgataaatggggagacagaacaattccttgcagggccaacgtctccactgtgctttggcccctgggtggcagcttgagtcagagagggcrggtgcctggcactttgatttaggataatgggggccaggctgcggtggagcagtcacactgaggaaggcaggaacaagtctggagacagctgaggccccagaaacgcacccagaaagtggaggccgtgagggcaaagctgctcaacaccaagtgtgtggcttcggcatgatagacacaaagtaaccacaaaacagtcaagaccatccttaaatgaagctcctctgtgttctctactgaattgggggccaatcctgggttcaccccagagtgaaatcaggccccacctggcactctgtaccactgtatgccagatggaaggacttgatggttagtttccatccatccatccatccatccatccatccatccatcc

SEQ ID NO: 83835 - DNA, 776 bp, Homo sapiens
ggggccatgattcagggaatgcgagcggcctaccattttaggcttctaacttctagaactataaggtcataaatatgtgtggttttaagccgtttactgttgtggtgatttgttacagcaggaacaggagatgaatacgattgggaagtgggaaaacgcgagctatgatgcagtctcaacagaggccttagccaaccttacagccaggtctcctgccggaatgaccctttagtactgttgcacattgaaacaatcagtattagatgtgggcggctcctggaaggaaattgaccttgggcaaggcagttgttttcagcctcagtcaattgttggagagactgacagcagagagatattctctggcaatactatcatcagctgggggtgtgaatccttcattcttccagggggtcctgggtggcacattacagtatccactacaytaggtattagctactatgcgattagtaagtgatgaggcatggtgattagaatcactggctttgggtctagtctgggctagattcaggttctggtgctactactcattaaccgaggcaggtcccttcatctctagtgggggaaatctcagccactacctcctggttctcagaaggttcccatgagataaggcacagagagcctgacactagaaccactggactccactggaccctggagtcctcaagttccggatctgacttaacagtttcagttatcactatctgacttaacagccaaaagcagaatcacaatggtttaattaaagccatgga

SEQ ID NO: 83836 - DNA, 608 bp, Homo sapiens
ttctgtcttccacccaatacacaggttttctgtcgtttgtaagccactgatgctcatgagcgctctacatgagacaccatacgggcagactgggaagaattgaggttagaccttctgtgaagtctcagagccttggtgcaaatctagggagagacctctggggcaggagggtggcaggacggatgcaggggagaaggcattcccgggcttttctctggctgcagcccggacagggacagacagatatgtctrcttatcaaaggtggatctcatctgccctaccactggctgccgggaccacaaatatccagacatctgggaagaagtcaggggcacagaagggcagcatggagagggtgtgtgttttcaggaagcatctaccacatgtggccaagtggaatcccctccccacttcacctggtcacatgtgaaaggcaggctgggtcccagggaatgatacatctgtttttgcagtgagagttacggaaaccctgtatttaaaaggtgtcgctgcgtggatgtatctgtaactcatctgtggaccagttacaatttgcttggccccctggcagttactgagatgagccccatagaacttagtggtagga

SEQ ID NO: 83837 - DNA, 684 bp, Homo sapiens
tctctctctctctctctctctctctctatatatatatatgtatatatatatatgagcattttatgcctattctttgctttgggatgtttatcagttatggtacctggcatctagttactaaatgtagtttgaatgaaattaacacacatatttgctagatccttagtcactgatgaagattagactttttggttgtcatttgtggtaggcagaataatgctcttccctccaaaaatgkccatgccctacaatcccccaaacctgtgaatgttactttacatggcaaaataaatttgagtttgtgattaaattaaggattttgagatggagaggttattctggattagccaggtgggacaaatgcaatcacaggggtttgtataagagagaggaagaagtgtcagagtcagagaagagacaagacaacagaagcagagctcatagaggaaaaagatttgataataccatgctgctggctttgaagatggttaatggggccatgagccaaaaactgccagtaacctatagatgctagaaaaggcaaggaaatggattctctcctgggacctgcagaaggaattcagcactgccaactcagtttgggctcctgacctccagaactctaagataacaaatttgtgctgtttcaagcttgtggtaatttcttacagcagcaataggaaa

SEQ ID NO: 83838 - DNA, 684 bp, Homo sapiens
tctctctctctctctctctctctctctatatatatatatgtatatatatatatgagcattttatgcctattctttgctttgggatgtttatcagttatggtacctggcatctagttactaaatgtagtttgaatgaaattaacacacatatttgctagatccttagtcactgatgaagattagactttttggttgtcatttgtggtaggcagaataatgctcttccctccaaaaatggccatgccctacaatcccccaaacctgtgaatgttactttacatggcaaaataaatttgagtttgtgattaaattaaggattttgagatggagaggttattctggattagccaggtgggacaaatgcaatcacaggggtttgtataagagagaggaagaagtgtcagagtcagagaagagacaagacaacagaagcagagctcatagaggaaaaagatttgataataccatgctgctggctttgaagatggttaatggggccatgagccaaaaactgccagtaacctatagatgctagaaaaggcaaggaaatggattctctcctgggacctscagaaggaattcagcactgccaactcagtttgggctcctgacctccagaactctaagataacaaatttgtgctgtttcaagcttgtggtaatttcttacagcagcaataggaaa

SEQ ID NO: 83839 - DNA, 751 bp, Homo sapiens
tgtatttgtatccttacaagagaaatataggtttaccaaacatactgattttaaaggactagttaatttttaagtattaattaatatattcgccacaaatatacactctctgagatgtaatttagtccaatattgtttggactaaattaaatagcactgacagccaaaatcttgcttaccaagtctgaggctgttgctcagatgtttcaaacaatattgcatattttaaaaaatgaattaggacacttccttagagaatgtattaataagactttctaaaatttgaaaacccaaaacttaaaataatcagctgagcttttccaaattccaggatgttttttggcattatgcagctaaaatgcctrcctagatgtttttgtagagaacccgtcatcctattgtttgaagtcaggtaggtatggtctatgtcaactatgaaaataagcactggaggggccagaactttgtccaaagctcataagtgatcattgtgtgctcaaaggaatcaggcgatgtgcttaacggaaatcagatgccatgccttagagacatgaattagactctcttcatctccaaaacatgggagtttatgtttggagaaagcacaaactactgttacccaaaatagtagtgttttcttgaattagattccattaaaaggcaaatatatgatgacatgtattacctttttctagcacagccttcccctctttctgtctctccatcatcagatttcactatttttgcttcg

SEQ ID NO: 83840 - DNA, 906 bp, Homo sapiens
tgcatagagacagaaagcaatcagtgcttatctgagatgagggagtactgggacgggtatcagggaggtgttgcaaaaggaaatgaggaaatgggttgatggacatgttcactacctttattgtgtcaatggttttatgaatgtataaataccttaaaactgaccaaaattttatcattttaaacatgtagtgcattgtatgccaaccatacctcaatagaggtacaaaactgtatggtctcagaaaaacaagcctctttctaatacatggtggcttctttgctatttagaaattatatcttcaggccaggcatggtggctcacgcctgtaatcccagcactttgggaggctgaggcggttgcatcatgaggtcaagagatcaagacaatcctggtcaacatggtgaaaccccgtctctactaaaaatacaaaaattagctgggcatggtggcacgtgcctgtagtcccagctactcaggaggctgaggcaggagaattgcttgaacccgggaagcggagattgcagtaagccgagatcgcaccactgcactccaacctggtgagagagtgagactccatctcaaaaaaaaaaaaaaaaaaaagaaattatcttgaaatcatgtcatttgcagcaacacaaatggagctgaaggtcactatctttagtgaaataattcaggccccaaaacacaaatatcacatgttttcacttatatgccagagccaaaaaaagttgatcacatggaggtagagaaatatagtaaatagagtttgagaaaggtaagtggaagaaagagaggaggatgaagagaaatggattaaaaggtaaaaacatgcagctggatagaaggagtaaattcagtatttsatagcagagtagggtaactataattaagcagaaatgc

SEQ ID NO: 83841 - DNA, 840 bp, Homo sapiens
tggggtggggagagtgttactctcactcagtcatggcccaagtgccatatggcatggaatgtctcctggaaccatggcccagcctgtacaacaaggtgatggactgaaataggactttaaaaggtagaatgagctatacaaagatgcaaatgaatacaagagcccagccttgatgctacaagttgcacaacacaaaaagggagtacttggctsttggtaagagggacaacatcagtacatcacttaagttggctggatagccaaatctctttttaaaaaataagggctgagtgtggtggctcatggctataatcccagcactttgggaggctgaaacaggtgggtcacttgaggtcgggagtttaagaccagcctggccaacatggtgaaaccccgtctctactaaaaacataaaaattagctgactgtggtatcaagtgcctgtaatccagttactcgggaggctgaggcagaagaatcacttgaacatgggaggcagaggttgcagtgaactgagatcatgccactgcactccaggcaacagagtgagactctgtctcaataaataaataaataaataaataaataaataaataaataaaatgaacaagcaacactactccaggagactactgtcttttaatttcagtagcaagtgctcggtagaatcagaagtagacaaggtgagctacagaaattgaccaaaaacatgtgtccaatttgaagggaacatttaattgactaaaaagcccagtgagtgttctttatggataatcaattgattagctcaaatccgtcagcagcactacaatcaatgacggaagatgcatttggaaaaga

SEQ ID NO: 83842 - DNA, 527 bp, Homo sapiens
tgcattagcaggcattatttactcataaatcccatatttattgggagcattttgcaattccagaaggtgatcataaagttatcttggctatgtgttggatcagtagcaaacaggaattgctattatgaaatcattacactgaagtgtgtctgatgcctgaaatagatcctcatattcaaaagaatatcaaggactaaggcacttaccaaactacttgatacaaatatggaaaatggctaagtactctgtcaaaaatttatattgattttataggtacatttcacatgaatacttgattcttttagctgcttcagaatagcttgagctaattctacatcaatctcatatcatcagtgtagcatcctgtgttattccagtgacacttggtaagaaccagtgtatctcctctagagccatctgctattaattttgaagctaagcctcccagaatttcactcatctggaacctaggggcaacacacacacacacacacacacacacacacacacacacasacaaacacaca

SEQ ID NO: 83843 - DNA, 527 bp, Homo sapiens
tgcattagcaggcattatttactcataaatcccatatttattgggagcattttgcaattccagaaggtgatcataaagttatcttggctatgtgttggatcagtagcaaacaggaattgctattatgaaatcattacactgaagtgtgtctgatgcctgaaatagatcctcatattcaaaagaatatcaaggactaaggcacttaccaaactacttgatacaaatatggaaaatggctaagtactctgtcaaaaatttatattgattttataggtacatttcacatgaatacttgattcttttagctgcttcagaatagcttgagctaattctacatcaatctcatatcatcagtgtagcatcctgtgttattccagtgacacttggtaagaaccagtgtatctcctctagagccatctgctattaattttgaagctaagcctcccagaatttcactcatctggaacctaggggcaacacacacacacacacacacacacacacacacacacacagacamacacaca

SEQ ID NO: 83844 - DNA, 767 bp, Homo sapiens
ctaaacgagttaattgctagtaagggaaccaacaagatgacaaaagactgcaagagttggagagagcatggaaactgtggagttattattggggaacagaatgctcacataagcatgcagttctataagaaaactggatgcacgaggtcccacagataacatgcacttaaactctcaggcaggatggttgcagaggaaaggtgtgtagctgccagtcgggagaaaaacacagctgcaaagtgcgtgatgttcacctgttcctgaaattaggttgacaaggcctcccctccaatcaaggcacctggtatggccaactcacctgaaagctcaagaccttgccaaaaagagatggaaaatgacaggatctgatttaaacaggaggtcctggctgggcraggtggctcaggcctgtaatcccagcactttgggaggccgaggtgggtggaccacttgacgtcaggagttcgagaccagcctggctaatatggtgaagccctgtctctactaaatatacaaaaattagccgggcatagtgacaagcacctgtaattccagctacacaggaggctgaggcaggagaatcgcttgaaccaaggaggcagaggttgcagtgagctgagatcatgccacatgcactccagcctaggcaacagagcaaaactctgtctcaaaaaatatataaaataaaataaaataaacaggaggtcttgtagccaggtgcagtgacatgtgcctgtagtctcagctacttgggagggtgagatggg

SEQ ID NO: 83845 - DNA, 570 bp, Homo sapiens
tcccatctcaccctcccaagtagctgagactacaggcacatgtcactgcacctggctacaagacctcctgtttattttattttattttatatattttttgagacagagtttgctctgttgcctaggctggagtgcagtggcatgatctcagctcactgcaacctctgcctccttggttcaagcgattctcctgcctcagcctcctgtgtagctggaattacaggtgcttgtcactatgcccggctaattttgtatatttagtagagacagggcttcaccatattagccaggctggtctcgaactcctgacgtcaagtggtccacccacctcggcctcccaaagtgctgggattacaggcctgagccacctygcccagccaggacctcctgtttaaatcagatcctgtcattttccatctctttttggcaaggtcttgagctttcaggtgagttggccataccaggtgccttgattggaggggaggccttgtcaacctaatttcaggaacaggtgaacatcacgcactttgcagctgtgtttttctcccgactggcagctacacacctttc

SEQ ID NO: 83846 - DNA, 832 bp, Homo sapiens
tcctacctcagcctcccaagaagctgggaatacaggcatatgccagcatgcctagctaagttttttgttgttgttgttgtttgtttggttggttggttggttggctttttattttttatttttttattttatttatttatattttttttttgagaaggagtcttgctcttgttgcccagactggagtgcactggcatgatctctgctcactgcaatttctgcctcccagactcaagcgattctcctgcctcagcctcctgagtagctggtataacaggagccctccaccattcctggctaattttttggtatttttagttgagatatggtytcaccgtattgcccaggttggtctcaaactcccaacctcaggtgatctgcccgcctcagcctcctaaagtgctgggattataggtgtgagccacagctaatcttttaaatattgtttttttagtgatgagatctcactgtggtgctcaggctggctttgaactcatggtttcaaatgattctcccatcttggccacccaaagtcctgggaatacaggccaccatgcctgcttgacatattattcttttttacaatttgtattttggtatcttttgttaaacagatgttttccactttaatgtcatcatttatacttgttagtattttttattactaaaaaatattttgctactcaaagatcatgagttagatattttcctatattaacatccagtcttttattggtttttccttataacatacacgaacaaacacactatatattcattgttttctatatatatgtctacttatctgagcaccagtttttggaaacagttt

SEQ ID NO: 83847 - DNA, 832 bp, Homo sapiens
tcctacctcagcctcccaagaagctgggaatacaggcatatgccagcatgcctagctaagttttttgttgttgttgttgtttgtttggttggttggttggttggctttttattttttatttttttattttatttatttatattttttttttgagaaggagtcttgctcttgttgcccagactggagtgcactggcatgatctctgctcactgcaatttctgcctcccagactcaagcgattctcctgcctcagcctcctgagtagctggtataacaggagccctccaccattcctggctaattttttggtatttttagttgagatatggtctcaccgtattgcccaggttggtctcaaactccyaacctcaggtgatctgcccgcctcagcctcctaaagtgctgggattataggtgtgagccacagctaatcttttaaatattgtttttttagtgatgagatctcactgtggtgctcaggctggctttgaactcatggtttcaaatgattctcccatcttggccacccaaagtcctgggaatacaggccaccatgcctgcttgacatattattcttttttacaatttgtattttggtatcttttgttaaacagatgttttccactttaatgtcatcatttatacttgttagtattttttattactaaaaaatattttgctactcaaagatcatgagttagatattttcctatattaacatccagtcttttattggtttttccttataacatacacgaacaaacacactatatattcattgttttctatatatatgtctacttatctgagcaccagtttttggaaacagttt

SEQ ID NO: 83848 - DNA, 1111 bp, Homo sapiens
ggtaatttacckattggaattcctagtgtcatccttgagacacaagcaaaaaaactcaacaatattatccacgtgaaatgggacctctaaactgtcctgttttgttacagcctctaatgagccaaaatagtataagaatcttgaagattaagaatttctgtagtgctctacttgcctgaaatttggggtgctaagcattaaaaaaatgcaattttagtgtgttatacttgcggacattaaacactatgtgtaaaggttgagaatttctaccataaaatacatagatcctctggatgtaaatcttgtatatgacacaaactagatgttagaccctaaaaaagatgttcagattctccatgtgtcagtctcttcattttaaagaatctaaaatacgaagaataaaacaatgtagggaaagtctttagaataatgaaatttacttgataagcattcaataaatatttgctattattactgatggttaatattgtcaacttgattggattgaaggatacaaagtattgatactaggtgtgtctgtgaggatgttgctaaaggagattaacatttgagtcagtgagctgggaaaggcagacccacccttaatctggtgggcataatctaatcaactgccaacgtggctacaatataagcaggcagaagaatgtgaaaagagagactagcctagcttcccagccgacatctttctcctgtgctggatgcttcctgccctggaacatcagactccaagttcttcagttttggaactcagactggctctccttgctcctcagcctgcagacggcctattgtgggaccttgtgatcctatgagttaatacttaatacattcattcatatatatatatatatatatatatatatctgcattccattagttctgttcctctagagaaccctgactaatacaattactattaatggagactaagttatgtcaacttatcaacttgataaaatgtccaacttaattatttagagcaaaaatgagagaaagaggtgataaaggtattgtaaatgtcattaatagaataaatattcagcatgttgtacaaaaattttaaatttaagtacatgggcttattgaaaaa

SEQ ID NO: 83849 - DNA, 810 bp, Homo sapiens
ctcctggtgactttaaatcatgtggagtttgccatctgctttccatttcagattccattcaaatcacttctattgaactaaaacacatggatgattttattaatagccaaaaaacacatctacccatttcaaaatcattatttgtttgtttgtttgttatttaatgtgttttatttattttggcttaaaacaacagaaagttattgtctcaaagttgcaggaagctagaagtccaaactcaggctgttagtagggccatactccttccggagtctctaagggagaaactgtttcttgcttcttccaccttctggcagctgctggcattccttggattgtggttgcatcactccaatctctgcctccaccatcacatctctttctctgactcttctgccttccttttaaagggtacttgtaattgcatttagagctcactcagataatccagaataacctcctcattttaagatccttaactttctcacatctgccaagtttcttttcccatataaggtaatatttataggttctagggatgaggaagcagatatctttgggggccattatcctgcctaccacattattctgccttgcttagggaggagtccagaactggtgggctctgggctggcctcgtggtggtgaggggtcaccatgatcatgagccaagtctgcaccccatggaggagggactgcctagggccagcagggtcagaagggccatccytcaacctggtgcaaggagggaaaatgccatgattttaagaatagtaaagtcatttcaaagccttaatcttagagagtcat

SEQ ID NO: 83850 - DNA, 716 bp, Homo sapiens
acatatggatatatggagaagtgttatgagggcctggatcacacagatgtgttatgagggcctggatcatacaaaagagatgtgttatgagggcctggatcacacaggtatagaagctggaaacatcccaccctgtgtcatctgcaagctggaagcccaggaaagccgatgctgcagttcatgtccaaatcccaaggcctgaaacccaggggagctaatgttgtcagtcccagtcccaggctgaaggcgcaagaaacaggagtgccgacgtccaagggcaggagaagacggatggcccagctcaaacaaagagarcaaattcacccttcttttgccttttcattctatccggaccatcagtggactggatgatgccagcctgcaccggtgagagccgtctgctttattcagtccagccatcaaaatgctcatctcttcccgaaatacctgcacagtcacactctgaaatcatgtttcaccagctgtctgggcagcccttagcccagtcatattgacacagaattggccatcacacctgccctgacacattggtccaagcatccttggtgaacccgtgggtcaggcacaggctcacccctgttgtcccagcttcgggggcaagggagtgccaggttctaaagttagtctatgaggcaaatgtgtcttagagtcaaagttattccccaaaactctttcctctcccctaagatacaact

SEQ ID NO: 83851 - DNA, 865 bp, Homo sapiens
tttatgctcaaaattaatttctggagttttccaagcccaactcagtttaaaattacctctcagttctctgagaaataattaagtgcagcaaattctgttcatacgggagaattattctggatttaacaggtaaattttacttaggtaaattaaaaactaaagacagatttttgtgccagttgcggtggctcacacctgtaatcccagcactttgggaggctgaggtggttggatcacctgaggtcaggagttcgagaccagcctgaccgacgtgatgaaaccctgtctctactaaaactacaaaaattagctggccgtggtggtgtgcacctgtaattccagctaytagggaggctgaggcatgagaattgcttgaacccgagagagagaggttgcagtgagccgagattgtgccaccgcactccagtctgggcaacaagagcgaaactccatctcaaaaaacaaaacaaaacaaaaaaacaaaaactaaagaaagattttgatattcatcaggtagaatgacagagaaagctattgatctctgaactactctagaagatacagaagatccttcacaggtttctgcaagcacccacttcattgtcccacccaactccttctctcctggcttccccaacccttggcagctgctaatccactcccatctctaaagacttgtaattttgaggacgttatacaaataaaattgtacagcatgttctcttttgtgactggcttttttcactcagtataatgcccttgagatctgcccaagttgctgtaggtatccatagtccattcatgtggattgttgcgcacaatttcatggtatgggtgtgtcacaatttgttaattattgacattc

SEQ ID NO: 83852 - DNA, 865 bp, Homo sapiens
tttatgctcaaaattaatttctggagttttccaagcccaactcagtttaaaattacctctcagttctctgagaaataattaagtgcagcaaattctgttcatacgggagaattattctggatttaacaggtaaattttacttaggtaaattaaaaactaaagacagatttttgtgccagttgcggtggctcacacctgtaatcccagcactttgggaggctgaggtggttggatcacctgaggtcaggagttcgagaccagcctgaccgacgtgatgaaaccctgtctctactaaaactacaaaaattagctggccgtggtggtgtgcacctgtaattccagctactagggaggctgaggcatgagaattgcttgaacccragagagagaggttgcagtgagccgagattgtgccaccgcactccagtctgggcaacaagagcgaaactccatctcaaaaaacaaaacaaaacaaaaaaacaaaaactaaagaaagattttgatattcatcaggtagaatgacagagaaagctattgatctctgaactactctagaagatacagaagatccttcacaggtttctgcaagcacccacttcattgtcccacccaactccttctctcctggcttccccaacccttggcagctgctaatccactcccatctctaaagacttgtaattttgaggacgttatacaaataaaattgtacagcatgttctcttttgtgactggcttttttcactcagtataatgcccttgagatctgcccaagttgctgtaggtatccatagtccattcatgtggattgttgcgcacaatttcatggtatgggtgtgtcacaatttgttaattattgacattc

SEQ ID NO: 83853 - DNA, 865 bp, Homo sapiens
tttatgctcaaaattaatttctggagttttccaagcccaactcagtttaaaattacctctcagttctctgagaaataattaagtgcagcaaattctgttcatacgggagaattattctggatttaacaggtaaattttacttaggtaaattaaaaactaaagacagatttttgtgccagttgcggtggctcacacctgtaatcccagcactttgggaggctgaggtggttggatcacctgaggtcaggagttcgagaccagcctgaccgacgtgatgaaaccctgtctctactaaaactacaaaaattagctggccgtggtggtgtgcacctgtaattccagctactagggaggctgaggcatgagaattgcttgaacccgagagagagaggttgcagtgagccgagattgtgccacygcactccagtctgggcaacaagagcgaaactccatctcaaaaaacaaaacaaaacaaaaaaacaaaaactaaagaaagattttgatattcatcaggtagaatgacagagaaagctattgatctctgaactactctagaagatacagaagatccttcacaggtttctgcaagcacccacttcattgtcccacccaactccttctctcctggcttccccaacccttggcagctgctaatccactcccatctctaaagacttgtaattttgaggacgttatacaaataaaattgtacagcatgttctcttttgtgactggcttttttcactcagtataatgcccttgagatctgcccaagttgctgtaggtatccatagtccattcatgtggattgttgcgcacaatttcatggtatgggtgtgtcacaatttgttaattattgacattc

SEQ ID NO: 83854 - DNA, 465 bp, Homo sapiens
aggcctctccagccatgtggagctgtgagtccattaaacctctttttctttataaatttcccagtctcaggtatgtcttatagcagcatgagaatggactaacatacccctaatccttgagactgtcctttcctccacttcttttccttttccctctttcctggtctagcccttctccacgccattcccgagctcttctctcttgcttgccccttacacaggatttctagatagtgtaattctctttttcttcccttttcacactctccaggaaccaccctgtgttggaacacaagtttagctcccatccatttgctgatgacactccatgtctcttcctcggccttggcccccacccccatcattatgtgtgtgcctactgaggtctyccaggcatcctcaccccagtgagcccaatggcacatcctacgctcctccccactcatctcctacatgccattccat

SEQ ID NO: 83855 - DNA, 1364 bp, Homo sapiens
accccttaatttgcatgcagttgaaagcaggtataagtagagtgtggatataggcgtcaggrgcccataagctgcggactctggcacacttcctgtgagtttgtcctgctctgcagaaagcagctctggcttaatgaaaggttcctgcctaacaccacgggctcacccttggattcttccctgggcaaaggcgagaatcctcctgggctaagccctgatttcaggactcacctgcccacctgcatcactcttatcactcacaggcaggaaatgagacagccttccccaggagacccaggtatcattcttgtgcgatagggatggcagaatccaagatgtgcagtgctctgaacgtgagaaaacctcactaagtctgttcttacatactgctctagttattttatcaaataatacgtttgatatgtttggtcaacttcaagacactttttaaagtcagaatctgtacagttaaagtaagcagtccaagtgttaatctgaaaacaattaacaataaatacaccaaagagtgtcaatatattctagaaacacaggcaagttgtgcccctttaatttaccttaacaaatagacccatcgttttaaatgtagaggtcctttattggagaagaagtcgagaggtcagagaaaaatacattgagcatataatttggaaatgccattaacatagtatttccaactaagttcaccaaatgtctccccacgtttctcattccctgtggttagttcttacaccgaggtcctcaccatccggggcaaatgaaatgtaaacaatcacatctcatacagaaatagcagcactgacttcgttctcaccatttcacctacatcaacttctaatcaaagggcctttggtactgccattagaataatatcactactcacattttaaaacacactattaaatactctcaaaaacagaagccatagcctgggcaacacagtgagatcccatttctactaaaaaaaacacaaaaagtagctggacgtggtggcacatgcctgtggtctcagctactcaggagactgaggtgggaggattgtttgagctcaggaggcagaggctgcagtgagctgaaattgcactactgtactccagcctgggtgacagagggagaccttgtctcaaaaaacaaacacaaaacaaaatgaaaccccaaacccagaagcctgggtgtggcccacatgtggttaaggctgaatgtctcctgagggcatggagggaacgcagtacacacacacaaggctcaaagtagaaacaaatgagttcgtggagcagccaatctatgtgaagcatgcactgccttctcacacttaatgctcatgctttacagatgaggaaacaaag

SEQ ID NO: 83856 - DNA, 1364 bp, Homo sapiens
accccttaatttgcatgcagttgaaagcaggtataagtagagtgtggatataggcgtcaggggcccataagctgcggactctggcacacttcctgtgagtttgtcctgctctgcagaaagcagctctggcttaatgaaaggttcctgcctaacaccacgggctcacccttggattcttccctgggcaaaggcgagaatcctcctgggctaagccctgatttcaggactcacctgcccacctgcatcactcttatcactcacaggcaggaaatgagacagccttccccaggagacccaggtatcattcttgtgcgatagggatggcagaatccaagatgtgcagtgctctgaacgtgagaaaacctcactaagtctgttcttacatactgctctagttattttatcaaataatacgtttgatatgtttggtcaacttcaagacactttttaaagtcagaatctgtacagttaaagtaagcagtccaagtgttaatctgaaaacaattaacaataaatacaccaaagagtgtcaatatattctagaaacacaggcaagttgtgcccctttaatttaccttaacaaatagacccatcgttttaaatgtagaggtcctttattggagaagaagtcgagaggtcagagaaaaatacattgagcatataatttggaaatgccattaacatagtatttccaactaagttcaccaaatgtctccccacgtttctcattccctgtggttagttcttacaccgaggtcctcaccatccggggcaaatgaaatgtaaacaatcacatctcatacagaaatagcagcactgacttcgttctcaccatttcacctacatcaacttctaatcaaagggcctttggtactgccattagaataatatcactactcacattttaaaacacactattaaatactctcaaaaacagaagccatagcctgggcaacacagtgagatcccatttctactaaaaaaaacacaaaaagtagctggacgtggtggcacatgcctgtggtctcagctactcaggagactgaggtgggaggattgtttgagctcaggaggcagaggctgcagtgagctgaaattgcactactgtactccagcctgggtgacagagggagaccttgtctcaaaaaacaaacacaaaacaaaatgaaaccccaaacccagaagcctgggtgtggcccacatgtggttaaggctgaatgtctcctgagggcatggagggaacgcagyacacacacacaaggctcaaagtagaaacaaatgagttcgtggagcagccaatctatgtgaagcatgcactgccttctcacacttaatgctcatgctttacagatgaggaaacaaag

SEQ ID NO: 83857 - DNA, 635 bp, Homo sapiens
aaaaataattctatatttttgctggaatgcagagatctctaaagtaagagacaggcaattctcaatatacattttgcttcagggttaaacttgcttcctctaaggaaaggtcacagcaggatccaatgtttctaatcctactacagtgtaatgacatttatgggatgtttgcaaatgtgtaccaagctgccctgttcagagcggtattttattgtagcacctcgattagccctgcctgctacccttggcatccgtgtgaagtcccatctaggcacgaggaagagaacaagagtggcagcatgttggcggtcctcaccgggactggagcagatgccactggacccttccaggaattcttcagttctgttcagttctggttcccaccgtgtgatgaaaagcaactcaacaaacctattcacctttgtaggtttccagaataaaaagttgycttatgagaaacttggttagttccatggtttttactcatttaaaaactatgacatttccacagttacatataactgtatatataacgtaagtcccatattcttgcataaactttggcgttttatatactattccttcctccaaatggactgtcagatcgatcctgccgtcatctcccttgaatgtgt

SEQ ID NO: 83858 - DNA, 635 bp, Homo sapiens
aaaaataattctatatttttgctggaatgcagagatctctaaagtaagagacaggcaattctcaatatacattttgcttcagggttaaacttgcttcctctaaggaaaggtcacagcaggatccaatgtttctaatcctactacagtgtaatgacatttatgggatgtttgcaaatgtgtaccaagctgccctgttcagagcggtattttattgtagcacctcgattagccctgcctgctacccttggcatccgtgtgaagtcccatctaggcacgaggaagagaacaagagtggcagcatgttggcggtcctcaccgggactggagcagatgccactggacccttccaggaattcttcagttctgttcagttctggttcccaccgtgtgatgaaaagcaactcaacaaacctattcacctttgtaggtttccagaataaaaagttgtcttatgagaaacttggttagttccatggtttttactcatttaaaaacyatgacatttccacagttacatataactgtatatataacgtaagtcccatattcttgcataaactttggcgttttatatactattccttcctccaaatggactgtcagatcgatcctgccgtcatctcccttgaatgtgt

SEQ ID NO: 83859 - DNA, 541 bp, Homo sapiens
tattctgattaacataaatagtaattagggtttttatatagtgggrcactaaaattaggcaaattagtatctgtcaagagaaactttttcagacttgtggtaaatgcgatgccagtgaatggtgtgaaatgaagcgagttgcccccttaagaagaaccagtggagtttaaatagtcctcttttgctgtggtaaaaaggtcttctaatctgaacagacaaagcgattttagtagttctatttgtttaagaaaataggtctaaattgatgaaactaatcattttacactaagtgctctttttaaagacaattgctgattgcatgccccttttgtagctgtagctgagcccgagatggtgcaaaatcaccatctcgccagttgtcacaactatttgctcattctttaattaaacataatataggaaacagtataattcacgtctaattagaaatcaacttctttaggctgtgaactctttccaaaactgtcagggatcatcgtttaatgattgtcatatctaccaaggttgggtatttttgcct

SEQ ID NO: 83860 - DNA, 541 bp, Homo sapiens
tattctgattaacataaatagtaattagggtttttatatagtgggacactaaaattaggcaaattagtatctgtcaagagaaactttttcagacttgtggtaaatgcgatgccagtgaatggtgtgaaatgaagcgakttgcccccttaagaagaaccagtggagtttaaatagtcctcttttgctgtggtaaaaaggtcttctaatctgaacagacaaagcgattttagtagttctatttgtttaagaaaataggtctaaattgatgaaactaatcattttacactaagtgctctttttaaagacaattgctgattgcatgccccttttgtagctgtagctgagcccgagatggtgcaaaatcaccatctcgccagttgtcacaactatttgctcattctttaattaaacataatataggaaacagtataattcacgtctaattagaaatcaacttctttaggctgtgaactctttccaaaactgtcagggatcatcgtttaatgattgtcatatctaccaaggttgggtatttttgcct

SEQ ID NO: 83861 - DNA, 1341 bp, Homo sapiens
  misc_feature (1)...(1341): n = A,T,C or G
gtcttcgcgttgcctgctccatgtgtatctctrggtgtcttctcttcttacaaggacatcggtcatggggttcagggcctgccctactccaggatgcccttttcaggacatctgaaaagagtctttctccaaatgaggaccattctgaagctccagaattcaggaaaagtaatgatgactttttgtacagatttacaagtgccacttctggagtaaacaggaatcttctcagcctgtttccctgacacacgtgagatgctccctacgacatgctcagtggatccctggatgcacagaaggcctcagctggctttgccgtacctcactcctgaagctggctgatgggcgcatttcttatttctagaggaggcattactatctttcaagctttttgaacatattgtacaagttgtaaaattaagtttaaagctataaatacatcaagtaagacgttgacttgaaattacaactgtatttcatcaattctatgatacattattttttccacattttaacctttctgaaaaaagaagtcctttcccagccgccagcacctccaggcacagcagttntcccgactcggaggttgtggcccacacgtgcacctgccactttccctgagccctgaatgtcattggctttatataccctgcatttaattatggttcaaaatgttcaatatgtcttcataaaaattacaccgtggctgggcacggtggttcatgcctgtaatcccagcactttgggagggcaaggaaggcagatctcttcaggtcaggagttcgagaccagcctggccaacatgatgaaaccccatctctaccagaaatataaaaactagccaggcttggtggcaggtggctgtaatcccagctactaaggaggctgaggcaggagaaccacttgaacctgggagtggaggttgcagtgagccaagatcacaacactgcactccagcctgagcaacagagcgagacttggtctcanaaaaaaaaaaaaaaaaaaaaaaccaccgcatttcatccttgaaaccgagatgtattgtgtactaaaagaaaatcttgttcaattgtacaagtgaatttatactcagagacaaataatgtaattgatattttgaaggaagtatttattattaaaagaccgtctagattttctatttccttaccgagcaaatgacatgcttcatgggactgtgtaagaagaaagacaaccacaagtacactaagctgtgctccctgtgaaaacattcttctcactcctgggcaaggcaaaggaaggcggggaaattcgcaaaatgcctccaaataggtggaagaacattcccggtggggagacggg

SEQ ID NO: 83862 - DNA, 1341 bp, Homo sapiens
  misc_feature (1)...(1341): n = A,T,C or G
gtcttcgcgttgcctgctccatgtgtatctctaggtgtcttctcttcttacaaggacatcggtcatggggttcagggcctgccctactccaggatgcccttttcaggacatctgaaaagagtctttctccaaatgaggaccattctgaagctccagaattcaggaaaagtaatgatgastttttgtacagatttacaagtgccacttctggagtaaacaggaatcttctcagcctgtttccctgacacacgtgagatgctccctacgacatgctcagtggatccctggatgcacagaaggcctcagctggctttgccgtacctcactcctgaagctggctgatgggcgcatttcttatttctagaggaggcattactatctttcaagctttttgaacatattgtacaagttgtaaaattaagtttaaagctataaatacatcaagtaagacgttgacttgaaattacaactgtatttcatcaattctatgatacattattttttccacattttaacctttctgaaaaaagaagtcctttcccagccgccagcacctccaggcacagcagttntcccgactcggaggttgtggcccacacgtgcacctgccactttccctgagccctgaatgtcattggctttatataccctgcatttaattatggttcaaaatgttcaatatgtcttcataaaaattacaccgtggctgggcacggtggttcatgcctgtaatcccagcactttgggagggcaaggaaggcagatctcttcaggtcaggagttcgagaccagcctggccaacatgatgaaaccccatctctaccagaaatataaaaactagccaggcttggtggcaggtggctgtaatcccagctactaaggaggctgaggcaggagaaccacttgaacctgggagtggaggttgcagtgagccaagatcacaacactgcactccagcctgagcaacagagcgagacttggtctcanaaaaaaaaaaaaaaaaaaaaaaccaccgcatttcatccttgaaaccgagatgtattgtgtactaaaagaaaatcttgttcaattgtacaagtgaatttatactcagagacaaataatgtaattgatattttgaaggaagtatttattattaaaagaccgtctagattttctatttccttaccgagcaaatgacatgcttcatgggactgtgtaagaagaaagacaaccacaagtacactaagctgtgctccctgtgaaaacattcttctcactcctgggcaaggcaaaggaaggcggggaaattcgcaaaatgcctccaaataggtggaagaacattcccggtggggagacggg

SEQ ID NO: 83863 - DNA, 1077 bp, Homo sapiens
catacactaatgtaaacttttaaatcataaagaatattgagaacaaatttaggctttcaggatatgtttctgttagagaaattattagaaattatgaaataaaaaatcccaacatatcttttgttctcaaagtaaccccccccatatatagagagagcatgttaagtccaagtctcatatttctatcaaaacctatcttcaaacatatttcctgtcatactccttcttgtaaatataagttatagttcattactttcccaagattaaatattttagaattaaakaacttgtctcctttattttaagaggagttggaaagggtgatggaggatgggagcagaggacaggatgatttgaaatcgcttctcatagtgaacatataccaggcactactacagaacttgggtctgaaacaacgaacaatcaataagacagtccttaacgacattcatattccaatgggaaaaacagaaaataaataaacaaatatataatctcaggtggtggcaagtaacaccaaaaacaaaccagggtagagaaatagaaaatgatttagattgaatgccagatgagcaagaaaggactttctacggaagttatatttgaccaggacttgaattaggcagtagttgaaacaaataaactgggaagaacagaacgcccagtgtaaaggcctaggcctggagtgtgctaagtgtatttgaagagtaacaaagatgccagagtggtcattattgagaatgcaagggagagactagcaagaaagcatattacatgtgtagcactgggcctttggacagaagtaagaactctgcagggttattttttggtgtataaggcaaaaaatatgtgaaataaaatttacaaattttaagtgtaaagttcagtgattttcagtatattcacattgctgtggaacagacctccagaatttttttattttgcaaaactgaaactctatactcacttaacaacaactcccattgacccctctctctaggtcctggtaaccatcattctgctttctgtcttgatgaacttgactggtgtatatacacagaagtggaatcatatagt

SEQ ID NO: 83864 - DNA, 879 bp, Homo sapiens
cattggtgtgtgtatgaatgtatatgtacaaatgtatatacatgtgagtatcagtttatctctctataaaatactactgtagaactgaggtcaaacattttgatagtattaataaatgtcaattaaccttgttaaactattaagaaaacatacttcagccaggtgtggtggctcacgcctgtaatcccagcactttgggagtccaaggtgggcagatcacctgaggtcgggagttcgagaccagcctgaccaacatgcagaacccctgtatctactaaaaatacaaaattagtcaggcgtgttggcgcatgcctgtaatcccagctacttggtaggctgaggcaggagaatcgcttgaactcagaaggtggaggttgcaatgagccgaaattttgccattgcactacagcctgaacaacaagagcgaaagtccmccaaaaaaaaaaaaaaaaaaaaagaagaagaagaaaatatacttctgataggctatgaaacaaaatgcaatacactatatacaagagacatatttaaaacaaagagaatcgtaagtgttaaaaatataagatggacaaatatatgccaggacaaaggaaactcatggtcagagggtcttaatcttactatcaacgaagaatgcagaccaaaaaaaagcattaaaagaaacaaacaaatgcgacacttaaaatgaatatattcaagagatgttcatatttatgtaacttataatagggcaacaatatacattatagcagaagatacagcagatgcaaatatttataaatctctctcaatccaagacaatcaagtggaaaaaaatagtatacagaagatctaaacaacatattacctagaaactcatcaaattgtaaaccttgaaga

SEQ ID NO: 83865 - DNA, 879 bp, Homo sapiens
cattggtgtgtgtatgaatgtatatgtacaaatgtatatacatgtgagtatcagtttatctctctataaaatactactgtagaactgaggtcaaacattttgatagtattaataaatgtcaattaaccttgttaaactattaagaaaacatacttcagccaggtgtggtggctcacgcctgtaatcccagcactttgggagtccaaggtgggcagatcacctgaggtcgggagttcgagaccagcctgaccaacatgcagaacccctgtatctactaaaaatacaaaattagtcaggcgtgttggcgcatgcctgtaatcccagctacttggtaggctgaggcaggagaatcgcttgaactcagaaggtggaggttgcaatgagccgaaattttgccattgcactacagcctgaacaacaagagcgaaagtcccccaaaaaaaaaaaaaaaaaaaaagaagaagaagaaaatatacttctgataggctatgaaacaaaatgcaatacactatatacaagagacatatttaaaacaaagagaatcgtaagtgttaaaaatataagatggacaaatatatgccaggacaaaggaaactcatggtcagagggtcttaatcttactatcaacgaagaatgcagaccaaaaaaaagcattaaaagaaacaaacaaatgcgacacttaaaatgaatatattcaagagatgttcatatttatgtaacttataatagggcaacaatatacatyatagcagaagatacagcagatgcaaatatttataaatctctctcaatccaagacaatcaagtggaaaaaaatagtatacagaagatctaaacaacatattacctagaaactcatcaaattgtaaaccttgaaga

SEQ ID NO: 83866 - DNA, 351 bp, Homo sapiens
atatcaagatatctcatgtgtcccataaacatgtacaattattatgaatcaattaaaatatttattacacatkaaattaaaagcaattaaaatctcagtaagacaacaaacattccttaaaaaattattgttgtttcaatagttttgagggtacaggtagttatggataagttctttagtggtgatttttgatattttggtaaacccgtcacctgagcagtgtacactgtatccaatatttagccttttagcccttactctcctctcacccttcccctttgaatccccaaagtctgttttatcattcttatgtctttgcatcctcatgccttaactcccacttataagtga

SEQ ID NO: 83867 - DNA, 1035 bp, Homo sapiens
tccttgtgtatgtacctacaagggaaatatartgagaatatccaacgttttgaaaacgaaagccatctaaaagtgatttcacatagtttctgtgatttcacttgcttggtttatttctcccccatagtcctgttcatcacaagagacactcaaactataagtaaattcctgggagcttataaatgatatgctttatacagccaaaatgtccaaaaagatttgtggtttcagacttttacacactgttcccgtgtcagtaattgatttgtgagaacttaacaagatgatctctgctcctagcctcaacctggcaaggccaccttctccctgaccctgcagggaactgcagtgtgtgctcagcagtggggctgctgcccattggcctcactaatgttacctcccctttaagctctaccaacttgcacctaaatctcagcccattcaagtgtcatgtgcctgcaatgtgcaacatctatgcagatgttaaggccatgaccaaaaccagttctcagcgaaatgactcccaagccagcacaccccaagcactttgaagtccctgttctgcgtggactccatagcacagaggttgccagggcctgctgctcctgggggctggtttgtagatcatatgactgctgaaatcccttagataaaagcaggcattgtccacttttccttgaaatcttgaaatcctggataagaccagcaatcaagtaacatttcaatcctccaacaaccttaaatcaattgatcaaattcttctctttgggcctcagctccccccttatacataatacaatatctagtaaaagcaattttagtcagtgtttaaagcagactgattgcatttatattaaataaaagataggattacgtgaagggggcaaagcttttaaaacaaacaatgaaccacccaacaaatttccgcagtatctttaaactgctctggaagcatcaagagtattaactgaaaaagcagctcccttccctccttctccatgttcagcctccagccgcacggatgagttctctgtg

SEQ ID NO: 83868 - DNA, 729 bp, Homo sapiens
aggctggtcttgaactcctgggctcaggcaatcctcccatctcagcctcccaaagtgctgggattacaggtatgagccaccacgcccagcctatttttttttttttttttttttttttgagacagggtctcaactctgtctcccaggctggtgtgcagtgatgctatcatagctcaatgaagccttgacctcgcaggctcaagccatccttccacctcaacctcccaagtggctgggactacaagtgcatgtcactatgcccagctgattttttttctttttttttggtaaaaacagggttttgccatggtgcccaggccggactccaactcctgtgctcaagatcttcctacacctcarcctcccaaagtgttgggatcacaggcgtgagccactgcgcttggcctttgccttcatcttcacatggcattctccctgtgtgtgttctgtgtccaaatttcccttttataaggacaccagtcatatcccattaggcacttactctactctagtgtgacctcatttaaactaattacgcctgcagtgaccctatttccaaggtcaccttctgaggtactggagattaggacttccaggtaggaagttggggggcacaaaaacaaggggcaatggtcatcattcacactgaagtttcccaaactccttcttttctattcactcttttcgtggttgtgacacccagtgacacctctttcattacgtaggaaa

SEQ ID NO: 83869 - DNA, 729 bp, Homo sapiens
aggctggtcttgaactcctgggctcaggcaatcctcccatctcagcctcccaaagtgctgggattacaggtatgagccaccacgcccagcctatttttttttttttttttttttttttgagacagggtctcaactctgtctcccaggctggtgtgcagtgatgctatcatagctcaatgaagccttgacctcgcaggctcaagccatccttccacctcaacctcccaagtggctgggactacaagtgcatgtcactatgcccagctgattttttttctttttttttggtaaaaacagggttttgccatggtgcccaggccggactccaactcctgtgctcaagatcttcctacacctcaacctcccaragtgttgggatcacaggcgtgagccactgcgcttggcctttgccttcatcttcacatggcattctccctgtgtgtgttctgtgtccaaatttcccttttataaggacaccagtcatatcccattaggcacttactctactctagtgtgacctcatttaaactaattacgcctgcagtgaccctatttccaaggtcaccttctgaggtactggagattaggacttccaggtaggaagttggggggcacaaaaacaaggggcaatggtcatcattcacactgaagtttcccaaactccttcttttctattcactcttttcgtggttgtgacacccagtgacacctctttcattacgtaggaaa

SEQ ID NO: 83870 - DNA, 713 bp, Homo sapiens
  misc_feature (1)...(713): n = A,T,C or G
acagccctctgtgagcgctggccgtggaaaaccatctaccgagaccagcaaacccagagtctactcaataccaggaattgtcccgcccagagcagttctgatctctgtggggttgggtgatgctaatcaaggaaattataggctgtccagccaccaggccttttaaaaagattatggggtgacttaccgatcttgaggtgggtcagaggttttgagggaaggttacatgttaagcctgtagttagccttgaaaaggcctggcttagactctcagggctcacgagattggacttggaatctnnnnnnnnnnnnnnnnnnnnnnnnnnnnnnnnnnnnnnnnnnnnnnnnnnnnnnnnnnnnnnnnnnnnnnnnnnnnnnnnnnnnnnnnnnnnnnnnnnnnacacacacacatatatatatatattttttatttttttaatttttaaaattgttttttaagagacagggtcttgctctgttgcccaggctggagtgcagtggcatgatcatggctcactgcagctttggactcctgggctcaagtgatcctcctgcttcagcttcccaagtagcttggactataggcatrtgtcaccatacatggctaattaaaaacaaattttagtagaaaacaaacacaaaaacaaaatatttttagtagagatgaagtcttgctatgttgcccaggctggtcttgaactcctgggctcgaa

SEQ ID NO: 83871 - DNA, 713 bp, Homo sapiens
  misc_feature (1)...(713): n = A,T,C or G
acagccctctgtgagcgctggccgtggaaaaccatctaccgagaccagcaaacccagagtctactcaataccaggaattgtcccgcccagagcagttctgatctctgtggggttgggtgatgctaatcaaggaaattataggctgtccagccaccaggccttttaaaaagattatggggtgacttaccgatcttgaggtgggtcagaggttttgagggaaggttacatgttaagcctgtagttagccttgaaaaggcctggcttagactctcagggctcacgagattggacttggaatctnnnnnnnnnnnnnnnnnnnnnnnnnnnnnnnnnnnnnnnnnnnnnnnnnnnnnnnnnnnnnnnnnnnnnnnnnnnnnnnnnnnnnnnnnnnnnnnnnnnnacacacacacatatatatatatattttttatttttttaatttttaaaattgttttttaagagacagggtcttgctctgttgcccaggctggagtgcagtggcatgatcatggctcactgcagctttggactcctgggctcaagtgatcctcctgcttcagcttcccaagtagcttggactataggcatgtgtcaccatacatggctaattaaaaamaaattttagtagaaaacaaacacaaaaacaaaatatttttagtagagatgaagtcttgctatgttgcccaggctggtcttgaactcctgggctcgaa

SEQ ID NO: 83872 - DNA, 718 bp, Homo sapiens
cgaactttttaaagctacttttcggtgattggccctccagatctgcacgtgaatgtttccacaggattaaaaacaaaggcaggtgcagtgctagaaatatgtcttaggagaacttggacagagcattctgaaaacagtatgccttaccagcctgagagcaatagtatgtatatcttgatttgttcctacataggtgtgttcatgtgttcacattgtaattattcatctaactgaacatttgagatttgtgcattttccagcatgtccataatggctcaaaaacaaaaccagaaagtgaaggaacaggcagttgtgtgagatgttttggtaaaacaggaagaaaaagagtcactggcaacagatccttgatggagatgacatttgatcttagccaagaaattttcagtagcaatacattgagtaaaataaatattttaaaaagaaacagccaacaaaatcaaatatcctgttctttgaaaagattactaacaattaaatctctagcagtgctaattaagaagaaaagtaaatgaagaattaaaaaaaaamccaccactctcgaaggcatgaaaggtatgcccagttagtttccagggctggtgagaggagggatgaggcaagcatcagctgaggctgcctcctgaagaaaggtgaatttacacagggcagccagggtaggaatatcctggatcagaggtgagtggggaagaggctgttt

SEQ ID NO: 83873 - DNA, 1176 bp, Homo sapiens
acacggcccggggtccataacaagctacagcagcatcataacctttgccagcaygaagcacggtgtcctttcagtttatccgtgtgtatgtgtaaacacacttacactcacctgtgcataccctcacaccacagtgtacactgtccacagtggcaccgcctgctactgagggccgtgtcttttatcaagtcttatttcaagctggctcagcatgaggaaattttgtatgcaacactgactttcaactgagtcactcaaaaattagtaaaatcatttcaggtagtatgtgtttttctttttcctgctttcaaaagcaatctccagaggagtttttttagccacttatttaaaatgttaatgaaggaacctgtgagtgcggggtcacagaaacgagcagttgatttaagtcattccaacgcataagccagttccaaatgcactgagaggtgaggaggggaagatgcaaagggtgccttgggaagaactgcttttgcggtaagcccctggcgcctcctagcatgcccgctgcgatggcattcaccccactgcagtcgtggtcatcaaggtgactttgttgttttagaaggatctgttgtggtcagggttctacctgtccttccctagaccatggccctccaggcggttctaggcaggtcccagcaaaaaagtactggggtagaaaccaaggaccaggcccacagaaacagggaccccaggggcttgcaagggggagtgctgactgccaggtgcagaatccatagaattacccaccatgggagacagagggacctgtgcaaatccctggggagagtgttagaatttccccaaatacagtaaaagagaaaagtgctcatactttatcacgtgaaagactaatgatgtctaggagctgacacagaacacgaggactctgaccaccgcaggaccagcgagatgtgtcaggacagaaatgagcaagcgtgagtctccgggcacacctggggaaagagtaatgcaaggcacacatcagggctgtgactcactcctcaaagcaggcttgggtccccagggtaagagtgaagagacagactccccacatcatgtagtgtggatggcagggctgcaggggttgtagtcctcttgccggtgggctgccagagacctggcagccagacccacttcttagtgagggcacat

SEQ ID NO: 83874 - DNA, 1176 bp, Homo sapiens
acacggcccggggtccataacaagctacagcagcatcataacctttgccagcatgaagcacggtgtcctttcagtttatccgtgtgtatgtgtaaacacacttacactcacctgtgcataccctcacaccacagtgtacactgtccacagtggcaccgcctgctactgagggccgtgtcttttatcaagtcttatttcaagctggctcagcatgaggaaattttgtatgcaacactgactttcaactgagtcactcaaaaattagtaaaatcatttcaggtagtatgtgtttttctttttcctgctttcaaaagcaatctccagaggagtttttttagccacttatttaaaatgttaatgaaggaacctgtgagtgcggggtcacagaaacgagcagttgatttaagtcattccaacgcataagccagttccaaatgcactgagaggtgaggaggggaagatgcaaagggtgccttgggaagaactgcttttgcggtaagcccctggcgcctcctagcatgcccgctgcgatggcattcaccccactgcagtcgtsgtcatcaaggtgactttgttgttttagaaggatctgttgtggtcagggttctacctgtccttccctagaccatggccctccaggcggttctaggcaggtcccagcaaaaaagtactggggtagaaaccaaggaccaggcccacagaaacagggaccccaggggcttgcaagggggagtgctgactgccaggtgcagaatccatagaattacccaccatgggagacagagggacctgtgcaaatccctggggagagtgttagaatttccccaaatacagtaaaagagaaaagtgctcatactttatcacgtgaaagactaatgatgtctaggagctgacacagaacacgaggactctgaccaccgcaggaccagcgagatgtgtcaggacagaaatgagcaagcgtgagtctccgggcacacctggggaaagagtaatgcaaggcacacatcagggctgtgactcactcctcaaagcaggcttgggtccccagggtaagagtgaagagacagactccccacatcatgtagtgtggatggcagggctgcaggggttgtagtcctcttgccggtgggctgccagagacctggcagccagacccacttcttagtgagggcacat

SEQ ID NO: 83875 - DNA, 1176 bp, Homo sapiens
acacggcccggggtccataacaagctacagcagcatcataacctttgccagcatgaagcacggtgtcctttcagtttatccgtgtgtatgtgtaaacacacttacactcacctgtgcataccctcacaccacagtgtacactgtccacagtggcaccgcctgctactgagggccgtgtcttttatcaagtcttatttcaagctggctcagcatgaggaaattttgtatgcaacactgactttcaactgagtcactcaaaaattagtaaaatcatttcaggtagtatgtgtttttctttttcctgctttcaaaagcaatctccagaggagtttttttagccacttatttaaaatgttaatgaaggaacctgtgagtgcggggtcacagaaacgagcagttgatttaagtcattccaacgcataagccagttccaaatgcactgagaggtgaggaggggaagatgcaaagggtgccttgggaagaactgcttttgcggtaagcccctggcgcctcctagcatgcccgctgcgatggcattcaccccactgcagtcgtggtcatcaaggtgactttgttgttttagaaggatctgttgtggtcagggttctacctgtccttccctagaccatggccctccaggcggttctaggcaggtcccagcaaaaaagtactggggtagaaaccaaggaccaggcccacagaaacagggaccccaggggcttgcaagggggagtgctgactgccaggtgcagaatccatagaattacccaccatgggagacagagggacctgtgcaaatccctggggagagtgttagaatttccccaaatacagtaaaagagaaaagtgytcatactttatcacgtgaaagactaatgatgtctaggagctgacacagaacacgaggactctgaccaccgcaggaccagcgagatgtgtcaggacagaaatgagcaagcgtgagtctccgggcacacctggggaaagagtaatgcaaggcacacatcagggctgtgactcactcctcaaagcaggcttgggtccccagggtaagagtgaagagacagactccccacatcatgtagtgtggatggcagggctgcaggggttgtagtcctcttgccggtgggctgccagagacctggcagccagacccacttcttagtgagggcacat

SEQ ID NO: 83876 - DNA, 1176 bp, Homo sapiens
acacggcccggggtccataacaagctacagcagcatcataacctttgccagcatgaagcacggtgtcctttcagtttatccgtgtgtatgtgtaaacacacttacactcacctgtgcataccctcacaccacagtgtacactgtccacagtggcaccgcctgctactgagggccgtgtcttttatcaagtcttatttcaagctggctcagcatgaggaaattttgtatgcaacactgactttcaactgagtcactcaaaaattagtaaaatcatttcaggtagtatgtgtttttctttttcctgctttcaaaagcaatctccagaggagtttttttagccacttatttaaaatgttaatgaaggaacctgtgagtgcggggtcacagaaacgagcagttgatttaagtcattccaacgcataagccagttccaaatgcactgagaggtgaggaggggaagatgcaaagggtgccttgggaagaactgcttttgcggtaagcccctggcgcctcctagcatgcccgctgcgatggcattcaccccactgcagtcgtggtcatcaaggtgactttgttgttttagaaggatctgttgtggtcagggttctacctgtccttccctagaccatggccctccaggcggttctaggcaggtcccagcaaaaaagtactggggtagaaaccaaggaccaggcccacagaaacagggaccccaggggcttgcaagggggagtgctgactgccaggtgcagaatccatagaattacccaccatgggagacagagggacctgtgcaaatccctggggagagtgttagaatttccccaaatacagtaaaagagaaaagtgctcatactttatcacgtgaaagactaatgatgtctaggagctgacacagaacacgaggactctgaccaccgcaggaccagcgagatgtgtcaggacagaaatgagcaagcgtgagtctccgggcacacctggggaaagagtaatgcaaggcacacatcagggctgtgactcactcctcaaagcaggcttgggtccccagggtaagagtgaagagacagactccccacatcatgtagtgtggatggcagggctgcaggggwtgtagtcctcttgccggtgggctgccagagacctggcagccagacccacttcttagtgagggcacat

SEQ ID NO: 83877 - DNA, 731 bp, Homo sapiens
cccacctcttcagagatatttagggtattaagaaaggtggagacagagatgattagctttctgcaatatttagtacatgccttttcatcactgattaaattagcatcacactatcattgtaaaaaccactgcctgaatgaggcatatctatcatcaatcttatcagagtaaacatatgctagaaattaactaaaattgattaatactgtttcttgagtttcttcccaaggtgcaagcattcctctaagtgcacatttatttatttataccaaagaaagtttctccatctggagtgcagtggcagaatcttagctcaccgcagccttgaaatccaggattcaagtaatcctcccacttcaactttcaaartaaaaaagactataggtttatgccattgcacctagctaatttttcatttattcatcaaaaatatttttgaaattcttaggtgattacatgtgttacagtgaccagctggattagaattagattaggtttaaaacgatcagagagtctgggagagggggcagagtgttggttgttaattagcacgtggatcaaaggagattactgatgtctttagaagccacaacgttgacagaataaaagccagaactaacaatccaatcgtaaatctctttaccgtggtattttctgccatttctgctccataagacacacttaaaccactttgtcatgatatctgcagtattctattttagtctaaatag

SEQ ID NO: 83878 - DNA, 731 bp, Homo sapiens
cccacctcttcagagatatttagggtattaagaaaggtggagacagagatgattagctttctgcaatatttagtacatgccttttcatcactgattaaattagcatcacactatcattgtaaaaaccactgcctgaatgaggcatatctatcatcaatcttatcagagtaaacatatgctagaaattaactaaaattgattaatactgtttcttgagtttcttcccaaggtgcaagcattcctctaagtgcacatttatttatttataccaaagaaagtttctccatctggagtgcagtggcagaatcttagctcaccgcagccttgaaatccaggattcaagtaatcctcccacttcaactttcaaagtaaaaaagactataggtttatgccattgcacctagctaatttttcatttattcatcaaaaatatttttgaaattcttaggtgattacatgtgttacagtgaccagctggattagaattagattaggtttaaaacgatcagagagtctgggagagggggcagagtgttggttgttaattagcacrtggatcaaaggagattactgatgtctttagaagccacaacgttgacagaataaaagccagaactaacaatccaatcgtaaatctctttaccgtggtattttctgccatttctgctccataagacacacttaaaccactttgtcatgatatctgcagtattctattttagtctaaatag

SEQ ID NO: 83879 - DNA, 1180 bp, Homo sapiens
acaaatctattgcagcaaacactagatatctaaaatttttcaaaaatatattaaaaacttttggaacacacaaaatgacaacaattaataacctcatgtcataaaatgaatagcaataatatgagttacaaataagatcattaagtaagtttagacagttagatatttttatcactgtaatttactcttttaaaggaagagagaaataattttctccatataagttgcactcaccccaaggttctatgaatgtttcctgcagtaattcttccaagaaaaaattcttttaagtattccccaagatcaggagttcattccctgcacagttgactttcmaaggtcacctgaatgcagttaactctaagtgctgtcctcctctggagaaatatgagcttgtctcttctacatccttttatatgaatctttgaagaccacacccacctctttagtgatatttagggtattaagaatggtggagacagagatgattaggtttatgcaatatttagtacacaccttttcatcactgattaaattagcctcacactatcattgtaaaaaccactgcctgaatgaggcatatctatcatcaatcttattagagtaaacatatgctagaaattaactgaaattaatactatttcttgggtttcttccaaggcacaagcattcctctaagtgcacatttatttatttataccaaagaaagtttcaccctctggagtgcagtggcacactcttagctccccgcagcattgaattccagagctcaagtaatcctcccacttcagctttcaaagtaaaaaagactataggtttatgccattggacctagctaatttttcatttattcatcaaaaatattttttaaattcttagttgattacatgtgtcacaatgaccagctggattagaattagattaggtttaaaacaatgaaagaatctgggagagggggcagagtgttggttgttaattagcacatggatcaaaggagattactgatgtgtttagaagccaaaacactgacagaataaaagccagaactaacaatccaattgtaaatctctttactgtggtattttctgccatttctgctccataagacacaccttaaccactttgttgtggtatctgcagtattctattttagtctaaatagcattttctctcaaatgca

SEQ ID NO: 83880 - DNA, 1180 bp, Homo sapiens
acaaatctattgcagcaaacactagatatctaaaatttttcaaaaatatattaaaaacttttggaacacacaaaatgacaacaattaataacctcatgtcataaaatgaatagcaataatatgagttacaaataagatcattaagtaagtttagacagttagatatttttatcactgtaatttactcttttaaaggaagagagaaataattttctccatataagttgcactcaccccaaggttctatgaatgtttcctgcagtaattcttccaagaaaaaattcttttaagtattccccaagatcaggagttcattccctgcacagttgactttccaaggtcacctgaatgcagttaactctaagtgctgtcctcctctggagaaatatgagcttgtctcttctacatmcttttatatgaatctttgaagaccacacccacctctttagtgatatttagggtattaagaatggtggagacagagatgattaggtttatgcaatatttagtacacaccttttcatcactgattaaattagcctcacactatcattgtaaaaaccactgcctgaatgaggcatatctatcatcaatcttattagagtaaacatatgctagaaattaactgaaattaatactatttcttgggtttcttccaaggcacaagcattcctctaagtgcacatttatttatttataccaaagaaagtttcaccctctggagtgcagtggcacactcttagctccccgcagcattgaattccagagctcaagtaatcctcccacttcagctttcaaagtaaaaaagactataggtttatgccattggacctagctaatttttcatttattcatcaaaaatattttttaaattcttagttgattacatgtgtcacaatgaccagctggattagaattagattaggtttaaaacaatgaaagaatctgggagagggggcagagtgttggttgttaattagcacatggatcaaaggagattactgatgtgtttagaagccaaaacactgacagaataaaagccagaactaacaatccaattgtaaatctctttactgtggtattttctgccatttctgctccataagacacaccttaaccactttgttgtggtatctgcagtattctattttagtctaaatagcattttctctcaaatgca

SEQ ID NO: 83881 - DNA, 736 bp, Homo sapiens
ggatcctcttgcttcagcctcccaagtagctaggactacaggctcacaccatcccacctggctaatgttttttaaaacttttcatagagtcagggtatggctctgtagcccaggmtgttctccaactcctgtcttcaaatgatcctctggtcttggacttccaaagtgcttgggagtacaggcataaaccacctcttccagtcctaaatgctgctttagtacatttataggctattcccagagaagtccaacaggaagataaaacttttttttattttctaccactctaagagaaatcactgattaaccaaataaccccactaatttgaggtctcttattgaatttacaaaactttgccaatctcatgggtgaaatataagttattgttttaaggcttttctccacatagtgcatgatgttctatgatgactagaaatgcaatgtaataatttgaggattataaacaagttttaggacataggctaattcacaaatacagaatccaaatgatagggatggattatatttttctttctttaacaaatatttttgctgtcatgtgacaattaaaaaaagaagagatttttagaagcggctactcaaacgttttctgacagaggaattctttgccaatagcccccacaagacttatagtcaagagtgcttatgtattttctcagcttattttatgtttaaccacatacaaatcatggagaaaatgtatctatggttatg

SEQ ID NO: 83882 - DNA, 734 bp, Homo sapiens
  misc_feature (1)...(734): n = A,T,C or G
tnnnnnnnnnnnnnnnnnnnnnnnnnnnnnnnnnnnnnnnnnnnnnnnnnnnnnnnnnnnnnnnnnnnnnnnnnnnnnnnnnnnnnnnnnnnnnnnnnnnnacccaggataaattccctttcaatgaactcaaagccaaccttaattaatctgcaaaacctcttcacctttgctatataatgtaatctattcactggagtaaaattccatcatattcaccactcctgcctacatcaaggggaaggcatgcacaccaagggtcaggaatctttggacaattttagaattctacctaccacacagatgctagtgcccatatattcttaaactacatacttcctcccccaaagcaatgaacattggtctgagcctcagcagacaaacaaaagttataccatgtaagtgcagcgaaggaattatgcaccaagtggaaagaagcacagtaaggaaaaatggtctactgtgcataggtggtagggttggagaggggagatttamggggagcttcaagagctgatgtttcaactggatggccaagaagaggaccacaccttctcacttttctgtctccactgcctagcagtcttggggctcatagtagacactcgataaacgtctgttgacatgaaagaccatgtgagtgtcttctaggcagattaggggaaagagcattctagatagaggaaacatcgtgtgcagaggcccagagatgtgaagccatatgctatgttcaa

SEQ ID NO: 83883 - DNA, 734 bp, Homo sapiens
  misc_feature (1)...(734): n = A,T,C or G
tnnnnnnnnnnnnnnnnnnnnnnnnnnnnnnnnnnnnnnnnnnnnnnnnnnnnnnnnnnnnnnnnnnnnnnnnnnnnnnnnnnnnnnnnnnnnnnnnnnnnacccaggataaattccctttcaatgaactcaaagccaaccttaattaatctgcaaaacctcttcacctttgctatataatgtaatctattcactggagtaaaattccatcatattcaccactcctgcctacatcaaggggaaggcatgcacaccaagggtcaggaatctttggacaattttagaattctacctaccacacagatgctagtgcccatatattcttaaactacatacttcctcccccaaagcaatgaacattggtctgagcctcagcagacaaacaaaagttataccatgtaagtgcagcgaaggaattatgcaccaagtggaaagaagcacagtaaggaaaaatggtctactgtgcataggtggtagggttggagaggggagatttacggggagcttcaagagctgatgtttcaactggatggccaagaagaggaccacaccttctcacttttctgtctccactgcctagcagtcttrgggctcatagtagacactcgataaacgtctgttgacatgaaagaccatgtgagtgtcttctaggcagattaggggaaagagcattctagatagaggaaacatcgtgtgcagaggcccagagatgtgaagccatatgctatgttcaa

SEQ ID NO: 83884 - DNA, 734 bp, Homo sapiens
  misc_feature (1)...(734): n = A,T,C or G
tnnnnnnnnnnnnnnnnnnnnnnnnnnnnnnnnnnnnnnnnnnnnnnnnnnnnnnnnnnnnnnnnnnnnnnnnnnnnnnnnnnnnnnnnnnnnnnnnnnnnacccaggataaattccctttcaatgaactcaaagccaaccttaattaatctgcaaaacctcttcacctttgctatataatgtaatctattcactggagtaaaattccatcatattcaccactcctgcctacatcaaggggaaggcatgcacaccaagggtcaggaatctttggacaattttagaattctacctaccacacagatgctagtgcccatatattcttaaactacatacttcctcccccaaagcaatgaacattggtctgagcctcagcagacaaacaaaagttataccatgtaagtgcagcgaaggaattatgcaccaagtggaaagaagcacagtaaggaaaaatggtctactgtgcataggtggtagggttggagaggggagatttacggggagcttcaagagctgatgtttcaactggatggccaagaagaggaccacaccttctcacttttctgtctccactgcctagcagtcttggggctcatagtagacactcgayaaacgtctgttgacatgaaagaccatgtgagtgtcttctaggcagattaggggaaagagcattctagatagaggaaacatcgtgtgcagaggcccagagatgtgaagccatatgctatgttcaa

SEQ ID NO: 83885 - DNA, 734 bp, Homo sapiens
  misc_feature (1)...(734): n = A,T,C or G
tnnnnnnnnnnnnnnnnnnnnnnnnnnnnnnnnnnnnnnnnnnnnnnnnnnnnnnnnnnnnnnnnnnnnnnnnnnnnnnnnnnnnnnnnnnnnnnnnnnnnacccaggataaattccctttcaatgaactcaaagccaaccttaattaatctgcaaaacctcttcacctttgctatataatgtaatctattcactggagtaaaattccatcatattcaccactcctgcctacatcaaggggaaggcatgcacaccaagggtcaggaatctttggacaattttagaattctacctaccacacagatgctagtgcccatatattcttaaactacatacttcctcccccaaagcaatgaacattggtctgagcctcagcagacaaacaaaagttataccatgtaagtgcagcgaaggaattatgcaccaagtggaaagaagcacagtaaggaaaaatggtctactgtgcataggtggtagggttggagaggggagatttacggggagcttcaagagctgatgtttcaactggatggccaagaagaggaccacaccttctcacttttctgtctccactgcctagcagtcttggggctcatagtagacactcgataaacgtctgttgacatgaaagaccatgtgagtgtcttctaggcagattaggggaaagagcattctagatagaggaaacatcgtgtgcagaggcccagagatgtgaagccayatgctatgttcaa

SEQ ID NO: 83886 - DNA, 815 bp, Homo sapiens
aagagtaccctaaaagagatatttgttaatgagatattcttctttcctgagcctctctcttgaaccagtcactatccccaacacaataccatcaggtattaatatccagatgtctgcactgacattgatagcattagtgcaaaggttttgccagctgaaaatgcaaaatagtctttgatcaaatgttaaagacacatttggatttctttgatttttttttttttttttaaatggagtttccctgttgcccaggctggagtacagtggcatgatctcrgcttgctgcaacatccgcctcccggatgttcaagcgattcttttgcctcagcctcccaagaggcttgggctgcaggcacgcaccaccgcacctggctaatttttatatttttagtagagacaggttttgccaggttggccaggctggtcttgaactcctgacctcaaatgatccacccacctcggccaaagtgctgagattacaggtgtgagccaccgcacccggcctctttgaatattaatatatcctagtaatatgaggaatatgacctaaaagtagaaataaagaagtacatatacttaacaggtgatgagattttgttttacttatgctttacttatgcttttctctgaaatgccatgggagattcagtccctaatatttggcagagggaggtgataaggaatccttctataactgttgctgctgctgtttgggcaagtggaatatatatacatacattttattatgaacacaaatgtaaatactgacttaccattgggatgttggcaactgtctgtcaactaagatcccaaag

SEQ ID NO: 83887 - DNA, 573 bp, Homo sapiens
caaacttttaagtagttaacttgttttctaaaaaccttggttttggctatagtaattgattagcaaattcagagaagaaaataactgaaaaacaattagttgtcattatgcaaataaaacagttgactgactgaatcttttatttatttatttwtttttccagctgttctgctgtgaagtaggggggcataagctttgaattctataaaggaagggatattaaactgatggattatttcttgcaaaagcagctgttggttttaaactacttgtactcaaatatgtatctctgcagacataaaatattttaaagtattatttttggttctacataggattttgaccatattttaaatgaaaccataatctttttagaaaaaagattccttaaaacttactaaataaaatcctgatattttagatctgaggacattgaagtccaatgactaaacaattcatttgccattctaaggtcacacaatttgttgatggctgagaaaggattctcaattcttatacttttattctggtaatcattctattaagctgcttctctcactgtactaactccat

SEQ ID NO: 83888 - DNA, 701 bp, Homo sapiens
attactcctttctgtacacactgacctggaaagtgttaatgacaaatgaatcaacggagatagaatagatacacataatgtcattttagtaagataaatagaaataaagaaggtaccagtctgttcaattggaataaaaaaacactgcctgtttctaataagtcttttcatatcttcaacgtatttgatttttgtctttgcatagaagagaaaataatgtctgttatttattatttgattttcattgtagaaacttgacttcagtgaagtcacaggaaggaagttgatgatttttagtaggcatatatatatcactatatatgtagtgcaaacttccccagcacctctgtcttctctacaagccccatttgcatatgggagtccatatggggatctatgtggttccaagraagctcacttcactctctggccccagggttcatgacttaggctacacaaatcagcacattccacccacctggccacaggaccacagtgattcattacctggtgcattatacaacctcaagaagcccaatcaaaataaatctcaagacttttgtcggaattgctgggtcaagggctctctctcctgctctggaaataggaactctaatactcctccagacattttactacgatgaggaaaatcagcttgagaatgaagccaaaacctagagaattacaaagaaattaagcca

SEQ ID NO: 83889 - DNA, 627 bp, Homo sapiens
cacttgctgaatacaggattagagggggactctcagacataaccaattaataaatcagcctccctagcagcctggggagcagaggcaagggtgcaaggccaataattttgccacatttcaaatagcaaatgcactcatccctacccagaactcccaccctcaaccccacctcacacacccagcacatccttcttgcttctcaagattatacccattccaagaatcagctcaatttctaccttcctgagactttcttccccaacscccataaccacatcaatatctaccttctctaaattcctctatatcctttattctcaatcctgctctcttgctaacccatgttgctatcttccctgtaataatagctaacactttaatttttaccatgtgccaggcactatactaaaagctttacaggaatgacctcatttagtcctcacagcaaccctatgatgtagtttttattatcattcacagaagagaaatgttcatatgaggaaactgaggtttagagagctaaaataaccttcccagggtccacatctaataaataatgggccaggcaatccaccaggttgtctggcccaaatcctgccctcttaatagcgaaatgtacagccactc

SEQ ID NO: 83890 - DNA, 759 bp, Homo sapiens
ttttggggtggatgaaggtatcctgaaaggagactgtggtgacggcagtatataaatggctgtaaatacaccaaaatccagtgaactatatattttcaatgggtaaactttgttatataaattacatctcaataaaactgttraaaatacacacctaactgaagcatcatacagggtgttaaagacagagctgaaaaagaaataggctattattatttcttgtcaggcatgtggattttctctggcttgagttttgaattgggagtgagagagaaccttccttatctctcatttgctgccagagacatctatttattggtaaagaaatgtaattgaaacttcttgatcaaggcctacctcaagagcaatttatttggattaaatggctttccttaataacttccacatctatcaaaattctgcagtcttttctaggcctccaggtcagttttggaaaacaagcagctactttgtatgaaactgaactttgacacttttgaacttataatgccaaggaaaactccaggcatgttgacatcagtaccatctgctgatgggcaattgctccacacaaacagagctcaaagtgtctgtggcagtgaactgagatgttgcttagctagcagccctgtgaatcttcctcccgagaactcactgatgttatggtaatctaataacatatatggaacaataacagcacattgcaatgaaaatgctgcatggttacaactcaatgaagaccattctccctcttctggg

SEQ ID NO: 83891 - DNA, 1272 bp, Homo sapiens
tgcatctatccattcgtccacctttccatccatttatctatccatctattcacccatccctccctccttctcactttccctcaggtcctgcatatggacacctagacatgtctagacatccatgtagccatgagcccacctgtaacatcactcatgcacagccttgcctgctgttttgtagccagatgatcacgactatgggtggcagaatatcaacagcagggtgggaaacctggggccactggaattgggcacatctgtgaaaatgtccctggatctttcctttgtgtctcatttcttagaggactcagggattatagcacttgtgttatttatcaagtttctctactgctggcctctgctcaagggagttagaagaaacggcaggagtgagtctctggaaagcccttaactcagagccccacacagatgaagatgctggtcttgagacctcaaataataattattatgtgaaaatagatcaaagcaatatctctgacctgcaaaatattgagaggggaaaatcacgtattacattttctaaagatacaaacactattttccattaggcaaaacagtctagaaagcaaggcgaagtctgaagtcgacttgaaagagccagataagttgtaagatttatttgcctaaaccagggccccggaaaaccttgtttatctgtttacactgctccccgctataccggactasaataattcccatgtactacttgctgggggtccaggaagggaaactgaaactgattcacccctaggatatcagggccataatctagttacaagcatagactttgaggacaaatgtcttgatatttgaatttcacttctgctgtttattagcagtgcattagctgaacatgtcaccaatctgatcttcaagtttctgacttgtagaatgacagcgatcattcttactataaggtttggtgcagattttctgaaagtgcttgcaaagcacctgccatgtagagagggctccatcaaacagtatggatgttgttataaatttcattcctgcccctaaagagggaattcttgacaagacatccccagcccctgacttgtggattgagcctgctgatgttcagtcagtggtgggaaatgagacctgctaatgggaccctgtaccgcaccacggtgctgaactgttgggaagataaagcaagaagtcagataaagtctggtaagccaggtgcctcatcatgaaaaacatctacaaggagctctcacatacctggaactaaattctgaacct

SEQ ID NO: 83892 - DNA, 450 bp, Homo sapiens
ggatcctcagaaawtgcacagaaagaaggctagctgattggatgagtggttggatggcttcaggaatcttttcataaataatcctccttgagtgaaacccttcataaaatgtttttgtaatatcaaccattaatactcagattatcaacacagattctataaattaaaatttctctataatccgttagaacactgtcattttactttatgctggtctctagaagccatgctatgacctgattaagtattatattgtcatattctggccaggagagctcaactggactttgcctttatttttctttgtttttctgtaaaaagtaaagaggctagaaaattaaagaaaataaaaaattaacacattgaaagtcacacctagatttttcagactgtaacattttactgtatttgcttcagatcatttataagaggaataacacattgcaattg

SEQ ID NO: 83893 - DNA, 748 bp, Homo sapiens
tttctaaatattaaaaaatatgtatattttttgagaaaaaattctctgaaatcaaaaattaatgtaaagtgggtaaaaacacatttaatccatccaggaaaaaggtatcagtgcatactcattacaaactttgtgtaaatttttaagcacatcttcagttttcttcaaaaatcctatttgttggttttcatttgtttcattgctactgtcaacagaaatcttcttacgagaattacaaataaataggaaaactgttgattcctgcttctttattcattctagaaacattattcttctgtcattaattttaaaaatagttaatggattcttttatgctacctagatatgcaaagatattagcagacmtaatgaaatctttttctctgtatttctaattgtttattatttctgttttatgagttagggatactgatgatggcatttatctacttcacatttttaattctgaaattgtgttgttttactttccaacattacacacacttattggattgagatgccttctttttattacatgaaagaaatgctctttgattgctttttttatttttatcaataattaggtgctaaaattaatgaaatatttttaagcttttaaaataatctgtaattataggcttaatttcaccttttattgataaatatgtaggaaggtattttaataaatttataaatattaggttttgttcttgatgttccaatgtgtactggataatagtcagcaaat

SEQ ID NO: 83894 - DNA, 748 bp, Homo sapiens
tttctaaatattaaaaaatatgtatattttttgagaaaaaattctctgaaatcaaaaattaatgtaaagtgggtaaaaacacatttaatccatccaggaaaaaggtatcagtgcatactcattacaaactttgtgtaaatttttaagcacatcttcagttttcttcaaaaatcctatttgttggttttcatttgtttcattgctactgtcaacagaaatcttcttacgagaattacaaataaataggaaaactgttgattcctgcttctttattcattctagaaacattattcttctgtcattaattttaaaaatagttaatggattcttttatgctacctagatatgcaaagatattagcagacataatgaaatctttttctctgtatttctaattgtttattatttctgttttatgagttagggwtactgatgatggcatttatctacttcacatttttaattctgaaattgtgttgttttactttccaacattacacacacttattggattgagatgccttctttttattacatgaaagaaatgctctttgattgctttttttatttttatcaataattaggtgctaaaattaatgaaatatttttaagcttttaaaataatctgtaattataggcttaatttcaccttttattgataaatatgtaggaaggtattttaataaatttataaatattaggttttgttcttgatgttccaatgtgtactggataatagtcagcaaat

SEQ ID NO: 83895 - DNA, 993 bp, Homo sapiens
ttttaaagtgaatgtattgaaaattgaatgccaactgaaaataaataatggcaccttttaaaattaaattacaaaaggctttttctttgtcctttaccctattgtcatcctcagttagcataactgtcacatttctaccacttatatcctataacaaaaatggtttagaatataaaatgagataaaacacatacctaattctacttaagtgaatctgtgataaatgtacttggtttcttataaaggaaaaattcaatgttattctactaattgattgtgtcttctacataagagtctgttagtaacttacctgagtttatttatatcattattacttttaatatacaatgttctctgaatatatttgcacttcaatraggagagacagaatgaaacaaaccattaatgtgttaaaatgttatatatactaagggacaacataatatttatggtaaaaataaagttataaagtattttttgtccttcttaataagccctaaaaaatgaacccataaaattgaattactttttaagcctaaaagcaaaaacaaaccaaacaaaggacagctgaagctgtattttgccgatagattactctctctttgtgtatgggtatgtgtatgtgtactgttacaatgaacactctgccagaatacatgaatcattctaattatctaggagggaaactgcaaaacaaaacataaaatcctaaccgtcaaatactattaactaaaactaatttacagaatttctcaatttttatgaaccaaatggataatatccaagctttcaaatgcagtaattgcagaaacactttacctatatcaaaacactttattagagcacttcagtcatattaaagtactatatagttttacacatgtacttttatttttttatttgctaattacgaattatgtaaacaaacaaaacatcatttataaccaataagaattgaagccccaagaaattgaacgtaatagataaaattga

SEQ ID NO: 83896 - DNA, 995 bp, Homo sapiens
gagacaattcacagaatgggagaaaatatttgcaaactacccacctgacaagggattaataaccaaattagacttttcagctataacatctagatttttgcatttcataaggagtaagctgggtactaatgaaattcatttattaaagrtcgacagactattatatatttctaaagttattatgttgggaatagctacctgaatgttcctgaaatcatctgacatagatagtcatgtgtcaagtatatacagatgttggcacttatttgaagttccctccagaagctctggcatagtgttgctgtgaaatgtatggcaatataaagagtaatgcaaaagatgaacactcagaatgctaaagagtcagttctggcaaaccaggttgtctgcttctatacattcacccaacctgttctccaaagtatttgctgagaacaaggctggcttataaaaaacaaatttggcaaaccgcagtcgatgggccaaatctggcttggggcttatgtttgtaaagtctgaaagataaaagattttttttttttacacttgtgaaaggtagtaagaaagaatataatacagatagtgtaagtggctcaagagattaaactatttacttcctggctctttttttacagaaaatttttgccatgccttgccttgtaaaatgaagggatccaaaaccaaaacctaaatcaacagcaatagatggaaaactgatctattacatcagaccacatcagatttttaattacacagaagacatttaaacatgaaatgtcttcctctttgatgctacataaccaacaagcattaatctactattataaaccaacaaatacaaacacacttaccactgaaaaaagcatattatttcttgttttgtgctcaaatataaaacatattggttagcatgtcctcctgttacctattgttaataaaacaagagacccaacattcttcatgttcaccagagtttcctttatgccaaatgtata

SEQ ID NO: 83897 - DNA, 995 bp, Homo sapiens
gagacaattcacagaatgggagaaaatatttgcaaactacccacctgacaagggattaataaccaaattagacttttcagctataacatctagatttttgcatttcataaggagtaagctgggtactaatgaaattcatttattaaagatcracagactattatatatttctaaagttattatgttgggaatagctacctgaatgttcctgaaatcatctgacatagatagtcatgtgtcaagtatatacagatgttggcacttatttgaagttccctccagaagctctggcatagtgttgctgtgaaatgtatggcaatataaagagtaatgcaaaagatgaacactcagaatgctaaagagtcagttctggcaaaccaggttgtctgcttctatacattcacccaacctgttctccaaagtatttgctgagaacaaggctggcttataaaaaacaaatttggcaaaccgcagtcgatgggccaaatctggcttggggcttatgtttgtaaagtctgaaagataaaagattttttttttttacacttgtgaaaggtagtaagaaagaatataatacagatagtgtaagtggctcaagagattaaactatttacttcctggctctttttttacagaaaatttttgccatgccttgccttgtaaaatgaagggatccaaaaccaaaacctaaatcaacagcaatagatggaaaactgatctattacatcagaccacatcagatttttaattacacagaagacatttaaacatgaaatgtcttcctctttgatgctacataaccaacaagcattaatctactattataaaccaacaaatacaaacacacttaccactgaaaaaagcatattatttcttgttttgtgctcaaatataaaacatattggttagcatgtcctcctgttacctattgttaataaaacaagagacccaacattcttcatgttcaccagagtttcctttatgccaaatgtata

SEQ ID NO: 83898 - DNA, 995 bp, Homo sapiens
gagacaattcacagaatgggagaaaatatttgcaaactacccacctgacaagggattaataaccaaattagacttttcagctataacatctagatttttgcatttcataaggagtaagctgggtactaatgaaattcatttattaaagatcgacagactattatatatttctaaagttattatgttgggaatagctacctgaatgttcctsaaatcatctgacatagatagtcatgtgtcaagtatatacagatgttggcacttatttgaagttccctccagaagctctggcatagtgttgctgtgaaatgtatggcaatataaagagtaatgcaaaagatgaacactcagaatgctaaagagtcagttctggcaaaccaggttgtctgcttctatacattcacccaacctgttctccaaagtatttgctgagaacaaggctggcttataaaaaacaaatttggcaaaccgcagtcgatgggccaaatctggcttggggcttatgtttgtaaagtctgaaagataaaagattttttttttttacacttgtgaaaggtagtaagaaagaatataatacagatagtgtaagtggctcaagagattaaactatttacttcctggctctttttttacagaaaatttttgccatgccttgccttgtaaaatgaagggatccaaaaccaaaacctaaatcaacagcaatagatggaaaactgatctattacatcagaccacatcagatttttaattacacagaagacatttaaacatgaaatgtcttcctctttgatgctacataaccaacaagcattaatctactattataaaccaacaaatacaaacacacttaccactgaaaaaagcatattatttcttgttttgtgctcaaatataaaacatattggttagcatgtcctcctgttacctattgttaataaaacaagagacccaacattcttcatgttcaccagagtttcctttatgccaaatgtata

SEQ ID NO: 83899 - DNA, 995 bp, Homo sapiens
gagacaattcacagaatgggagaaaatatttgcaaactacccacctgacaagggattaataaccaaattagacttttcagctataacatctagatttttgcatttcataaggagtaagctgggtactaatgaaattcatttattaaagatcgacagactattatatatttctaaagttattatgttgggaatagctacctgaatgttcctgaaatcatctgacatagatagtcatgtgtcaagtatatacagatgttggcacttatttgaagttccctccagaagctctggcatagtgttgctgtgaaatgtatggcaatataaagagtaatgcaaaagatgaacactcagaatgctaaagagtcwgttctggcaaaccaggttgtctgcttctatacattcacccaacctgttctccaaagtatttgctgagaacaaggctggcttataaaaaacaaatttggcaaaccgcagtcgatgggccaaatctggcttggggcttatgtttgtaaagtctgaaagataaaagattttttttttttacacttgtgaaaggtagtaagaaagaatataatacagatagtgtaagtggctcaagagattaaactatttacttcctggctctttttttacagaaaatttttgccatgccttgccttgtaaaatgaagggatccaaaaccaaaacctaaatcaacagcaatagatggaaaactgatctattacatcagaccacatcagatttttaattacacagaagacatttaaacatgaaatgtcttcctctttgatgctacataaccaacaagcattaatctactattataaaccaacaaatacaaacacacttaccactgaaaaaagcatattatttcttgttttgtgctcaaatataaaacatattggttagcatgtcctcctgttacctattgttaataaaacaagagacccaacattcttcatgttcaccagagtttcctttatgccaaatgtata

SEQ ID NO: 83900 - DNA, 995 bp, Homo sapiens
gagacaattcacagaatgggagaaaatatttgcaaactacccacctgacaagggattaataaccaaattagacttttcagctataacatctagatttttgcatttcataaggagtaagctgggtactaatgaaattcatttattaaagatcgacagactattatatatttctaaagttattatgttgggaatagctacctgaatgttcctgaaatcatctgacatagatagtcatgtgtcaagtatatacagatgttggcacttatttgaagttccctccagaagctctggcatagtgttgctgtgaaatgtatggcaatataaagagtaatgcaaaagatgaacactcagaatgctaaagagtcagttctggcaaaccaggttgtctgcttctatacattcacccaacctgttctccaaagtatttgctgagaacaaggctggcttataaaaaacaaatttggcaaaccgcagtcgatgggccaaatctggcttggggcttatgtttgtaaagtctgaaagataaaagattttttttttttacacttgtgaaaggtagtaagaaagaatataatacagatagtgtaagtggctcaagagattaaactatttacttcctggctctttttttacagaaaatttttgccawgccttgccttgtaaaatgaagggatccaaaaccaaaacctaaatcaacagcaatagatggaaaactgatctattacatcagaccacatcagatttttaattacacagaagacatttaaacatgaaatgtcttcctctttgatgctacataaccaacaagcattaatctactattataaaccaacaaatacaaacacacttaccactgaaaaaagcatattatttcttgttttgtgctcaaatataaaacatattggttagcatgtcctcctgttacctattgttaataaaacaagagacccaacattcttcatgttcaccagagtttcctttatgccaaatgtata

SEQ ID NO: 83901 - DNA, 995 bp, Homo sapiens
gagacaattcacagaatgggagaaaatatttgcaaactacccacctgacaagggattaataaccaaattagacttttcagctataacatctagatttttgcatttcataaggagtaagctgggtactaatgaaattcatttattaaagatcgacagactattatatatttctaaagttattatgttgggaatagctacctgaatgttcctgaaatcatctgacatagatagtcatgtgtcaagtatatacagatgttggcacttatttgaagttccctccagaagctctggcatagtgttgctgtgaaatgtatggcaatataaagagtaatgcaaaagatgaacactcagaatgctaaagagtcagttctggcaaaccaggttgtctgcttctatacattcacccaacctgttctccaaagtatttgctgagaacaaggctggcttataaaaaacaaatttggcaaaccgcagtcgatgggccaaatctggcttggggcttatgtttgtaaagtctgaaagataaaagattttttttttttacacttgtgaaaggtagtaagaaagaatataatacagatagtgtaagtggctcaagagattaaactatttacttcctggctctttttttacagaaaatttttgccatgccttgccttgtaaaatgaagggatccaaaaccaaaacctaaatcaacagcaatagatggaaaactgatctattacatcagaccacatcagatttttaattacacagaagacatttaaacatgaaatgtcttcctytttgatgctacataaccaacaagcattaatctactattataaaccaacaaatacaaacacacttaccactgaaaaaagcatattatttcttgttttgtgctcaaatataaaacatattggttagcatgtcctcctgttacctattgttaataaaacaagagacccaacattcttcatgttcaccagagtttcctttatgccaaatgtata

SEQ ID NO: 83902 - DNA, 1089 bp, Homo sapiens
tgctctccctccccttgcccccggaacccccgacaggttccagtgtgtgatgttcccctccttgtgtccatgtgttctcatttttcaacccctgcttatgagtgacaacatgtggggtttggttttctgttcctgtgttagtttactgagaaggatggcttctaacagctggatatttctataagccaatgagggcccaaggaaaaagaaaaatgttctcttaatgtattgtaaacttttgcttagaaaagcatctcataccataaattcttccatttaacgtaattgaagagttaacgatgactttctcagaaagcaagcttctctttacttcttaggcatgtatatttctatatttctatgagactattgatgcctacttgagaaagcaacatctagtaagttctcagtgtttgcttacgaactctctttttctgtcaaacttattcattttctgagtgtcctctcctcattgcttatttttgttgattttgttgaagatcagatggttgtaggcattaaaaacatacatcagtataatagccatctatgacaaacacacagccaacatgaaagagttaatgatgaatcttttttagaaagtaagcttccatttatttctaggggtgtatttttctttttaccttttctttaataatttcaactattattttagattcaggggatacatgtgtaggtttgctacatgggtatattgagtgaaactaaggtgtgaggtacaaatgatcctgtcacccaggtagtaagcatagtacccaataggtagtttttcagccctttcccttctcccactcctagtaatacccagtgtctattgttgtaatctttatgtccctgtgtacccaatgtttagctctcacttataaatgagaacatgacatatttggttttctattyctgcattagttcccataaaataatggcgtctggctgtatccatgttgctgcaaaggagatgattttgttcttttttatggctgtacagtatagtgtgtatgcacactttctttatcagttccactgttgatgggcattattccatgtctttgctattgtgaatagtgttgt

SEQ ID NO: 83903 - DNA, 1423 bp, Homo sapiens
aggaaaagttcataaaaagagattaatttattgataaattgcatgattatataaaaataggctaacatttctgtatgacaacagtggagctgagtgacactgcttcctttacaacagaatgctacatgttccctgtgacagggttcattgcagtcctcttcatttacttatgttatctacctgaccctggtacgcatttgactttctaatctctgctgtcaaatttccttttcttacatgtagcattgaattaaaaaaatgtaacaataaaagatgtttaaatatataagtatctgtccaaaattaataattcccgttatcatttttagttttctatttttcttcactcatctctacttattctttcttttttaattttaaattttcttttatctgaatcttaccattgcttgttttaatgcctgtatattatggcatttgtttactttaatccatcagagattttgtcatttaaccttgctctctagcagtctagtaataaatgattttgtaaagtaatacactacctttttttattttgtgggaacagggtctcactctgatgcctggctggactgcagtgtaagatcatagctcaaagcagcctggaaaytgtgggctcaagaaatcctcctgcctcagcctcacaatagctaggattacaggcatgagccactgcatctggctggaatatactaatttcgtttaaagcaagttatctcttttgcttcacgtcttgtaaaatcattgtgaaaaacatttcatgtcttcaaatgtttttaggatccagggaaaatttagaaaaaaaatgagaaattaaagggagatatagagagaaatagtaaattaatgaattggtgattagctgattgacatggtttggctctgtccccacccaaatctcaccttgaattgcaataatccccccacctgtcaagggcaggtccaggtagagataattgaatcatgggggtggtttcctccatgctgttctcagaatggtgaattctcacaagatctcatggctatataaggggcttcccccttcactcagaattcattctctctcctgctgccctctgaagaggtgacttctgccatgattgaaagtttcctgaggcctccccagccatgtggaactgtgagtcaattaaacttattttcttcataaattacccagtctcagatatttcctcatagcatcatgataatggattaataaactgaccaaacactaaattcagaaacgtgcaaggcaccagccaaaaatctaattacaataactgcctctggtagctagttggatatataagggaacacactgccccaaacatatttttatagaagttatgaaaactgatacattcttagctactttgggccttgaatttaaaaatttccagggtgataattttcattaaaa

SEQ ID NO: 83904 - DNA, 918 bp, Homo sapiens
aactcccagagggtataaaacagttattgtttatccttacaattattatatattcaagtctgaacataaaagcaattgatcttttctgtaaaatgctgattctattaacaaacccacctttaaatattactcrctgttccaaactgctttttgtagactgcttcagccagtactttggagggggcagtcaaccatgttgctgtactgatcctcacacaactacagaaattacaaatatgttttcacaggagcagcaagacctcattaatcaagttgtacacacttccatcagccacaggcagagccaatgggtctgtctcagatgtcccaccctaaattctgtatttgttcactttagtttatagagaataaagccttgtaaaaaataaatctgatggctctactaatggcataatttgtttttctcagctactcctcctcctcccaatggcaaattacttttaaaagtaagtatcaaaaatacatttcacaaagcatgatcttcataatttatcacataacacttgtctcctaaagtaggttttttttgttattttacctgcttatctaaaaataagtcaatacatttaagcatcctccttttgcaactgtctatacatgccctctatttttaaatcataatcactactgagtcacagatggacagatgaacccatgtaaaaaaaaaacattccttgataaatcgatctttccaacttttatcctaatagtatgaatgctcatattcagtcaaattgcttgaacatcacctatgatgctatttttatgtgaaataaagtaaaaataaatttcttggttttgctaccttagaaacttatacatagaaacaccatactgactaaaatgcattattaaactctagatcatatcaatcaaacataagtatattttcctctc

SEQ ID NO: 83905 - DNA, 739 bp, Homo sapiens
acagtggaatgttatttggccatagaaggaagtactgacactagctacagcatgaatgaacctcaaaaacattatgttaaatgaaagaaattggtcagaaaagactacatatggtatgatgccattcatgcgagagtccagagttgagaaatctatagcaggggtcyccaaacccccagccatggactggtattggtggcccgttaggaacgaggctgcacagcaggaggtgagcagcaggcaagtgaatgaagcttcatctgtatttacagcatgtctcaggactcacaggctttttttttttttttaaattgaggcagggtcttgtgctgtcacccaggctagagagcagtggcacaatcatggctcactgtaaacttgaactcctgggctcaagtgatcctcctgcctcagcctcctgactagctagcactacaggcacacaccaccatgctcagcattttttttttaaatttttttttaatttttgtagagacaaggtcttggtgtgttgcccaggctggtcttgagctcacagcctcaagagatcctcctgtctcagcctcccgaagtgctaggattacaggcgtgagccaccgcaccccacgtactttagttttttggaatgagtcaaccagtggcctaacctggggtggagaatcctcaggggtccatttccagagcctcctgtcttcagaattaagcaaaaggattcagctcagcctaaacaactccatct

SEQ ID NO: 83906 - DNA, 739 bp, Homo sapiens
acagtggaatgttatttggccatagaaggaagtactgacactagctacagcatgaatgaacctcaaaaacattatgttaaatgaaagaaattggtcagaaaagactacatatggtatgatgccattcatgcgagagtccagagttgagaaatctatagcaggggtccccaaacccccagccatggactggtattggtggcccgttaggaacgaggctgcacagcaggaggtgagcagcrggcaagtgaatgaagcttcatctgtatttacagcatgtctcaggactcacaggctttttttttttttttaaattgaggcagggtcttgtgctgtcacccaggctagagagcagtggcacaatcatggctcactgtaaacttgaactcctgggctcaagtgatcctcctgcctcagcctcctgactagctagcactacaggcacacaccaccatgctcagcattttttttttaaatttttttttaatttttgtagagacaaggtcttggtgtgttgcccaggctggtcttgagctcacagcctcaagagatcctcctgtctcagcctcccgaagtgctaggattacaggcgtgagccaccgcaccccacgtactttagttttttggaatgagtcaaccagtggcctaacctggggtggagaatcctcaggggtccatttccagagcctcctgtcttcagaattaagcaaaaggattcagctcagcctaaacaactccatct

SEQ ID NO: 83907 - DNA, 739 bp, Homo sapiens
acagtggaatgttatttggccatagaaggaagtactgacactagctacagcatgaatgaacctcaaaaacattatgttaaatgaaagaaattggtcagaaaagactacatatggtatgatgccattcatgcgagagtccagagttgagaaatctatagcaggggtccccaaacccccagccatggactggtattggtggcccgttaggaacgaggctgcacagcaggaggtgagcagcaggcaagtgaatgaagcttcatctgtatttacagcatgtctcaggactcacaggctttttttttttttttaaattgaggcagggtcttgtgctgtcacccaggctagagagcagtggcacaatcatggctcactgtaaacttgaactcctgggctcaagtgatcctcctgcctcagcctcctgactagctagcactacaggcacacaccaccatgctcagcattttttttttwaatttttttttaatttttgtagagacaaggtcttggtgtgttgcccaggctggtcttgagctcacagcctcaagagatcctcctgtctcagcctcccgaagtgctaggattacaggcgtgagccaccgcaccccacgtactttagttttttggaatgagtcaaccagtggcctaacctggggtggagaatcctcaggggtccatttccagagcctcctgtcttcagaattaagcaaaaggattcagctcagcctaaacaactccatct

SEQ ID NO: 83908 - DNA, 739 bp, Homo sapiens
acagtggaatgttatttggccatagaaggaagtactgacactagctacagcatgaatgaacctcaaaaacattatgttaaatgaaagaaattggtcagaaaagactacatatggtatgatgccattcatgcgagagtccagagttgagaaatctatagcaggggtccccaaacccccagccatggactggtattggtggcccgttaggaacgaggctgcacagcaggaggtgagcagcaggcaagtgaatgaagcttcatctgtatttacagcatgtctcaggactcacaggctttttttttttttttaaattgaggcagggtcttgtgctgtcacccaggctagagagcagtggcacaatcatggctcactgtaaacttgaactcctgggctcaagtgatcctcctgcctcagcctcctgactagctagcactacaggcacacaccaccatgctcagcattttttttttawatttttttttaatttttgtagagacaaggtcttggtgtgttgcccaggctggtcttgagctcacagcctcaagagatcctcctgtctcagcctcccgaagtgctaggattacaggcgtgagccaccgcaccccacgtactttagttttttggaatgagtcaaccagtggcctaacctggggtggagaatcctcaggggtccatttccagagcctcctgtcttcagaattaagcaaaaggattcagctcagcctaaacaactccatct

SEQ ID NO: 83909 - DNA, 739 bp, Homo sapiens
acagtggaatgttatttggccatagaaggaagtactgacactagctacagcatgaatgaacctcaaaaacattatgttaaatgaaagaaattggtcagaaaagactacatatggtatgatgccattcatgcgagagtccagagttgagaaatctatagcaggggtccccaaacccccagccatggactggtattggtggcccgttaggaacgaggctgcacagcaggaggtgagcagcaggcaagtgaatgaagcttcatctgtatttacagcatgtctcaggactcacaggctttttttttttttttaaattgaggcagggtcttgtgctgtcacccaggctagagagcagtggcacaatcatggctcactgtaaacttgaactcctgggctcaagtgatcctcctgcctcagcctcctgactagctagcactacaggcacacaccaccatgctcagcattttttttttaaawttttttttaatttttgtagagacaaggtcttggtgtgttgcccaggctggtcttgagctcacagcctcaagagatcctcctgtctcagcctcccgaagtgctaggattacaggcgtgagccaccgcaccccacgtactttagttttttggaatgagtcaaccagtggcctaacctggggtggagaatcctcaggggtccatttccagagcctcctgtcttcagaattaagcaaaaggattcagctcagcctaaacaactccatct

SEQ ID NO: 83910 - DNA, 1039 bp, Homo sapiens
aatgtttaaatgaatgaatgagttgatggatggatgggtggataattccttcagtgcttctccgtgcaaggtgaccaactatcctagtttgctcaggacatgggacttccggcactaaacccaggcaagtctcaggcaaactgggaaaagctggccaccctacctacctccatgacaccacataaaacctgactccagtcagcctggattaaatcctagtcacttgctaatcttgtgtattttatgatttcctcatttcacacatttgtgtccagtcttcygattttgctggagagcatagatctttccgtagggtgacccacagtaacccttcagggctacacagaaacaggctttgaaagatcttcattatcatcattatttaaactcttcatgtgtgttttttctctaaatctcccagtgacttcatgaggtagatattctccttctcattttacacgagactgtagaaccctggagtctgagtgaccaatccaagctagcacacctaggatgttgtaggatttaaaactggtgtaagccgggcgcagtggctcacacctataatcaccacaatttgggtggccgaggcagaaagatctcttgaggccaggagttcaagaccagcctgggcaacatagtgagaccctgtctctacaaaaaaatgtaaaaattagccggatgcagtggcaagcaccagtagtcccagcaacttgggacgctgagacaggaggatgcttgagctcaggaggtcaaggctgcggtgagctatgatcacaccactgcactccagtctaggcaacagagtgaggccctgtctctaaaataaaaacaaaacaggcctgttggagtctgaatcctatgcttaaggggcacccaggttggtccctcttcagcactcaggcccagattctgtagggtgtggcagctgcccatcaccctcactgggtccctgaatgcatggctggatgaaagtccctcagagtcctgttctccagctgctagcccaggaccttgagctctagagagaagagaatca

SEQ ID NO: 83911 - DNA, 1474 bp, Homo sapiens
  misc_feature (1)...(1474): n = A,T,C or G
actggcacctcatgggtagaggcgagggatgccactcancatcctacagtgcacaggacagcccccatcacaaagaatcatccagaaagtcaatagtgcagagatggagaaacccaatggaggcctcctttcaatcagtgttttagggtaggtaggttctctggagcagaagctgagacagactttgaggtccaagggatcaacattgtgaaagggaggaagagaaggaggaggaggaggagcagnnagaagaggaggaggcggtrgcaggactgggcatcagtgagatgagggagatgaagttgagttgaaaaataaaataaaataaaagtgatttcttgcttgtggcatttttagcttgtgcaaatcgtccctgtaatatttcttcttccatttttaagaagttgaactgtgatgtgggcacaagaccttggccagccccatgggcatagatgacctgtcagagttgtccctgccatgggccaaattggccaggtctttatattcctgtaggggtcagtcactggatacaggctgaactgggaagggtacagcctgtgcgagctggctgcagacagcagaggcaattcctgaggggggctgacagctgtaggccatctgtgagccaccttcccagcagctgaactctaagtccttccttgaaggcggatccaggtggcttatcaccgtgttcatcacaatgaataaccattgacctgctagttcatgcatccactaattcaggaagttttggtgaaaagagcagtcccagttagaacctacacatagatgagtaggtctccataagccaatgcgattagcacaactgaagacaaaggagaagcctggaaaataaaatttatatttctaactttgttttccctaagtcaaatgagatgcatacaacgtatctcttggtcagcattaagatgaatgggtgaattgatgaatgaatgaatgaatgagaggttgcagtggctcatgcctgtaatcccagcactttgggaggccgagacaggtggattgcttgaacccaggggttcaagaccagcctgggcaacatagcaagaccccgtctctacaaaagattttaaaattagctgggtgtggtggcgtgcatctgtggtcccagctactcaggatgctgaggtgggtggatcacttgagcctgggaggttgaggctgcagtgagctatgtttgcaccactgcactccagcctgtgtgacagagcaagaccctatctcaaaaaataaagaaagaaaagaaaagaagggggcatagtaatagtggccattgattatttagtgtgccaggagctctgctaagtgatctatatatatgatctctcaacctcacaaaagccttttagggtttttcaccccattttatggataaggcttgacttaatcacctattgctgcagaacaaactacctaaaaatatagtggcttaaagcactcacatggctgttgg

SEQ ID NO: 83912 - DNA, 1474 bp, Homo sapiens
  misc_feature (1)...(1474): n = A,T,C or G
actggcacctcatgggtagaggcgagggatgccactcancatcctacagtgcacaggacagcccccatcacaaagaatcatccagaaagtcaatagtgcagagatggagaaacccaatggaggcctcctttcaatcagtgttttagggtaggtaggttctctggagcagaagctgagacagactttgaggtccaagggatcaacattgtgaaagggaggaagagaaggaggaggaggaggagcagnnagaagaggaggaggcggtggcaggactgggcatcagtgagatgagggagatgaagttgagttgaaaaataaaataaaataaaagtgatttcttgcttgtggcatttttagcttgtgcaaatcgtccctgtaatatttcttcttccatttttaagaagttgaactgtgatgtgggcacaagaccttggccagccccatgggcatagatgacctgtcagagttgtccctgccatgggccaaattggccaggtctttatattcctgtaggggtcagtcactggatacaggctgaactgggaagggtacagcctgtgcgagctggctgcagacagcagaggcaattcctgaggggggctgacagctgtakgccatctgtgagccaccttcccagcagctgaactctaagtccttccttgaaggcggatccaggtggcttatcaccgtgttcatcacaatgaataaccattgacctgctagttcatgcatccactaattcaggaagttttggtgaaaagagcagtcccagttagaacctacacatagatgagtaggtctccataagccaatgcgattagcacaactgaagacaaaggagaagcctggaaaataaaatttatatttctaactttgttttccctaagtcaaatgagatgcatacaacgtatctcttggtcagcattaagatgaatgggtgaattgatgaatgaatgaatgaatgagaggttgcagtggctcatgcctgtaatcccagcactttgggaggccgagacaggtggattgcttgaacccaggggttcaagaccagcctgggcaacatagcaagaccccgtctctacaaaagattttaaaattagctgggtgtggtggcgtgcatctgtggtcccagctactcaggatgctgaggtgggtggatcacttgagcctgggaggttgaggctgcagtgagctatgtttgcaccactgcactccagcctgtgtgacagagcaagaccctatctcaaaaaataaagaaagaaaagaaaagaagggggcatagtaatagtggccattgattatttagtgtgccaggagctctgctaagtgatctatatatatgatctctcaacctcacaaaagccttttagggtttttcaccccattttatggataaggcttgacttaatcacctattgctgcagaacaaactacctaaaaatatagtggcttaaagcactcacatggctgttgg

SEQ ID NO: 83913 - DNA, 1474 bp, Homo sapiens
  misc_feature (1)...(1474): n = A,T,C or G
actggcacctcatgggtagaggcgagggatgccactcancatcctacagtgcacaggacagcccccatcacaaagaatcatccagaaagtcaatagtgcagagatggagaaacccaatggaggcctcctttcaatcagtgttttagggtaggtaggttctctggagcagaagctgagacagactttgaggtccaagggatcaacattgtgaaagggaggaagagaaggaggaggaggaggagcagnnagaagaggaggaggcggtggcaggactgggcatcagtgagatgagggagatgaagttgagttgaaaaataaaataaaataaaagtgatttcttgcttgtggcatttttagcttgtgcaaatcgtccctgtaatatttcttcttccatttttaagaagttgaactgtgatgtgggcacaagaccttggccagccccatgggcatagatgacctgtcagagttgtccctgccatgggccaaattggccaggtctttatattcctgtaggggtcagtcactggatacaggctgaactgggaagggtacagcctgtgcgagctggctgcagacagcagaggcaattcctgaggggggctgacagctgtaggccatctgtgagccaccttcccagcagctgaactctaagtccttccttgaaggcggatccaggtggcttatcaccgtgttcatcacaatgaataaccattgacctgctagttcatgcatccactaattcaggaagttttgrtgaaaagagcagtcccagttagaacctacacatagatgagtaggtctccataagccaatgcgattagcacaactgaagacaaaggagaagcctggaaaataaaatttatatttctaactttgttttccctaagtcaaatgagatgcatacaacgtatctcttggtcagcattaagatgaatgggtgaattgatgaatgaatgaatgaatgagaggttgcagtggctcatgcctgtaatcccagcactttgggaggccgagacaggtggattgcttgaacccaggggttcaagaccagcctgggcaacatagcaagaccccgtctctacaaaagattttaaaattagctgggtgtggtggcgtgcatctgtggtcccagctactcaggatgctgaggtgggtggatcacttgagcctgggaggttgaggctgcagtgagctatgtttgcaccactgcactccagcctgtgtgacagagcaagaccctatctcaaaaaataaagaaagaaaagaaaagaagggggcatagtaatagtggccattgattatttagtgtgccaggagctctgctaagtgatctatatatatgatctctcaacctcacaaaagccttttagggtttttcaccccattttatggataaggcttgacttaatcacctattgctgcagaacaaactacctaaaaatatagtggcttaaagcactcacatggctgttgg

SEQ ID NO: 83914 - DNA, 383 bp, Homo sapiens
attccctctgctcctttttaatgtgtcctgttggctcgctcctatcagagtcctccatgtccacttaaagggracttctggaagccttcttgcctacagtgagatctgcctccactgagcttacatctcccatatcgatgctcgtctgaggtcattgactgacttgcagttcttaagcttctagaaggcaggattgtatcttctacatgagagggccagatgaagccatgagctctggtcccagacgtcagcaggcttcaaagcccagttctgccccttaaacaagatactgaatgccactgcctcttaacctcagtttctttctttcttttttttttttttttttctgggacagagtctcactctgtcacacaggctggagt

SEQ ID NO: 83915 - DNA, 383 bp, Homo sapiens
attccctctgctcctttttaatgtgtcctgttggctcgctcctatcagagtcctccatgtccacttaaaggggacttctggaagccttcttgcctacagtgagatctgcctccactgagcttacatctcccatatcratgctcgtctgaggtcattgactgacttgcagttcttaagcttctagaaggcaggattgtatcttctacatgagagggccagatgaagccatgagctctggtcccagacgtcagcaggcttcaaagcccagttctgccccttaaacaagatactgaatgccactgcctcttaacctcagtttctttctttcttttttttttttttttttctgggacagagtctcactctgtcacacaggctggagt

SEQ ID NO: 83916 - DNA, 682 bp, Homo sapiens
acttattacaactctatggactatgtgtgttgctatccttaccttaaatttacagattagaaaaattaaggcatagaaaggtcatgtatctttcttaaggttgcacagctagatttgatacagagcatctggctacataaggtattttgttaaccrcaactactgctactgttccctgcagagcatggttaatgaaaacaacctggaaaaccagttgacaagaaaagagtgtagacttatggtttctgtcttagtccattcagcctgctataacagaattacatgaattgggtggcatgtaaacaggagaaatctagttctcagttctggagcctggaaaattcaagatctacgcaccagcagattccgtgagaacccaaggagaacctaatttctgtcagtgagaacccaagtcctcactgtgtcttcacacagtgggaagggagaactctggtctcttcagcccctcataagggtactaataccactggtgaggcctcatcttcatgacctaataatcatctcccaagggccctacctcccaataccattacattggttattaggtttcaacacataagttttggtgggccacaaatattcggtccatagcagtttttcatccaataccgttatgtcaatcaacagattaatggataaaaaacgatgtggcatatatact

SEQ ID NO: 83917 - DNA, 540 bp, Homo sapiens
caaacctgcatattctgcacatgtatcccagaactgaaaattaaaaaataaaattaaaaaaatttcctgtattgcttctagttacttttttagatttgtttttgatatctagatatttaatctatttggaatttgtttctgaaaattatgtgaagtaatatctaacttagttttttccaaatatacagctgattgcctcaacatctctaatttctcctgttttaaaaaatgctaagcatatagttatatttacatatctttacatatgtgtactatatagttttatatatgtattaaacatatgtcaaataaatatccatgcttacctgtatatatagcatatgtttatataacatacagatgtgtatttatattttgtttcattgatatattgtactttttatgccactaatacattattttaattattatattctagagtatagtttaatataataaaaagtctctatttattatccytttctgatatttttatacatttaattttccacatgcagaattgcaagtttttaatggatc

SEQ ID NO: 83918 - DNA, 1062 bp, Homo sapiens
tgttccttggatcagactgacagggccagtctgaaagcacagtctgtaccatttacagtttttactggtcatggaaggctgcacccatattcttaggataacatccaattgtgctrtgattatgcagacccactagaatatcacaaaaatatgtgtgttgtgtttttctatattcctgtatttaggtcaaaatttacaaattaaaaaagtgaatggctcgactgtgagaattagagacaaagagacaattaaaaatcaacttgcttttgcatacttcattatcataaaacaaacatgacaggaacaactaaaactgactggctaaatatgaacaggtcatttttagaaaattgtttttagtcctatataattgagcagcataatatcttcaggattgttatggctagttgcttctttttccgaggaaggtacaatctttatagaaaactaaacttaaagttcagggtgtaattgtcatttttataaatactgagtttttctccttgatcgcctgcatctaatcatgaataagcctaagtcacattgaatatatatatatatatatatatatatatatatatatatatatacatacagacacacacacacacacacacacaaacatatctcaaacatcaaaaactctgggttaaagcagaagagaaggaggccagtttggagactttatattaagtctgagatgaccagaagaaagagatattgtgtattaaagtgggaggctccaagcaagtcctggaaatggagtaggggctatttacaaatgtttacctccatctcaaatgtcatttatatatccaagtgatgctgtcttctgaaatagtgaccactatacacacaagccatagcatatttaagccacaaaatcactgtttaacaagtcagtcataagtcctcctatctagaaaatagcaacattccattcattagaatactagatccagtagtcttaatttgagctcattttttgtatccttaggtatggcctcctgctatttaaaagggtgtggcacagaaagacaaataccatatgttctcactttt

SEQ ID NO: 83919 - DNA, 1062 bp, Homo sapiens
tgttccttggatcagactgacagggccagtctgaaagcacagtctgtaccatttacagtttttactggtcatggaaggctgcacccatattcttaggataacatccaattgtgctatgattatgcagacccactagaatatcacaaaaatatgtgtgttgtgtttttctatattcctgtatttaggtcaaaatttacaaattaaaaaagtgaatggctcgactgtgagaattagagacaaagagacaattaaaaatcaacttgcttttgcatacttcattatcataaaacaaacatgacaggaacaactaaaactgactggctaaatatgaacaggtcatttttagaaaattgtttttagtcctatataattgagcagcataatatcttcaggattgttatkgctagttgcttctttttccgaggaaggtacaatctttatagaaaactaaacttaaagttcagggtgtaattgtcatttttataaatactgagtttttctccttgatcgcctgcatctaatcatgaataagcctaagtcacattgaatatatatatatatatatatatatatatatatatatatatatacatacagacacacacacacacacacacacaaacatatctcaaacatcaaaaactctgggttaaagcagaagagaaggaggccagtttggagactttatattaagtctgagatgaccagaagaaagagatattgtgtattaaagtgggaggctccaagcaagtcctggaaatggagtaggggctatttacaaatgtttacctccatctcaaatgtcatttatatatccaagtgatgctgtcttctgaaatagtgaccactatacacacaagccatagcatatttaagccacaaaatcactgtttaacaagtcagtcataagtcctcctatctagaaaatagcaacattccattcattagaatactagatccagtagtcttaatttgagctcattttttgtatccttaggtatggcctcctgctatttaaaagggtgtggcacagaaagacaaataccatatgttctcactttt

SEQ ID NO: 83920 - DNA, 1062 bp, Homo sapiens
tgttccttggatcagactgacagggccagtctgaaagcacagtctgtaccatttacagtttttactggtcatggaaggctgcacccatattcttaggataacatccaattgtgctatgattatgcagacccactagaatatcacaaaaatatgtgtgttgtgtttttctatattcctgtatttaggtcaaaatttacaaattaaaaaagtgaatggctcgactgtgagaattagagacaaagagacaattaaaaatcaacttgcttttgcatacttcattatcataaaacaaacatgacaggaacaactaaaactgactggctaaatatgaacaggtcatttttagaaaattgtttttagtcctatataattgagcagcataatatcttcaggattgttatggctagttgcttctttttccgaggaaggtacaatctttatagaaaactaaacttaaagttcagggtgtaattgtcatttttataaatactgagtttttctccttgatcgcctgcatctaatcatgaataagcctaagtcacattgaatatatatatatatatatatatatatatatatatatatatatacayacagacacacacacacacacacacacaaacatatctcaaacatcaaaaactctgggttaaagcagaagagaaggaggccagtttggagactttatattaagtctgagatgaccagaagaaagagatattgtgtattaaagtgggaggctccaagcaagtcctggaaatggagtaggggctatttacaaatgtttacctccatctcaaatgtcatttatatatccaagtgatgctgtcttctgaaatagtgaccactatacacacaagccatagcatatttaagccacaaaatcactgtttaacaagtcagtcataagtcctcctatctagaaaatagcaacattccattcattagaatactagatccagtagtcttaatttgagctcattttttgtatccttaggtatggcctcctgctatttaaaagggtgtggcacagaaagacaaataccatatgttctcactttt

SEQ ID NO: 83921 - DNA, 1062 bp, Homo sapiens
tgttccttggatcagactgacagggccagtctgaaagcacagtctgtaccatttacagtttttactggtcatggaaggctgcacccatattcttaggataacatccaattgtgctatgattatgcagacccactagaatatcacaaaaatatgtgtgttgtgtttttctatattcctgtatttaggtcaaaatttacaaattaaaaaagtgaatggctcgactgtgagaattagagacaaagagacaattaaaaatcaacttgcttttgcatacttcattatcataaaacaaacatgacaggaacaactaaaactgactggctaaatatgaacaggtcatttttagaaaattgtttttagtcctatataattgagcagcataatatcttcaggattgttatggctagttgcttctttttccgaggaaggtacaatctttatagaaaactaaacttaaagttcagggtgtaattgtcatttttataaatactgagtttttctccttgatcgcctgcatctaatcatgaataagcctaagtcacattgaatatatatatatatatatatatatatatatatatatatatatacatacasacacacacacacacacacacacaaacatatctcaaacatcaaaaactctgggttaaagcagaagagaaggaggccagtttggagactttatattaagtctgagatgaccagaagaaagagatattgtgtattaaagtgggaggctccaagcaagtcctggaaatggagtaggggctatttacaaatgtttacctccatctcaaatgtcatttatatatccaagtgatgctgtcttctgaaatagtgaccactatacacacaagccatagcatatttaagccacaaaatcactgtttaacaagtcagtcataagtcctcctatctagaaaatagcaacattccattcattagaatactagatccagtagtcttaatttgagctcattttttgtatccttaggtatggcctcctgctatttaaaagggtgtggcacagaaagacaaataccatatgttctcactttt

SEQ ID NO: 83922 - DNA, 1062 bp, Homo sapiens
tgttccttggatcagactgacagggccagtctgaaagcacagtctgtaccatttacagtttttactggtcatggaaggctgcacccatattcttaggataacatccaattgtgctatgattatgcagacccactagaatatcacaaaaatatgtgtgttgtgtttttctatattcctgtatttaggtcaaaatttacaaattaaaaaagtgaatggctcgactgtgagaattagagacaaagagacaattaaaaatcaacttgcttttgcatacttcattatcataaaacaaacatgacaggaacaactaaaactgactggctaaatatgaacaggtcatttttagaaaattgtttttagtcctatataattgagcagcataatatcttcaggattgttatggctagttgcttctttttccgaggaaggtacaatctttatagaaaactaaacttaaagttcagggtgtaattgtcatttttataaatactgagtttttctccttgatcgcctgcatctaatcatgaataagcctaagtcacattgaatatatatatatatatatatatatatatatatatatatatatacatacagacacacacacacacacacacacamacatatctcaaacatcaaaaactctgggttaaagcagaagagaaggaggccagtttggagactttatattaagtctgagatgaccagaagaaagagatattgtgtattaaagtgggaggctccaagcaagtcctggaaatggagtaggggctatttacaaatgtttacctccatctcaaatgtcatttatatatccaagtgatgctgtcttctgaaatagtgaccactatacacacaagccatagcatatttaagccacaaaatcactgtttaacaagtcagtcataagtcctcctatctagaaaatagcaacattccattcattagaatactagatccagtagtcttaatttgagctcattttttgtatccttaggtatggcctcctgctatttaaaagggtgtggcacagaaagacaaataccatatgttctcactttt

SEQ ID NO: 83923 - DNA, 2224 bp, Homo sapiens
  misc_feature (1)...(2224): n = A,T,C or G
aaaattggaaaaagaaaataaaggtaaaaaagaaggggaaaaggaagaactttaaatctaagtcattcctaccaagtgaatattggtgtcaaaattcacgaaaaaaaatcaagaaaaggaatatggagatatattaaaacaataaagtataaaaacgaagttatttctaggaataactttttaactttagaagacctattaatatatttcatccaattaacattttaagggtaaatattactagatattttcaatagatgttcaagtgatttttgataatatacaaatacatttctgatttaaacacattagtaaagcaatagaaggaattttccttagtatggataaatacatatttaacctgatgcttagagtaacaatttcagtatgctgtctgtataaaattaggaataatagaagactctccatgatcaccattaccatttagtattttttctggaagtgccagtcacaagctaagaaaatgtaataaggagaaatttggacatgagtaggcaagtctgtctatatttgaaatatgactatacttgtatggcaatggtttctgtgaaaaaaattccctctctccggtgcttgggccctctgaacacatgtcacttttgtaacaagattttctccgtttggtaactagactgtacctaaaagaatggaagaaacttaggccttgtgttaggaactaaatgacacaaatttgcaatattgcagtggtttgaattaaggtaaaaatgctgtgaggttggtgcttagtaatgacataaataatgagtaaattattttgaattaaactgttctgaaacacttagaaataagaaaattaccctaatttttactgtaaatgtaggtgacaggtacatataaataaacrtgtataaaacttttataatataagaagatataatggtataaaataaaaatttaatatgctgaaacatactaaaatgcatatacaataaataaaattatatagctaactggaaaaaatgaggcaaaaatgcaacagttttgtcaaaatgataaaattatgctgatatttttcctttatcaaaaatatatttaatatttttnnnnnnnnnnnnnnnnnnnnnnnnnnnnnnnnnnnnnnnnnnnnnnnnnnnnnnnnnnnnnnnnnnnnnnnnnnnnnnnnnnnnnnnnnnnnnnnnnnnnttcttattttcttctcctctaccccttcacttttctctttgttttgcttcttatttttggttaagaaatactacttgagtcatgtgtggccacatgtgtcaaattacacagtgagaaggccctttcatgccctaacttgtgccagcttcgttttccttcagggctgtctttcctgcgaacaacccctcttctgccccctggaactcatttttcttgctgtggtgttctgttgcaaagtaagtctgaagttattaagaaaggcaatgacaaaatgccaacaggaacatcgtatattacatgcagggcctactataaacaaatcactggaaatgctgcacaggtacaagtcactacattaaaacaacatatttttgtttgatcgagaaatactttttgagcatctattttgtgccagaactgttagtatcccattgtagctacccaacaaagggaagcaaaaataagagataatcatcatcccctcactaatacttttgattttctctgtttcaagtaaaatgaacatactcacttcattaaaatttcaaacattatacaagattgacataaaatgaaataaaaagatcttatccttctttccaaaattttcattaacattcctcagaagtaaagagtcttaacagtttactgtacatcctttcagaatatttatatatttatctaccatataaatctccttgggatgctataagaaaatgccatagacttaaaaacagattatttgtttctcacagttttgaaggctgggaagcctatctatcaagtcctatccatcaaggtcctatcaaggtcctggaaaatttgatttctggtaagggcccgctttctggcctgcagatggctgccttcttgcttctcacatggtagagagaaagtaatttcttttaaaaaattttatcatattttaagtttcaggatccatgtgaaggatgtgcaggtttgtttaataggtaaatgtgtgccgtggtagtttgctgcacctatcaacccatcacctaggtattaagctcagcatgca

SEQ ID NO: 83924 - DNA, 996 bp, Homo sapiens
taagatatggtacataataaaaatgcaaaaaggacccttaatttatttttagataaggaagccagggccttaataactgtttaaagtgcccagcttttagaaatcaagaccaaaattttaatgattataagaaattattttggaaatggttgagatctttctactactcatgtcagaataataacttggtgaacaatagtactggagtaacctgttattatttgaataaatgtagatagaatttttacaagacctttctgttagatttaaacacacagctgcccctccccaccctccctctgactccctgtcaaaggtcaaaggcagattagcatagaggtcttggggggaactctgaattcaggcrgtctgagctcaaatctttactctgtacatcccgaatcatgtattcctggcaatctgaataactctgcttcagttcctcacttggaaaatagaggttgtaatgtacccgcatcctagtgttactttatatttctattcaacagtgccctttctttccctgcccgctttgctttgcttgcctgcctgcctgcctgcctgcctgccttccttccttccttccttccttccttccttccttccttccttcttccttccttccttcctctctttctttctctctctctttctctgtttagctttcttgcttgccaaagtggcatccccttaattgcttccttttttctataataatatcctaatctactttatatgaagttgaaacaaaattgattcaactttttcttggccttcaaatgggtgtttctagccccctcaaagaaaatgtagtaaatttaaatgagcagggaaatataatgtttaaactatgatttggattatcctttgttttctatatggagccctttttcccccaagctgagcagcactatggtagctatcacattgttatcgctactgctttgttttattcattttaagacacatatgtttttcacatttcaacatctctga

SEQ ID NO: 83925 - DNA, 996 bp, Homo sapiens
taagatatggtacataataaaaatgcaaaaaggacccttaatttatttttagataaggaagccagggccttaataactgtttaaagtgcccagcttttagaaatcaagaccaaaattttaatgattataagaaattattttggaaatggttgagatctttctactactcatgtcagaataataacttggtgaacaatagtactggagtaacctgttattatttgaataaatgtagatagaatttttacaagacctttctgttagatttaaacacacagctgcccctccccaccctccctctgactccctgtcaaaggtcaaaggcagattagcatagaggtcttggggggaactctgaattcaggcggtctgagctcaaatctttactctgtacatcccgaatcatgtattcctggcaatctgaataactctgcttcagttcctcacttggaaaatagaggttgtaatgtacccgcatcctagtgttactttatatttctattcaacagtgccctttctttccctgcccgctttgctttgcttgcctgcctgcctgcctgcctgcctgcctkccttccttccttccttccttccttccttccttccttccttcttccttccttccttcctctctttctttctctctctctttctctgtttagctttcttgcttgccaaagtggcatccccttaattgcttccttttttctataataatatcctaatctactttatatgaagttgaaacaaaattgattcaactttttcttggccttcaaatgggtgtttctagccccctcaaagaaaatgtagtaaatttaaatgagcagggaaatataatgtttaaactatgatttggattatcctttgttttctatatggagccctttttcccccaagctgagcagcactatggtagctatcacattgttatcgctactgctttgttttattcattttaagacacatatgtttttcacatttcaacatctctga

SEQ ID NO: 83926 - DNA, 447 bp, Homo sapiens
ggccaagatgggcaggtgtcacaaagaagagggccctaagggctcacaaccaaagtgatccgccaagcagggcagtatctgggttacagccacagcaggaagaaccactggagagacactcagaaggacttccctgacatctgcaccaaggagagtctggacaaagctactgaaactcctccaccygcttctaaaatgcccagaagacaactggaccagtttggtattagaagtaggaggctggacgacttcacccccaaagggtcctgaagccccagaactggcatgtggaaggggctgaggcctaattgaggttggtggattcacacatgggggtcctccaggacctcagctgcacccattttctggaggttttgctgcccacaacaccagtatttcacaacttcctggtcgctgagaatatttattcaaaaacagggattgaaa

SEQ ID NO: 83927 - DNA, 662 bp, Homo sapiens
tgcaccttgggaagccccgtggccccctttaaagatctccacctgatctatatccacctgtggtcctcacctgatcttacacagtcatctgtttgctgactggccccttttctcactggttcctagagggcagaggctgagcattcctcatgtttgcgaccccagaggctgcacaataccaggacatagtaggtgaaaaataattgttcaccgaatgtataatgagtggatgaattaatggactatctactcatagcccacctctctgaggagacctggagcccccagggtctgcattcctggagacaaattctgtcattccctcctctgtctcctctaccctggtaagggtgggcatgggcatggaatggacatgggctggtgctgaaagtcccagatcagaggtgaggaggctgggcactttgggactggaggagaaggatgacacggggaaggcaggggagggagaaataaagaaacctggaggggtcgggcacagtggtgctccctgtaatcccaccacttygggtggcaaaaaagggaggatcacttgaggccaggagatcaaggctgcagatcgtgccactgcactccagcctgggcaacacagtaagaccctatggaaggaagggaggaaggaaagaaaagaaggaagggaggga

SEQ ID NO: 83928 - DNA, 383 bp, Homo sapiens
ggattcccattcgtgcctgaaggctggacagtgactgtggaaacaaaacggttttgaggaaggtggttcgtttgttcttagtggtttgatacacrattctcccctatttctcttcttcattatacaggaaaatctacatgactgactaattattggagtaagtggctaagtttttggaaacaaaaggaggtactgagttggggcaaggcaaaaataaatccttaaattaaaaaaaaaagaaagttgatgcagaaacaaatcaaaccaaatattaaagatttaacacggatggagacctagaatccatgtgctaaacagtttcctctttatgaaaaatgtctgcagcccttgaacaacttagctcataaaagctgctgcacact

SEQ ID NO: 83929 - DNA, 1101 bp, Homo sapiens
tggctatatacacatctggtggtctgctgggaaatctgagytataattgcaaattcgagagtcgtttgcaatgactctctgaaagagaaaatcactgaggtagagcgtacagagataggaaagaaacagaaagaagtaaagtgaaggaaagaggcgagtagaggggagatgctgagaataaagttttgggtcacctcaatatttagaagactgacagagaaagatggaccagtaaacaagactggagccctgtaattgtgtatactagcaaaaaattgatttcttgttttattgtgccttttaaagtaggaaatattagagatgaaaagatctagaatgtatgatctagttgatcaagtgggagaggaagagactaattataacagcaaaatcctcaagcagaaaaggtggaataagaaccatggtgaaagtggagggattaaccactgttaaaatctaagacacatcatcctttatggtaagaaggaaggcaggcagataggtgtatccacacgttcatggatagcccagggagaagtccaaaaagttttcattcaattgcttgtcttttctctgtgaagcatgagtcaggttataagttgaaaatacaggtaaaggttagggagaaagaagtggttcacataagagcatgcaagtggattagaagagagcaaaaacattttggaaaaaacaaactagcaaggtttagtagggtcattaggcaatgatagaggcccaaatgtcatgttctgttaaaatgataagtgtagtgttcagatgcaatagggtgacactatctgtagatgattccagaggactcaggctctgccattctacagggaaatcttgagatgagttcatgtatcactaaaactcagattagctcttcactaatcctgaggccaagcagcaggtcttccactccataacaggaaattaaaaaaaaaaaaaaagtccaggtcagacataattacaagattcagtaaagatataagctacactatagcctcacaagcaaagaaatagaaacttagctgctttgagatttatcttactaaagcaaagaaagtcatgaaaagacatggcggaaatataaatgca

SEQ ID NO: 83930 - DNA, 1101 bp, Homo sapiens
tggctatatacacatctggtggtctgctgggaaatctgagttrtaattgcaaattcgagagtcgtttgcaatgactctctgaaagagaaaatcactgaggtagagcgtacagagataggaaagaaacagaaagaagtaaagtgaaggaaagaggcgagtagaggggagatgctgagaataaagttttgggtcacctcaatatttagaagactgacagagaaagatggaccagtaaacaagactggagccctgtaattgtgtatactagcaaaaaattgatttcttgttttattgtgccttttaaagtaggaaatattagagatgaaaagatctagaatgtatgatctagttgatcaagtgggagaggaagagactaattataacagcaaaatcctcaagcagaaaaggtggaataagaaccatggtgaaagtggagggattaaccactgttaaaatctaagacacatcatcctttatggtaagaaggaaggcaggcagataggtgtatccacacgttcatggatagcccagggagaagtccaaaaagttttcattcaattgcttgtcttttctctgtgaagcatgagtcaggttataagttgaaaatacaggtaaaggttagggagaaagaagtggttcacataagagcatgcaagtggattagaagagagcaaaaacattttggaaaaaacaaactagcaaggtttagtagggtcattaggcaatgatagaggcccaaatgtcatgttctgttaaaatgataagtgtagtgttcagatgcaatagggtgacactatctgtagatgattccagaggactcaggctctgccattctacagggaaatcttgagatgagttcatgtatcactaaaactcagattagctcttcactaatcctgaggccaagcagcaggtcttccactccataacaggaaattaaaaaaaaaaaaaaagtccaggtcagacataattacaagattcagtaaagatataagctacactatagcctcacaagcaaagaaatagaaacttagctgctttgagatttatcttactaaagcaaagaaagtcatgaaaagacatggcggaaatataaatgca

SEQ ID NO: 83931 - DNA, 1101 bp, Homo sapiens
tggctatatacacatctggtggtctgctgggaaatctgagttataattgcaaattcgagagtcgtttgcaatgactctctgaaagagaaaatcactgaggtagagcgtacagagataggaaagaaacagaaagaagtaaagtgaaggaaagaggcgagtagaggggagatgctgagaataaagttttgggtcacctcaatatttagaagactgacagagaaagatggaccagtaaacaagactggagccctgtaattgtgtatactagcaaaaaattgatttcttgttttattgtgccttttaaagtaggaaatattagagatgaaaagatctagaatgtatgatctagttgatcaagtgggagaggaagagactaattataacagcaaaatcctcaagcagaaaaggtggaataagaaccatggtgaaagtggagggattaaccactgttaaaatctaagacacatcatcctttatggtaagaaggaaggcaggcagataggtgtatccacackttcatggatagcccagggagaagtccaaaaagttttcattcaattgcttgtcttttctctgtgaagcatgagtcaggttataagttgaaaatacaggtaaaggttagggagaaagaagtggttcacataagagcatgcaagtggattagaagagagcaaaaacattttggaaaaaacaaactagcaaggtttagtagggtcattaggcaatgatagaggcccaaatgtcatgttctgttaaaatgataagtgtagtgttcagatgcaatagggtgacactatctgtagatgattccagaggactcaggctctgccattctacagggaaatcttgagatgagttcatgtatcactaaaactcagattagctcttcactaatcctgaggccaagcagcaggtcttccactccataacaggaaattaaaaaaaaaaaaaaagtccaggtcagacataattacaagattcagtaaagatataagctacactatagcctcacaagcaaagaaatagaaacttagctgctttgagatttatcttactaaagcaaagaaagtcatgaaaagacatggcggaaatataaatgca

SEQ ID NO: 83932 - DNA, 1101 bp, Homo sapiens
tggctatatacacatctggtggtctgctgggaaatctgagttataattgcaaattcgagagtcgtttgcaatgactctctgaaagagaaaatcactgaggtagagcgtacagagataggaaagaaacagaaagaagtaaagtgaaggaaagaggcgagtagaggggagatgctgagaataaagttttgggtcacctcaatatttagaagactgacagagaaagatggaccagtaaacaagactggagccctgtaattgtgtatactagcaaaaaattgatttcttgttttattgtgccttttaaagtaggaaatattagagatgaaaagatctagaatgtatgatctagttgatcaagtgggagaggaagagactaattataacagcaaaatcctcaagcagaaaaggtggaataagaaccatggtgaaagtggagggattaaccactgttaaaatctaagacacatcatcctttatggtaagaaggaaggcaggcagataggtgtatccacacgttcatggatagcccagggagaagtccaaaaagttttcattcaattgcttgtcttttctctgtgaagcatgagtcaggttataagttgaaaatacaggtaaaggttagggagaaagaagtggttcacataagagcatgcaagtggattagaagagagcaaaaacattttggaaaaaacaaactagcaaggtttagtagggtcattaggcaatgatagaggcccaaatgtcatgttctgttaaaatgataagtgtagtgttcagatgcaatagggtgacactatctgtagatgattccagaggactcaggctctgccattctacasggaaatcttgagatgagttcatgtatcactaaaactcagattagctcttcactaatcctgaggccaagcagcaggtcttccactccataacaggaaattaaaaaaaaaaaaaaagtccaggtcagacataattacaagattcagtaaagatataagctacactatagcctcacaagcaaagaaatagaaacttagctgctttgagatttatcttactaaagcaaagaaagtcatgaaaagacatggcggaaatataaatgca

SEQ ID NO: 83933 - DNA, 1101 bp, Homo sapiens
tggctatatacacatctggtggtctgctgggaaatctgagttataattgcaaattcgagagtcgtttgcaatgactctctgaaagagaaaatcactgaggtagagcgtacagagataggaaagaaacagaaagaagtaaagtgaaggaaagaggcgagtagaggggagatgctgagaataaagttttgggtcacctcaatatttagaagactgacagagaaagatggaccagtaaacaagactggagccctgtaattgtgtatactagcaaaaaattgatttcttgttttattgtgccttttaaagtaggaaatattagagatgaaaagatctagaatgtatgatctagttgatcaagtgggagaggaagagactaattataacagcaaaatcctcaagcagaaaaggtggaataagaaccatggtgaaagtggagggattaaccactgttaaaatctaagacacatcatcctttatggtaagaaggaaggcaggcagataggtgtatccacacgttcatggatagcccagggagaagtccaaaaagttttcattcaattgcttgtcttttctctgtgaagcatgagtcaggttataagttgaaaatacaggtaaaggttagggagaaagaagtggttcacataagagcatgcaagtggattagaagagagcaaaaacattttggaaaaaacaaactagcaaggtttagtagggtcattaggcaatgatagaggcccaaatgtcatgttctgttaaaatgataagtgtagtgttcagatgcaatagggtgacactatctgtagatgattccagaggactcaggctctgccattctacagggaaatcttgagatgagttcatgtatcactaaaactcagattagctcttcactaatcctgaggccaagcagcaggtcttccactccataacaggaaattaaaaaaaaaaaaaaartccaggtcagacataattacaagattcagtaaagatataagctacactatagcctcacaagcaaagaaatagaaacttagctgctttgagatttatcttactaaagcaaagaaagtcatgaaaagacatggcggaaatataaatgca

SEQ ID NO: 83934 - DNA, 1101 bp, Homo sapiens
tggctatatacacatctggtggtctgctgggaaatctgagttataattgcaaattcgagagtcgtttgcaatgactctctgaaagagaaaatcactgaggtagagcgtacagagataggaaagaaacagaaagaagtaaagtgaaggaaagaggcgagtagaggggagatgctgagaataaagttttgggtcacctcaatatttagaagactgacagagaaagatggaccagtaaacaagactggagccctgtaattgtgtatactagcaaaaaattgatttcttgttttattgtgccttttaaagtaggaaatattagagatgaaaagatctagaatgtatgatctagttgatcaagtgggagaggaagagactaattataacagcaaaatcctcaagcagaaaaggtggaataagaaccatggtgaaagtggagggattaaccactgttaaaatctaagacacatcatcctttatggtaagaaggaaggcaggcagataggtgtatccacacgttcatggatagcccagggagaagtccaaaaagttttcattcaattgcttgtcttttctctgtgaagcatgagtcaggttataagttgaaaatacaggtaaaggttagggagaaagaagtggttcacataagagcatgcaagtggattagaagagagcaaaaacattttggaaaaaacaaactagcaaggtttagtagggtcattaggcaatgatagaggcccaaatgtcatgttctgttaaaatgataagtgtagtgttcagatgcaatagggtgacactatctgtagatgattccagaggactcaggctctgccattctacagggaaatcttgagatgagttcatgtatcactaaaactcagattagctcttcactaatcctgaggccaagcagcaggtcttccactccataacaggaaattaaaaaaaaaaaaaaagtccaggtcagacataattacaagattcagtaaagatataagctacastatagcctcacaagcaaagaaatagaaacttagctgctttgagatttatcttactaaagcaaagaaagtcatgaaaagacatggcggaaatataaatgca

SEQ ID NO: 83935 - DNA, 1101 bp, Homo sapiens
tggctatatacacatctggtggtctgctgggaaatctgagttataattgcaaattcgagagtcgtttgcaatgactctctgaaagagaaaatcactgaggtagagcgtacagagataggaaagaaacagaaagaagtaaagtgaaggaaagaggcgagtagaggggagatgctgagaataaagttttgggtcacctcaatatttagaagactgacagagaaagatggaccagtaaacaagactggagccctgtaattgtgtatactagcaaaaaattgatttcttgttttattgtgccttttaaagtaggaaatattagagatgaaaagatctagaatgtatgatctagttgatcaagtgggagaggaagagactaattataacagcaaaatcctcaagcagaaaaggtggaataagaaccatggtgaaagtggagggattaaccactgttaaaatctaagacacatcatcctttatggtaagaaggaaggcaggcagataggtgtatccacacgttcatggatagcccagggagaagtccaaaaagttttcattcaattgcttgtcttttctctgtgaagcatgagtcaggttataagttgaaaatacaggtaaaggttagggagaaagaagtggttcacataagagcatgcaagtggattagaagagagcaaaaacattttggaaaaaacaaactagcaaggtttagtagggtcattaggcaatgatagaggcccaaatgtcatgttctgttaaaatgataagtgtagtgttcagatgcaatagggtgacactatctgtagatgattccagaggactcaggctctgccattctacagggaaatcttgagatgagttcatgtatcactaaaactcagattagctcttcactaatcctgaggccaagcagcaggtcttccactccataacaggaaattaaaaaaaaaaaaaaagtccaggtcagacataattacaagattcagtaaagatataagctacactatagcctcacaagcaaagaaatagaaacttagctgctttgakatttatcttactaaagcaaagaaagtcatgaaaagacatggcggaaatataaatgca

SEQ ID NO: 83936 - DNA, 656 bp, Homo sapiens
tagggttgattttaaactgtagatcccatcctcatttttatggaaattatgtaaaccagtgtattaccttattaagactatattggtaactataaatatgaaatatgctttattaacaaaggtttctattttgatacttgctgtgttgcttccattatgtgagactattaagtctttctgctgattaacttgtttttagcaaacacttaaaacataaaataatgaccaaatgctaaatattttatggtctacaccgactcacactttcctagtacaaaatttgagaatgtttacccccgaaaacttggttgaccragcataattacataaaattgatgagactcttataaaccaagtgtccataaacataattcacttattactaaaaaaacaccttattaattataaaagatgaagaaagaaaagctagaagggaccattagcatatacctattaaagtccatagacatagatgtcacaaagtggtaagacaagaaatcaatgtcagaaattaataaaatatattataaaatatagtattagacttaatcagattaagcatctggttttctttaaggaagtttcttttcatatacaggttaagaatggcttggctatgccttgaagaagactcacagccaacatggactattttt

SEQ ID NO: 83937 - DNA, 665 bp, Homo sapiens
cacttcagatgtcacaatccaaatcaaatctgcctctttggtttatatttaaaccaaagtttaaattaagttaaacttgtgcctcaaagtttatattcgcagcatgcctaccctggttgaactactatatgggctgagttgagggacacaggagattctctgggcaaaaatgctacagactatgttgttcttacctgaaattcagtggttttcatgaataaatgcttctcatttgactgtatacctttgattgattccagagcatcaaaataattataatttatagttttgtccaactttacaatggtcaaccaccttattcaatcatgctggatttcaaaattagatataatatccaaatttatcaaaattgcttgataaaatgcctatatacaaaataaattatattatcatataagcattaaacaaaaagaaaaatatatttcaaaaacataatgctgttttaatagcattgataattatcagatacctaataataaatctaagggatctgaaagacttctacagtgacatgtagagaacataactaaaacaaaataaatggaggctaacataaacattttccttggttggtagatgcaattgggtaaaaagtttaatgttatccatattgattcagagggtaaacttagttccaraagaaa

SEQ ID NO: 83938 - DNA, 1231 bp, Homo sapiens
tgcatggaatacaggggaactctttgggcatctcagtattaccatgccctgtgaataagatcagtaggaaactacaataacccaatccaggcagaactacaaatggccagacccttcaggaatgaaggtttgggtcacttcaccaggtaaaaattcacaacctgccgtggtgcttgctgaaggcaaaaggaatacacaataagtagtagaatagggtagtcatcaataccagctatgaccacgtaaccagttgcagaaacaaggactgtaattgtcaggtgtatttcctccttattttgttaagaccatgtttgtgtgtgtataaacttgtactaagaaaatatcttccttttatttcctttctttttcctttattacatgacataagatttattgacttcatatcagtatttaagtgtcattaactttaggtaatagcattgaggttatggattgatgaatttccagttgtacaaaggataggtatattatgttaggcataattataaccttacatgttatgtgaagtgttatagcctcagcttaccactgtgctttggccaaaaggcattgtgtgtgcgtgtgtgtgtgtatgtgtgtgtttgtataaagatgaaaagatgggagcatatgtgacaaggttttaacaaaggatgaatctgtttaaggggtaagtgggttttcattagtattttataaagttttctgtgggtttaagctacagttgacccttgaacagtaaggatttgaactgcccaggtccacttgtccacagatctctatgctgaatgtgtctgcctctcctgcctcctctttcacttcctccacttctgcctctgccactcctcaggaaacaagtccaatccctcctcttcctccttctcagcctattcaacatgaggacaccaaaggtgaagacctttatgataatctatttccactccatgactaaaaaatatattttatttttcttatgattttctcaacaacattttcttttctctagatgactttattgtaaaaatacagtatataatacacataacatacagactatgtattacttgactgtttatgttatcagtaaggcrtttggtcaacagtaggctaatagtacttaagtttttgtaagttttggggagtcaaaagttacatgtggattttcaactgcacaggagttggcactaaccttacattgttcaagggttgactgtatttcaaaataaaaaga

SEQ ID NO: 83939 - DNA, 721 bp, Homo sapiens
tctcctttcacatgtaaaatgtggattcagtgaacactgatcaaagtttcaaattaatgcaaccatttgcattttatctaycttttatctaccttcccttgttatttctttcctctttcccctacagcccactctttctcctttaaatattgaagtcttcaaaactctctttgggaagatcacaatgttcctttttggacacattctcaatcttggcaaaataaacctctaaaataattatgactcccctcagtcattttccttgatttatattcttttggctttgtacctcctggaatgtaggaattctgtctctcatccttggtaatctaccattcaccttctttactgcacaaatattagtcaataaacatttgatatataaatgaatgaacacatatgcaaaaataaattgagttcaaaataaaagccatcgtggatgccattcaagagcttttaataattaaagtatagattctaagttggttttaccattaaagtatttaactcttatgatatgaagcctgaagtgatttggtgttcgtttcttcatagaaggaacaataacttgggtgattatcttcatcacaattatttttctaactataacccagatttctcagtgtctcctgcttgatcatctttctgctaccaacaactaaatttgatttatccgagcctcagtcctcacgctgtcttctccagttccatggctttattt

SEQ ID NO: 83940 - DNA, 824 bp, Homo sapiens
ccttgaggaatcgccacactgtcttccacaatggttgaactaatttacactcccaccaacagtgtaaaaccgttcctatttccagcacatatacaccatggaatactatgcagccataaaaaggatgaattcatgtcctttacagggacattgatgaagctggaacccatcattctcagcaaactaacacaggaatagaaaaccaaacaccacatgttctcactcataagtgggagttgaacaatgagagcacatggacacagggaggggaacatcacatactggggcctgttggggaacagggggctagggaagggatagcattaggagaaatacctaatgtagatgatgggttgatgggtacagcaaaccaccatggcatgtgtatacctatgtatcaaacctgcacattctgcccatgtgtcccagaacttaaagtacatatatatgaaatattttataatatatttacttacaaatataccacattttatttaaagtgcttacatggcattttgcatgagaccaaatggaggaacaaaaattgtattttcagtcccatatgaaacaagaagcagatgtaatatgtaaaacaacggttttcaaatattagaaatcagacagtgccagaaaattatacaggagagagatgaaaggataaggtaagtcaaatgactgtcccagcagttccayaggggccacagaacagagggggaacctaagcacagcccagtgttctttctgagttgaaacattgaagttgagagtccaggagcagggtattagtaaagagagagagagacagagagagagagatctgcaga

SEQ ID NO: 83941 - DNA, 965 bp, Homo sapiens
tgtacatgtgagacagaagaaaatttacctgattcagaataaaacctatatctatatcaaagaaaatcattatgtttcaaaagccaaaattaatgaaagagaccaaaccccttctacaaatgttagaaaaattttaatttcaaggacaaagcatcttttcggttatattagaggctgctaattgacacctcccccttctcctcacccccctgctccaaatatttcctgtcatcttcttttgtggtaagaatattttaacagagttacctaaagtaaggattccctttctcagcctcccttgtgtctcaatgtggccatgtgatcaagttctggtccaatgatataagcagaatttgtacgtggcttctagtccatgcccattcctctaaaaggaagaagtgtgtctaccactttgctctctttccccttatagctggctgagatgtgagcatggtggggagccctcctcgatgtggataaggcaacattttggaaatgtcagagcatttctgaaggaaaggacctccatattaaccctgaattgcttattctggggttactgcagaaagaaagaaagaaagaaagacagagagaaagaaatgttggacttgtttaagatacttttattttagggtcttactatcacataagtgtatagataaactgcaaagaatcagcctttcaataatataggtgtawatttgtttaactgatataaaacaactgaaggatcctacaacagatacaatacattctcttcaacagctgataaaatattttaaaatatgttaggtcataagaaactcattaaaccacaaaagcaaaaatgtgtaaaaattgttttctttgttcaagaaaacaataacaaaaatgaaaatagataattgaagaaaactgaaaaaatttaaaatatactttttagatcaaagaagaaattaaagttgtaattgcagattatttagaaa

SEQ ID NO: 83942 - DNA, 2156 bp, Homo sapiens
cattatccagatgaaaacacaaagcccctagagagaattcgtgatttgccaaggccaaggcaatgagtaagaagtactgcttaataaatgtttgctgaatgcatatctattaatgctagagtttatgtaatgacatttactgattttttttcttctaattataaaggtaacacatgctcatcatagggaatatcagaaacgtacagagaaaaaaactaaaattacttgccagtccaatcacaaaaaaaaacttgtttatatttccttataattcctatatatattaagatcccaatgtacatccaattttgtattttgcatattttcattgaaattgtataaggataacttttataagccattagatatctttgatatcaatattttaagacgttctaacaacgtggcgtttacagaagcagattgcaaaggtgattcacgaggacgtggtggttggccatctctctgggataagtggtcttcagccgggcacctgctgccccacaggcttttgaagaaggtgtactgtagctgttgtgtaggcaactgatgtggcaacagtcggccccgcttcctggctgacacgctcttctccaggacagctttgctccccagcaagtgcagcaaaaattcactccagaatcagtcacttgcctctttccgtgggcatgactttagagccattggctttagagctgagttggccaccaccctgtgcctgcatgagtggaaaggtatagtgtaattcatcatagacgtatagtgtaattcgtgtatccatttccctcctggtatgcatagaaattgcttctacttcctttacactattataaataactctatcatgaacatcttcatgtttattttcaagtaaggtttctattttgctccctgcagccctgtccatgggggcctatttcaacttctttcacagtgaattttttccatcattttattattttggttcttcatgtttatttctaaaacttgacacaatgtagaaagacagctcctaattctctctctgtaaatccagacgtttcagagctttccttccagactcttttctggacaaaacatttataatgggtccaactccaaaatagtattcatgacaacctggagcttgaagtggggaaaaacaaaacagtgaaaacaatgaatggagtatgtctttaactgagaatgagaagaagtgccaggaaacatgagcatgctgttattccaggaagatgcccttcaagatggcagggtggctgggctctccttgggagacctgagggcagttccagcttgagcggattctttccactcatgcaggcacagggtggtggccaactcagctctaaagccaatggctctaaagtcatgcccacggaaagaggcaagtgactgattctggagtgaatttttgctgcacttgctggggagcaaagctgtcctggagaagagcgcgtcagccaggaagcggggccgactgttgccacatcagctgcccacgcaatagctacagtacacctgcttcagaagcctgtggggcagcaggttcccggctaaagcccacttgtcccagagagatggccgaccaccacatcctcgtgaatcacctttgcaatctgcttctgtaatcaccatcagtctctctgtagtcataattgacaaagtgtgcaaatagttattraaatattgattaaagaaaaccaacaaccatttatcatcatggaagagtggttgttaactgcttttatctcggcagagcttcatggggagcttgaaaaagctcattgtttgtgtgttttgagctgtaagagttgggaagtgtgattagactcaaagggctcactttcatttgtattatagagctggggggaaatccaccctccgaggttgggggctgagcagctgtgcctgcaagtcctgcttccagatgcttctcccctagaaagttcctacagcagggaagaggaatctctgatctacattacttgaactttgttttattgtttgtttgcttttttttttttaccaccaaagttcacttggtgatttttgcaaaatgccatcccaatcatttttgttttagtaatgactccttacaaccaccctgtgcactgtcaagtggaaaaacagaatcataagggcctgaaatgaggatc

SEQ ID NO: 83943 - DNA, 2156 bp, Homo sapiens
cattatccagatgaaaacacaaagcccctagagagaattcgtgatttgccaaggccaaggcaatgagtaagaagtactgcttaataaatgtttgctgaatgcatatctattaatgctagagtttatgtaatgacatttactgattttttttcttctaattataaaggtaacacatgctcatcatagggaatatcagaaacgtacagagaaaaaaactaaaattacttgccagtccaatcacaaaaaaaaacttgtttatatttccttataattcctatatatattaagatcccaatgtacatccaattttgtattttgcatattttcattgaaattgtataaggataacttttataagccattagatatctttgatatcaatattttaagacgttctaacaacgtggcgtttacagaagcagattgcaaaggtgattcacgaggacgtggtggttggccatctctctgggataagtggtcttcagccgggcacctgctgccccacaggcttttgaagaaggtgtactgtagctgttgtgtaggcaactgatgtggcaacagtcggccccgcttcctggctgacacgctcttctccaggacagctttgctccccagcaagtgcagcaaaaattcactccagaatcagtcacttgcctctttccgtgggcatgactttagagccattggctttagagctgagttggccaccaccctgtgcctgcatgagtggaaaggtatagtgtaattcatcatagacgtatagtgtaattcgtgtatccatttccctcctggtatgcatagaaattgcttctacttcctttacactattataaataactctatcatgaacatcttcatgtttattttcaagtaaggtttctattttgctccctgcagccctgtccatgggggcctatttcaacttctttcacagtgaattttttccatcattttattattttggttcttcatgtttatttctaaaacttgacacaatgtagaaagacagctcctaattctctctctgtaaatccagacgtttcagagctttccttccagactcttttctggacaaaacatttataatgggtccaactccaaaatagtattcatgacaacctggagcttgaagtggggaaaaacaaaacagtgaaaacaatgaatggagtatgtctttaactgagaatgagaagaagtgccaggaaacatgagcatgctgttattccaggaagatgcccttcaagatggcagggtggctgggctctccttgggagacctgagggcagttccagcttgagcggattctttccactcatgcaggcacagggtggtggccaactcagctctaaagccaatggctctaaagtcatgcccacggaaagaggcaagtgactgattctggagtgaatttttgctgcacttgctggggagcaaagctgtcctggagaagagcgcgtcagccaggaagcggggccgactgttgccacatcagctgcccacgcaatagctacagtacacctgcttcagaagcctgtggggcagcaggttcccggctaaagcccacttgtcccagagagatggccgaccaccacatcctcgtgaatcacctttgcaatctgcttctgtaatcaccatcagtctctctgtagtcataattgacaaagtgtgcaaatagttattaaaatattgattaaagaaaaccaacaaccatttatcatcatggaagagtggttgttaactgcttttatctcggcagagcttcatgggragcttgaaaaagctcattgtttgtgtgttttgagctgtaagagttgggaagtgtgattagactcaaagggctcactttcatttgtattatagagctggggggaaatccaccctccgaggttgggggctgagcagctgtgcctgcaagtcctgcttccagatgcttctcccctagaaagttcctacagcagggaagaggaatctctgatctacattacttgaactttgttttattgtttgtttgcttttttttttttaccaccaaagttcacttggtgatttttgcaaaatgccatcccaatcatttttgttttagtaatgactccttacaaccaccctgtgcactgtcaagtggaaaaacagaatcataagggcctgaaatgaggatc

SEQ ID NO: 83944 - DNA, 2156 bp, Homo sapiens
cattatccagatgaaaacacaaagcccctagagagaattcgtgatttgccaaggccaaggcaatgagtaagaagtactgcttaataaatgtttgctgaatgcatatctattaatgctagagtttatgtaatgacatttactgattttttttcttctaattataaaggtaacacatgctcatcatagggaatatcagaaacgtacagagaaaaaaactaaaattacttgccagtccaatcacaaaaaaaaacttgtttatatttccttataattcctatatatattaagatcccaatgtacatccaattttgtattttgcatattttcattgaaattgtataaggataacttttataagccattagatatctttgatatcaatattttaagacgttctaacaacgtggcgtttacagaagcagattgcaaaggtgattcacgaggacgtggtggttggccatctctctgggataagtggtcttcagccgggcacctgctgccccacaggcttttgaagaaggtgtactgtagctgttgtgtaggcaactgatgtggcaacagtcggccccgcttcctggctgacacgctcttctccaggacagctttgctccccagcaagtgcagcaaaaattcactccagaatcagtcacttgcctctttccgtgggcatgactttagagccattggctttagagctgagttggccaccaccctgtgcctgcatgagtggaaaggtatagtgtaattcatcatagacgtatagtgtaattcgtgtatccatttccctcctggtatgcatagaaattgcttctacttcctttacactattataaataactctatcatgaacatcttcatgtttattttcaagtaaggtttctattttgctccctgcagccctgtccatgggggcctatttcaacttctttcacagtgaattttttccatcattttattattttggttcttcatgtttatttctaaaacttgacacaatgtagaaagacagctcctaattctctctctgtaaatccagacgtttcagagctttccttccagactcttttctggacaaaacatttataatgggtccaactccaaaatagtattcatgacaacctggagcttgaagtggggaaaaacaaaacagtgaaaacaatgaatggagtatgtctttaactgagaatgagaagaagtgccaggaaacatgagcatgctgttattccaggaagatgcccttcaagatggcagggtggctgggctctccttgggagacctgagggcagttccagcttgagcggattctttccactcatgcaggcacagggtggtggccaactcagctctaaagccaatggctctaaagtcatgcccacggaaagaggcaagtgactgattctggagtgaatttttgctgcacttgctggggagcaaagctgtcctggagaagagcgcgtcagccaggaagcggggccgactgttgccacatcagctgcccacgcaatagctacagtacacctgcttcagaagcctgtggggcagcaggttcccggctaaagcccacttgtcccagagagatggccgaccaccacatcctcgtgaatcacctttgcaatctgcttctgtaatcaccatcagtctctctgtagtcataattgacaaagtgtgcaaatagttattaaaatattgattaaagaaaaccaacaaccatttatcatcatggaagagtggttgttaactgcttttatctcggcagagcttcatggggagcttgaaaaagctcattgtttgtgtgttttgagctgtaagagttgggaagtgtgattagactcaaagggctcactttcatttgtattatagagctggggggaaatccaccctccgaggttgggggctgagcagctgtgcctgcaagtyctgcttccagatgcttctcccctagaaagttcctacagcagggaagaggaatctctgatctacattacttgaactttgttttattgtttgtttgcttttttttttttaccaccaaagttcacttggtgatttttgcaaaatgccatcccaatcatttttgttttagtaatgactccttacaaccaccctgtgcactgtcaagtggaaaaacagaatcataagggcctgaaatgaggatc

SEQ ID NO: 83945 - DNA, 2156 bp, Homo sapiens
cattatccagatgaaaacacaaagcccctagagagaattcgtgatttgccaaggccaaggcaatgagtaagaagtactgcttaataaatgtttgctgaatgcatatctattaatgctagagtttatgtaatgacatttactgattttttttcttctaattataaaggtaacacatgctcatcatagggaatatcagaaacgtacagagaaaaaaactaaaattacttgccagtccaatcacaaaaaaaaacttgtttatatttccttataattcctatatatattaagatcccaatgtacatccaattttgtattttgcatattttcattgaaattgtataaggataacttttataagccattagatatctttgatatcaatattttaagacgttctaacaacgtggcgtttacagaagcagattgcaaaggtgattcacgaggacgtggtggttggccatctctctgggataagtggtcttcagccgggcacctgctgccccacaggcttttgaagaaggtgtactgtagctgttgtgtaggcaactgatgtggcaacagtcggccccgcttcctggctgacacgctcttctccaggacagctttgctccccagcaagtgcagcaaaaattcactccagaatcagtcacttgcctctttccgtgggcatgactttagagccattggctttagagctgagttggccaccaccctgtgcctgcatgagtggaaaggtatagtgtaattcatcatagacgtatagtgtaattcgtgtatccatttccctcctggtatgcatagaaattgcttctacttcctttacactattataaataactctatcatgaacatcttcatgtttattttcaagtaaggtttctattttgctccctgcagccctgtccatgggggcctatttcaacttctttcacagtgaattttttccatcattttattattttggttcttcatgtttatttctaaaacttgacacaatgtagaaagacagctcctaattctctctctgtaaatccagacgtttcagagctttccttccagactcttttctggacaaaacatttataatgggtccaactccaaaatagtattcatgacaacctggagcttgaagtggggaaaaacaaaacagtgaaaacaatgaatggagtatgtctttaactgagaatgagaagaagtgccaggaaacatgagcatgctgttattccaggaagatgcccttcaagatggcagggtggctgggctctccttgggagacctgagggcagttccagcttgagcggattctttccactcatgcaggcacagggtggtggccaactcagctctaaagccaatggctctaaagtcatgcccacggaaagaggcaagtgactgattctggagtgaatttttgctgcacttgctggggagcaaagctgtcctggagaagagcgcgtcagccaggaagcggggccgactgttgccacatcagctgcccacgcaatagctacagtacacctgcttcagaagcctgtggggcagcaggttcccggctaaagcccacttgtcccagagagatggccgaccaccacatcctcgtgaatcacctttgcaatctgcttctgtaatcaccatcagtctctctgtagtcataattgacaaagtgtgcaaatagttattaaaatattgattaaagaaaaccaacaaccatttatcatcatggaagagtggttgttaactgcttttatctcggcagagcttcatggggagcttgaaaaagctcattgtttgtgtgttttgagctgtaagagttgggaagtgtgattagactcaaagggctcactttcatttgtattatagagctggggggaaatccaccctccgaggttgggggctgagcagctgtgcctgcaagtcctgcttccagatgcttctcccctagmaagttcctacagcagggaagaggaatctctgatctacattacttgaactttgttttattgtttgtttgcttttttttttttaccaccaaagttcacttggtgatttttgcaaaatgccatcccaatcatttttgttttagtaatgactccttacaaccaccctgtgcactgtcaagtggaaaaacagaatcataagggcctgaaatgaggatc

SEQ ID NO: 83946 - DNA, 2156 bp, Homo sapiens
cattatccagatgaaaacacaaagcccctagagagaattcgtgatttgccaaggccaaggcaatgagtaagaagtactgcttaataaatgtttgctgaatgcatatctattaatgctagagtttatgtaatgacatttactgattttttttcttctaattataaaggtaacacatgctcatcatagggaatatcagaaacgtacagagaaaaaaactaaaattacttgccagtccaatcacaaaaaaaaacttgtttatatttccttataattcctatatatattaagatcccaatgtacatccaattttgtattttgcatattttcattgaaattgtataaggataacttttataagccattagatatctttgatatcaatattttaagacgttctaacaacgtggcgtttacagaagcagattgcaaaggtgattcacgaggacgtggtggttggccatctctctgggataagtggtcttcagccgggcacctgctgccccacaggcttttgaagaaggtgtactgtagctgttgtgtaggcaactgatgtggcaacagtcggccccgcttcctggctgacacgctcttctccaggacagctttgctccccagcaagtgcagcaaaaattcactccagaatcagtcacttgcctctttccgtgggcatgactttagagccattggctttagagctgagttggccaccaccctgtgcctgcatgagtggaaaggtatagtgtaattcatcatagacgtatagtgtaattcgtgtatccatttccctcctggtatgcatagaaattgcttctacttcctttacactattataaataactctatcatgaacatcttcatgtttattttcaagtaaggtttctattttgctccctgcagccctgtccatgggggcctatttcaacttctttcacagtgaattttttccatcattttattattttggttcttcatgtttatttctaaaacttgacacaatgtagaaagacagctcctaattctctctctgtaaatccagacgtttcagagctttccttccagactcttttctggacaaaacatttataatgggtccaactccaaaatagtattcatgacaacctggagcttgaagtggggaaaaacaaaacagtgaaaacaatgaatggagtatgtctttaactgagaatgagaagaagtgccaggaaacatgagcatgctgttattccaggaagatgcccttcaagatggcagggtggctgggctctccttgggagacctgagggcagttccagcttgagcggattctttccactcatgcaggcacagggtggtggccaactcagctctaaagccaatggctctaaagtcatgcccacggaaagaggcaagtgactgattctggagtgaatttttgctgcacttgctggggagcaaagctgtcctggagaagagcgcgtcagccaggaagcggggccgactgttgccacatcagctgcccacgcaatagctacagtacacctgcttcagaagcctgtggggcagcaggttcccggctaaagcccacttgtcccagagagatggccgaccaccacatcctcgtgaatcacctttgcaatctgcttctgtaatcaccatcagtctctctgtagtcataattgacaaagtgtgcaaatagttattaaaatattgattaaagaaaaccaacaaccatttatcatcatggaagagtggttgttaactgcttttatctcggcagagcttcatggggagcttgaaaaagctcattgtttgtgtgttttgagctgtaagagttgggaagtgtgattagactcaaagggctcactttcatttgtattatagagctggggggaaatccaccctccgaggttgggggctgagcagctgtgcctgcaagtcctgcttccagatgcttctcccctagaaagttcctacagcagggaagaggaatctctgatctacattacttgaactttgttttattgtttgtttgcttttttttttttaccaccaaagttcacttggtgatttttgcaaaatgccatcccaatcatttttgttttagtaatgactccytacaaccaccctgtgcactgtcaagtggaaaaacagaatcataagggcctgaaatgaggatc

SEQ ID NO: 83947 - DNA, 745 bp, Homo sapiens
aatttgttattatttaatgctataaacagctgagatatatatatacatatcaatttgtatcagttcatatcaatttatatatcaaatatatcaatttagtggagatacatatttatttattcatttcacatttcaggagtatgcctagaaggaggaaagatattatctgctctgtcaaacagaatagatatttattattcagcatattttcatagtggaagaaatatacaatcataaacctagctagaaatttaaaacttataaacagaaatttgagaaaagaaaagacaaacatgtcttcagtatcctttgctccccactttttaagataggcagttctcattttgaagcccatgcaactcacacactactggttatcccggggcagctgcttagagatgaagcataaggtctccacatgagatagaaaaggaatggtcaaccgtaatcaaccttgttgagccttgagctccttgtctattacatttgtttcttccaaagtgcaacagagtaatatatctcattaaatggtcacctttgctaagattataggctttccctaaagttaaaggtaaaagttttatrtaagcgaaacatttagtagagccttagaaatgccttgtagaatgaacaacattcattcaacaaatatctgagcacctagtactgtgattctcaattctggctgcacattaacaccacaagggaagttggtgtttttaaaaacaccaatgccctggctgca

SEQ ID NO: 83948 - DNA, 1028 bp, Homo sapiens
aaataatagaggtgcacaaatctgtacaaggctggttatcacagtgtcatttataatatcamaacattacaaatgactttaatccacatgctacaggctggcacccttgccctcagaggtactgagttgtgtgttagggtgctctaagcaatatggtagacatggtgcacattcaaagggggttggttttacttgatagcgactaatttagaacaaaaactttatattaaaaccaatatagcaggtcacaccactaggatgactaaaatcaaaaagacagatgatgacaagtatagctaaggatgtggagaaattgaagccctcttacattgctagtaagaagtaaaatggtgtggtcactttggaaaaccgtttggcagttcctcaaaaagttaaacattgagctaccatatgacccagtaattcaactccaaggtatatacccaagagaaatgaaaacatatgttcatataaaaacttgcatatgagtgttcatagcagcattattcataagagtcaaaaagtggaagcaacctaaacgtctaacaattgatgagtggataaacaaagtatggtttatatttgtacaatggaatcttgtctgggaagtaaaaagaatgaggcactgatacagtgatacctgctacaacatggatgagccttgaaaacattatattaagtgaaagaagacagtcataaaagaaatggctagaataggcaaatccgtagagacaggaagtagatgagtggttgctgggacctaggagaagtgtgaatgaggggtgactgctaaacgagcatggggtttccttctagggtgatgaaaatgttctggaattagtggtggtgattgcacaaccttgtgaatgtactaaaaaccactgaatggtttcttaacataggcggattttatggtatgtgaaatatatttcaataaaggtggttttttttaaatggatatgatatggcatagaattagggtgaccaattgttctagtttgcccagtacaaaaagttttcccagaggc

SEQ ID NO: 83949 - DNA, 1028 bp, Homo sapiens
aaataatagaggtgcacaaatctgtacaaggctggttatcacagtgtcatttataatatcacaacattacaaatgactttaatccacatgctacaggctggcacccttgccctcagaggtactgagttgtgtgttagggtgctctaagcaatatggtagacatggtgcacattcaaagggggttggttttacttgatagcgactaatttagaacaaaaactttatattaaaaccaatatagcaggtcacaccactaggatgactaaaatcaaaaagacagatgatgacaagtatagctaaggatgtggagaaattgaagccctcttacattgctagtaagaagtaaaatggtgtggtcactttggaaaaccgtttggcagttcctcaaaaagttaaacattgagctaccatatgacccagtaattcaactccaaggtatatacccaagagaaatgaaaacatatgttcatataaaaacttgcatatgagtgttcatagcagcattattcataagagtcaaaaagtggaagcaacctaaacgtctaacaattgatgagtggataaacaaagtatggtttatatttgtacaatggaatcttgtctgggaagtaaaaagaatgaggcactgatacagtgatacctgctacaacatggatgagccttgaaaacattatattaagtgaaagaagacagtcataaaagaaatggctagaataggcaaatccgtagagacaggaagtagatgagtggttgctgggacctaggagaagtgtgaatgaggggtgactgctaaacgagcatggggtttccttctagggtgatgaaaatgttctggaattagtggtggtgattgcacaaccttgtgaatgtactaaaaaccactgaatggtttmttaacataggcggattttatggtatgtgaaatatatttcaataaaggtggttttttttaaatggatatgatatggcatagaattagggtgaccaattgttctagtttgcccagtacaaaaagttttcccagaggc

SEQ ID NO: 83950 - DNA, 725 bp, Homo sapiens
tgttctttgacctcattagaaccctgatttattggcctctattttcttccaatctatcagccctcccctttttcttcagttttcttccaatccagcttagattccatagcccatcattccaacaacaccctaaactccctttaactctgtctttatatttaactctctggcagtacctctaacctggtcagggacagttgcagacaacagaacccacttaagcagtaagggatgtattgcaataaaagactttggcagaacttccaggaacaacacctaacccacaaaataataccacctttgccacaatccaggaaagttatggctatcactgcagcaagccaccaaaccagggagytattgactggagaaatttactgccatgactggcagcaaaactggatgactcacaccctccttctttccacatttaactcagttccaaattcaattttcaccttaggtgcaagggagtcaagaaaatggtttttagttttccagatttttcaggaagagaagacatattagaggttagaatgtgtcttgagcaagcgatgtccttgccatacccagaaaggttttctccatgcatgcactaaaccgctggatatgctggaaaaaaattttttttttccttgcatcctacatttctctagtaacctcattctcccacactccacagtgactttcaaatcttctacaatattctcaaatttctcaaaact

SEQ ID NO: 83951 - DNA, 725 bp, Homo sapiens
tgttctttgacctcattagaaccctgatttattggcctctattttcttccaatctatcagccctcccctttttcttcagttttcttccaatccagcttagattccatagcccatcattccaacaacaccctaaactccctttaactctgtctttatatttaactctctggcagtacctctaacctggtcagggacagttgcagacaacagaacccacttaagcagtaagggatgtattgcaataaaagactttggcagaacttccaggaacaacacctaacccacaaaataataccacctttgccacaatccaggaaagttatggctatcactgcagcaagccaccaaaccagggagctattgactggagaaatttactgccatgactggcagcaaaactggatgactcacaccctccttctttccacatttaactcagttccaaattcaattttcaccttaggtgcaagggagtcaagaaaatggtttttagttttccagatttttcaggaagagaagacatattagaggttagaatgtgtcttgagcaagcgatgtccttgccatacccaraaaggttttctccatgcatgcactaaaccgctggatatgctggaaaaaaattttttttttccttgcatcctacatttctctagtaacctcattctcccacactccacagtgactttcaaatcttctacaatattctcaaatttctcaaaact

SEQ ID NO: 83952 - DNA, 725 bp, Homo sapiens
tgttctttgacctcattagaaccctgatttattggcctctattttcttccaatctatcagccctcccctttttcttcagttttcttccaatccagcttagattccatagcccatcattccaacaacaccctaaactccctttaactctgtctttatatttaactctctggcagtacctctaacctggtcagggacagttgcagacaacagaacccacttaagcagtaagggatgtattgcaataaaagactttggcagaacttccaggaacaacacctaacccacaaaataataccacctttgccacaatccaggaaagttatggctatcactgcagcaagccaccaaaccagggagctattgactggagaaatttactgccatgactggcagcaaaactggatgactcacaccctccttctttccacatttaactcagttccaaattcaattttcaccttaggtgcaagggagtcaagaaaatggtttttagttttccagatttttcaggaagagaagacatattagaggttagaatgtgtcttgagcaagcgatgtccttgccatacccagaaaggttttctccatgcatgcactaaacygctggatatgctggaaaaaaattttttttttccttgcatcctacatttctctagtaacctcattctcccacactccacagtgactttcaaatcttctacaatattctcaaatttctcaaaact

SEQ ID NO: 83953 - DNA, 703 bp, Homo sapiens
tagaataatgattgcctaaagctgggggcatagagagaatctggagtgatggctaataggtacagggtttctttttggggtgacaacaatgttctcaaagtagatcgtggtgatggtcacaaaactctgaatataccaaagaaaccactgaattgtacactttaagcaggtgaaatgtgtggtatgtgaatcatatctcaagtaaaacataagaatgttatataaatggaatcataaagtgtataaccttttgagattagcttttttcactcagtataatttctggagagggatgatccaggttgttgcatgtatgaatattttattctcattcctttgtattgttgagtaatatcccattatatgaatctaccagtctaagttactttttagtcatacggagaatgagtatcttttactatagtaccaagtaatatttttttatcctgtgagttgtttttcatatccttggcaccttttcctaataccccctttgtattagctctttatcatatgtactacaaattctttttccaaacttaactctgattacaatgatttttgcagtkaagtttttaattttcatgtagtgaaatattcttctagattttcttctagtattcttatggttgcctttttttaaaatgttaaaatctttaattaaaccttattttagcataagaagttagcaagttgaatcttt

SEQ ID NO: 83954 - DNA, 1579 bp, Homo sapiens
acttctgaatgtgaggcctgggccaaatggcactctcttctctcctttgcagtaacaggccctgccacacacacaagcatacccccacctctacatgtaaaccccacctgcgtacacaccatatatgacttacccatgtccccacatttatacatgcacattccatgcacatattcacataaccacacacgctcatctgtgcacatatacctaaacacccccccctccccaacacacacaaactgcccacatatacactcacagaagaccctggacatctgtaaggaaagcatctggagacctttgggaatcctcagacctgtgactgtcgtggagccggtgccaggtcctggctgtctcctccatacatttctggcaagtgccagaggctcccttgagctacctacctcagatgtcctaccttttccactcttacccatcttctctctcaacccctagtcacttcctacaaaggaaacggattccttccagagtgttactgttatgggaagcaaatcccacagaccatccactccatgcaggctgggactgtgtctgccctatccacactgcattcccagctcctggccccctgtggctaagtgttgattggaaaaaagtcaccagagcagcacagaggcacatacactgggcagccacaggggtacctccaccccacacagttacgtccatgcacacagaacaccctgtgtgtgtgtgcatgctcaagcttgcatcactgtgtgcctgcayacatatgaacacgcatcgtgtctgcctgtctccatactttccagatagagtcccttccaggacctgggtcctttcacaaaatcacctaataccactgtgggctcatctgctgacatgtgagatccagatgtggccccatgactgctcagggctcctggcttggccctgaacatctgggcgcaggggtttagagcaccagctttggaattgcattctcctgagaaaacctgggttccaccctggctctgcacatgatcactgtgcatgttccccgtatgatttatgtacaagttacctaacttcttggagcatcaatttccttatttgctaaatgggggcaatagttcctaccttaaattcatcttaaaggagataatctcagcagagtgcctggcatgttgtaagctcttaaaaatgcttgctatgaatatgattattgttactttagcctttgctctgaaatcccatgcacgctttgtgaggaaggacagccttggttggggggtgtttatggggagagcagagtggatggtgcgtatgtgaatacctctccccagatgctcccccaatcccaagctctcattatcttatatgcatattcataagggatggccctgctctgtaaatgggtcagaagcaggaaatagaggccagtacagacagcgaagcccaagggataggagggctcaaagccggcacacatctgagtcctcatggacgggaggatggtaagaggggatggggagagaatggattgggggcactgaggcgggggcaggagttcgttcctatgttgcagatttgaaaactcaggcccagtgagatc

SEQ ID NO: 83955 - DNA, 1579 bp, Homo sapiens
acttctgaatgtgaggcctgggccaaatggcactctcttctctcctttgcagtaacaggccctgccacacacacaagcatacccccacctctacatgtaaaccccacctgcgtacacaccatatatgacttacccatgtccccacatttatacatgcacattccatgcacatattcacataaccacacacgctcatctgtgcacatatacctaaacacccccccctccccaacacacacaaactgcccacatatacactcacagaagaccctggacatctgtaaggaaagcatctggagacctttgggaatcctcagacctgtgactgtcgtggagccggtgccaggtcctggctgtctcctccatacatttctggcaagtgccagaggctcccttgagctacctacctcagatgtcctaccttttccactcttacccatcttctctctcaacccctagtcacttcctacaaaggaaacggattccttccagagtgttactgttatgggaagcaaatcccacagaccatccactccatgcaggctgggactgtgtctgccctatccacactgcattcccagctcctggccccctgtggctaagtgttgattggaaaaaagtcaccagagcagcacagaggcacatacactgggcagccacaggggtacctccaccccacacagttacgtccatgcacacagaacaccctgtgtgtgtgtgcatgctcaagcttgcatcactgtgtgcctgcacacrtatgaacacgcatcgtgtctgcctgtctccatactttccagatagagtcccttccaggacctgggtcctttcacaaaatcacctaataccactgtgggctcatctgctgacatgtgagatccagatgtggccccatgactgctcagggctcctggcttggccctgaacatctgggcgcaggggtttagagcaccagctttggaattgcattctcctgagaaaacctgggttccaccctggctctgcacatgatcactgtgcatgttccccgtatgatttatgtacaagttacctaacttcttggagcatcaatttccttatttgctaaatgggggcaatagttcctaccttaaattcatcttaaaggagataatctcagcagagtgcctggcatgttgtaagctcttaaaaatgcttgctatgaatatgattattgttactttagcctttgctctgaaatcccatgcacgctttgtgaggaaggacagccttggttggggggtgtttatggggagagcagagtggatggtgcgtatgtgaatacctctccccagatgctcccccaatcccaagctctcattatcttatatgcatattcataagggatggccctgctctgtaaatgggtcagaagcaggaaatagaggccagtacagacagcgaagcccaagggataggagggctcaaagccggcacacatctgagtcctcatggacgggaggatggtaagaggggatggggagagaatggattgggggcactgaggcgggggcaggagttcgttcctatgttgcagatttgaaaactcaggcccagtgagatc

SEQ ID NO: 83956 - DNA, 724 bp, Homo sapiens
aggaccaaattctcagtggcagctgaactatggtgaggccatgggtctggctctatgatgccagaccggatagtgggaggtacagggctctggccctggcactactctaagttagggaaggattggagttagtagccaaacacagtcctttcctgagtctctggatatttttcctatttgtcaactatatgccaggcaccatcttagacactaaggatgaaggaagccaaatggtataagggaaggaaaaacactcaggatcttgaccaaattacttcctctctaaaggctcgttttttccaaatctctaaaataagaattacaatgcctrtcttaaggatttgctgtgcatatcagaaaaaaaaaattatgtatgtatacacacacacacacacacacacacacacacacacacatacatacatatagccggcacatagtaggtactcaagtgacaattatcaggaggaagggagggtagaatgctcgcaatggtgttcctggctccaccccccatctcactctgtctttccttccagacactcacccacggcactgcagtttgcactcgcacttatgagaaagaggcatgacctgactgcactgttgctgactactactctgccaatcggctacccctcgactcagcaccacattgcctcatttcttcctctgcattttgtacaaatccacgaattcttctggggtcaggtgccactgaccg

SEQ ID NO: 83957 - DNA, 724 bp, Homo sapiens
aggaccaaattctcagtggcagctgaactatggtgaggccatgggtctggctctatgatgccagaccggatagtgggaggtacagggctctggccctggcactactctaagttagggaaggattggagttagtagccaaacacagtcctttcctgagtctctggatatttttcctatttgtcaactatatgccaggcaccatcttagacactaaggatgaaggaagccaaatggtataagggaaggaaaaacactcaggatcttgaccaaattacttcctctctaaaggctcgttttttccaaatctctaaaataagaattacaatgcctatcttaaggatttgctgtgcatatcagaaaaaaaaaattatgtatgtatacacacacacacacacacacacacacacacacacacayacatacatatagccggcacatagtaggtactcaagtgacaattatcaggaggaagggagggtagaatgctcgcaatggtgttcctggctccaccccccatctcactctgtctttccttccagacactcacccacggcactgcagtttgcactcgcacttatgagaaagaggcatgacctgactgcactgttgctgactactactctgccaatcggctacccctcgactcagcaccacattgcctcatttcttcctctgcattttgtacaaatccacgaattcttctggggtcaggtgccactgaccg

SEQ ID NO: 83958 - DNA, 967 bp, Homo sapiens
aactaccccgctccctgcgctatagggtcactttaagctctggggaaaaaggagaaagtgagaggagagttctctgcatcctccctccttgcttgtcacccagttgcctttaaaccaaattctaaccagcctatccccaggtagggggacgttggttatattctgttagagggggacggtcgtattttcctccctacccgccaagtcatcctttctactgcttttgaggccctccctcagctctctgtgggtaggggttacaattcacattccttattctgagaatttggccccagctgtttgcctttgactccctgacctccagagccagggttgtgccttattgtcccatctgtgggcctcattctgccaaagctggaccaaggctaacctttctaagctccctaacttgggccagaaaccaaagctgagcttttaactttctccctctatgacacaaatgaattgagggtaggaggagggtgcacataacccttaccctacctctgccaaaaagtgggggctgtactggggactgctcggatgatctttcttagtgctacttctttcagctgtccctgtagcgacaggtctaagatctgactgcctcctcctttctctggcctcttcccccttccctcttctcttcagctaggctagctggtttggagtagaatggcaactaattctaatttttatttattaaatatttggggttttggttttaaagccagaattacggctagcacctagcatttcagcagagggaccattttagaccaaaatgtactgttaatgggttttttttwaaaattaaaagattaaataaaaaatattaaataaaacatggcaataagtgtcagactattaggaattgagaagggggatcaactaaataaacgaagagagtctttcttatgccttccttgcagttatgtaatattttcttttttaaatttcacatgca

SEQ ID NO: 83959 - DNA, 1270 bp, Homo sapiens
gctctctttgactaaaaaattaaaactgaacaaccacaatagcaaccaaaagtcagctgtatcaaaggatagaataggagctaagcaaacaaggtatcttggtttggttctgtgagttccatgttttcagacacagggagtaattgagttacattttccccattggcttgctggaaaggtgagcccatgataccaacttttctagaggcggattatttttggagttcagctcttagggcattaaccaagttctaaatagyaaattatcctgagtcagctgattgtgaatgaataaacaataaaaggccttattctctgaggactgggtctggtatttctgtctctttcagaggtttgaccaagtgtgaggtttgggaatgggaacccaggcctgccatctggccagtcagctttctccctcattcctctttagtggggttttccattgtgttccttgttgcatctgcttggtggttgaataccaatcccagccaacatctcctcactctgttacaaatgccatactcattatctgtttagtagacaaaggctgctgttctagggctaggagtccatgctgtataatcctggctagcacagatggtgtgtgggcatggattcagaattttggagttagaaaagaccacatatatcttctctaccaacattattcaacagaactttctgtgatgacagaaatggtttataatctgtgctatcaatatggtagccactagctacacatggcattgaaatttgagtagtgtgactgataaagtaaattttaatttcattcacatatagctaggggttattacattagtcaatttggaattttttcacttagtttataaataataaaggtaagaccccaagagaggaagagtgagttgttcaaagtcatatagtagatacactgcacagttgggattagtgattggaaataccctcttccatactagtgctttccctttcttacaatcccaaagccatgaacacagttctagaatcccactggtatcgataaaacaccagagtctcttatttttgtgagatctaatatccaggaagcagttccccatcatcaccaccttcctgacatgcttttcttttgtgactttcaggggtggggagtgctgtttctgcttactgtatggacaagatttcaccaaaggctggagtggacaaagcattcagtaacttaatccgcagcccaacagtttttctcctccttcagggataatgtgagctcatttgtgttaggctctgc

SEQ ID NO: 83960 - DNA, 597 bp, Homo sapiens
tgctgggctagaaaaacatgtgtgacccctagatctctatcctcacacagaaagcaaggacagctttcagaaggggactcacaactggaaattctaacwggtaaatattagtatcattaagaaatcttgcaaaggtgattattagccatctcttgtctgtcgagttctgtagcttttctttcttctctccttttctcagtttttctctctcccctgtgtctttctcctcctttgccacatctgtctgcctctttccttctcgtctgtttttctattctctggtctcttgttctcgctctttgtctctttctgtctcttggagcatttctctgtctctcttgctttgctacctttctctctctgtctttctctttcttgtatctcttgctgaccttggggtcactcccttggttttctccatttaatggagccccaacttgcctttgatggcatttggggagggcaaagttagtcggactctctgaacttgattggcctcccgtgacaaggatctcttttcacagggtctggatttaaagtgtgaaaatataaagagctttttcattctgactcgcacatatccctacttgagctgaa

SEQ ID NO: 83961 - DNA, 1236 bp, Homo sapiens
catgtttgatgtttagtgctgggaggaagaaatctgcagagaatttctgtggtactgggctgattggagatgggggcggcaaatggaaaatattttatgggtaggtaattatattggttctgagataatatttcagcagcagaaatggtgaatggcaatccttaatcaccaaatgttgcagccatgggaagtggaaggctgagtttgaaagtgttaagtcttcttcagatggaatgtctgttactgccttaaaatctctgtcttcttagcatttcctttcctttgaaaaaacattatttgccagcttgttggactctagctcttgttctgtttacctacagggaaaacagactgcagtgtccaacagcattatttactctttaaagacttttttttttaaccaaaaactgcagatggtttagttttctaaaacaaatgcagaggtgtgaatggttaatcaagctgaaacaattgcagagctgtgcttttgaaagcttaccaaatgccagcctcacttttgatgttagcattttttttcctaaacagtgtgtccataatttctaatgaaggctttgcccattcatgcttgaaattcatgataataatgtgcagccagataatcacaagatttggtgtcaaactgtggggcatataatttctgcgtgcctgtgaattagcactgataccctaaacataagtatatttatggttctccgtaaacatgccattaaaagttaaaatgctgataaaattattaattactttgtaactttgttgaaaacatcagcagaatgaacttaattcagatggttcttgataataatactaaaaaataattttaataaagaatctaagctaccagatgcctggtgagaaacaaagwgctggtgtggaaatgacagagaaggcacaggaacaaatgtaggcaatttaagataatgctcatctccacccaggttcctagtttcaaatcagagagaggatgaaagcacaaagaccctggccaaaggagggctcagagagaagtggcagattgtaaattagcaggaccctgctactagcctggaaagcaacatgacattccctgaaggtattccaaggataaaaataagtaccgagaatgtgtagatgtccaatccacagagaaaggctcatgtatttgtaagctgcgttagcccttttagatcgccaagtcaattcagtggtgttatattgagcatctaaattattttgttc

SEQ ID NO: 83962 - DNA, 542 bp, Homo sapiens
tcaatgttaaaacacaacatatcagtctattggaaatcaaagctctgtctgattctttttaggtcagcagttctccaatttccacaagtctaaggcttacttggggrttatttaagatgccaatccttgggcttcacccagatactgattaaatgtgtctctggggtagggtcttggaatctccattttttttttttttttttttttgagacagagtcttgcactgttacccaggctggagtgcagtggtgtgatcttggctcactgcaacctccgccttctgggttcaagtgattctcctgcctcagcctcccaagtagctgggactacaggtgtgcgccaccatgcctggctaatttttgtattttcagtagagatgaggtttcaccatgttggccaggctagtcttgaaatcctgacctcaagtgatccacctgcttctgcctcccaaagtgcttggattacagcaagcagtgtaccgtgcctggctggaatctccattttaaatgagctttctacacgttaccatgcaggtaggggag

SEQ ID NO: 83963 - DNA, 918 bp, Homo sapiens
catataatgggctgaaatcaaggggttggcagggatttgttcctgtctggaggtccttttccctatcatttccaacttttagaagctacctatattccttagatcatggttctctttctccatcttcaaagccagcaagagcaggctgagttcatctcagagaggcatcactccagcctcttcttctgcctccctcttccacttttaaggacatttgtgtccacattgggtccacttggataacccaggataatctgtctattttaaggttggctaattagcaacctcaattccatctgtgaccataattctctatgtaacataacataaccacgggtttggaggttagaatgtgaacatctttggggaggctattaatctgcctaccacattatcccaccagtaaaggataaaaataaaatcctataattatgatacttttatataaatgtaatataaaaatgaatataagtaaatttagtagcagatttccctaaagttctcagtagctgataatgttcttaaaattgatagttgttccaaccaattatattaacttttgttagaaagtaacccagtccttagcactaatgtgtggcagcaggtagcttttcaatgatcaaatactgagataactttgacaatgctcccaatcaggagccaatgttcatccaatttcctgctgaagagttctagtaaatgaaaacgtactgtgtacagatgggatcctcgaggtgccatacagttattcagcacacagctggaaaaacagataaacgggacacaattcttgcctcagcgtttttatagtccaatgggagagattaagtatagacctgaaattacattatgtattcatttgtttagttgtcctttctatctctcccactcgaayataaattccatcaagggctgaga

SEQ ID NO: 83964 - DNA, 670 bp, Homo sapiens
ttcatgaataggtgaatttcctgcttggagcagagggagaccgggtgaatgaattctcactctgttggttcctgtgacatctggttgttaaaaggaggctggcatcgcccccatttcttgcttaatccctttctcgccatgtaatccctgcaggtgcaggttcccctttgccttccaccatgaatggaagcagcttgaggtcctcatcagaagcagatgttggcacagtcttcttgtacagcctgcagaagtgcaagccaaataaacttctttataaattacccagcctcaggtattcctttacagcaacacaaatggactgagacagctataacacayagtgatggctgtttgctttttggtctcctccattagtggttgttccgtctttgtctctctcacactcagcacagtgcctggcccggcaacacatggttgtccaataaatgactctcagagatgagtgatatgatatacactatgcattatgcaataaataaattcttaacaacaaggtaacaccctaggacctcagaaagggaagaagggaaatggatggcatgcaaccacttatgcaaatgaccaaccccaactcctcccttccctcagtctgcccaaggtagcctagcccactctctctttcctctttcatgatctggctatggatttt

SEQ ID NO: 83965 - DNA, 811 bp, Homo sapiens
ttgtaaaagttagccttgggacatagtccactctgcagctaagcagaccatcccattcaaacccaagcctcatcaagatcacaagcggattataagcaytggaaaatcagcacctggaactgtaggatccccaaaggcatctgccccaggggcccagccatttattaactaaccactctgccatcagtatctcccccgtttctcatgcctagtaacacattgctcaattaagccttgtccgtctaaacagagtgtcatattctgctgtaacataaaggaaagctgattttattatcaaagatctgagttcaaggactgagtccttgtcccttgaacaagtcctttaaacttaggacaacaatataatttatcattcaagacagaataattttgagagtgaaagtgagtgctattacaccaggaacgagaggcataaaccaggactatttcaggcaaatgaggaagcagggtcatcctacctaaatctttgattcttaatcccctcatctgtgaaatagaaattaaaatccctacatgtccctcccagaatggttgtgagaatcaagtaccaatctgttgtataatctggtgctttgtaaacaaaaaggcaacatacacataagatactgtaggaaaagacacaggcttctaaaagcaaactagtacaatagaaaaagaattagaaagatttccaaaatcaattaggtgcataaagtcttctgatcagagtcccattaaaatctgaggataggagcttatctatcattttcaatgctgtaaccccaggatctggcccagggtctggcacatt

SEQ ID NO: 83966 - DNA, 811 bp, Homo sapiens
ttgtaaaagttagccttgggacatagtccactctgcagctaagcagaccatcccattcaaacccaagcctcatcaagatcacaagcggattataagcattggaaaatcagcacctggaactgtaggatccccaaaggcatctgccccaggggcccagccatttattaactaaccactctgccatcagtatctcccccgtttctcatgcctagtaacacattgctcaattaagccttgtccgtctaaacagagtgtcatattctgctgtaacataaaggaaagctgattttattatcaaagatctgagttcaaggactgagtccttgtcccttgaacaagtcctttaaacttaggacarcaatataatttatcattcaagacagaataattttgagagtgaaagtgagtgctattacaccaggaacgagaggcataaaccaggactatttcaggcaaatgaggaagcagggtcatcctacctaaatctttgattcttaatcccctcatctgtgaaatagaaattaaaatccctacatgtccctcccagaatggttgtgagaatcaagtaccaatctgttgtataatctggtgctttgtaaacaaaaaggcaacatacacataagatactgtaggaaaagacacaggcttctaaaagcaaactagtacaatagaaaaagaattagaaagatttccaaaatcaattaggtgcataaagtcttctgatcagagtcccattaaaatctgaggataggagcttatctatcattttcaatgctgtaaccccaggatctggcccagggtctggcacatt

SEQ ID NO: 83967 - DNA, 1002 bp, Homo sapiens
catacaactccctacttgatctataaatgctacacattggaaatgatgattcccaggccatagacgcagacatctgaggctcacagaggtcaggtgacagggcccaggcatgcgcctagagctaggatttcgattctcacattctgaccagcagtggggactgaccgtcatctcctggtgtttggattcaaagttctcctccccggagagtggctgtgagcttcaggtctggaatctgagcacctacawgaccctgaccatcagtaagcacaccacacctcagtttcctcctctgtatagcgaggatgagagtaataccgccacacagagtagctataaggatcacatgagataaataaagtgcttaggaatatgcctggcaccgtataagcactgaatgaatgcaagcttgccagcctgataaggattttaacaatcattgagaaagatatctgcagctttccaaaagaacagaatggctcaaaattaattgataaaaaagatcctttgtactttatttttttaatctgttcaaatattcccccaaagtggattaagtaaaaaatgttcaatatgttctttctaccaagctattggatgaaagcacgctattagttgagctaaataattcatttagttaatttgcactgtaatcaatcaggagaagctacaaaacctcaaagtcattccaagtccaatttcaagtctctttcaggctttagaaacgtcttccaccagaagacagtcataaaatgtgtcaggaaacagaaacgatgagcttaacctctaccgcaggctggctaatcttcggaaacaaacacactgtctgaacagcaggaaagcaggatcacagtcactgctgttatcagaactgggtccagacgtcagctctgccacttgctgactatgcaactcgggatattctactcaacctttctgagcctcagcatccaccaccgcctaccttgcaaggttgtcgtgaagattaaatgacacgatgca

SEQ ID NO: 83968 - DNA, 640 bp, Homo sapiens
agggtgggtacacgggatctttgggttttccaggagctgtgtctacataacaattcatatccttcttggtccagccacctgagaagtaggtggggaaaggctctggtaaggaaatggcccaataccataatcagctccaagtgaactgagcgccacgctcccctgcacactacaagactcggctgcctatgccccccgccttcctgctcgccagctcctccaagtggagagcccttccttcaccatgttaacctggctagccctccagtttcaaggctcagccttgcctgaccacagcccatggatagatttcttcctctgtgctcccaaaccaccctctgtttaatttgcttccagcgctcactgctctgaatrcccatcatggccccctcatttgtctctcccatttgcctggctgctcttccacaagagccctacccacttatctctgtatcccaagtattttgctcagtgcctgacacacaggagatgctcaataaatgtttgtttcatcaatgaattaatgtatccactttggcaaaccaccaaatcacatttttaaccaagactgctgctactattattacgataacggcaatgactactactgttaatactactaccatgaatagatgacatg

SEQ ID NO: 83969 - DNA, 759 bp, Homo sapiens
atcctgagaaatctatggcaagtattattatttctagttaaagatagtgtggccaggacttaaaactggcctttggatcacaagtttggtgccctttgctccacaccacatggcaacactcaggctttgtctaaaggagcatctcctaaccttagcctctctggaaaggaaatataagaccaatagaagatacttccatcatttactgacatttcaggcttggaggagacctagaaagcacagaattggtgttagacatgatgtgattgtcaaatgcctattgrttttaacctgatttcctatttccttcctcccattcattctttcactggtctccttgttgaaaagaatggcctcccgtcgccagaacggtcatatgtgttcaacggtgactttgtggatcgaggcaaggattcagtagagatcctgatgattctttttgccttcatgctggtttaccccaaagagttccatcttaacagaggaaaccatgaggaccatatggtgaacttacggtacaagtcaaaacatgcttgagtatttgatgtttgtttgttgtaattgtaaaatgttatttctccagaacttcttatttgttaaatgcctttaaaactagttttccaatttttttaaaaagcagaatacacagtatataacattcaaaaaaaaattttttttttttttggagagagtctcactcggtcgcctaggctagagtgcaggtgcaatcttggctcactgcaacctctgcttcctggg

SEQ ID NO: 83970 - DNA, 759 bp, Homo sapiens
atcctgagaaatctatggcaagtattattatttctagttaaagatagtgtggccaggacttaaaactggcctttggatcacaagtttggtgccctttgctccacaccacatggcaacactcaggctttgtctaaaggagcatctcctaaccttagcctctctggaaaggaaatataagaccaatagaagatacttccatcatttactgacatttcaggcttggaggagacctagaaagcacagaattggtgttagacatgatgtgattgtcaaatgcctattggttttaacctgatttcytatttccttcctcccattcattctttcactggtctccttgttgaaaagaatggcctcccgtcgccagaacggtcatatgtgttcaacggtgactttgtggatcgaggcaaggattcagtagagatcctgatgattctttttgccttcatgctggtttaccccaaagagttccatcttaacagaggaaaccatgaggaccatatggtgaacttacggtacaagtcaaaacatgcttgagtatttgatgtttgtttgttgtaattgtaaaatgttatttctccagaacttcttatttgttaaatgcctttaaaactagttttccaatttttttaaaaagcagaatacacagtatataacattcaaaaaaaaattttttttttttttggagagagtctcactcggtcgcctaggctagagtgcaggtgcaatcttggctcactgcaacctctgcttcctggg

SEQ ID NO: 83971 - DNA, 759 bp, Homo sapiens
atcctgagaaatctatggcaagtattattatttctagttaaagatagtgtggccaggacttaaaactggcctttggatcacaagtttggtgccctttgctccacaccacatggcaacactcaggctttgtctaaaggagcatctcctaaccttagcctctctggaaaggaaatataagaccaatagaagatacttccatcatttactgacatttcaggcttggaggagacctagaaagcacagaattggtgttagacatgatgtgattgtcaaatgcctattggttttaacctgatttcctatttccttcctcccattcattctttcactggtctccttgttgaaaagaatggcctcccrtcgccagaacggtcatatgtgttcaacggtgactttgtggatcgaggcaaggattcagtagagatcctgatgattctttttgccttcatgctggtttaccccaaagagttccatcttaacagaggaaaccatgaggaccatatggtgaacttacggtacaagtcaaaacatgcttgagtatttgatgtttgtttgttgtaattgtaaaatgttatttctccagaacttcttatttgttaaatgcctttaaaactagttttccaatttttttaaaaagcagaatacacagtatataacattcaaaaaaaaattttttttttttttggagagagtctcactcggtcgcctaggctagagtgcaggtgcaatcttggctcactgcaacctctgcttcctggg

SEQ ID NO: 83972 - DNA, 209 bp, Homo sapiens
gagaggctcacagattctctggaatggcttcttcagatcacctaagcaaatagggtgggcctactttcattcaggagtcacattagattggactgttataggccgggcactgtggctcacgcctgtaatyccagcactttgagaggccaaggcaggcagatcacaaggtcaggagatggagaccatcccagctaacatggtgaaacctc

SEQ ID NO: 83973 - DNA, 776 bp, Homo sapiens
gaaaatcatcttcaagaagtctgacacattgatctacagaatcagctataatttcaaagacaagtcagtaaaacgatggagaggaggcatgacaagtgctgtttatagaacttgccagtctcaaaatttgaactggtatatttacaatttctcttaagtgataaggcctcctcatttattcagaatggaatggaaaaaatgtctaaaaagagaaaatgattcacttattagaaaatttgaaaacaaaagctttttttctcttgaacttactgctttttcattaacatcaccgaaacccagttttctaatctggaaaattattataatatatgctatacttttccttgggtgatgcctactatgtaaatagtagcatagatagtatttctctccattttcttggcccttggtcattttttactgcattaaggaaatagtgattgtacgtgccatagttgggtctcctgaatttattctttgacttcagtctcattgtcaaatcctactctgttataggtcacattcacttccctagggtcttattaagtggatggcaaggyaatttgatgaaatatttttgctattgttttaatggatgataatttattggtgtattagtcctccaaagtaaaatatatatgaacactggtcctcactgtctcaaatcaacgttataaataaatagtaagattttttgacaatgtgtcagccccggagggcaattatatccatgtcaggaattctcaacctcagcactattgacatctggggcaaga

SEQ ID NO: 83974 - DNA, 697 bp, Homo sapiens
ggtgggatccaagcacaggtgtggccacctcttagcaaaacctgcaggaataggtctagcagctcctcttgagaacaaggtggggtacccacagcctattgtacttagctttaccagccttctgagacaataaagaaaacacaaaataatctttctacatagaaaagctgagtaacttttctgattctcaggtctttcctttgcaaaatgagagtaaataaaattctgtgcttgcttcggcagcacatatactaaaattggaatgagagtaaatgaaattctcttgttagtgttgttgcaaagacaagatgatgtatatgaaggtacctgacatatttaatctctctttcaactgttcctccattattcttcttcattcttctttgtttacttttcccactgcttctcctgggtccctaggttgatatgytagggaaggatcctatggaagtattggagtcttaaattagaatttcttacaacaaaaagacagagcctacttcattgaatgaaggcttaatgggaaaatctggaacttggagattaccagggcctctgaggtgtgagagcatcttgcacagaaggcaaaactttgtttagtagaaatctcctgctgaggagatgctctacaccccagctttgcacgtgtggtgcaaatggattccccggcaaacaggagaatgccctggcaccgcca

SEQ ID NO: 83975 - DNA, 1341 bp, Homo sapiens
attcccctggggcgtctagtctatcagatagacttcagctctgaaaaacatactgggcccatttgccatactatcttattctatgaaattcctgtcatcaaacaataataccagcaaaactagcctacttagacaattccttttttctgtttcctttgattagcactgaaactacacaccaaggttaatcatagctaaaattttgaattagattaaatttgcccttgaagctctctcaattaacctcactgcatttctttcttaactcctgacactcgtttctctaaagataatgtcatcagagaggtttattttaactggaaatgtctctacattccaaaattatatttccacatcttgcttccatctctagggtaccccaactttaactggatgatgctatgtcacataaagctgtacatggacaatgacacttcagtgctttcctcttcttggggctatttttattatttaagtagacacattattgtatgcaaggtaccaatgtgaaatactgatgctagcgatgacaaaaatagtcaaactttgtaaaatatttgaagagatttattctgagccaaatatgagagaccacagcccatgacacaaccctcaggagatcctgagaacatggaacgaaggtggttagggagcagcttggttttatacattggtttggtccagaaagtcaggacaacttgaaggggtggtgtgctttcaggttataggtagatttaaattttcttgttgacaattggttgggtttatctaaagacctgggatcaacagaaaggaaatgtctgggttgcaataagaggttgtggagagcaaagtttaatcatgcagatgaagccttcaggtaagggcatcatacagaatagattgtaaatgcttcttatcagacttaaaggtctgtattgatgttaacaatggagtagtataatgaggcttgtctgaaccccacttcctatcatggcctgaaccagtctctcaggttaaattctaaaagtgccctggtcgagggggaagtccattcagacggttggggtgccttagaattttattttgggttacactaggaattcaaagatgaatgaaacaaaaatctgtgacttcagtgaattccccattttaggagagacatcgatttgttaacaataataacagtatctagcatttattaagcctctattgtgtgtgaggcaatgtgctaagcttttctttgtattacctttttttaaacctcacagcaacccctcaatgtgggcattatttttattcccatttkacaaaagagaaaacttccaaagagtaaagtcacatatctagtagaagcccagc

SEQ ID NO: 83976 - DNA, 1285 bp, Homo sapiens
aataacaatttaaataacttttacacagagaggttaataattactttaacaatatttgataattaaaacatactcaatttaattagtaacaaaagtataatacagtaaaaaataaacagtaactaaaattcctgaatgttatatatgctagttgtataatcttgaagagctgattcttctttcactccagtttccttatgtatataatggctatttaaagtattatataattgccttagagtgaaaggatggaaacataaaataaaataaagtattatataagcttcttaaggtaaaacacacagcaggaagtctcgcaamtgatactgtaatagtggtcagtagtagtagcagtggcagtggtgatggtgatgatggtggtggtggtggtggcgacggtagtgacggtggcggtggtaacagttgtagtggtaggtactaagtaacattccagagggtatttcatttaacacaagaatctcttgagataattaaaacaaaccctgcatcaaaaataagagaataatttagggttaaaaaaaaaaaggtgggaatttagtaagttctgccaattcaaaatccctcctcatctccaggataccttgtgccttcaattaaagtcatatgactcaagtaaaaaacaaggaaaaaaaatgttttgttaaaaataagtactgttccttaaaactttacggaaattcaaggcaaaaactaaaaataatgcacatttttataatcatcaataaattaaaaatttattttcaacatctttatttttcccatagttcctcaaagtatagacacgtccccattccactgataaagactgaaatcggcaatttagcatatattatatgaggcacatgcaaactaataaactgattaggtagctgcctattcaatgcaatgaaagagacacacagacacccccaaaaaggttttcttttcaaaaaacatttctgggatctatttagtaatgtttttaaatgtagccgagatcagaattatctattttaaaaacagaccagttgtaaaataaacttgttacccatgcaatcaaaaagtgcaacagacaacatcaaacacagaaataggctcattgctcttattaagaaacatataatgactggaataatgttgtatttataataatgtgctacacattgatctactattttttgttgtttatggtatctttggagtaggggaagtgtcaactgctctaaaagtgatctttctcttttgaaatagtgaccgttttcaaatagtatcaatatgatgtatg

SEQ ID NO: 83977 - DNA, 1029 bp, Homo sapiens
tttgttattagtcatagtattattagaaatgtccttgagtaccattattaagaaaacgtagctaaatcaaatatcattttcttaattgaagagttcttgatgagctaggaaaatcaatagcattttcttaagtagttgagaaaggttcaagtcttgtatttatctttactatgttctttccctctgtccttttttaaccttttaagtacttatttctgagctcttcttcatcttaaaatgttatgctctgctactaattccccatcaaaaattataatcctgacagaaaaatatttttgacatccaccaaatactgtgtccgaagattgactttaaattaggtataaaatgaaagyaacaatttaagatgttttaaattaaatgccctattatcttttcacatgtcaatcattctttaagctttaactgcatcagaattttctataatgctgtaaccatatgaagtcatcataaacgtcgaagatatcaggattttcatatttttaaaagatttataatcccagattttaagtctcataagaatgccataaatgagataaacctataaaattcagaccccaaaattgctttaaagactaaaacttttgaaaggctcataaatgagttgaaattttagaattgacatatgtatttcagttacagtgccaataagagaagttattaaaatgtgtgacttttaccataattatccagcatgtatactgaaaaggaaaggatatgatatagtaggtggtaaaaatgaatgaaaaagtaaactgcacattggactggacaactggcttgctaaattgtaccagaattaggtgttttaaagtatgactcaaggaattgaaagccaagtagaaacgacactccctcctgtttgatcagcttgtgttggtgtttacgcatcccgcagaggcagagtgtgttactattcaggacagccccagtggctccacagtagcctgagcctgtgagaatagaggagagactcaagcccagtttttgatgttctgcttgggtggg

SEQ ID NO: 83978 - DNA, 1029 bp, Homo sapiens
tttgttattagtcatagtattattagaaatgtccttgagtaccattattaagaaaacgtagctaaatcaaatatcattttcttaattgaagagttcttgatgagctaggaaaatcaatagcattttcttaagtagttgagaaaggttcaagtcttgtatttatctttactatgttctttccctctgtccttttttaaccttttaagtacttatttctgagctcttcttcatcttaaaatgttatgctctgctactaattccccatcaaaaattataatcctgacagaaaaatatttttgacatccaccaaatactgtgtccgaagattgactttaaattaggtataaaatgaaagcaacaatttaagatgttttaaattaaatgccctattatcttttcacatgtcaatcattctttaagctttaactgcatcagaattttctataatgctgtaaccatatgaagtcatcataaacgtcgaagatatcaggattttcatatttttaaaagatttataatcycagattttaagtctcataagaatgccataaatgagataaacctataaaattcagaccccaaaattgctttaaagactaaaacttttgaaaggctcataaatgagttgaaattttagaattgacatatgtatttcagttacagtgccaataagagaagttattaaaatgtgtgacttttaccataattatccagcatgtatactgaaaaggaaaggatatgatatagtaggtggtaaaaatgaatgaaaaagtaaactgcacattggactggacaactggcttgctaaattgtaccagaattaggtgttttaaagtatgactcaaggaattgaaagccaagtagaaacgacactccctcctgtttgatcagcttgtgttggtgtttacgcatcccgcagaggcagagtgtgttactattcaggacagccccagtggctccacagtagcctgagcctgtgagaatagaggagagactcaagcccagtttttgatgttctgcttgggtggg

SEQ ID NO: 83979 - DNA, 1004 bp, Homo sapiens
aggcagtggagcacaacattttaaggaggtataaaaggtggtccacagatccgtggccaagcttatctgtttccctgctttttcctgtgtgactttacataggtgatttaatttcactttccttgtatgtcaaattaaaacaaaagcaattttaccaccttgcattgcmgtgcagagcaagtgagaggctacatggaaaccatgcacgcaggttgacacacactgagccagcactgcacaccgtggtcccttcccttctcctgcatcttcactggtgtgccctcatgcttcctctttctcactctctttttctctctggtttttatcagtttgtttctgtatagctgaggaataatgataaagcactaatctaccatttcactcaagtgtaaagccagaaaatctgttcttacactgatataccagttccttatattgatatgctgatttattacatttgttaaatattttataatttgcaaatgcactcatttctttgcttattcattgaactcttcattcaacagagggtttatgtttgcactgtgcctggcatctgcttccttacggtacctggcaacaccttctgaagtgccagagtgaggacgttccctttgcaagtgtggatgcccagatgagggatgcctcaaggtcacgcaggacgtgaggtcggctcttctgactcttggtgcggtgctctttcatctcctacaggcttagtgaatctcagttagcgtcagagagcacattggtcagggaaccaggggaagctaagtgccctataaaaagcctgtgtgcctcccaaggaatcctcttttcattggaatgatttacagtgggattttcattctaaaaacctgccacctcctgaatgatatttgtaaaatgtttaaccccatggggattccttctggtatgcaggagaaggtaccataaattgttctgttttctttttcaaatgggaagacattaattatgttctaagaggtatgccaaactaagtg

SEQ ID NO: 83980 - DNA, 643 bp, Homo sapiens
gatccagtggtgctgctgatctgacagaaggcagamctcgggtagtaatactcactcgcctgccactcacctgctgccgtgcggcctggtttctaacaggtcagaggttgggaacccatgttgtaatgtattcatctttttcagtagtacgtgtatataattacataattattaatacataattaattaatacataataggagtagattctttatgttctcagattgtcctactaaataaataatcagaaaacaagggaaaccactgttttagacaataaatgagacctattgcaacacaacctgatcatatcagacagctattgtaaggacaaaaagcaagtgaaaacggaagaacccttaaggacatcagatgttctcatcaccataaacctattttaaaaaatatacaaacacttgtaaaatgatcgtggtgtgctggcagtctgccagataggatttcaagaaaccattcctgggtgtatttggaggagaaaatagtattgacgccaccgcagattctgaaccccagcatctgtaaagactttgctaacattttttgccttcttattctccatacattttaaaattgaaatgatttcattgtatttaaagatgaaccattcattcacagagatatatat

SEQ ID NO: 83981 - DNA, 643 bp, Homo sapiens
gatccagtggtgctgctgatctgacagaaggcagacctcgggtagtaatactcactcgcctgccactcacctgctgcygtgcggcctggtttctaacaggtcagaggttgggaacccatgttgtaatgtattcatctttttcagtagtacgtgtatataattacataattattaatacataattaattaatacataataggagtagattctttatgttctcagattgtcctactaaataaataatcagaaaacaagggaaaccactgttttagacaataaatgagacctattgcaacacaacctgatcatatcagacagctattgtaaggacaaaaagcaagtgaaaacggaagaacccttaaggacatcagatgttctcatcaccataaacctattttaaaaaatatacaaacacttgtaaaatgatcgtggtgtgctggcagtctgccagataggatttcaagaaaccattcctgggtgtatttggaggagaaaatagtattgacgccaccgcagattctgaaccccagcatctgtaaagactttgctaacattttttgccttcttattctccatacattttaaaattgaaatgatttcattgtatttaaagatgaaccattcattcacagagatatatat

SEQ ID NO: 83982 - DNA, 719 bp, Homo sapiens
ggtctgcagaaccaggagcccgggccaggctggcctatcagccatgaccatctgtgcaccttagccacctactcacagcacagcctccatctgcagatccacctaggactcatccattcctgactggtcttttgtttcaaaacccggcagccccggcccctcccaagcctgaagtcaccacacacgcccatcctcccatcagtcacttcctggctaatggggactgaggcccaatcattctcgtttttcatgccttgtcagaggcctgaacacagagacagaggargggagagagagagagagggcagctctggaggaggcgcagagtatgggcagatgtcctcatgaaaaatttacaaggaataatcagaggccccttctctcccctctggccaaagtccccctaggcttgttgcccgggccgctgtgagaatattggaaaagtccccctcgttttgaaggcaatctggttctggggggttaatgcccagcgttgatgcacttggctgtcctcttgagaccgggttgcaaatgcagttcaggcaaaattgatgaagtatcagttaatctgaggctgacagtttagagaggtcacagctgcgaggggctgccagggtctcccagagacaggactaagaagagttaaagccagggagggcccggtgaaaggaagcattcatcttcttcgcctgggcatttctcaaacattgcgcctgcca

SEQ ID NO: 83983 - DNA, 1229 bp, Homo sapiens
tgcatgctggtgtatgcaccctttttaacctaaggagcagtagcaccttagattatattttgccttgctcatgggaataaatggatacatgatcttataaataacatagcactatagtgtcattgacttggctgggtaatgttattttttccatcttaaaaattacatacatttgcttttagaaatcaatgaaatccgtttttaagaacgttctcttgctttaagaaaagtcatctgcattcagcagctgaacaaggacaacgtagtaatttttttctcttttttagatttcattttattgattacactaggaaaaagcctaaattgctttattcagtagaagggggaacacatatatagaattttaatgcaaggagataagctgcattgatctttccagatattcatatcaaacataacttattagaaacaccttcaatctaaacaaacaggctcaagaaaaaagaaaayatgcagaaagattattgttattataggagcatgacattttcttttcattatggaatatgtactcataaaatgagctggaagaggaaggcccttccacaaaattttaaatgttgcctttcatattcgaaatgttgaaattttttatttgacatccatgatcatagaagtacaggattttttttattgttttaattttatcaagatgaaagttaagtttccaggagctagaggtgctatttatccagatatatcacaacaggtcatttcataattaatcaggtcattatggagaattatttagagctcttccatccaaacccatgtttaatttgtgatcggaatacaattttattaatactgtgtacagttgcagaagttttgctggggagcttcaaatctgtttaaagaattgcaaatatatgaggaccccaagtcatcataagcacttcctaggttgctgccaattaaagtcatgtgggttcggtaccttcctagagttgctcatccaagatttaagtcagggccattgctagaaagggagtcccttctaggcccactcagccctggccacccaggtatccccgccctgaacactgcggctcagagcaaccgagggcattcatcgatccctgcccttgcagctggcaggcagaaccaaagaactggcgccctttgtcaccttgtttgcagtgtgctccgatcactgcaggggaatgtgagtcccacaggctcctttgcctctgttgattgccacatgc

SEQ ID NO: 83984 - DNA, 1229 bp, Homo sapiens
tgcatgctggtgtatgcaccctttttaacctaaggagcagtagcaccttagattatattttgccttgctcatgggaataaatggatacatgatcttataaataacatagcactatagtgtcattgacttggctgggtaatgttattttttccatcttaaaaattacatacatttgcttttagaaatcaatgaaatccgtttttaagaacgttctcttgctttaagaaaagtcatctgcattcagcagctgaacaaggacaacgtagtaatttttttctcttttttagatttcattttattgattacactaggaaaaagcctaaattgctttattcagtagaagggggaacacatatatagaattttaatgcaaggagataagctgcattgatctttccagatattcatatcaaacataacttattagaaacaccttcaatctaaacaaacaggctcaagaaaaaagaaaatatgcagaaagattattgttattataggagcatgacattttcttttcattatggaatatgtactcataaaatgagctggaagaggaaggcccttccacaaaattttaaatgttgcctttcatattcgaaatgttgaaattttttatttgacatccatgatcatagaagtacaggattttttttattgttttaattttatcaagatgaaagttaagtttccaggagctagaggtgctatttatccagatatatcacaacaggtcatttcataattaatcaggtcattatggagaattatttagagctcttccatccaaacccatgtttaatttgtgatcggaatacaattttattaatactgtgtacagttgcagaagttttgctggggagcttcaaatctgtttaaagaattgcaaatatatgaggaccccaagtcatcataagcacttcctaggttgctgccaattaaagtcatgtgggttcggtaccttcctagagttgctcatccaagatttaagtcagggccattgctagaaagggagtcccttctaggcccactcagccctggccacccaggtatccccgccctgaacactgyggctcagagcaaccgagggcattcatcgatccctgcccttgcagctggcaggcagaaccaaagaactggcgccctttgtcaccttgtttgcagtgtgctccgatcactgcaggggaatgtgagtcccacaggctcctttgcctctgttgattgccacatgc

SEQ ID NO: 83985 - DNA, 526 bp, Homo sapiens
tcccttgattttcttccctcctctttcctgcatcctcttctccgccatatcacttctggagcaagcctcttaaacctacttcctatggtgaacatgagtggttttcatttacttccccacagtttttattccttccccactctccatccatgtgattcagctgggattgacacccatcatagtgactggatatgggttccaggacaatcaagttacctaagggtttttgttgaaatggaaaaaaaaaaaaaaagccactctttttttctacaaggattgctaagacagagactagaggtggagagagacagatttccaatcatgacacttgagctcctaaattctgccacacttgtagccattcttacccttacawtgattttctgttatgtgaatcaatacattttattttattcttgggccaatttgagatgggtttttatcccttgcaattaaaagaactgaccaagacaagacctgtcagcctactgttatctccacttctatagttccctctgggccctat

SEQ ID NO: 83986 - DNA, 699 bp, Homo sapiens
acctggtcttagagttcttttttttataaattgtgttgcctcccctgggtagaaacacagctctaatgtaaacttacactgtcttctcccatggaaacctttttttaacacctgtaaggccctgtgggacagaaggcctttgtttcactatttctttgagattgctgtcctccatttttcaatatttgaataacatttcatctgtgtgtaccatctactacagtctttgtttctgttgtaggttccttctcaaggacttatcctagtttaaaaatacgacttttgcccaaatttcatttgggtcctactgcccgttggagaaccctttggcttcttcgatccttcaacaacccaagacctcccacaaagccagtcaaatcattcatcatttctactcttcctgatctgcttcttatgatcccactcctgggctgggaagtgcaacagcaaagagactaacgcatgcacttttggccttgctgcctattttcatctgggccctttctgctgtgcagatctctaggtggytacattcttatagtagctgcttctcaacctttgccaatctgttcatggtcttgctttctctatttgatgtctgaaaccagtttgccttcatagaacttctataataaacattactgtttgcctacttagcatctattgcttccttccttataatatctgatttttattaag

SEQ ID NO: 83987 - DNA, 1417 bp, Homo sapiens
  misc_feature (1)...(1417): n = A,T,C or G
ctccggctaccaccgaggttcctaacagggaaattgccagcttgaatgcttggggttgatgtgggagtgcgtgtgaaacgggtgtggggtgaaagggcagtgaactttgtaggtgggtagatagggggtgctgaagggctttcaggtaagaggcacagaggaaactgggagaggcagcgaaagcacttcacgcctcagataaccagaagatgctcccaccagcgccatgacagtttgccagtgccatggcaacacaggaagtccccaccccttgccatggaaacagctggaagttactgcccatttctagctatttctgagtaacccgccccttaattagcatgtcattaaaagtgaattataaaaatgactacaagccacccttaggctgctactctgggagcacaacccacagagggctccctgccctgcangagcggacgcagggctgtaacaccgccaatgcctccatagagctgctttattccaccacaggcttgcttttggattccttcatgagcgacgccaagaacctgcccttcctcagtgtgactcttgcctaaaatctatccctggttttctcttttcctaagcatgccctgacttgttctttcatctcctctgaacttgcaattgctcctcagtgactctattctgcagatccagaaaactcaaccttaatcttcccagagccctgttgtctccaatattggaatctctagccttgctttctcagacacctagattacagtcctctctcttgaacacctattggtaaggtatccggggatcctttaaatacacgatgattggcagggtttacataggggaaatcagtgcctgacaattcgccttccaggatatggattgtcattccctctctttgtgggccccagtctcctatacataaaagtagagattgtaatactcatttgacttrcagatacctcaccccgaacccacctactataacgtaaaagccaagaatgcaaaccctttcctcaccccgtgaaggtaaagtcctcagagccaaggagagaaggctcaaggatggtacctgggtgtttccaacactaaccatgcattgtagtttttagtgttcaagtttaagcttcttatgttaaagttaccccagctttaattatattgtaacaagatttatttttgtaatcccatttttggattcttgatttcttggtaaagaaatacagttatttttgtataccaatcttatatagtgttacattccaaaatttgttcatgagtcctaacactttttagtaaatttcttatgattttctaaatgcaagatcatgtcatctgtacataaagataactgtacttcttcctttccaatctagatgccgtttatttatttacattgccaagttgtcccagctaccactgttatcaagta

SEQ ID NO: 83988 - DNA, 1417 bp, Homo sapiens
  misc_feature (1)...(1417): n = A,T,C or G
ctccggctaccaccgaggttcctaacagggaaattgccagcttgaatgcttggggttgatgtgggagtgcgtgtgaaacgggtgtggggtgaaagggcagtgaactttgtaggtgggtagatagggggtgctgaagggctttcaggtaagaggcacagaggaaactgggagaggcagcgaaagcacttcacgcctcagataaccagaagatgctcccaccagcgccatgacagtttgccagtgccatggcaacacaggaagtccccaccccttgccatggaaacagctggaagttactgcccatttctagctatttctgagtaacccgccccttaattagcatgtcattaaaagtgaattataaaaatgactacaagccacccttaggctgctactctgggagcacaacccacagagggctccctgccctgcangagcggacgcagggctgtaacaccgccaatgcctccatagagctgctttattccaccacaggcttgcttttggattccttcatgagcgacgccaagaacctgcccttcctcagtgtgactcttgcctaaaatctatccctggttttctcttttcctaagcatgccctgacttgttctttcatctcctctgaacttgcaattgctcctcagtgactctattctgcagatccagaaaactcaaccttaatcttcccagagccctgttgtctccaatattggaatctctagccttgctttctcagacacctagattacagtcctctctcttgaacacctattggtaaggtatccggggatcctttaaatacacgatgattggcagggtttacataggggaaatcagtgcctgacaattcgccttccaggatatggattgtcattccctctctttgtgggccccagtctcctatacataaaagtagagattgtaatactcatttgacttgcagatacctcaccccgaacccacctactataacgtaaaagccaagaatgcaaaccctttcctcaccccgtgaaggtaaagtcctcagagccaaggagagaaggctcaaggatggtacctgggtgtttccaacactaaccatgcattgtagtttttagtgttcaagtttaagcttcttatgttaaagttamcccagctttaattatattgtaacaagatttatttttgtaatcccatttttggattcttgatttcttggtaaagaaatacagttatttttgtataccaatcttatatagtgttacattccaaaatttgttcatgagtcctaacactttttagtaaatttcttatgattttctaaatgcaagatcatgtcatctgtacataaagataactgtacttcttcctttccaatctagatgccgtttatttatttacattgccaagttgtcccagctaccactgttatcaagta

SEQ ID NO: 83989 - DNA, 572 bp, Homo sapiens
gataagtgccctataacattttatatttctggaaacccttcaatataaagttattacatgtaaaaataaaaagtctgttttagcaaactttttcttcacaaattatcttttcctagttccctattagacaatttytgtaggccccatatgctattaatttatattcacctttagaagaattttcatcaaaagcacaagtcttatgtaaattgtttatatgctatttgtacttctatgtatatatacacacatagccacatacatatatgtaactccggaggcctgcctggactgttaaataactgtattgaacaagagcaagaaaaagctgttcaaatttcaaacaacaagttgaactgaagagctcatatctttgaatgaaatagacactagtagcctttaaaaattaaacatttctactgttttaaaaaattatagccatcatagtatgaggaaaaatgtaataatcctttttaattcttgccattttattaaccacaaagtccttatgccctgacttcattggtacccctttgagattaaacagaacacttaatttaaaattctgataa

SEQ ID NO: 83990 - DNA, 572 bp, Homo sapiens
gataagtgccctataacattttatatttctggaaacccttcaatataaagttattacatgtaaaaataaaaagtctgttttagcaaactttttcttcacaaattatcttttcctagttccctattagacaatttttgtaggccccatatgctattaatttatattcacctttagaagaattttcatcaaaagcacaagtcttatgtaaattgtttatatgctatttgtacttctatgtatatatacacacatarccacatacatatatgtaactccggaggcctgcctggactgttaaataactgtattgaacaagagcaagaaaaagctgttcaaatttcaaacaacaagttgaactgaagagctcatatctttgaatgaaatagacactagtagcctttaaaaattaaacatttctactgttttaaaaaattatagccatcatagtatgaggaaaaatgtaataatcctttttaattcttgccattttattaaccacaaagtccttatgccctgacttcattggtacccctttgagattaaacagaacacttaatttaaaattctgataa

SEQ ID NO: 83991 - DNA, 572 bp, Homo sapiens
gataagtgccctataacattttatatttctggaaacccttcaatataaagttattacatgtaaaaataaaaagtctgttttagcaaactttttcttcacaaattatcttttcctagttccctattagacaatttttgtaggccccatatgctattaatttatattcacctttagaagaattttcatcaaaagcacaagtcttatgtaaattgtttatatgctatttgtacttctatgtatatatacacacatagccacatacatatatgtaactccggaggcctgcctggactgttaaataactgtattgaacaagagcaagaaaaagctgttcaaatttcaaacaacaagttgaactgaagagctcatatctttgaatgaaatagacactagtagcctttaaaaattaaacatttctactgttttaaaaaattatagccatcayagtatgaggaaaaatgtaataatcctttttaattcttgccattttattaaccacaaagtccttatgccctgacttcattggtacccctttgagattaaacagaacacttaatttaaaattctgataa

SEQ ID NO: 83992 - DNA, 1292 bp, Homo sapiens
atacttaaaagttaatgccctcataatatgcaaaatttttaataagcacattggtccctgtgttcaagtagttggtaatcaaattagtgaagtatggtaagtcttttgaagagcattaaacagcagagaatgtaagaaatttttctctataatagtgtgggccttctgtgtttcctaagggaacattcatatgatctaataactgagcagagagaagcctaaaggatatttaatggtttcatttttttgtttttgccaattaacatacatttctagattaaaagtcaactatcttttccttgggagtcaactataggagaagatagtgaagaggcaaggaaaattacagcagctcaacaactttaccctggaaatatctgtattgtgtaccgctatagcctacctttatcagtcagataacaatgtcaaagaggcaagcttggcaccattgctcttagtgaatctctgctgccagccttttatcctaagtgctctccaaagacccatttaatggacctttctgaaattgtgctcaggatcaatatgaggctcattgatacagcagctttggaactcaccatttgcttatttattaaacctgggatatttgcccgacttctatcatctgaaatcctctccatgactttcaaaattaccaacattggttccaacatcattcctagaaaacatttcagtggagtatatttatctgacatttgactgtatttatagcagtaagaatatatgatgattcctcttaaaataatcccacaattacccattttgggtcacctttgagggtcttatccttaatatcagagatctgttctatacatttgagtcttagaaataattactagcttctctctgaatttaactgaagttccttacttttattcagcctgttacccaaattacataatgtattgaaagctaaaaactgtccaaatttctgattacctttagttaaaaatgggaatatgactttttctttttctaacttggcaaagattatgtttttttcatgaagaagtactgacatatttaaacactcaggatctgagaatttgaaatacatgaaacttagcaagtggtctttaagtagttttcatttctaaattatagtacatagcattgaatgctacagaagaaaagacaatgagggattactcataaacattgcctttatgatatccttccaaagaaaaccaagtgtccctgtgcttggactcataaagcagaaatgcttacmttgcttttatgtcactaacaaacaattttgcctagtcatt

SEQ ID NO: 83993 - DNA, 743 bp, Homo sapiens
aaaacttacccaatgcctgtaccatcattgtaccttgaaagaaaagaactcccttttaaattcagggacttataggcaaaagggactgtagccttttctcaggtgagacgtggaactttttacattcgagttaatgctgaaatgacttaagacttttggcaacttttgaaaaggcatgattgtattttactctgtgagaaggatatgatattgggggatcagggtcagaataatatggtttagctgtgtgtccctacctaaactcacatgtaattgtaatcccgaatgttgcaggtggggactggtgagaggtgacttattcatggatgggagaggggtggggttggaagtaaaaacaggtgggtaagggggggaggagtaggctggctgtagggtggtgtgtagcaggaagggagtagcctgccacagaggcagaggctcatggaaaacctctactaaggcagtgcacctgtggttttgcacctgtggctttgcagggtttagcacctgctgctgctctcatgggctgggctggtgttgagtacctgaagcttttccatactgggggtgtgagctgttggtgggtccatgactcttggrtctggaggatggtggcgtgggggctccaagcccatattttccttctgtactgccctagtagaggttttccaaggggatctgtctctgcctcaggcttctgcttggaaacagtgggtggtggatatggggaggtgggcggatcc

SEQ ID NO: 83994 - DNA, 1204 bp, Homo sapiens
tcccatttaatttgacatttatttctacatacacacactcaaatattaacatacaaaaaacaggagtatatttcatgttcagatttacttatttatggttttcacctgagattcatgtgaacacaacacaagagggttacagacaggaaaatagcattatttttcaaggtaaaaataactttcttcatcaattaattcatgtaatctgaattattgcatctaattagcacactcattctctttctataacaaaacagagaaaaattatttacaatgaattactgctgtatttcgcattctggcaaagttcccattgctttcagatatacttaatgacaaggtgaataagatgacaccactttttctttcaaaaacgtagtcatgctgaaaatatctatgtagaagacaagtcacaacacatagaaaatatcacaaaggatgcttgttaacaatagaaaaaatgaatggagaggggacagaaaggtgtcagatgagaggtgctcataatacctgcaaaataaacaccagcttcagtttcagagacaagtgagtctcagattgacagatggtggatgattgcttctggtggagcgaatgatggttagtttgcaagtaaaagcagataaaggagcacatgaataacagtcaaatctttggtatgtgggtaaggcttaaattataaatggcttaaattataaatggttcatgattgactggccacaagtaatttattaagaatgcacatatggtgaagaaaggcagtagtgttctaacaaatgaatgcagctgaccataaaaaatcctatattaaatggaaaggaatatttggaaaacaatgaacttgaaggagacctaaaggcagatgaaatataaattaagccagcacttgtgacaaaagcaacaaaaacatgcttggaatatgggcatgttagggttaaacwttggttgatccaaagactaagtttcatttctaaattcaatttgtaaaattcaaggacaaaatattgtaaaagtgctatcagacaaataactacttgtggtcttggcctttaatagtatggaatcaagcactcttcacagagaacatggttgtcattcacaatgagatcaaaccaaacattagagattcacccaaaaattttcccttcaaaatgacctggtcatgtctctacgagatgttttacaagttagtttatccttctgt

SEQ ID NO: 83995 - DNA, 1204 bp, Homo sapiens
tcccatttaatttgacatttatttctacatacacacactcaaatattaacatacaaaaaacaggagtatatttcatgttcagatttacttatttatggttttcacctgagattcatgtgaacacaacacaagagggttacagacaggaaaatagcattatttttcaaggtaaaaataactttcttcatcaattaattcatgtaatctgaattattgcatctaattagcacactcattctctttctataacaaaacagagaaaaattatttacaatgaattactgctgtatttcgcattctggcaaagttcccattgctttcagatatacttaatgacaaggtgaataagatgacaccactttttctttcaaaaacgtagtcatgctgaaaatatctatgtagaagacaagtcacaacacatagaaaatatcacaaaggatgcttgttaacaatagaaaaaatgaatggagaggggacagaaaggtgtcagatgagaggtgctcataatacctgcaaaataaacaccagcttcagtttcagagacaagtgagtctcagattgacagatggtggatgattgcttctggtggagcgaatgatggttagtttgcaagtaaaagcagataaaggagcacatgaataacagtcaaatctttggtatgtgggtaaggcttaaattataaatggcttaaattataaatggttcatgattgactggccacaagtaatttattaagaatgcacatatggtgaagaaaggcagtagtgttctaacaaatgaatgcagctgaccataaaaaatcctatattaaatggaaaggaatatttggaaaacaatgaacttgaaggagacctaaaggcagatgaaatataaattaagccagcacttgtgacaaaagcaacaaaaacatgcttggaatatgggcatgttagggttaaactttggttgatccaaagactawgtttcatttctaaattcaatttgtaaaattcaaggacaaaatattgtaaaagtgctatcagacaaataactacttgtggtcttggcctttaatagtatggaatcaagcactcttcacagagaacatggttgtcattcacaatgagatcaaaccaaacattagagattcacccaaaaattttcccttcaaaatgacctggtcatgtctctacgagatgttttacaagttagtttatccttctgt

SEQ ID NO: 83996 - DNA, 769 bp, Homo sapiens
caaattacacgctgttatggactgagggcatctccccaaattcaggtgtgaagccttagggccagcctaacagtataaagagctgggatctgtctttaattgtcccgaggtggaamctgcatgaatgggattaggacccttataaagtcttctgctcttctatcacgtgagggcacagcattcctcccccttgcccttccatttttttcaccatgtgaggacatagcttgtgtctttcacgggggctgctgaaacatagcaccatcttggaagcagagagccgccctcccagacactgaacctgccagcaccttggttttggacttcctatgaaaaataattttctattacttataaactccacagtctcaagtatttttttgtagcagaacaaatggactaatacagaacattggtaccaagaagtcaggtgttgctataacagatacctaaaaatgtgtaagcagctttggaatgtggtaatgggtagaggcaggaacaattttgaagtgtatgctagaaagagtctagattgccataatggatcattaagggagacagactctggtgagggctcagaataggagagctatagagagagtctcggacttcctagagattatctaacatgctcaggatcagaatgctgggagaaatatggacggtacaggtaattctgatgtgacctcagactaaaatgaggaatatcatattggaaactagagggaagaccatcctcattacaaagtgccaaaaaacttggctgaat

SEQ ID NO: 83997 - DNA, 769 bp, Homo sapiens
caaattacacgctgttatggactgagggcatctccccaaattcaggtgtgaagccttagggccagcctaacagtataaagagctgggatctgtctttaattgtcccgaggtggaaactgcatgaatgggattaggacccttataaagtcttctgctcttctrtcacgtgagggcacagcattcctcccccttgcccttccatttttttcaccatgtgaggacatagcttgtgtctttcacgggggctgctgaaacatagcaccatcttggaagcagagagccgccctcccagacactgaacctgccagcaccttggttttggacttcctatgaaaaataattttctattacttataaactccacagtctcaagtatttttttgtagcagaacaaatggactaatacagaacattggtaccaagaagtcaggtgttgctataacagatacctaaaaatgtgtaagcagctttggaatgtggtaatgggtagaggcaggaacaattttgaagtgtatgctagaaagagtctagattgccataatggatcattaagggagacagactctggtgagggctcagaataggagagctatagagagagtctcggacttcctagagattatctaacatgctcaggatcagaatgctgggagaaatatggacggtacaggtaattctgatgtgacctcagactaaaatgaggaatatcatattggaaactagagggaagaccatcctcattacaaagtgccaaaaaacttggctgaat

SEQ ID NO: 83998 - DNA, 769 bp, Homo sapiens
caaattacacgctgttatggactgagggcatctccccaaattcaggtgtgaagccttagggccagcctaacagtataaagagctgggatctgtctttaattgtcccgaggtggaaactgcatgaatgggattaggacccttataaagtcttctgctcttctatcaygtgagggcacagcattcctcccccttgcccttccatttttttcaccatgtgaggacatagcttgtgtctttcacgggggctgctgaaacatagcaccatcttggaagcagagagccgccctcccagacactgaacctgccagcaccttggttttggacttcctatgaaaaataattttctattacttataaactccacagtctcaagtatttttttgtagcagaacaaatggactaatacagaacattggtaccaagaagtcaggtgttgctataacagatacctaaaaatgtgtaagcagctttggaatgtggtaatgggtagaggcaggaacaattttgaagtgtatgctagaaagagtctagattgccataatggatcattaagggagacagactctggtgagggctcagaataggagagctatagagagagtctcggacttcctagagattatctaacatgctcaggatcagaatgctgggagaaatatggacggtacaggtaattctgatgtgacctcagactaaaatgaggaatatcatattggaaactagagggaagaccatcctcattacaaagtgccaaaaaacttggctgaat

SEQ ID NO: 83999 - DNA, 575 bp, Homo sapiens
tgggatacacataaaattagatattaggttattagtgacaattaattgaattgtttaaaataaagaaacttctgatccataaatattcccattagattgctgaattttgatgtctaccctttatgaagtaaatgtatatattacccatttcctgcaggtgctctatcataattacttgcaaaatcagtttctattcattgaatttttaattccaagtcttcaaaaatgttgcaaagataactcaattattgagacatttgttccatggaatcaaacaactcagaacctacattttaagtgcttaaaatctgaatggatacagacaactgtacatataaattgatatctagtagagcgtgttagaaagagtaaataagaaatatatctaactagaaatagtttttatataagaggatactgttcaaattcatagagcttgggtgaaaagtaaacagcaagacagacattactgattsagtattttgagctaagtcacagagactataaaacataaggcatattttaataaatgcaaacagttaatttacatttttatatatgatatggaaagaatg

SEQ ID NO: 84000 - DNA, 1015 bp, Homo sapiens
ctatccaaagggactctctctatgaactcttcacaccccaccatttcacagatggggtgaacgacccttaatgctagtagaagcaggttttatagcctcaccttgcactacatgtgttgtctagcagcttgctttaggatgcaggggttctaagtacccactctctcgactttttgtagtctcagctgaactaagacagaatgagttmcattttaacaatcaaatacattaaacatacagcattgcagacacttgaagatgaaagcacatggaggtcactataataaagcaccttttgatttagactgtggtccccttttattttagaatatactgacatttctcagagcaataagctatttgtaaatctttattcacttaggttcactggaacttgagtgaaaaaaataaaaatatagggggctcaaatctaataagataaatttatatgttccctcttatgttcatctgcatgatacagctctgccatttttcttcaggtcatttttccagtttctttcacgttttacctttgtttttctctctttgatttctagagaatgtcactctcatttggatagagcagtctccagcctcctaagaacatatcagagttgacatttctacatacttgtttattcctttcaaggagtaaacatattgttcagaaccaagaagctgaaaatattgttgtagaattataatgctaacataaaatcatttcccacatcatcatttgattaatacaaaatggctgtggtttctcaaagcctcttgctttttcatgtttttgttcatgctatgatactaccactaaatagacaactttcttctcactctcctttgaccatcatctactcacccttcaggatttagtcaggcatatgttgaaaaatatgcttaaaaacaaagcttacctgagaatgtcattgtcaaggatatacaaaatagcaaatattaaatttgttgactttctttgtcatagattagatgtagaatattttgttcgaatgct

SEQ ID NO: 84001 - DNA, 1015 bp, Homo sapiens
ctatccaaagggactctctctatgaactcttcacaccccaccatttcacagatggggtgaacgacccttaatgctagtagaagcaggttttatagcctcaccttgcactacatgtgttgtctagcagcttgctttaggatgcaggggttctaagtacccactctctcgactttttgtagtctcagctgaactaagacagaatgagttccattttaacaatcaaatacattaaacatacagcattgcagacacttgaagatgaaagcacatggaggtcactataataaagcaccttttgatttagactgtggtccccttttattttagaatatactgacatttctcagagcaataagctatttgtaaatctttattcacttaggttcactggaacttgagtgaaaaaaataaaaatatagggggctcaaatctaataagataaatttatatgttccctcttatgttcatctgcatgatamagctctgccatttttcttcaggtcatttttccagtttctttcacgttttacctttgtttttctctctttgatttctagagaatgtcactctcatttggatagagcagtctccagcctcctaagaacatatcagagttgacatttctacatacttgtttattcctttcaaggagtaaacatattgttcagaaccaagaagctgaaaatattgttgtagaattataatgctaacataaaatcatttcccacatcatcatttgattaatacaaaatggctgtggtttctcaaagcctcttgctttttcatgtttttgttcatgctatgatactaccactaaatagacaactttcttctcactctcctttgaccatcatctactcacccttcaggatttagtcaggcatatgttgaaaaatatgcttaaaaacaaagcttacctgagaatgtcattgtcaaggatatacaaaatagcaaatattaaatttgttgactttctttgtcatagattagatgtagaatattttgttcgaatgct

SEQ ID NO: 84002 - DNA, 684 bp, Homo sapiens
ggcttcacatcacattatatattcttctccaatagggtaggaaatttttatttttgagtcaatattttaatgggataacttgctcctctttttaaaaaaataagcttaacacagagaacactgctatcgagtccaaagttatgtgttttaatacattctcatcctctttctaaaagaatatgttcatttaaaaaattgtgtcagcatgcttcagatttgctggactgaaagagcttactatgccagagccaacaagcactcagctggttaaaagtacgaagctgaggcatggaacaggacagttgttctcaaccttagctcatactggaatcccctgcagagatttacaaacttcatctgcctgggttacattcccagcatttctgatttaactggtctggagtacagcctaggcaccagaatttgaaggcctcccagttgattctagtggacagctaagactgagaattcttggaatcagaatcaagaacaaagagcacatcaatsagtagtggaacagagaggaatcttgtggaggccttaatggtctaattctcttctggtagaattgggagtaacctgatccccttttttcttcccctcctgcttgtgtcttcccctccttcttttgctttttcatatatcgagtcctccttactacgtgtctaactcagactatacatg

SEQ ID NO: 84003 - DNA, 748 bp, Homo sapiens
atggcatggtttaaataacctaccaaaattacagctaagacataaaaacaccaatcctatcggccagccaaaattccagtgtggttcctcagaagttgaatgactttttttgggctattctgcaaacctcaagaagcagatctgatgtgaacttgactggtggtgttgccatgcatctagcagagcatgaccttcaatcaaggatgcagcaaaagctgcgataatgaagcatgtatcgaaacagtcctattgacttgcagtagattttttggacattatctaagctttaggggagtaagggatcaaacactgaatgaaattttaataagtgctgcttttacaagaagaatagmaaacaaggttatttcctgatttgtttaaattttttaaatctagggtaaagaaaaatagactaggcaaatttacccagatcataggaataaaggaatggttacaaaaggaaatgttaacttgaatctttcctgaatattcttaaaaataaaaatatgttacctttaagacaatatagtgtctatctctctctctatatatatatatatatttatatattaaatatttatatacataatatatattaaatatttatacacataatatatatttatatattaaatatttatatacatatatatttatatacaaataactttatataatatataattttatataactataaatatatatataatttatatatataattttttgctaataggagccagtg

SEQ ID NO: 84004 - DNA, 748 bp, Homo sapiens
atggcatggtttaaataacctaccaaaattacagctaagacataaaaacaccaatcctatcggccagccaaaattccagtgtggttcctcagaagttgaatgactttttttgggctattctgcaaacctcaagaagcagatctgatgtgaacttgactggtggtgttgccatgcatctagcagagcatgaccttcaatcaaggatgcagcaaaagctgcgataatgaagcatgtatcgaaacagtcctattgacttgcagtagattttttggacattatctaagctttaggggagtaagggatcaaacactgaatgaaattttaataagtgctgcttttacaagaagaatagcaaacaaggttatttcctgatttgtttaaattttttaaatctagggtaaagaaaaatagactaggcaaatttacccagatcataggaataaaggaatggttacaaaaggaaatgttaacttgaatctttcctgaatattcttaaaaataaaaatatgttacctttaagacaatatagtgtctatctctctctctmtatatatatatatatttatatattaaatatttatatacataatatatattaaatatttatacacataatatatatttatatattaaatatttatatacatatatatttatatacaaataactttatataatatataattttatataactataaatatatatataatttatatatataattttttgctaataggagccagtg

SEQ ID NO: 84005 - DNA, 748 bp, Homo sapiens
atggcatggtttaaataacctaccaaaattacagctaagacataaaaacaccaatcctatcggccagccaaaattccagtgtggttcctcagaagttgaatgactttttttgggctattctgcaaacctcaagaagcagatctgatgtgaacttgactggtggtgttgccatgcatctagcagagcatgaccttcaatcaaggatgcagcaaaagctgcgataatgaagcatgtatcgaaacagtcctattgacttgcagtagattttttggacattatctaagctttaggggagtaagggatcaaacactgaatgaaattttaataagtgctgcttttacaagaagaatagcaaacaaggttatttcctgatttgtttaaattttttaaatctagggtaaagaaaaatagactaggcaaatttacccagatcataggaataaaggaatggttacaaaaggaaatgttaacttgaatctttcctgaatattcttaaaaataaaaatatgttacctttaagacaatatagtgtctatctctctctctatmtatatatatatatttatatattaaatatttatatacataatatatattaaatatttatacacataatatatatttatatattaaatatttatatacatatatatttatatacaaataactttatataatatataattttatataactataaatatatatataatttatatatataattttttgctaataggagccagtg

SEQ ID NO: 84006 - DNA, 748 bp, Homo sapiens
atggcatggtttaaataacctaccaaaattacagctaagacataaaaacaccaatcctatcggccagccaaaattccagtgtggttcctcagaagttgaatgactttttttgggctattctgcaaacctcaagaagcagatctgatgtgaacttgactggtggtgttgccatgcatctagcagagcatgaccttcaatcaaggatgcagcaaaagctgcgataatgaagcatgtatcgaaacagtcctattgacttgcagtagattttttggacattatctaagctttaggggagtaagggatcaaacactgaatgaaattttaataagtgctgcttttacaagaagaatagcaaacaaggttatttcctgatttgtttaaattttttaaatctagggtaaagaaaaatagactaggcaaatttacccagatcataggaataaaggaatggttacaaaaggaaatgttaacttgaatctttcctgaatattcttaaaaataaaaatatgttacctttaagacaatatagtgtctatctctctctctatatmtatatatatatttatatattaaatatttatatacataatatatattaaatatttatacacataatatatatttatatattaaatatttatatacatatatatttatatacaaataactttatataatatataattttatataactataaatatatatataatttatatatataattttttgctaataggagccagtg

SEQ ID NO: 84007 - DNA, 1971 bp, Homo sapiens
aaagcaggatttgaatagagcttctggttaaaaagtaaacagccttaaatgccatacaatactacctctcaatggttggaaaactgtaggtgttcagtaaacagcagctgtcattattatttgggtcttagcatatcctgattattctacagatgttcagaaatacttgtcaataaataaaaggtattgaattagaataaagtattgtgctttataagccaatgtatttcatatgtactcgaaatattccattcatggttgacattttaaaaatatttgataatgcatcaaaacagaatttcaacagtactactcaggatcagatttgttttcatgtgtagtcagtctttgtccattcaggctactataacaaaataccatatactgagtaacttatacacaacagaaatttatttcttatagttttagaggctgggaagcgtaagatcaacgcgccagcagatacagtgtctagtgagggcccatttcctcgtccataggtggtgccttctccttgcgacctctcatggtgaaggggcaaatgagttcctttggtcctgttataaaagagcackaaagctattcatcaggtcagagcctgtcaaaaagcctggcctcttaatactatcaccttgggggttaggggtttcaacatatgaattttgggagaacatcaggagagatcagataaacataataaaaatagttttttctaggtatctgtatacactctgttgactcaatcatgttttaataatgaaaaagtaacatctctattgtatatttatttctttctaaaatcatcttgaatttatgtaatctcatagaaattgtggctatttcaaaataatcagtagataaaatttattttggatgtttcaccaacagatattctgattattaatttatgaccatatattgagttatttttcttttagaagttataaagaaatattaattgtgcctaagtcatctaaagatgctctagctatcaaaatagagcattacatagacacacattttcatgctaaattaagattaattgtaataatgacctaactcttgacctttattttaagaattataaattgcatggggcatattttagttgttcagttaactctttagaaaataatacatgaaccaactaatgagtattattagacaattattttttcacaaataagttgtatactaaaatattaaatttagagtttttgatgtgaaagtatgtttaaatataggtattaggtaaaaagttagttgaaaaaaattagccccaaaatgaaaaatattgatggaaacataattcagtatatttaattttatattattcatatccttagaggttagaatctacataggtaaagttaatcatatgctggtctaaaatagtccctaaaataattttaattatctttaactttttccctgctaatatttactctaattcaatttgaattctcctctctctcttcctctcttactcaggaacacatagaaattctttataatttttgtcctaaagagaattacttcttattaactctttaagcataaaaaaattaaattttgtacttataatatagctttttttttttttttttggctaactgctttgttggcactaaagttaaatagcctaatgccaaattctccattttaaagcagcttgtgcagattgccatttttcctacttgaatttagtttttatactaaaaggaaagtgctattaaaaatcaaaattgattactattagatgctccgaatacaattttgaacttgagagcacccctctctcctatcagcaccaccctgaggtgatccacacactgaccgtggaatacatttaccaggcccccatacacaggcttggcattctgtcctaatcattcttttcatagcacaatttgtgggtctctgtgaaatgcagctattggtagttctgcctgaactcaaatgaagtgatat

SEQ ID NO: 84008 - DNA, 608 bp, Homo sapiens
acactgtgcatgtagcccctcccaagtgttggcaggtcactgcacatgcagacagcccatcccaggggagaatcgggggagaaaaaacaaaatacccggaagcatgccaatgtataaaaccccatgtcaaaggtcaaaccatgcacttggatctgtcaagtcactcatttsgccctcttccaagtatattttgctttctttagttcctgctctaaaatcgttaataaacttttactcctgctctaaaactttcttctgtctcccgctctgccttatgcccccttggtcgaattctttcttatgaggaggcaagaattgaggttggtgcagatccgtatgaatttgccactgctaacacttccctgctcaaatcccctctgcccacccaagaaatcacctgcagacaggttctatccatctccaaggcttccagaatctttctacctgaagacactttcttgcctaaggagtatgcttagcttgggcattgagcaggtggaaaatgccaaggagttcagaatgaagagtgggagatgatggataaacaccatgttctcccttcagtgggatagatccatgccatgccccagattgtcactcagaaggta

SEQ ID NO: 84009 - DNA, 608 bp, Homo sapiens
acactgtgcatgtagcccctcccaagtgttggcaggtcactgcacatgcagacagcccatcccaggggagaatcgggggagaaaaaacaaaatacccggaagcatgccaatgtataaaaccccatgtcaaaggtcaaaccatgcacttggatctgtcaagtcactcatttcgccctcttccaagtatattttgctttctttagttcctgctctaaaatcgttaataaacttttactcctgctctaaaactttcttctgtctcccgctctgccttatgcccccttggtcgaattctttcttatgagraggcaagaattgaggttggtgcagatccgtatgaatttgccactgctaacacttccctgctcaaatcccctctgcccacccaagaaatcacctgcagacaggttctatccatctccaaggcttccagaatctttctacctgaagacactttcttgcctaaggagtatgcttagcttgggcattgagcaggtggaaaatgccaaggagttcagaatgaagagtgggagatgatggataaacaccatgttctcccttcagtgggatagatccatgccatgccccagattgtcactcagaaggta

SEQ ID NO: 84010 - DNA, 591 bp, Homo sapiens
gtgggttatttagatgtttccaaaggttacttgaaaattgcctatttttccacaaagaagtgagtgtttattgcttcaaaaatgtgcctcagagtgaatgcttttcttatttgagatgggaaaaaatactgaaataggtgtaatgctgagaaaaaagtttgcctggagagcagggaggtgtctggagctaggagtttaggatggttgcagaaggtatgtttcctccgagccttagaatagaagaaaaagcaggcaatattgtctttatgtgggatgagcaagtgttggtctcttagtgtatcagataaaaggctacagtgaggtgggctgggggacagagctggggctttggggcattgggtttctacaggagacgtttggaacctgaagagaataatgcctctttgagcactttctaactgctacctgacagaaaagagagctttgcaaggctcttgatggaatcgtattaattcatggctggctctaytgcatgaccattagtagatcccagtttttattctttgggagctcctagaatagagaatattttctggccacttagttactgggtcccaatgacatagaggc

SEQ ID NO: 84011 - DNA, 591 bp, Homo sapiens
gtgggttatttagatgtttccaaaggttacttgaaaattgcctatttttccacaaagaagtgagtgtttattgcttcaaaaatgtgcctcagagtgaatgcttttcttatttgagatgggaaaaaatactgaaataggtgtaatgctgagaaaaaagtttgcctggagagcagggaggtgtctggagctaggagtttaggatggttgcagaaggtatgtttcctccgagccttagaatagaagaaaaagcaggcaatattgtctttatgtgggatgagcaagtgttggtctcttagtgtatcagataaaaggctacagtgaggtgggctgggggacagagctggggctttggggcattgggtttctacaggagacgtttggaacctgaagagaataatgcctctttgagcactttctaactgctacctgacagaaaagagagctttgcaaggctcttgatggaatcgtattaattcatggctggctctactgcatgaccattagtagatcccagtttttattctttgggagctcctagaatagagaatattttctggccacttagtwactgggtcccaatgacatagaggc

SEQ ID NO: 84012 - DNA, 646 bp, Homo sapiens
agtgtcaccctgtctgttttctgtggggtcttccttgttttggtgagaatctactctttattcttctcttggtcctccagcatgtcttcttcacagaaacatatcctctttgactcttttgttttttggcttctatgatgtccttttctttatgtcctgttttgctttcactccttctcactgctccttctcgttctcttagtgggtttgaawattggtgcttcctgagttctgtgcccaggtctttgatctatgagcttattgcctgagaggagtaattatcctgaaagaaaccggacctgaagcctccagtttgccgaatatatgttgactgatttgtaggaaccccgaatgaaggagagtgagacatctacaagtgatgtgtgtgcttctgagatgtaaacagaaacatcagaagcaataacatcagaaggcaagtgttatattgggaattcccttaatctgataattactccattgaaggcattgctgttgaaatcgtgctttggagctgaaatgtccttctgaagaatccttatggccacaaaatcttggaactcatgaacatttgtaaacaaaaaagtagagatgttgaagaaatgatatggggcagaaaaactaggaccttagacaaaaccataaatga

SEQ ID NO: 84013 - DNA, 747 bp, Homo sapiens
gtaacacaatggtatttgtgtgtctaaacatagctaaacacagtaaaaaataagtattggtattctaatcttacgagaccaccatcacaataggtggtccgtcattgactgaaatgtcactatggagtgcatgactgtatagttacaaaagcaagcaagaaaaagtgagagagacaatcagtaaaagagaaactgaaatgaaaaaaggtaaatgtgtgtgtgtgtacgtgtgtctgtgtgtatcaaagacagagagagagattgtgtctgtttatcctaccaaaatgcaaattagttgtgaatgtatcctgtaggtaatttcttactttaagacaattacagttcatttttatttcttagcacagttcttggcacatagtagggcttcggtcaatgtttaatacatcaatgaatgctttaataacataatttctttgtaactccttcaaactataggcattgggaacatgagggaaaatctgacagaagttgaggatattttggtggtcacagtaaaaaatcacactgtatctaatgaacataaatcgtagaacagtgcttttgcatgtaagtaggwtcattttttttctagataataaaacagggaaaaagagacatttttaattttattcccttctttctcatgctgaagcatcttccttggggcatacctgacagttgctctagttgaaaagtgcttgataattttaaaatatgcaaatcagcctggggcctacattaccttgg

SEQ ID NO: 84014 - DNA, 860 bp, Homo sapiens
aaattgtttgaaatcattaataactgccagtgcagatgttgtgtgaggttgtcagtatcaggatgaaagtgcacttatttatgtagccccacattttgctcagtccttaggaagctttctttgcgatgttaccttctagatttttactttttcaatacgactttatttatgtgatatagaaatggcaattacctctctccttctcacattcatgcctttgtgcttaaatgggtaaccatactaagaatgtacccaccaggaagaaatatttatctgcctaaacattaaaaggggagcagatgattcaatctgacacctggaaatgaatttaaaacaactataaattagaattgataggaaagcrtaccacataattaaagcttcatcactgtaagataaaaaaataaggagcatgcaaataggtgtctttaaggagaaatgaaacttaagcactcatttgcctttgtcagtgtacgcataaacaatctatgcctgctttctagttccctgcctactgcttgcccgaaatgtcaaacacccttggaggaagagcatgctggttctcaattagtaatttcagtttgcttgacaaagtaggatacttctattcaacagactcatcttagaaataaattagaaagtgtgaatgaatcactgtttcatacatttaaaatatagaaattcacttttcaattttgaaatagacccaataaatcttgtcctaaaaatgatttctgagcataaacataattccagagaaagcacgattaacttctgtatgtagggaactgaatataaatttgttgaatgaattaattactgatgttgccatataatcaatttttgttttagggaaaaat

SEQ ID NO: 84015 - DNA, 580 bp, Homo sapiens
aaaataagccatccattccattctcatctatagctctaattctcacagataacaactttattactctttttagttcatctaggattaagctacaattttctaactagtatcttcttgttatttgttgagatatktttatacattactcattgacttgcttttatgattgatgaaaatggacatcagttacccatcattctgttctccccaaatataatttcactccccaccctcccttcctgcccccatccccgttttctgtattagttatctttgcatatttaaatgccatgctatgaaaggtttcctttgcgtgtgcctttattttgttttaatattcaccattgtcaacctccttctttggctttctgtcctacgagcactctcactacagcactaaatgtatgaaattttttttattgtttaagacacaaactgattttttagtgtaattttcaaaaatgctatactgttaactgtaaaatttaggtctcatgtgctaaaatttatagcagagcataccattgctcccaaaggtcaaagagaaaaaaggcagacattttatttcctaagtaattat

SEQ ID NO: 84016 - DNA, 673 bp, Homo sapiens
gcagggcatagtggcgcttacctgtaatcccagctcctcgggagacagaggcaggagaatagcttgaatctgggaggcagagattgtggagagccgaaattgtgccattgcactccagcctgggcaacaagagtgaatctccgtctcaaaaaaaaaaaaaaaaagaaaatttaaagggacatttcctatcttattttatgaacccagtattgccgattccaaatcgagacaaaggcattatacaactttgatgtttatccctcataaacatagactcaaaagtccttaaaacataataaccaattgaatgtagcagtacatagaatggataataaactgtgaacaaattaaatttctagcaagattgcaaagttaatttattatttgaaagatcagtttaatcaatttyattcacctggatggttacatctggcaaaactcagcaaactgtgcactttaaaatagtatttattttatgtaaattatgtttcaatacaattgattttttaagaaaaaaaaaacgtttcccagagtgatcaaagtggagggcagggaacagtaaacatcagtgcttatgttatagctactagaagcctcccaattccaacgacatgctttcaagcaggtctgatccttcccctggaggatacctctgacccaggtgtgctacaaa

SEQ ID NO: 84017 - DNA, 673 bp, Homo sapiens
gcagggcatagtggcgcttacctgtaatcccagctcctcgggagacagaggcaggagaatagcttgaatctgggaggcagagattgtggagagccgaaattgtgccattgcactccagcctgggcaacaagagtgaatctccgtctcaaaaaaaaaaaaaaaaagaaaatttaaagggacatttcctatcttattttatgaacccagtattgccgattccaaatcgagacaaaggcattatacaactttgatgtttatccctcataaacatagactcaaaagtccttaaaacataataaccaattgaatgtagcagtacatagaatggataataaactgtgaacaaattaaatttctagcaagattgcaaagttaatttattatttgaaagatcagtttaatcaattttattcacctggatggttacayctggcaaaactcagcaaactgtgcactttaaaatagtatttattttatgtaaattatgtttcaatacaattgattttttaagaaaaaaaaaacgtttcccagagtgatcaaagtggagggcagggaacagtaaacatcagtgcttatgttatagctactagaagcctcccaattccaacgacatgctttcaagcaggtctgatccttcccctggaggatacctctgacccaggtgtgctacaaa

SEQ ID NO: 84018 - DNA, 735 bp, Homo sapiens
tgcattgctttttggaatgtaaaatggtacagcccactgtggaaaatggtttagcagctccttaaaaatatgaagcatagaattatatgatccatcaacaccctttaagcgtatatacccaaaagaactgagagcagggactcaaacaggtatttgtacacccgattaacagcagcattattcacagtggccaraaggtagcccaaacctaatgcccatcagtaggtgaatagataaagaaaatgtaatatatacatacacagagtattattcagccataaaaagaaaaatatctggccagattcaggggcttacacctgtaatcccagtattttgggaggccaaggtgggcaggtctcttgagccccatattttgagaccagactggacaacatggcacatttggttagaagtgtttgaccataactactattccagaaaaagatctactcattagaactacaaatcataaaattataagttctacaaaaacaaatcaaccttatctaccacccagttctacccaattatatcatgttagaacagaaggtctcaccgtggactcgagagctgatatgagaaatgtcaccaccatcctgctctccacggaatcatcttcaacagactcctcatcttccatggactcctcatcttccatgggcagggtggaatctgcaacttgtgccatgatccctgtgcaaaaaagtagtaagaaattgaatggtagaaatgcag

SEQ ID NO: 84019 - DNA, 735 bp, Homo sapiens
tgcattgctttttggaatgtaaaatggtacagcccactgtggaaaatggtttagcagctccttaaaaatatgaagcatagaattatatgatccatcaacaccctttaagcgtatatacccaaaagaactgagagcagggactcaaacaggtatttgtacacccgattaacagcagcattattcacagtggccaaaaggtagcccaaacctaatgcccatcagtaggtgaatagataaagaaaatgtaatatatacatacacagagtattattcagccataaaaagaaaaatatctggccagattcaggggcttacacctgtaatcccagtattttgggaggccaaggtgggcaggtctcttgagccccatattttgagaccagactggacaacatggcacatttggttagaagtgtttgaccataactactattccagaaaaagatctactcattagaactacaaatcataaaattataagttctacaaaaacaaatcaaccttatctaccacccagttctaccmaattatatcatgttagaacagaaggtctcaccgtggactcgagagctgatatgagaaatgtcaccaccatcctgctctccacggaatcatcttcaacagactcctcatcttccatggactcctcatcttccatgggcagggtggaatctgcaacttgtgccatgatccctgtgcaaaaaagtagtaagaaattgaatggtagaaatgcag

SEQ ID NO: 84020 - DNA, 751 bp, Homo sapiens
gtctctctccagtatgaattctctgatggttggttaggtataatttgcgcccaaagactttgtcacattcattacatttgtaaggtttctctccagtatggattagaagatgggccataaggcccggacgcttgtgaaatgctcttccacattcgttacatttgtagggcttctctrtactatgaattatttgatgccgtgcaaggtatgaaagcagactaaagaccttgccacattcattacatttgtaaggtttttccgccgtgtgacttctctgatgattggttagagaaaatttgtgcctgaagttcttgccacactcattacatttgtaaggtttctctccagtatggattacaagatgggtagtaagtcctgaacactctctaaaagctttgccacattcgttacatttgtgaggcttctctccagtatgaattctttgatgtcgtgcaaggtttgaattgcgattaaacaccttgtcacattcactacatttgtaaggcttctgtccagtatgaattctccaatgttctacaaggtgtgaattgcgactgaagaccttgccacattcagtacatttgtaaggtttctctgcggtatggattacttgatggttagtaaggcttgcagggactctaaaaacttcaccatcttcactacattcatattcataagattttcctctaatgtatgctttctcttcttgtgggagtaatgggaaatcaataagatcatttctatatttatt

SEQ ID NO: 84021 - DNA, 756 bp, Homo sapiens
aaaaatatcagtagcaatattggatatcaaattttgtaacacatatttttgtatattcttaagatacatatatatgtgtgtgtgtgtcttttaaaaaggaacgtaaatacaatggaataattaaacattatctctacttaataaaaaataagttttttttgcctcatgaaatagtaagacattttactttttgtttttctttcccaaaaacactcctctgaactgtatcaagcctttaggacatccatctttttcttgatgtattgggaaaactgaatagggtcaaaagtgaaattcagtgtgacttgcagctttgcccttataaatcatacattacagtgacttctactgtcagtgtaatatgaggacattagttaaatctcctctgaacaaaagtgtttgaatatggactacctagayttttaattactggcaactgtaggtttttaaacttgtatgaattcgtttctagctgtccaaaaatgtccatccatttaaacataaatgcttttttgcagtacagctgtttctgaatcaggtggtttgcatctatgaattcatcaaataggctatccatgtctaaaatatccacttttaatcttttctcatcttacataacactttttagtgttctatgatatatctttctgttactcaaaaccttgaattcttttagttccactaagatgagattttgaataccgtatctttatttatattcatcgcctagaataagggttgggtcaaataggatcc

SEQ ID NO: 84022 - DNA, 698 bp, Homo sapiens
aacagaataatacagcgaatttcacatttttcctgtgtgcaggagttaaattattgttacattgaatattttacataatcttcaaaatattttaaggtgcygatagatttgcttagccccattttataaataaataaagtaattaaacaaagaaacgtaagtgctatttctaatgtcagatggatagtaaagtttagatttgtaaaccgtgtagttacttcatagttacacatgttaaaaggacaactttagatgaattaaatttagcagagtttatttgctcaagaaatgattcatgaattgggcaacactccaaaccaggacaggtttttaaagctccacccaacaatgtggacaggcagcatttatagacagaaaaaagaagtgatgtacagaagtagcgtgattgttgacagattggcatttgccttatttaggcatggtatgatgaggcatttcctttatatggacatggcctgaacagttggtagcctgtggctgactgaaactcagctatttcttacaggaatatatgcttaagttaggttgcagtgcacaatatatacacttgatatggaggcagctttagggcaaatttaatttaatttaacacaatgagctaatgtaatgcactattttatcgtttcaatttttcaacaacagagagttgttgtctagtgttttgagaaacacagtat

SEQ ID NO: 84023 - DNA, 530 bp, Homo sapiens
acaggtcaagatatggactgataaagttagtgcagttacttatcatacagttcttggtctttgctgtatgcaactagtacaaatattatgaaacacttacccaataaatcctsctaaattgaataatattaatagtatatagaaacaagttctgtcaggaaaaacaggaattttctgtttgtttctttggcatgcaaaagtaattttgtgctttgtacaaaagtagaactttgtaccagtacaaattacaactttgtgctggtctgtactctttcaactacaagcactaatcattttgaggaaacaattgcacacattgagagcaagattacaatctctttcatccattaatttgtttttgacctgctgaaaggcaagactacctaagagtctttttgtctacaaaaacatctgaagtatatgcagccatatatgccatgttcaatggattggactaatgggatctctgacaaaatagcaatttttttctgttatttttcttttcattctgagttctatatgaaaaacaa

SEQ ID NO: 84024 - DNA, 1263 bp, Homo sapiens
atattcagttactaattaccagtacttccttaaaaagtagtaatataaacaactatgtaatcaatgctcaatatatactacttactacttctctttttaaaaaataaaacaaatagcttgtataaaaatgttggtttcatttatgtatagcatcataattttattttttacaatgtagttactctaagatgtactcccaaagaaatgagtaacatctttattgtaaataaagttgtattgttagaagaaatatgtcaaattgcaaagattaagtttttccatcgcactttaatgacattaaatgattttaatttatgataataatttatgttatttttaccagctttcaatttaaaccatgtaatattattaaatatctgtccaaacagtgcttttgttttaaagatggaatatactggtataattttgctcctgatagtttttttatttttttagctctttcctcataagaaatgcacataacctatttttgaaaaaaaagaatatttttgatttatataaaaatattgcttcttaggtacctttactatgctttctcgaatacgacagaatggattaacttgtgaaatgttaatttcaaaaagaaagagaggtttgacatttttgccttgagcttggaaattataaacaatttccagattgaataccttgcactgagtatcttaattctttggtccaaatgtgaaaaacatatgaataaatgaataaataagtaaactgaaattctgaataattttaaagcttttattaaaactcatcattataaagtttgcctaacatatcttataccagaggatctttctgttactttacagtccttgagctgaatctctaacaatggttttcattctttcttccattcatggctctgctctccactatgttggggtatggcattgttcatgtggaagaaccttgcctcgccacattcatttcatccacagaagctatgttttatatctttggcatatttagttyctgaataaaactttactgagaaaatgattggggggaaaatgtaattaaacacctttaacattactgataactgatttttttttgctctaataattactcaataggcttatttttgtctctcagatgaattatgaatttggttaataaagaaaccatactttctactttctcatatatatatacacatatatatacatatatatacacacacacatatatatacatatatatatacctgagcattcatatatgtatatacaaata

SEQ ID NO: 84025 - DNA, 1266 bp, Homo sapiens
tgcatacacatacacacgtatatagaattctctgaaccattaaatataattatatatatatataaaacttcatatatacatattttatatgtatactctgtgtggaaagttcctcacatttgtggaatccgagccatgaaatttacacaggaattctttgtgctgatattgccataagtctaattatctcaaaataaaatgttgaaagaataaatacaaagtgagtctcaaaattcataattgacaattgactttgcttgtgctttatttcctaaataaacaaataactgtttattcatacaaagtgaggataagccagtcatagttcttatttttccagtgaaaattacaaataagcatatctaaaatgtccaatacatcagtgtgtaagctcttacctgcttaacccaattgtcactattttctgtgtgtttccagtcttgacccccttcagagccccagcaagatggaaataccccctggctgctgcacaccaagcccaaacgcaccagaaatatgctgacctgagcaggttggtgaacatgctgaataccctgtacctgaccttttcaaacaggggttgtggtgccctagggataggcttagaaaatttgcaacgatagaatcagatagtacacatctctctaagacatcatatttattctcaaattaggtcaatattttttaaaatacatgttgccatatcttggtcttaaaatgttacttacatctatctttaaagatggtgccatattactgacaaaagaaatataaagactcaaaagacataatgagtttaagagtttactgcctttgaatcagggaaaatgtgattcaagaaaaacagattgttttgctctataccaaaagattgtcagattaatatcaaataataactcaggaggcttgtttaaattatgttctcatctgtacctatagatgagacaaaggaacccacatgaagatgatgttagaccaaacacaaggatgagacttaggctcagaaatgcaaaagccgcatgtttttcaggggaaaatgaatagttaaagtaaacaagtctctgctatatttagaactggttgctatagcattgcttggtgtgacatatttgartgagtagataaaatctagcactataattgtcacttaagaagagaaagaactataaggggaaaaaagaaagcagtaaacaacaaccccccaccaaagaaaaaataaaactaaagcaaaccgaaccaaacaaacaagaatcacaaaatgaagta

SEQ ID NO: 84026 - DNA, 577 bp, Homo sapiens
tagaatatttggaaaaactagaaaagaatgtttgcaattaaatgttcaggaataattttccaaaactaagctacagaactggtctaataacagaactactgaacttgccactcactagagtccagtttcatggctatcacttctctctctctctctytttttttttttttgccccagagatttaattgaggtgccactgctagtgctgctaatataactgccatttctgtactaaggatatattcttgcttaccccagacctccaccattgctacccaagagaaaaacagtttgactgtatcctgctttttgggtcactagctcctgagtcaagtatgaagtgaagtgtatccaattggcagggcacaggaaacatgtctactttctggcagcatggggagctggaaaagtgagtgtctgacattctgaactttcatagtaagaagcaatttctgctttcctccaaaattaataatatgtaggaattcttctaacaagaagagagtcctgatattgttcgactgaaagaaatgtcaatcattaactatgatggtcattactacttaaaaaaccacgt

SEQ ID NO: 84027 - DNA, 1864 bp, Homo sapiens
atgcatggtattcaactttgagtccttagccaatttagaaacaataggaataattctatttaattctattccacatttatctatggatacattagtaaacacacacacacaaacagacacatacattatttcaacattcattaccttaaatcttgcaactcaaattaaggaacaataagaaaaaaatgtatataccatttataacttgacatggtttgaatgtgtgtcccctccaaatctcatgttgaaataaaagccccagttttgtaggtaaggcatagtaggaggtgtttggattatgggggcagatcccttatgaacgtcttagtgccatccttgtgataatgagtgagcattcactctgtgttcatgtgggatctggttgtttaaaagaatgcggagaacatctccgccttctctcttgctctctctcttgccatgtgacttacccgctcccatttcgccttctgccataattataagcttcctgaggccctcaccagaagctaagcagatgctggcaccacatttcctgtacagccttcaaaagtatgagccaattaaatctcttttcttaataaattacccagtttcaggcatttctttatagcaatgcaaaaatggcctaacacataacttaaataatatatattaatatctaatgtgtatttactacattataaattatcttattctcttataaatattaacacattaattccctacacccttcatgtgatgtagttataatttttatccagactttgaaaataaaaaaattaaggaaaaaggaagttaaataactgcttataatcacaaaacttgtaaatgcaagatggagttttaactcagaaagccaaattctcaaccacttttyttactgcctctcatatgactgatttattttctctctctcttgattttacattcatgtgtagtttgtcctgaatttgtaagtaatacattctttaaaacaaagtgtttcacatgaaaattttgttgttaatgatgttgaaatgagagattgtgattctgggacatttttaaagcagtgtataataaattaattcagtagagattatattcgcccaaaaactttagcaatacagaatttccatactgcaaattttggatagctattcaacatgtgaaatgacatcatgagaaagacacctgaaaactctgcatacacaataactgattagagaattactggtattatgcatacatttttttgtgagccagcacagccattatttttctctgaactgcaggaccagaagggtcacaactgaccacccagaagtttgatcaatttaacaactgcctctgaactctccctggagtccgtgactcctctatttaggggaaaacctcaatcttaatttttagtctacaaaaaatgatcatttttatttgatagaacacttgaaagcagtaaaaaaaatcactatagtccactggtttttaaagtgggttttagttgtactctaaaactagaaaaagtgtgttgcttattaaaaccatattttccaattaagttcttgcaagggttcagattgcacacagtactattatgcagggctatttaagtaggtgctataactcttaagaaggggtgcgtgctcagttccagacatgggtttctatgacactttcacattttcatttgatcatgtagtaaataataacataaaatcccatacaatggccaaaactagagttatataatcctctgagtactcttaacttgtagaagggtgtgttttgatcatatttaaagaatggatatatgtttttgtgtgtgtttcttattaaaatatttagaataaacttgagatgttgtatacatttttgatgatgt

SEQ ID NO: 84028 - DNA, 1864 bp, Homo sapiens
atgcatggtattcaactttgagtccttagccaatttagaaacaataggaataattctatttaattctattccacatttatctatggatacattagtaaacacacacacacaaacagacacatacattatttcaacattcattaccttaaatcttgcaactcaaattaaggaacaataagaaaaaaatgtatataccatttataacttgacatggtttgaatgtgtgtcccctccaaatctcatgttgaaataaaagccccagttttgtaggtaaggcatagtaggaggtgtttggattatgggggcagatcccttatgaacgtcttagtgccatccttgtgataatgagtgagcattcactctgtgttcatgtgggatctggttgtttaaaagaatgcggagaacatctccgccttctctcttgctctctctcttgccatgtgacttacccgctcccatttcgccttctgccataattataagcttcctgaggccctcaccagaagctaagcagatgctggcaccacatttcctgtacagccttcaaaagtatgagccaattaaatctcttttcttaataaattacccagtttcaggcatttctttatagcaatgcaaaaatggcctaacacataacttaaataatatatattaatatctaatgtgtatttactacattataaattatcttattctcttataaatattaacacattaattccctacacccttcatgtgatgtagttataatttttatccagactttgaaaataaaaaaattaaggaaaaaggaagttaaataactgcttataatcacaaaacttgtaaatgcaagatggagttttaactcagaaagccaaattctcaaccactttttttactgcctctcatatgactgatttattttctctctctcttgattttacattcatgtgtagtttgtcctgaatttgtaagtaatacattctttaaaacaaagtgwttcacatgaaaattttgttgttaatgatgttgaaatgagagattgtgattctgggacatttttaaagcagtgtataataaattaattcagtagagattatattcgcccaaaaactttagcaatacagaatttccatactgcaaattttggatagctattcaacatgtgaaatgacatcatgagaaagacacctgaaaactctgcatacacaataactgattagagaattactggtattatgcatacatttttttgtgagccagcacagccattatttttctctgaactgcaggaccagaagggtcacaactgaccacccagaagtttgatcaatttaacaactgcctctgaactctccctggagtccgtgactcctctatttaggggaaaacctcaatcttaatttttagtctacaaaaaatgatcatttttatttgatagaacacttgaaagcagtaaaaaaaatcactatagtccactggtttttaaagtgggttttagttgtactctaaaactagaaaaagtgtgttgcttattaaaaccatattttccaattaagttcttgcaagggttcagattgcacacagtactattatgcagggctatttaagtaggtgctataactcttaagaaggggtgcgtgctcagttccagacatgggtttctatgacactttcacattttcatttgatcatgtagtaaataataacataaaatcccatacaatggccaaaactagagttatataatcctctgagtactcttaacttgtagaagggtgtgttttgatcatatttaaagaatggatatatgtttttgtgtgtgtttcttattaaaatatttagaataaacttgagatgttgtatacatttttgatgatgt

SEQ ID NO: 84029 - DNA, 531 bp, Homo sapiens
atgaaggaaatgtatctatgtttatttgtttgtttgttttttgagacggagtctcattctgtcgccaggctggagtgcagtggcacgatcttggctcactgcaacttccgcctctgggttcaagtgattctcctgcctcagcctcctgagtagctgggactacaggcacgcgccaccatgtccagttaatttttgtatttttagtagagacagggtttcaccatgttggccaggatggtytctatctcttgacctcgtgatccaagtgccttggtctcccagagtgctgggattacaggtgtgagtcacggtgtccggctgtggacctatgtttatgaagattcttatctaaatttggcacctaatacataaattatcagaatctagataaccaacagaaaggttttctttgaattatttttaaaaataagttgacaaaaccttaaatagagttttaaaagaaaggagaagctgagtttgagaggattggggtgggtatgacaagcaagggaaatgacatagtttagaatt

SEQ ID NO: 84030 - DNA, 531 bp, Homo sapiens
atgaaggaaatgtatctatgtttatttgtttgtttgttttttgagacggagtctcattctgtcgccaggctggagtgcagtggcacgatcttggctcactgcaacttccgcctctgggttcaagtgattctcctgcctcagcctcctgagtagctgggactacaggcacgcgccaccatgtccagttaatttttgtatttttagtagagacagggtttcaccatgttggccaggatggtctctatctcttgacctcgtgatccaagtgccttggtctcccagagtgctgggattacaggtgtgagtcacggygtccggctgtggacctatgtttatgaagattcttatctaaatttggcacctaatacataaattatcagaatctagataaccaacagaaaggttttctttgaattatttttaaaaataagttgacaaaaccttaaatagagttttaaaagaaaggagaagctgagtttgagaggattggggtgggtatgacaagcaagggaaatgacatagtttagaatt

SEQ ID NO: 84031 - DNA, 686 bp, Homo sapiens
taggcaataccattcaggacataggcatgggcaaggacttcatgtctaaaacaccaaaagcaatggcaacaaaagcmaaaattgacaaatgagatctaattaaactaaagagcttctgcacagcaaaagaaactaccatcagagtgaacaggcaacctacagaatgggaaaataattttgcaatctactcatctgacaaagggctaatatccagaatctacaaagaactcaaacaaatttacaagaaaaaagaaaacaaccccatcaaaaaagtgggtgaagtatatgaacagacatttctcaaaagaagacatttatgcagccaacagacagatgaaaaaatgttcatcgtcactggccatcagagaaatgcaaatcaaaaccacaatgagataccatctcacaccagttagaatggcaatcattaaaaagtcaggaaacaacaggtgctggagaggatgtggagaaataggaacacttttacactgttgatgggacactatttttttaacaataagactttttgcctgggaaatggcttgagatctcagcccaaagagatttttataaaatgcttcttcaaaaaaattagaaaataaaattattattttcttaggcctttagaaatttacttacctatgtgctgtgtctgacatttaggtagcaaaacaatgttgcaaattaca

SEQ ID NO: 84032 - DNA, 979 bp, Homo sapiens
ttgcaaaaatatggaaccaaatgaccattcatcaatgagtggatgaagaaaatgcagtgtgtatataccatgaaatactgctcagacataaaaatgaatgaaagaatggcatttgcagcaacttggatggaatttggagaccattagtctaagagaagtaactcaggaatggaaaaccagacattgtaygttttcattcattaggttggagctaagctatgaggatgtgaaggcataaaaatgatacagtgaactttggggactcaaggataagagaatatacattgggtacagtgtatgctgcttgggtgatggatgcagcaaaatcttgaaaatcaccactaaagaacttattcatgtgaccaaatgccacctgttcccacccaaaccaactcttggaaatggaaaattttagaataatatttcgtaagtcttttgaatgttctttaccctatatttttcttgcccctacctcaatctccactgtttatgtataaagtaagtttaaaatctatcatttttcagtgattaaatatgtctttcataccataattactgccagttgtccacttgtggctactagaggaatgaattttaaggaacatgggcaatttttagctgcaggcataaacatactaattccctagactccctgaatatagcgaagtgatgtcaggtctggataaaatatggcaaatgcctttgctatgattttgtgcaatcttcaaaaggttttctttttgtttattttgtttaaccagaaaacagtctctctcaactttctttgctgtgaattctacagaacttagaccattatgtaacaggtaatgagattcaatggatatttgttaaataaataaagtctggtttttattatgttaattgaaacaagttattattactaaaagtctcctctgtatactaaagaaaaaatgtagtagataaactcaaatatgttgtgaatcaacaatttcataaa

SEQ ID NO: 84033 - DNA, 581 bp, Homo sapiens
catctttattatttaattaaaaatatgaatatttagacttgacttttcctctaagttccaaccattcttttgcaactaggtctagttgtaacttaacatctcaagtttatgacatctgaaatcaaacttattgctctcctcccatctgccatcctcatattttccctttctcacctctattctgttaaggaaactgtcattttctcaactaagcaaactaaaaatctcagattgattttttttattccagaaactgtggtgtgttgtatttaatctgttgctgaagtctattaatcatacctgytataagggatggcttgcccatgtggtatagggaagtttttaacgaaagacaagcaaaaagccagggcaaccagttcttcagatcattaggtcaaggccaataatgatctattgtctgttctagaataaagcaggaattcaatttgcatgttttggagtgtatcattcatcagtatcatatgggtacctgagtcctatatcagcaaggatgttatcagactatgagcaccaccattttctggagaattagtctggcagaatacagagtatgaaagtgg

SEQ ID NO: 84034 - DNA, 1080 bp, Homo sapiens
tttgttatcctccattcattcttgtagctatctagtaacctagccaattgttttarggtatagatgtagcagcagaatctgctgccatctaaatgcttttttgtgaatgaatacttcaagatttaaaagattttaaaaacataacaaatttttaaaatgtcatgccttataggtcccacctcttaatattatcatgttggcaacacccgaattttggaggggacacattcaaaccacagtacctacatatcaggtaagcactgggcttatatcagtgactgtgatagttttttattttcatataacttgcatttttttgggggggagcactgatggataataaatagataaaaataaataatcaagtgacaaaatcatcaggtagtgatgtgtgcaatgaaaataattaaataggcaatatgataatcagtgtcaagacatctacattggttggatggttgagagaaccttgctgttgaaggtgacagtgacccgagatctgactaacaagcagcagccagctgggaaaaaaaactggggacaggcatctctaccatcagagagtatggctagagcaaaggctcttgtggagcaataaacttggtggtttggaggaaacaaagaaggccaaggtggctggaaaagagagagtaaagtaaggagtataagagaggaggccaaagaaagaaaaatgggccatattatgtggtgctctgtgagctaggataaggaagtttcatattcctatagaatgggaaactattggaaggatttaagcagatgatacacaaataagtactatgttttgtttacaatatcaacgtatgctattttgtatggtgattaaaaatacaagtttgttaaggagtatagcactaagatcttgcttgggagtagagggttgttgtctgtttacataaggtctagttgagcaggggatttaaaattaaagccagattcctctttttcctagttggttgtagagacagcttcctttgttttaccaacagttgggtgcctgatactgacacaccacagaagcttgatgcggatttttctcctggcttcaggagagatagc

SEQ ID NO: 84035 - DNA, 1080 bp, Homo sapiens
tttgttatcctccattcattcttgtagctatctagtaacctagccaattgttttagggtatagatgtagcagcagaatctgctgccatctaaatgcttttttgtgaatgaatacttcaagatttaaaagattttaaaaacataacaaatttttaaaatrtcatgccttataggtcccacctcttaatattatcatgttggcaacacccgaattttggaggggacacattcaaaccacagtacctacatatcaggtaagcactgggcttatatcagtgactgtgatagttttttattttcatataacttgcatttttttgggggggagcactgatggataataaatagataaaaataaataatcaagtgacaaaatcatcaggtagtgatgtgtgcaatgaaaataattaaataggcaatatgataatcagtgtcaagacatctacattggttggatggttgagagaaccttgctgttgaaggtgacagtgacccgagatctgactaacaagcagcagccagctgggaaaaaaaactggggacaggcatctctaccatcagagagtatggctagagcaaaggctcttgtggagcaataaacttggtggtttggaggaaacaaagaaggccaaggtggctggaaaagagagagtaaagtaaggagtataagagaggaggccaaagaaagaaaaatgggccatattatgtggtgctctgtgagctaggataaggaagtttcatattcctatagaatgggaaactattggaaggatttaagcagatgatacacaaataagtactatgttttgtttacaatatcaacgtatgctattttgtatggtgattaaaaatacaagtttgttaaggagtatagcactaagatcttgcttgggagtagagggttgttgtctgtttacataaggtctagttgagcaggggatttaaaattaaagccagattcctctttttcctagttggttgtagagacagcttcctttgttttaccaacagttgggtgcctgatactgacacaccacagaagcttgatgcggatttttctcctggcttcaggagagatagc

SEQ ID NO: 84036 - DNA, 1080 bp, Homo sapiens
tttgttatcctccattcattcttgtagctatctagtaacctagccaattgttttagggtatagatgtagcagcagaatctgctgccatctaaatgcttttttgtgaatgaatacttcaagatttaaaagattttaaaaacataacaaatttttaaaatgtcatgccttataggtcccacctcttaatattatcatgttggcaacacccgaattttggaggggacacattcaaaccacagtacctacatatcaggtaagcactgggcttatatcagtgactgtgatagttttttattttcatataacttgcatttttttgggggggagcactgatggataataaatagataaaaataaataatcaagtgacaaaatcatcaggtagtgatgtgtgcaatgaaaataattaaataggcaatatgataatcagtgtcaagacatctacattggttggatggttgagagaaccttgctgttgaaggtgacagtgacccgagatctgactaacaagcagcagccagctgggaaaaaaaactggggacaggcatctctaccatcagagagtatggctagagcaaaggctcttgtggagcaataaacktggtggtttggaggaaacaaagaaggccaaggtggctggaaaagagagagtaaagtaaggagtataagagaggaggccaaagaaagaaaaatgggccatattatgtggtgctctgtgagctaggataaggaagtttcatattcctatagaatgggaaactattggaaggatttaagcagatgatacacaaataagtactatgttttgtttacaatatcaacgtatgctattttgtatggtgattaaaaatacaagtttgttaaggagtatagcactaagatcttgcttgggagtagagggttgttgtctgtttacataaggtctagttgagcaggggatttaaaattaaagccagattcctctttttcctagttggttgtagagacagcttcctttgttttaccaacagttgggtgcctgatactgacacaccacagaagcttgatgcggatttttctcctggcttcaggagagatagc

SEQ ID NO: 84037 - DNA, 1080 bp, Homo sapiens
tttgttatcctccattcattcttgtagctatctagtaacctagccaattgttttagggtatagatgtagcagcagaatctgctgccatctaaatgcttttttgtgaatgaatacttcaagatttaaaagattttaaaaacataacaaatttttaaaatgtcatgccttataggtcccacctcttaatattatcatgttggcaacacccgaattttggaggggacacattcaaaccacagtacctacatatcaggtaagcactgggcttatatcagtgactgtgatagttttttattttcatataacttgcatttttttgggggggagcactgatggataataaatagataaaaataaataatcaagtgacaaaatcatcaggtagtgatgtgtgcaatgaaaataattaaataggcaatatgataatcagtgtcaagacatctacattggttggatggttgagagaaccttgctgttgaaggtgacagtgacccgagatctgactaacaagcagcagccagctgggaaaaaaaactggggacaggcatctctaccatcagagagtatggctagagcaaaggctcttgtggagcaataaacttggtggtttggaggaaacaaagaaggccaaggtggctggaaaagagagagtaaagtaaggagtataagagaggaggccaaagaaagaaaaatgggccatattatgtggtgctctgtgagctaggataaggaagttkcatattcctatagaatgggaaactattggaaggatttaagcagatgatacacaaataagtactatgttttgtttacaatatcaacgtatgctattttgtatggtgattaaaaatacaagtttgttaaggagtatagcactaagatcttgcttgggagtagagggttgttgtctgtttacataaggtctagttgagcaggggatttaaaattaaagccagattcctctttttcctagttggttgtagagacagcttcctttgttttaccaacagttgggtgcctgatactgacacaccacagaagcttgatgcggatttttctcctggcttcaggagagatagc

SEQ ID NO: 84038 - DNA, 1080 bp, Homo sapiens
tttgttatcctccattcattcttgtagctatctagtaacctagccaattgttttagggtatagatgtagcagcagaatctgctgccatctaaatgcttttttgtgaatgaatacttcaagatttaaaagattttaaaaacataacaaatttttaaaatgtcatgccttataggtcccacctcttaatattatcatgttggcaacacccgaattttggaggggacacattcaaaccacagtacctacatatcaggtaagcactgggcttatatcagtgactgtgatagttttttattttcatataacttgcatttttttgggggggagcactgatggataataaatagataaaaataaataatcaagtgacaaaatcatcaggtagtgatgtgtgcaatgaaaataattaaataggcaatatgataatcagtgtcaagacatctacattggttggatggttgagagaaccttgctgttgaaggtgacagtgacccgagatctgactaacaagcagcagccagctgggaaaaaaaactggggacaggcatctctaccatcagagagtatggctagagcaaaggctcttgtggagcaataaacttggtggtttggaggaaacaaagaaggccaaggtggctggaaaagagagagtaaagtaaggagtataagagaggaggccaaagaaagaaaaatgggccatattatgtggtgctctgtgagctaggataaggaagtttcatattcctatagaatgggaaactattggaaggatttaagcagatgatacacaaataagtactatgttttgtttacaatatcaacgtatgctattttgtatggtgattaaaaatacaagtttgttaaggagtatagcactaagatcttgcttgggagtagagggttgttgtctgtttacataaggtctagttgagcaggggatttaaaattaaagccagattcctctttttcctagttggttgtagagacagcttcctttgttttaccaacagttgggtgcctgayactgacacaccacagaagcttgatgcggatttttctcctggcttcaggagagatagc

SEQ ID NO: 84039 - DNA, 529 bp, Homo sapiens
ctgtatgtctttcattcttctctgagcctctaagtctccaaaaccaggacatcttctagaacttctgcatttctttgatgggctttagggaaataaatgtgttgccacatctttaaccgtctgtctttgttcatttccatgctgttatgacagaataccaaacaaagactgggtaatttataaacaatagaagtttgtttggttcacagttctataggctagaaagtccaagatcaaggggctgtattgggcatcggcctatgtgctgtgtcataacatggcagaaggcatcacgtggtgagaaggagaaggaaggccaaagtcgcctttataacacactcttttttytttctttctttctttcttttttgttttttggttggtttctttttgttgttgttgttgagacggagtctccctctgtcacccaggctggagtacagtggcacgatcttggctcactgcaacctccgcctcccgggtttaagcaattccctgtgtcagcctcctgagtagctgggattacagg

SEQ ID NO: 84040 - DNA, 496 bp, Homo sapiens
acttcttgtaacatgagaaaaattaaccctaacttggaatggagacagtacctagccttacaaggcagttgcaagaattagataatgattatgtagctctttgtacagtaattgacacatagggctcaaaagctggtgcctatggctattattattaactcagtttaacttgcaggtgtttcttccttttcttctaggatggggtgagtggggaaggcaatagagcaaccgcaagaaatgttaaaatgtctatttctataagcatgatkaaatgatactttatataatggggactggcaatcaagacttcattttctatggttggagacatagttgcttctaccaaatggaaagaggtgatcactatggacaaagatagagaactgattgcagatatatttgttccagggtccaaaagtttttcactttgctacagcaatgaatacctagggagatgttgatctctcaggtccagtgaaaattttccccaactgga

SEQ ID NO: 84041 - DNA, 1567 bp, Homo sapiens
attttcccactgaaaggcaggccagagccagtgakgcaggtgtggagatgtgtccctcagacctcacctcaagggagacctgccataaagagtacagctagtgatgggtttctctttggaggcctctgagttctaccacagtaaggtcgtgctcttcctgaacagctcccaaccaatgaatgagcatcatattggtactaggtcctggccatttttgcccaatgtagaaatcctatatgagctggctctctccattggactggcaaaaactatcccagaactacgtcagagcccaaggttcttcctcccaaatctgccttccttttctcttgacataggtcttagatccacactgtggtctgaagtcttttcctgcttcccctgattactctccccttatctttcacagacattaccaccagtaaatttcttgcacttgtaactggattttgtttatgctttctagatgagatcatctagatctcatccagatgaatacagccatggcatctgctagacataatgtggattttattccagaggaagtagcctttcccccttatttagctttccctttttaccttgttatagtaagggtaaaggaaataaagaaatatcatctgccaagaagtctgggtttgggatgccagctgtttataagagttgtctgagaaaaccagctgctctgattctggggaaaaattggctattgagatgataacagattctgcttctataggaagttgatcatgaatgtaacctcttccactgggagaatggggatcctgattccaggtggcccattgtccagataagccagggtagcccccagggttatctagaaacagttcttctcattatacaatgcacaaacagcagtgttcatttttttcatacaccatagtgactattcagaggagaagctcattaggtaacctggattctataactctcaatctctaatccagaccaggcatatacatgcattctctactctttaaattttctatttaaaatattgtcccatttttcaaaagaagacaaacaaatggccaacaggtatatgaaataatgctcaacatcactaatcatcagataactgctaatcaaaaccacaaagagatattatcttaccccagtaagaatggctattactaaaaagacaaaaaacaacatgttggtgaggatgcagagaaaaggaaactcttacacatttgttttgggaatgtaaattagtacagcctctatggaaaacagtatggagatttcttaaagaactaagaacaaaactgccatttgatcccactagtgggtatatactgaaagtaaaataaatcagtatatcaaaaagatgcctgcacttatacatttattgcagcagtattcacaatagcaatgataaagaatcaacctgtgttcatcaatggatgactggataaacaaaacaaaaacatggcatatgtatatatatatatacaatgaaattctattcagacataaaaaataatgaaactatgtcttttgcagcaatagggatggaactggaggtcaattatcatagggatgg

SEQ ID NO: 84042 - DNA, 1567 bp, Homo sapiens
attttcccactgaaaggcaggccagagccagtgaggcaggtgtggagatgtgtccctcagacctcacctcaagggagacctgccataaagagtacarctagtgatgggtttctctttggaggcctctgagttctaccacagtaaggtcgtgctcttcctgaacagctcccaaccaatgaatgagcatcatattggtactaggtcctggccatttttgcccaatgtagaaatcctatatgagctggctctctccattggactggcaaaaactatcccagaactacgtcagagcccaaggttcttcctcccaaatctgccttccttttctcttgacataggtcttagatccacactgtggtctgaagtcttttcctgcttcccctgattactctccccttatctttcacagacattaccaccagtaaatttcttgcacttgtaactggattttgtttatgctttctagatgagatcatctagatctcatccagatgaatacagccatggcatctgctagacataatgtggattttattccagaggaagtagcctttcccccttatttagctttccctttttaccttgttatagtaagggtaaaggaaataaagaaatatcatctgccaagaagtctgggtttgggatgccagctgtttataagagttgtctgagaaaaccagctgctctgattctggggaaaaattggctattgagatgataacagattctgcttctataggaagttgatcatgaatgtaacctcttccactgggagaatggggatcctgattccaggtggcccattgtccagataagccagggtagcccccagggttatctagaaacagttcttctcattatacaatgcacaaacagcagtgttcatttttttcatacaccatagtgactattcagaggagaagctcattaggtaacctggattctataactctcaatctctaatccagaccaggcatatacatgcattctctactctttaaattttctatttaaaatattgtcccatttttcaaaagaagacaaacaaatggccaacaggtatatgaaataatgctcaacatcactaatcatcagataactgctaatcaaaaccacaaagagatattatcttaccccagtaagaatggctattactaaaaagacaaaaaacaacatgttggtgaggatgcagagaaaaggaaactcttacacatttgttttgggaatgtaaattagtacagcctctatggaaaacagtatggagatttcttaaagaactaagaacaaaactgccatttgatcccactagtgggtatatactgaaagtaaaataaatcagtatatcaaaaagatgcctgcacttatacatttattgcagcagtattcacaatagcaatgataaagaatcaacctgtgttcatcaatggatgactggataaacaaaacaaaaacatggcatatgtatatatatatatacaatgaaattctattcagacataaaaaataatgaaactatgtcttttgcagcaatagggatggaactggaggtcaattatcatagggatgg

SEQ ID NO: 84043 - DNA, 1567 bp, Homo sapiens
attttcccactgaaaggcaggccagagccagtgaggcaggtgtggagatgtgtccctcagacctcacctcaagggagacctgccataaagagtacagctagtgatgggtttctctttgraggcctctgagttctaccacagtaaggtcgtgctcttcctgaacagctcccaaccaatgaatgagcatcatattggtactaggtcctggccatttttgcccaatgtagaaatcctatatgagctggctctctccattggactggcaaaaactatcccagaactacgtcagagcccaaggttcttcctcccaaatctgccttccttttctcttgacataggtcttagatccacactgtggtctgaagtcttttcctgcttcccctgattactctccccttatctttcacagacattaccaccagtaaatttcttgcacttgtaactggattttgtttatgctttctagatgagatcatctagatctcatccagatgaatacagccatggcatctgctagacataatgtggattttattccagaggaagtagcctttcccccttatttagctttccctttttaccttgttatagtaagggtaaaggaaataaagaaatatcatctgccaagaagtctgggtttgggatgccagctgtttataagagttgtctgagaaaaccagctgctctgattctggggaaaaattggctattgagatgataacagattctgcttctataggaagttgatcatgaatgtaacctcttccactgggagaatggggatcctgattccaggtggcccattgtccagataagccagggtagcccccagggttatctagaaacagttcttctcattatacaatgcacaaacagcagtgttcatttttttcatacaccatagtgactattcagaggagaagctcattaggtaacctggattctataactctcaatctctaatccagaccaggcatatacatgcattctctactctttaaattttctatttaaaatattgtcccatttttcaaaagaagacaaacaaatggccaacaggtatatgaaataatgctcaacatcactaatcatcagataactgctaatcaaaaccacaaagagatattatcttaccccagtaagaatggctattactaaaaagacaaaaaacaacatgttggtgaggatgcagagaaaaggaaactcttacacatttgttttgggaatgtaaattagtacagcctctatggaaaacagtatggagatttcttaaagaactaagaacaaaactgccatttgatcccactagtgggtatatactgaaagtaaaataaatcagtatatcaaaaagatgcctgcacttatacatttattgcagcagtattcacaatagcaatgataaagaatcaacctgtgttcatcaatggatgactggataaacaaaacaaaaacatggcatatgtatatatatatatacaatgaaattctattcagacataaaaaataatgaaactatgtcttttgcagcaatagggatggaactggaggtcaattatcatagggatgg

SEQ ID NO: 84044 - DNA, 768 bp, Homo sapiens
tgcattgaaaatataaatgctaaatatgtattaacagataacattaataaagtatcgtgctaaaacacattrcataagaaatgagaattataaaacatttaaaaatataattttctcttttttaaaagatgaaaatgttaaatctttttacgatatgatatacattgatttttcttttaaactgcatatacattgtggcataatctaaatagaagaatcatggtaaatgtttccaaagtcttagtactacttctaatttctgaattttttttttcagcttttattttagattcaagggttacatgtgcaggcttgttacccgggtatattgcttgatgatgaggtttgggatatgaataatcctattacccaggtactgagtacaatacccaataggtagtttttcaactcttttctcccatttttcctcctcccatctagtagtccccagtctctgttgttgccatatttatgttcatgagtacccaccgtttagctcccacttgtaagtgagaacatgcttatatttggtctttggttttctttttctgttagtttgctttggataatgggctccagctccacccacgttgctgcaaaggacatgatctcattcttttttatggctacatagtatttaatggtgtatatgtacattttcttcatgcaatctaccattgatgggcacctaggttgattagatgtctttgctattgtgactagtgctgtgctgtgatgaacatatgagtgtgtgtgtcttttggtaga

SEQ ID NO: 84045 - DNA, 706 bp, Homo sapiens
tgcaatgctcacagtgaccctataaggagtttttatcatcccaatttttaattgaggggcctgagaggtaaatgatcaagtaatttgcctagagtttgaaagtaatgggcatagagctcagatccaaatatatctcatgtccaacatttgtttgtcatcacaagacaatgttttatccttacatatatgtgtgtgtgcatattcatgctttttattcactggcccactactgttattatccrttttggaatatgacagctcaaaaggtggtaactactttctatttgctttatgttctgtctcacatctcagtttagatgtattcctataaaagaatggtaaatctagtaggtatataattcccaagagcatataatgcctaatttgaacactaaagaaaatcctttagacacaaatccaacacatgaggaggtttaaataaaatgggaaaatgtggaaggacagaattctcaatgaacctattcagatagaagaggcttttagagtctatgtgcctacagcctcttctgaaaaaaaaagtacagaacaagaggagaatcccaccctccaggaataaaggcccagtggctgtggctattgcaaacagtcacttgattcctgattgtagggacttctcccagattggctgtgggagttattgcagcagtgtaggaaagggacaggttctgaacccagaaagccctgt

SEQ ID NO: 84046 - DNA, 706 bp, Homo sapiens
tgcaatgctcacagtgaccctataaggagtttttatcatcccaatttttaattgaggggcctgagaggtaaatgatcaagtaatttgcctagagtttgaaagtaatgggcatagagctcagatccaaatatatctcatgtccaacatttgtttgtcatcacaagacaatgttttatccttacatatatgtgtgtgtgcatattcatgctttttattcactggcccactactgttattatccattttggaatatgacagctcaaaaggtggtaactactttctatttgctttatgttctgtctcacatctcagtttagatgtattcctataaaagaatggtaaatctagtaggtatataattcccaagagcatataatgcctaatttgaacactaaagaaaatcctttagacacaaatccaacacatgaggaggtttaaataaaatgggaaaatgtggaaggacagaattctcaatgaacctattcagatagaagaggctttyagagtctatgtgcctacagcctcttctgaaaaaaaaagtacagaacaagaggagaatcccaccctccaggaataaaggcccagtggctgtggctattgcaaacagtcacttgattcctgattgtagggacttctcccagattggctgtgggagttattgcagcagtgtaggaaagggacaggttctgaacccagaaagccctgt

SEQ ID NO: 84047 - DNA, 618 bp, Homo sapiens
ctgccctctattgttcaaaaaacaaaacaaagcaaaacaaaaaacagttaaattgtgatttcctgttaaacaattttaacaagaacaaaaaatatattaaggtataactagcaggactcaaaaatattracttacaaattttaaaatccattttcctcctttcactactgtcaaataacagaagattctatcctgggacttccttagttgtacagacatcagtgaatttgttaggatatttttgcttacaagtaagagaagcctgattcaaatgggcttgaacaagatttgctacctaacatttctggagctccgtgggtaggacaatcagggctcgaggctgttcctctgggctcttccctgcattgtttcagatttactcttaccctggtacaagatggttgtaaacagcaactgtggcagatgacttcttaatgggggttgagggagtacagagaagcgacagattctaccgttctatggagtagggcaaggagaaaagtgaggtgcgcagaggggctaagtggactgccatgacaaaggcctgggccagagaggagatgggagaggagagaagggaggtgacatagattgagttagaaaaaggattttttgaat

SEQ ID NO: 84048 - DNA, 618 bp, Homo sapiens
ctgccctctattgttcaaaaaacaaaacaaagcaaaacaaaaaacagttaaattgtgatttcctgttaaacaattttaacaagaacaaaaaatatattaaggtataactagcaggactcaaaaatattgacttacaaattttaaaatccattttcctcctttcactactgtcaaataacagaagattctatcctgggacktccttagttgtacagacatcagtgaatttgttaggatatttttgcttacaagtaagagaagcctgattcaaatgggcttgaacaagatttgctacctaacatttctggagctccgtgggtaggacaatcagggctcgaggctgttcctctgggctcttccctgcattgtttcagatttactcttaccctggtacaagatggttgtaaacagcaactgtggcagatgacttcttaatgggggttgagggagtacagagaagcgacagattctaccgttctatggagtagggcaaggagaaaagtgaggtgcgcagaggggctaagtggactgccatgacaaaggcctgggccagagaggagatgggagaggagagaagggaggtgacatagattgagttagaaaaaggattttttgaat

SEQ ID NO: 84049 - DNA, 618 bp, Homo sapiens
ctgccctctattgttcaaaaaacaaaacaaagcaaaacaaaaaacagttaaattgtgatttcctgttaaacaattttaacaagaacaaaaaatatattaaggtataactagcaggactcaaaaatattgacttacaaattttaaaatccattttcctcctttcactactgtcaaataacagaagattctatcctgggacttccttagttgtacagacatcagtgaatttgttaggatatttttgcttacaagtaagagaagcctgattcaaatgggcttgaacaagatttgctacctaacatttctggagctccgtgggtaggacaatcagggctcgaggctgttcctctgggctcttccctgcattgtttcagatttactcttaccctggtacaagatggttgtaaayagcaactgtggcagatgacttcttaatgggggttgagggagtacagagaagcgacagattctaccgttctatggagtagggcaaggagaaaagtgaggtgcgcagaggggctaagtggactgccatgacaaaggcctgggccagagaggagatgggagaggagagaagggaggtgacatagattgagttagaaaaaggattttttgaat

SEQ ID NO: 84050 - DNA, 618 bp, Homo sapiens
ctgccctctattgttcaaaaaacaaaacaaagcaaaacaaaaaacagttaaattgtgatttcctgttaaacaattttaacaagaacaaaaaatatattaaggtataactagcaggactcaaaaatattgacttacaaattttaaaatccattttcctcctttcactactgtcaaataacagaagattctatcctgggacttccttagttgtacagacatcagtgaatttgttaggatatttttgcttacaagtaagagaagcctgattcaaatgggcttgaacaagatttgctacctaacatttctggagctccgtgggtaggacaatcagggctcgaggctgttcctctgggctcttccctgcattgtttcagatttactcttaccctggtacaagatggttgtaaacagcaactgtggcagatgacttcttaatgggggttgagggagtacagagaagcgacagattctaccgttctatggagtagggcaaggagaaaagtgaggtgcrcagaggggctaagtggactgccatgacaaaggcctgggccagagaggagatgggagaggagagaagggaggtgacatagattgagttagaaaaaggattttttgaat

SEQ ID NO: 84051 - DNA, 1336 bp, Homo sapiens
catttgatggaagtagtgtgtttgacactgttaatggaactattcattatgattatcaattattttactaaatcagcggcagcaacatattttttttccactcccaccacctgttccttaagtagaagagtgacagtagcgtattttaggagggacagtgggtaaaggacggaagtgcctgtgaaaagcatctcttaacccacagaactagaaaattcacccaaaggggctttttctgtgtgggccagattctcttccaattaagattaaaacatatttatagtttactgtgtctttcctattaaatgatatagctctctttttttttagagtcaaataactggggtgttatatgcctagaaactattaaaagaattttaaagcatgtaatcccaaggagcagaacacttatttttgaaaatagaggtctctcaaatagtccaccaagtggagcgtatataaaaataatgtgatactgacaaaacattagcagaaataagcagagatcaaaaatcatcagtgtgggccaggtgcagtgcctcacgcttgtaatcccagcacttcgggaggctgaggcaggcagatcacttgaggtcaggagttcgaggccagcctggccaacatggtgaaactccgtctctactgaaaatacaaaaattagctgagggtggtgccaggcatctgttatcccagctactcgggactgaggcacaagagtcacttgaatccaggaggtggaggttgcagtgagctgagaagacaccattgcactccagcctgggcaacagagtgagactccatctcaaaaaaaaaaaaaattgtgatgtgcatattgagaaataaattgtgttatatatgatcctgtaaaatatctttaattttacaatacagtaacaaactgcaaactattgtagaatagaaatatatctgacaaaaccatctgctcctcagcaaagaggaaggttcgacatggttttgatcagaggtatcattaatgaaagaacaatcacctgaaagattaataacatctgaaagggaagaatttccttttatctccttttgctttcctatcctttaatgtagatgttaatgagtattgaaatcgacaaaagggaaaaaataataataaggcacaggagaaaggggcacattggattttcatccttgaataatctgacttggttggcgtgaccttccccatttgagcacctctgaaaatagtctgtgacgggaatttttcatgtctatttttgcgcagaaagtaaataatcatagaataagaaaaatattgcttaggcrttttctgagatgatctctaggaaaattcagaattctt

SEQ ID NO: 84052 - DNA, 1288 bp, Homo sapiens
cataccagatggctcaaggaacaagaatgctagagaagatacctcagtcagatcactggagccagttaatcgattttattaaataaactggctttgtgtgtgcttggccatgcactaaataagcagaatcatagcacatttttgttgtacctgacaaaatggctgaagtgataagaaactgcatccaatggcaatagaaaggaaatcacttggaaatggctgtgagtaaaattccccaaagacaagagcctgcacaaagctcgcaagtggatatattaggcctctaccaggraccccaggaagctacagatgagtgttaactaggattgacacctattatgctcttggattcacttatcctgtaacacaggcaactgtggaggacacaatgagtggtttggaacagtgaattatcattcaaaaaatctggacatactacttgcaggcaaattaggcattttactgcagctagtatgcagaaatgagcacggagacatagtgccacataaccttgtctcattcctcattcccctccaagtacagtggaccatctaaacacctgacagtcaaagcatctggtaaaaataaatttttaaagaattacatgtgtgccttcacactgcctaagggaggactctactggaagggtggagttggagctaagaagaaacattagcaagactgtagtgattactggcacttcggttaagcagtagatctgagctggtaatcccaactactggggaaagggtgtggatcaaaacagttaatacataacaatgggactggaagttagcaaatggaagagaccactaagtggacttccatgccaggagagggtgcaagcatactatttacatgagaacaccttagggaaagaaaacactcctcttgcttagatctggtgctgactcattggtaatattgggagaaaccttcagagctgatgtctatggagagtggaaattggactcctgaatctttgtaatcttgcaaataaatagtctatctggataattcagagaaaagaagtgcacagcacataggcccaatgtgccaggagctgaccatgtaagtgaatgtactacctagtaagtaataattagaattccaggtgatttctaagaaaaagagaagccagaaaacagggaaatatcttccaacgtttaaaatcaaaaggtcaactttaattgtaaatgcagaaaacatgttataaaagaacaaaagtgattatatgcatttttagataaaagaggaaaaggttcactactaactgatctttactaaa

SEQ ID NO: 84053 - DNA, 1468 bp, Homo sapiens
tgaaaacaggttaaacttgtctctgtaacttgaaaatatctattactgaaagaacactgaatagagaaatgacagatcttttctaataaactggttacttctaggtgtccttttctctctctaggaaatggctatctttaaagtgttttcataaaaagaacatgttaggtattaaatttagctatcattacatgaattgtttctaaaacagttaaaatgtaattctacccttaacctattttctctgccatcagtgaattaaggaaacaataaatctgggttttacagtaagaggaaactgttaggccgggcgcagtagctcaygcctgtaatcccagcattttgggaggccaagacaggtgatcacctacggtcaggagtttgagaccagcctggccgacatggcaaaaccccgtctctactaaaaatacaaaaaaattagctaggcgtggtggcatgcacctgtagtagtcccagctactcgggaagttgaaacaggagaattgcttgaacccaggaggaagaggttgcagcgagcggagatcgtgccagtgcactccagcctgggtgacacagcgagactcagtctcaaaaaaaaaaaaaaaagaggaaagtgtttacaggaaattcttataaaatgattatcagctttttctaactaataaatttacagattcctataacttgagtctcaatagtaacctagaaataataaattctccacgaattccagttgtgtgacattaaaggaagtcttgtttacctccattcctaatcgaatatcttctaacactccatccacaacgtggatcccaacatcctcttggtagagcactagtcctgctaagaggttggctacacaatgaatactattatatttcacattccagatgtttatcatacaacaaataacatagtctttcacttcttggtcctgccagggcagctttcgcatctgtctcaaaacctaaaaaaagagaattttgttcaaattattaagataagtacacagtagcctgaccaaataatacagaaattttgctatgattgcgcagagaacttttgaaatagaaaatacattagaaatcctctatcggcctcttcagaaatagaaaaactgagactttctaattacaataaaatgtattatcatctttcctaaatccttccatagtgctctcaaattttctagagttttcaggtcttcaatctaggtgactgttctcaggtcattaaaataaatatccaatcaggagtttggagtaggtttctttttcccccccagacacagtctcactctgtcacccaggctggagtgcagtagcgcaatcttgactcactgcaacctcctcctccatggctcaagcaatcctcccacctcagtcccccaaatagactggactacaggcatgcaatagcatgcctggctaatttttatattttttgtagaggcgagatcttcctatgt

SEQ ID NO: 84054 - DNA, 1468 bp, Homo sapiens
tgaaaacaggttaaacttgtctctgtaacttgaaaatatctattactgaaagaacactgaatagagaaatgacagatcttttctaataaactggttacttctaggtgtccttttctctctctaggaaatggctatctttaaagtgttttcataaaaagaacatgttaggtattaaatttagctatcattacatgaattgtttctaaaacagttaaaatgtaattctacccttaacctattttctctgccatcagtgaattaaggaaacaataaatctgggttttacagtaagaggaaactgttaggccgggcgcagtagctcacgcctgtaatcccagcattttgggaggccaagacaggtgatcacctacggtcaggagtttgagaccagcctggccgacatggcaaaaccccgtctctactaaaaatacaaaaaaattagctaggcgtggtggcatgcacctgtagtagtcccagctactcgggaagttgaaacaggagaattgcttgaacccaggaggaagaggttgcagcgagcggagatcgtgccagtgcactccagcctgggtgacasagcgagactcagtctcaaaaaaaaaaaaaaaagaggaaagtgtttacaggaaattcttataaaatgattatcagctttttctaactaataaatttacagattcctataacttgagtctcaatagtaacctagaaataataaattctccacgaattccagttgtgtgacattaaaggaagtcttgtttacctccattcctaatcgaatatcttctaacactccatccacaacgtggatcccaacatcctcttggtagagcactagtcctgctaagaggttggctacacaatgaatactattatatttcacattccagatgtttatcatacaacaaataacatagtctttcacttcttggtcctgccagggcagctttcgcatctgtctcaaaacctaaaaaaagagaattttgttcaaattattaagataagtacacagtagcctgaccaaataatacagaaattttgctatgattgcgcagagaacttttgaaatagaaaatacattagaaatcctctatcggcctcttcagaaatagaaaaactgagactttctaattacaataaaatgtattatcatctttcctaaatccttccatagtgctctcaaattttctagagttttcaggtcttcaatctaggtgactgttctcaggtcattaaaataaatatccaatcaggagtttggagtaggtttctttttcccccccagacacagtctcactctgtcacccaggctggagtgcagtagcgcaatcttgactcactgcaacctcctcctccatggctcaagcaatcctcccacctcagtcccccaaatagactggactacaggcatgcaatagcatgcctggctaatttttatattttttgtagaggcgagatcttcctatgt

SEQ ID NO: 84055 - DNA, 556 bp, Homo sapiens
attggtctatagttttggtttttttgtttgtttttttttgttttgagatggagacttgctctgtcacccaggctggagtgcagtggcgtgatcttggctcactgcaacctctgcctcctgggttcaagctgggattacagacatrcaccaccatgctgggctaatttttggatttttagtagagacggggtttcaccatattgttcaggctggtcttgaactcctgatcttaagtgatccacctgccttggcttcccaaagtgctgggattacaggtgtaagccatggcacctggcctatagttttgtcttatgtttatcaggttttcatattaatgctgcactgcctatgtgaaatgaattggtttttcttttttaaaaaaaatttgggatactttaaataacattggaattatccttcttgcaaccctagtactttttaaattatggatttaaaaaatcactttacattctcttctttgtaactggtctactaacattttcaatttcttcttggattagttttggtcatttatatttttccagaaaattaccca

SEQ ID NO: 84056 - DNA, 2323 bp, Homo sapiens
ccccttgtatatttggtactggagtttaatgcccgcctcttcttctgggctgtaaatgcaatgaggatggaactgtatctacgggtctcatcactgtcaccccccacctagaatgtggtaactgtttagtccacacttagggaatcaatggatggatgaatggatgccccttaccagctcttgggaaattgatcttggaaacataatttaatctctcttagattctgtttcctcgtctgtagcaggaagactaaaaatgtacaacgttcacaaagctatgtcaggattaggcaaaataaggcaaagtgatcaacagtgctggtgcacagagctcagagaactcagaaatattccgcatgattggaacagactgttccattttaagctgagatctcctttattcactgtgcatatttcagatcaacttcaatttgaggtggaaagtgcacagtgacatcagtcttgcaaactggtgtacatccgggctgaatccaacccaatcagacctgaaaccaggtcgtccgagccatgcgcgggagttcgcgttgttttctgagctacagcttccagaaaccaagatgtgcccattcgaacatcaagactgggctcctccctcccatgctgtgcatctcccgcggatccaggttctggtgccagggtcacccacagggctcctccttccccygccctccacgctgcacccaggcctgctgtgccccaggagctgctctgcccggcactctgcattcccagtgtccaatgtggcactgaccttctcttgccaattactgattttacctcctggggaaggccctgagcaccgtggccacggtgtggcggaacttcaagccgcttgatgtttccacttttcttccacttttatttctgcagattcgctgagttgctctagtccctccccggtgcacttagggctaacgtgatggggacgggtaagaatctctccctgcttccttccaagacctggcatctgccttcccccagcctcggcctccactccactgtggaacacttcagctgtcaggcgtcattttaaaacataccaaaaaattatttcatcccttaaagtttttgttttatttgtgttcattagaataaccactttgcagccttttgttgccattattgttgaatattcataagagtctgcctacttactggataattatattacattaatatggtatgaataaaaaaagcagtaattatgcttttatcctgttctgttttgcaatttacagtttgcttgtttcaagaataaaaggaaattgccacatttgaaacaatgttgttttattgctaaactaggaagaacacaagaagcccacccagggtgacaggttaaaatatattttatttctcccattccttgtttagacaaagacttacatcttggtatcgcattgctgactaatgcatagacaaaactaggaatttttttttaaaggataaaagaggcatctcttaatcagaagatgacattttctcctggctgtctttgattaatagcaataataaaggatggaaacattttaaagtggttgaagccagtcatattccagtttccaaatctaaagaaatgtgtcactgttttcagagaggttgctttcctctgtctctatctaggaagcaccgactccctctgagaagaaccacaatgtgctatgacgagagatggttcagcatccttgtccaagagtaaggccatctaccaagtatagacatggatataaaagggctcagaatacatttgtattgatcttttgggctcatagtaggtgttcaatgaatactcattgaatgaatctaaaagcttgtttagattttgattttaaaagtttccactacttggccgggcacagtggcttttacctgtaatcccagcactttgggaggccgaggcaggcagatcatgaggtcaggagttcaagaccatcctgatcaacacaatgaaaccctgtctgtactaaaaatacaaaaattggctgggggtggtggccggcgcctgtaatgccagctactcgggaggctgaggtgggagaatctcttgaacctgggaggcagagtttgcagtgagctgagatcacgccactgcactccagcctgggtgacagagctagactctgtctcaagcaaaacaaaacaaaacagacaaacaaacaaaaaatgtttccactgctttaggtgaggcccttatcagcactgaagcatatggtattaaaatatcttgagtttgatatggacacgaagaggagaacaacagataccagggcctactggagggtggagggtgggaggagggtga

SEQ ID NO: 84057 - DNA, 755 bp, Homo sapiens
ttaaaacagaaaaagttgtaaacaatatctatgctgttgccaaaggaatgatgaaattaattgtaacatatttagtaggtagaataatatgctgycattaaacacatattctctatgaatattttgaaaaatgttgtcttacatgaatctggattttgtaaaaaaatacttacagaaaaataaataaatataccagcatattaatattgaggcatgtcttgatgccggcccatttttttctgcttttctcaatttgtaaatgtagaaaaataatccacaaagaagttttctttgcttgtttgtttttctgcatgtgaggtgtcctacggggagccatcctaacaatgacattcataggcatctggagggacaataaggaggaagagcaaaccatgggactttgcacagccaaaagctcgtatttacagattagtaactagactgattaaggtatagaaataatgtctaactgacaaagtcttagtgcttatagggtaactgcatttagaaggatcaagacttctctgcaaagtttatgaatttctaatgtaagaacctttatagtgaggctcgttcagaaaatggaaaaatacaatacacaatgggcatttgcaggatgacccagaattaaaacagagaccaaaggtgtgggagctgggggttgggagatacatgaaagaccgggacagagttaaatgccttcgttactgttggctgctaggcacagacatccctaagtagagggtgttagcagc

SEQ ID NO: 84058 - DNA, 755 bp, Homo sapiens
ttaaaacagaaaaagttgtaaacaatatctatgctgttgccaaaggaatgatgaaattaattgtaacatatttagtaggtagaataatatgctgtcattaaacacatattctctatgaatattttgaaaaatgttgtcttacatgaatctggattttgtaaaaaaatacttacagaaaaataaataaatataccagcatattaatattgaggcatgtcttgatgcyggcccatttttttctgcttttctcaatttgtaaatgtagaaaaataatccacaaagaagttttctttgcttgtttgtttttctgcatgtgaggtgtcctacggggagccatcctaacaatgacattcataggcatctggagggacaataaggaggaagagcaaaccatgggactttgcacagccaaaagctcgtatttacagattagtaactagactgattaaggtatagaaataatgtctaactgacaaagtcttagtgcttatagggtaactgcatttagaaggatcaagacttctctgcaaagtttatgaatttctaatgtaagaacctttatagtgaggctcgttcagaaaatggaaaaatacaatacacaatgggcatttgcaggatgacccagaattaaaacagagaccaaaggtgtgggagctgggggttgggagatacatgaaagaccgggacagagttaaatgccttcgttactgttggctgctaggcacagacatccctaagtagagggtgttagcagc

SEQ ID NO: 84059 - DNA, 755 bp, Homo sapiens
ttaaaacagaaaaagttgtaaacaatatctatgctgttgccaaaggaatgatgaaattaattgtaacatatttagtaggtagaataatatgctgtcattaaacacatattctctatgaatattttgaaaaatgttgtcttacatgaatctggattttgtaaaaaaatacttacagaaaaataaataaatataccagcatattaatattgaggcatgtcttgatgccggcccatttttttctgcttttctsaatttgtaaatgtagaaaaataatccacaaagaagttttctttgcttgtttgtttttctgcatgtgaggtgtcctacggggagccatcctaacaatgacattcataggcatctggagggacaataaggaggaagagcaaaccatgggactttgcacagccaaaagctcgtatttacagattagtaactagactgattaaggtatagaaataatgtctaactgacaaagtcttagtgcttatagggtaactgcatttagaaggatcaagacttctctgcaaagtttatgaatttctaatgtaagaacctttatagtgaggctcgttcagaaaatggaaaaatacaatacacaatgggcatttgcaggatgacccagaattaaaacagagaccaaaggtgtgggagctgggggttgggagatacatgaaagaccgggacagagttaaatgccttcgttactgttggctgctaggcacagacatccctaagtagagggtgttagcagc

SEQ ID NO: 84060 - DNA, 1038 bp, Homo sapiens
actctcaatgtagtaataatctcccaagaatagacatcatcacctttattgaaacttgtatattatagaatttcctgctcctcatttgtaacttactggttagggtcgacagtttctacacatgacttctatacacattttgttgttttatttttaaagggtattacctttaaatttcagagaaaaatgattcaatggcataactttacatttagcattgtagacaccataaactggctgacattgtaagtaagttgaaagattttattttccttatctgtaaaccaaaagaattgtaaattcctcttctacatttctaagagcttgaaagttctactatagccaattttaaacttgagcatacaaaaatcttagaattaataagtaattaacttagtaacttttgttttggaaaatatgtaggctacacatatgatttatttcaaacggaagcatgattgcacttgaagaacttgtatgctatggaggcaaaactgtaaatacatacctatatttattaaaaattgtttaatatttataaaatataaaatatggttttatttgtgaacaatggtacattcttctaagttaaaaattatccacaagggcaagtgtttctatttggcttactggattccctaaatcaagtacctcaatagtatctggcatttagtagacattcagtgagtattggtttcataaatgagtcaatgggttttgcaattgtcgaagaaagctttatggaatatgttagaattaatttggtttgtaatgatgagtagaattaaaatacattcaggggatcaagagkcatattctagtaaagagggaagtagtaaaaaatattgagtgaaaatgattacggcatatttaagatggatcagtaaatataacagaacatgtatagcaactaataatagaataacaactaattaatagaacaagtatgaaaggcttcacatgtctttcacaaaaactagcaggaaagcagacagagatcctcatttaaggaggaaaagtatactttttaaagcccat

SEQ ID NO: 84061 - DNA, 850 bp, Homo sapiens
tgcacacagtgctttttagtgcctggaacttaggtattaatgacaattagccatttgaagaaagtctctgacagagaggaaatccaaagtaaacaaatggagagctataaactaaccagagctcagatctactacatgctaggcagttttcaaggagcaccaaaagctgcctatctcttattcttgcaataaccttgtaaatagccattatactatctccatttaataatgggcctgaggcataggtttttaaatgatttgcccacagtcaytcaacgcaaagaagtcaaagccatttccagtacttatagttccctcccctggatgctctgtgaattctagttttacaaccctgtcccatgcccacctttcctgaagtgattatatttttgaaataattagtacattatgtagtgtttcttgtttcctaattgcctgtgcatgtctgtatacaacgttgagtgcaagtagtgtttttccagtttaatttgctattcttttgcaataatctatcacttttctttaatggaaccaggttgtaaaagatactattttctcagcttcccagtaaaatctggccctgaggttttatttaattaaccttagccattgtatgcagataacaacctccattttaataagagaataacaagaagaagtcctttgggaagtgaagataggtaagtggcaaaacatttgccatttttccccctaggaaaaaatagatcttattcttcattggttggaggaaaaaaaattaaaagagagaaaaaaaaatctttgtcgctggaagtcgcatttccattcagcagatgtctctcttctgaataatttcaggaaccggagaggg

SEQ ID NO: 84062 - DNA, 1286 bp, Homo sapiens
aattctgatcatagttattaaaaagtctgcacaggcacaaatggtatataatatcaacatttaggggttctcacaactggaagtgaggatagggggattcaaagttasaaagaaaactgacagaatgactgtaagaagtagaggaaagggagcagtcaaagatgaatcaggtttcgcacttgagattctgtgagaatactgatgccttgaaaggaatgaaaaatagccatgcagttgggtttgtgatgaagataataagcccagatttaaacacattaattaaagcacaggttttgttaaaggggatagatgtttccagtagggtagtggaaaaagttgagcttattgggaatattgcccaggagattaatcatagaattatccaacaaaaccaaagagataagatgaataaccaggattttttaaaaagagagaaggggaggaagccacaggtcagcacatcaaacaaaggcatatcctaaagcacagaaaagatcaaataaacacagtaagtccaagcaagtaaaagtgggcaggggtgactgcaaatctaagtgtgggaatactaggctcaagcaaggacatttctttcacgagaaccttggtgcatttgtccaggccaggagccttcaggagctgggccaaaaatggacaaggtgcaagtaaaggtatctagaagaaaatgccagcaagcaattgacaatggctgggtctttagaggtggtttaggctacagatttggatgttggggccattcctattgaggtaatagttgacatcactgatggtgacacatagggagaaaaaagtgtggcttcacaataatgggatggtagtggaaaattcagctaaaatgaaacttaaagggaagatggtagaagataaaaaaagaccaacagagcagtactatttactgcataaagagaggcagaactacaagtggctaagtgtggttgacggcatcaagtgctgttgaaaggtggaagacagcattgttaagtgaccattgaacattgttaaccaaaaggtcgtttgtcactgatgaccttcacaaagagaatttgattagcataacctgagtaaagaaagaagctaagagattaaggaggttacagatggtattattagaggctattttgggcttccagcttaatcaggagggagagatacaagtccaagctattcttgttcatatttctttgtgactgatgtcttagactcctgcatttttcttcaatacctttttgccttagaataattgactccacctttctctttgtagaaag

SEQ ID NO: 84063 - DNA, 725 bp, Homo sapiens
tgcctagagcttggtgtctaggacacaactttgcacaaagtagagcaatcataattaccagacaatacatgacaaagaataaaacataactccaaataaaggaaaatttctacagttgatgttctgcctctgtgagggccaagtaggtgataacaaattaatcaccccagagataaatactrttaactctgaacaacaacctctagaagatcaaaaataaattagatatatcatagaaggaattttcttttattattttatttatttatattgatctataataggtgctaatttaatacttccatataatttataaatatcatgtctgtgtaattgggttttgcatcaccataaatatttgtcttttctttatgctagaaatatttgaataatgctatttggtagtatacaatagattattgtaaacgatagtcactttactgagctataaatcactgtgtcctatttcttccatcaaactgtatatttgcacccattaatgaaccccaactcgccactatccttcctggcctctggtaacaaccagtctattctctattgtcatgatactcacttatttggctcctgtgtatgagtgagaacattcaatatttgtttttctgagcttggcttaattaacttaacataatgacctctggtttcattcacattactgaaaattacagaatttaattcttttcatggctgaataaaattccattttg

SEQ ID NO: 84064 - DNA, 1094 bp, Homo sapiens
tggtttataaatacaacctcttaaaataagaacaaagtttaaatttttaagaaatcactcttcaaattttagttgtaaatccctcattttgacatttgtgccattactatttctatacaaacactacaaggggttgttggcttctctcttctcacagagccatttgttgaacccttcccagcacaccactgctaataactagactttctgaatgtctaaactgataaactgaacttttgatgttcttttattaatttattaatttgaatgtgaggtagagtaaataaaaattaaaaaagaggaaatttaaggtttcatagaggtaaataatcagtttttgagatttttcaacccaaacaaagtacatgctgtcagttataaaatcaccctacctacaagatatttctattagataaaaagcaagaggtagtactgagctatttcaaccccaggccctaatgaagacagaagagcacagtgaataatgcactcaacagcatgtcttcagtaagtaatggtgcatttttcagagggcgatttcttatatatttgtaagtgctaatggagagcatcatgccacatcayaggtccacaggggagacattgacaaaaggccagaacagtgtaaccagtacactgccatgattatttccagatttatttaagcatgaaagaaaaagaagctagtggactctttttttcatctactacatatctttgagatagcccctgctttctcagaacttaacattctagtaggagaattaaagcaactataaacaaaacttacacattatgataattttatgaagaaaattagggtgatatgataaaagaggagtaggactgggctcctttctccaccctgcccccccccccccgccagtttccttagagacaggttcttgccgtgtctctaaaggaatggaatgggctggaatgtagtagctgttcacaggttcacaggccagtcgtagctcactacagcctggaactcctgggctcaagcaatcttcctgccccagcctcccaagtcgctggaaccacaggtgtgtaccatgcctgactcagtctgccacatttttattaagata

SEQ ID NO: 84065 - DNA, 1223 bp, Homo sapiens
tatttccaaagacacatagctacttcacagatagctctacttttctactttctctatttggtttattctgaacaaaaataacttcttattggtacattctagtccagaatccagtgtcaatgactgttagtaatattttatggcatatttatctcatttaaaattacctgttcatgttgcttattacatcaaactcatcagactggtatataacaatgtgaaccacatataataatcctgaaactcttcctttgttctctgttttttgtttagcatgtactttagcatttagcctttcactcttttttcaatctctcatttcccctttcttcaacccttctgccttttaaataaaagagcctaaaagttgggagttcactttgcccatcgttatctttacttccttcttagttttattttataggcataggatagtaaacagaacatttaacagaatggctaaagttctttgttccagtcacagttttgcttttaactataaaaaacagaaggcattcatgtctttaagccttagtttaatcatttacagtcactgacatggacctacatgatctctaagttttctcccagttctacaatcactggagatcattagctttgttggccctgtacttgtccaatgtgtgatatctctctaagagatactcataatattccactggatactgagagttaaacattcactgaaaaacctaaatgccaagtcatatatacaaggcttccttttgattaacagaagtctcagctgtaattctttctgccctttatttcttgctcagttatgtagctaactaatataaataaaaacttcaggttaagaacttcatcaaaattctcaaaactatagaacataaaagcacagaggacttaaacttatcttttaaaattatgagatggctagaagaaggagtggagtgagacaaatcaaatcttcaattttctacaacgcttaatgtaagttgaagaaaagaagttctacttttcaatctttamcaaccaagttccactctaagattggttacataaatgtagatacaccttaataaaacaaggatacaacaacaggaaagtgcactgtaggcttcaaaaagatgcgtagcaatgtccagtcttttagaatccacaatctgtaagttgttcaccaaggctaacttatgcaaatgtggtataacaactgaaaacagaaaaaaaagggttaaatt

SEQ ID NO: 84066 - DNA, 368 bp, Homo sapiens
gactccaactcaaaaaaaaaaaaaaactgatcatttctcatcttctcattgtctgccttagaaacacttccatggtagctcctagttcactgctgtaattacttactttttcagttttacataccaaattatatgatcttttagacacactcccaktcacttctatattcacaacattcttccacttgtgactgacccattaatagctccttagtaaatgtttattgcctatatgaagaaatggcatattataaagcaaaggcaattgagtcaaactttgagttcacaaaagaacaagctgaaggccagagacatgaagtgaggtctcagctcatactgttatttaatatgcagcagtaaaaatctaa

SEQ ID NO: 84067 - DNA, 368 bp, Homo sapiens
gactccaactcaaaaaaaaaaaaaaactgatcatttctcatcttctcattgtctgccttagaaacacttccatggtagctcctagttcactgctgtaattacttactttttcagttttacataccaaattatatgatcttttagacacactcccattcacttctatattcacaacattcttccacytgtgactgacccattaatagctccttagtaaatgtttattgcctatatgaagaaatggcatattataaagcaaaggcaattgagtcaaactttgagttcacaaaagaacaagctgaaggccagagacatgaagtgaggtctcagctcatactgttatttaatatgcagcagtaaaaatctaa

SEQ ID NO: 84068 - DNA, 684 bp, Homo sapiens
tttattttttagacattgtaaaataactatactgtggtatctcattgttattattttttttttgagatggagtcttgctctgtcacccaggctggaatacagtggcgcaatctcggctcactgcaacctctgcctcctgggttcaagaaatcctcctgcctcagccaagtgtgtgccaccatgcttggctaatttttgtatttttagtggagatgaggtttcgccatgttggcaagctggtctcaaactcctgacctcaagtgatccacctgcctcggccttccaaagtgctgggattacaggcctgagccaccacactgggcctctcattgttattttaattaacattttcctaatgacaaaagatgttgagcatcttttcatgtgctttttctaaggctccttgttaaacttacacaaaaacaaagggcaaaacttttgctatagttctgtagaagtttgaggacttttcaacatctctcatgggagcacttacctgtcctatcttaaggccacttgtggcttagagtgaaatttcttgacactaaattatttggtaaaagatgctcactcttctagtataacctgcaaaagcaattaagagtgatgaaaaatgtcacaatttaatartaggtctgaaaatgatttacttatttagataatacaaatattttgttatataaa

SEQ ID NO: 84069 - DNA, 2475 bp, Homo sapiens
aggtaatatatttatgatttaaagacatcttctatcaaaataattcaatgaattgaaattaattcccctaatgaagccttctaatctagtgtcacttgaatattcagtcaatctgcaaatggtcttgagttgttatgtttctcataagcctgttctcccacatggtttatgttctgtacccaagtgttaaattttttagctaattctgttaagctcgtaattactggcaggtccttgttggtatttttttaagttatcacagtattttacagcctactttctcagtctggttttgtaattgaataatgatgcagaatattttctgtactctccctttgataattccatatgacctttaaagtggacaaaacaatatttttgtgttttttagatctctaaatcatgaaataaaagcatacattaaaaaagatttgtcatatgcaagtgtgcaataatataataaaatcaagagaggaccactgcccagtatggttagaggaaataataaagtgaatgtcaagaaatgaatatagataaggcaggggagacatctccaaagcctttccgtgtttaattaaagagcctgggatttacactgaaaggggtaattaatagctaaggagagtaaattaggctaatgtcacaaagctttattgggtgactttggggtttgtgcatttgaagtgaatgaggtcaaagatggaaaaaccaatgggttttgaggataatgataagatctggaaaacagtcaaaagtatttgatgtcctcaactagagaaacaccagtggacatctaaagaagggaatatatttgagagatatttaaataggaccatcaataaaactaggtgattgaaggtggaatgtgaggcagaaaggagagtaaacgttgatcctcaagttactgagttggacaagcaagtatatcagcagatcgtgcactgacaatggagtcacaagaaagggacacaagtgaacacgtactatgtgcctcaaactatactgcgttcgcttttcacacactatcctatcaattttcccaaccaaccaaataaagaaactgaacctcaaagtgtgttaaataacacgtccaatgtcacacagctagtacattggggaaagtgaaactcaaacccaaagactcacctattttttttttactaggtttatatattttgagtttggggtcccagtacaagttcaaagtagagatgtcaaagtaagaaataaacctttccaaattttgaacctgggaggaaggctacataattttcagttgtgaagccaggggaatgaaagccaccatgcatggagagtgagaaggcaaagagcccaggacagcaatgtgtcagacacagaatggaggaaggaacatttgcagagaagacagagaaaaagcatccctaaaaatgaattaaagtaggagcaatgtgtcatagaagccaagaaaattgaaattgctctaaggaaagtggtctccagtgtcaaatgctacattaagatcaagttaaacaatggcatgaaggtggccgtgtaatatagcaataggaacattgttggtaaagtccaggagtcttttttagtagagtgatgagggtggaattcaccataatcatttctctttagtgaaagaaagggaaattacaaagcagggacagcarccgttcaagaagttggacagtgaagataaattaaaggggtttgttacttctaggaagggtacttgtagttattagaaatactgaaatatgttcaaatgctgccataaaggagacacacagccaggcttactgtggagggaaagcaaaaggtcaggctttgactgagaatatttactatgtcacagtaacaaggtgatgttttcggctcatttaccaaccaagccattagggacatgcaatatgcacatgctgttaactgacattttgggaagacatgaatattttgcatctccttttctcctgggtagcattgttgctaaagggaaaagctcagctatgatctatgttaaacatagagatatataaagggttccctattaatataagcttatgtgctttgaggctcttgcaaagattgtgaagggacatgcttggccatggctcatcattatccatcaccacagggaggtgggaggacatggggaggaatgtggcacatgtgagctgcatgttttgtttttctgtgaatccattggtaattcacagaatcataaaatagaaatgtagtagaactcataccaagtcacaacacctgtaacactgaaacagtcatctttgggcagcaaaagtataacattgttatatcagttggtacattatctacagtcaatattgcttttataatcttataaactcttcacattttgaatatattcacactcctttatttttttctccaacaacccataaactggaagtagacttttagtttattttaaaatcatacttattgttctttttctgattttatgtt

SEQ ID NO: 84070 - DNA, 1165 bp, Homo sapiens
tagtgtggaaaattagctaaactcattcatacaaagtaactctgacattgaaggttctaaaattaacaacatttagaattttaatcttccatctagttttaccatttggagtatataaggaaacctagaaagaaaccttatatccacttgtctatcctataatatttgcacattatagggtataatctcagggcataaatacaactttttataattcctatagagtgatactcttaggccaatattactgatcttgaaaagtggggtattgaggtattttacttggttgtaagccatcaacgtgttttacaaatgtgatattaggttttgatattagtaaaaaaaagaagcttcaaaatgtcctctctttctttgaatgcaatcacaatcatttcctttttgaattttaaatataagtaacctaaaacttaataacttgctcacaagtctagaagcagacaaaatatcacccacaaacctgatttataatactacgttaaactgacttaaggctttagacattcataaacatcttttaatctattccccttttgcatggatatgtaaatatatactccaggaggtataatttttgtagttattgtagtgcttttgtaatgaagaactaagtctattttcacagtgatagagaattgagttgagttcttttgaccctggatggatttgtctattttttaaggtgctacttaaaaatgtataggagaaaataaaaataaattatctctttcataagttaaaaatattttacatttcagcattctgaaagcacagaggattcaacaaaaatgatggtttagaatcaaattcaataaagaaacatcagcttgagatcagactctctgaggaatgtttttttttcctgatgaatctgagccrttcaaggtccttataaataagtgagagcacctttgatttttgactttttatagttaacagtttcagtttgctaatacaaaagacctcatgccttttcatccagaaaacagagaacactttctattatgtaagagtattatgtttgaaggagtatgtttgcttcaactatgcgtgctatggtacagaaagaaaaaccacctccctgtaggtctaaatccaaggggttttcaatgtatttgggttaagttatgttgtaaggttatagctc

SEQ ID NO: 84071 - DNA, 1165 bp, Homo sapiens
tagtgtggaaaattagctaaactcattcatacaaagtaactctgacattgaaggttctaaaattaacaacatttagaattttaatcttccatctagttttaccatttggagtatataaggaaacctagaaagaaaccttatatccacttgtctatcctataatatttgcacattatagggtataatctcagggcataaatacaactttttataattcctatagagtgatactcttaggccaatattactgatcttgaaaagtggggtattgaggtattttacttggttgtaagccatcaacgtgttttacaaatgtgatattaggttttgatattagtaaaaaaaagaagcttcaaaatgtcctctctttctttgaatgcaatcacaatcatttcctttttgaattttaaatataagtaacctaaaacttaataacttgctcacaagtctagaagcagacaaaatatcacccacaaacctgatttataatactacgttaaactgacttaaggctttagacattcataaacatcttttaatctattccccttttgcatggatatgtaaatatatactccaggaggtataatttttgtagttattgtagtgcttttgtaatgaagaactaagtctattttcacagtgatagagaattgagttgagttcttttgaccctggatggatttgtctattttttaaggtgctacttaaaaatgtataggagaaaataaaaataaattatctctttcataagttaaaaatattttacatttcagcattctgaaagcacagaggattcaacaaaaatgatggtttagaatcaaattcaataaagaaacatcagcttgagatcagactctctgaggaatgtttttttttcctgatgaatctgagccattcaaggtccttataaataagtgagagcacctttgatttttgactttttatagttaacartttcagtttgctaatacaaaagacctcatgccttttcatccagaaaacagagaacactttctattatgtaagagtattatgtttgaaggagtatgtttgcttcaactatgcgtgctatggtacagaaagaaaaaccacctccctgtaggtctaaatccaaggggttttcaatgtatttgggttaagttatgttgtaaggttatagctc

SEQ ID NO: 84072 - DNA, 568 bp, Homo sapiens
tatttgtattttcctrtgtgcatctttaagcctatgttttgttctttaacttctgtctgataattctattatttaaattgtttttcttgtctgtcgatttgtttctggatgttgttatccttaacaatatactgattcttctctgtgtatgtgtgtctctctctccatgtctctctaaacacatgcacacaaactctctctctctctctcatgtatgctatattgcatacaaatgatttaccaaaataattgactttatttttaatacagacctacaagttagttactttcatattcacgttacagttgaggaaactgagactcaaagggaaaaatgacttggccaagtttatacacccaattagtgtcaggatagtttaagattaccttgttgtctactatggagataagttcctccagaagttttgcttatgcaagcattacccatatcagatcatcttaaatcagggtgaaaatatgagtatctgaacaactcagatttggtcccagacttcaagtatgctcaagagctggttcttgttttctccttcattggagtgtattaacc

SEQ ID NO: 84073 - DNA, 568 bp, Homo sapiens
tatttgtattttcctatgtgcatctttaagcctatgttttgttctttaacttctgtctgataattctattatttaaattgtttttcttgtctgtcgatttgtttctggatgttgttatccttaacaatatactgattcttctctgtgtatgtgtgtctctctctccatstctctctaaacacatgcacacaaactctctctctctctctcatgtatgctatattgcatacaaatgatttaccaaaataattgactttatttttaatacagacctacaagttagttactttcatattcacgttacagttgaggaaactgagactcaaagggaaaaatgacttggccaagtttatacacccaattagtgtcaggatagtttaagattaccttgttgtctactatggagataagttcctccagaagttttgcttatgcaagcattacccatatcagatcatcttaaatcagggtgaaaatatgagtatctgaacaactcagatttggtcccagacttcaagtatgctcaagagctggttcttgttttctccttcattggagtgtattaacc

SEQ ID NO: 84074 - DNA, 568 bp, Homo sapiens
tatttgtattttcctatgtgcatctttaagcctatgttttgttctttaacttctgtctgataattctattatttaaattgtttttcttgtctgtcgatttgtttctggatgttgttatccttaacaatatactgattcttctctgtgtatgtgtgtctctctctccatgtctctctaaacacatgcacacaaactctctctctctctctcatgtatgctatattgcatacaaatgatttaccaaaataattgactttatttttaatacagacctacaagttagttactttcatattcacgttacagttgaggaaactgagactcaaagggaaaaatgacttggccaagtttatacacccaattagtgtcaggatagtttaagattaccttgttgtctactatggagrtaagttcctccagaagttttgcttatgcaagcattacccatatcagatcatcttaaatcagggtgaaaatatgagtatctgaacaactcagatttggtcccagacttcaagtatgctcaagagctggttcttgttttctccttcattggagtgtattaacc

SEQ ID NO: 84075 - DNA, 666 bp, Homo sapiens
ccactcttctgttccactgatttgtctactcttatgccaataccacgttgattgtattccagtgatttttattacagtggctttcagttgaaggcaagtctctcattatttatcttctgcataytttctttgttattcaggcacttacatttccatgtggcttttaaaataattttatccaacgcattctaccccccaaaaagagaactattaggataatacatggaattttgctatatttatttaggggaatattattagtttttcaatctgtaaaaattttagtctttctttcttaacatttattatatcttaaaaattagcaataatttcttgatatgattaaatatctagtcactgcttaaatttccccaattgtctcaggatagtttaatttattttttagacttaggatctaaataggctataaatttcagttggtagtgataggtgtttaaatcttttttaatctgttgacacctccttcgttatgtgttttcttgcaatttactgaagaaaacaggttgtccggcagcattttcctaacctgaattttgataattgtacctctgtggtgtcatttaatgtattcttttgtctcctgtagttcctggatgttggtggttagatctagagctttgatcagactcaggttcaattttcagg

SEQ ID NO: 84076 - DNA, 1474 bp, Homo sapiens
tgttggtctgcggtttcccttgtctttgttttgccttctaattacttccttaccattagtttcaccatagaaagtgggcaaggaactaatggataagacattctattagaaggctgggagaacacattgtgaarccattgctgtttccttgttaccctgataataagaaacctttgcatttgaaagtgtgattctaattcacaaggcacttgcaggtatattatctctgagatggacggtaccctgtttttgtaattgtgaagactgtaaagactgcagctcaagcaggaaaagcgccttcccaaggctctcctagttattgaatctcagcctaaattttaccttctttttttaaagctcgggtgcagaggtttgagtgaatactatgtaccctttagtatatgacacattatcatcgcttgttcatgtaatgtgtctctgacaatacataaacaaatgggcatggcggtgttccaataaaatgttacaaaaacaggctaagggtggatttcacctgagagtcacagtttgctgatctctgctttcaggtaactctgtgtttcatgtgaattttcttgtttatgtatgtccttccaaatgaatatgttgttttgtggggctgtattttgaatttacatttttgatatcattttgttgcttatttttgtttgtttgtttttctctcagcttgatggcttaaggcccattcttgctatggggacatttaattggtcgcttctggttattccatactgtttgcaggtacaaccccgacatcttcccagcctaccctcccggtgactgactcacagctttgcactgcagtaaatgaagctgcagtgagccattcttgcacattttccctatgagactctctgtgctatatgccagatcatagaatgggcttattcaagcaagtagggccatattcttcactatgcctgtcccgtggacacgtccacctacatctctgccagcaattggtattattctacttgctcatttttgccaagttaatatctctttgttttaatttgcatctcttttgattactggtgagtttgaacatgtcatcatgcgcatatacattttctaattcaaaagccagatttcttcccttaaccctcatttgcttcttcccaaaagacttcaggttttttaatgagatttttcaaacatgcataaatatatagatgttttataatgaactcccgtgtatccaccccctgcatcaactgttaacatttcgccaaccttgtttcagctattcccccgcattttttttttttttagtggttgtcagtggaatgttttaaagccaattccagaccaaatgctatctcactctaaagttagtttgcagctctgcctaatcaggattttttttttttaaaaaaacatcacttatgccattatgccaactaataaaatggacaattctgcaatatccatattcaggttttctcagttgtct

SEQ ID NO: 84077 - DNA, 714 bp, Homo sapiens
ggcaggaacaggtttaaaagaacctcctctgggcacaaacaggggaacactgtataaaagtctcacctccagcctcaaacrtttgtttcccctcaagtctccagctctttcttttttcaacaggaaagcccccaaagacggccacctgaatagttttctgataaaatgcctccttccctgcttacccctctccctggcagctctgtcaccccaaaagaattctgccttccttgatagatttgctcacctggcatcaccacagtaacctggaggtttgtttgctagttctcagcaacataaaacaagctgccaccccaccccctaccctcaccggggcccagaacagatggagacagccccttgggaagcagagggagccataagctcattgagaaaagatcactccagccaccttgccaactccttgctgtgcagtattcagaagtctgaagatggaaacccaaaacagaaagcttttgatttccagatccgctgtggttgtttctctcaagacaaaccaaactttcttctgcatgtattcccctatcatattgccaagtcacaatttgtcactttgaaaatatggaatttgttgaactgatatcatcctattagtgacaaatccatctttattcataaatactttccgcccaagaaataagttttgtattaatattgtattggaaattagttaatagtccagatgatgtgggg

SEQ ID NO: 84078 - DNA, 525 bp, Homo sapiens
tgtggcttcacagagcctaaaatcccaccgggaaacaagttaccataataattaacaaatatctccaccgtccgagactgtgaaggattgtcattttggtctataactgtgatatgcacagttcctgtggaagacatttgaggaacaccagaatccttggtaaccacagacagatagaagtctgcaatctgctctctgtcaatctctctggttgtgctcagaactccagcagtgctcagactgaaataactggtggcaggacctgtgctcagcaagtaataagtaaagggaccttgatttggagggagatcagggtcagtggactgaagggtcatcaccaaagtgyctggccgtttgttttccatgacttctccttcactgacagtcagcatgggcccgttatcatttatatcttccagggtgactaataaagaggcactacctgtagctgagggggtccctgaatcaacagccaaaactgagagattatagatgggaagggtttctcgatctaattctgcagta

SEQ ID NO: 84079 - DNA, 1550 bp, Homo sapiens
gaaaattatgtatcattcagtttaggtgtaaacatccatctgtccctattatgttataacagtttattattcaaatgcatactgtgaaagaagaacatcaaactgataagtagttagtttaatttttaacaaacaccaaagattaaaagataaacattttagtcttggataagtcatctgtatttgattaaactaaaaaattaaagtgaagaaacttacaagaataagctttgttaaacgttctcatttgtaataaggaatccccagtgtgccaaacaaatgtttattttacatttaattacttgctaccagtaataaataacaattaaaatttccaaatattttgaacattataaaatttttacatgcatataatattgaaagacatcaatatttatattattcaaaaggaatgataacttctttatgtcaagagaagccatttctgaattaatttagtgaatttaataatttagtttctcaaaattaaattaatggctttgattcatctgtctgttctagattgcattaatcattttattttttacttttaaaatttacattgaaatttaacacaattttctgcaagatctatgagtttttgttgctgttaagcttatgattatatgcccttaattaaaaagacactgacctttctaatcccttgtaattaaaaatgtctcaagatttcagtaactctgtgttcaaaatattaagcatctttgctttttgtttttgtatataatctaatcattcttgatttttttgtcaattcttttgtaatagttctcaaaatgtttacttttttaaaattgtcataatcactagttcaaggccatgtcaccagacacttgtgcaattgctaaaattcttcataggctctactttcctgaagtgccctcttcttccaatacaaattacatagtcctaagagattaaatccttaaaaattcctaacaactctctgttatctagaagttcaagtccatagcttttagtttcatattaaaactattcctcaaactagtcttagtttcagctactaaatttattttgaatttcttctctgaacaaatcatctgttcttagactttatctgacctgcacacgcatcttctacagttttaagcctcttgataactatggcctaatttttcctaaactgttataacaattaacattcctgccagcagggtataagtgtttccatacgtcatttccaaaactccataattttgtgttttcaataatagcattttataattatgtattcatataatagttgtcttcagaagttgctaagtttgtaagacagttaataacaatattaacttgttaagaatagatgtaaaataattattaatatmattaaaatatataatttgctatagtacaaccaccataactaaatagtttacatgtactaattcattgaatatcctcagcaacttggtttgattatacaaacgagaaaaatgcagtctaggaagataatatcccaaatgtacaagactagcaaagtgatgtggttgcacttcaagcctatgttt

SEQ ID NO: 84080 - DNA, 1550 bp, Homo sapiens
gaaaattatgtatcattcagtttaggtgtaaacatccatctgtccctattatgttataacagtttattattcaaatgcatactgtgaaagaagaacatcaaactgataagtagttagtttaatttttaacaaacaccaaagattaaaagataaacattttagtcttggataagtcatctgtatttgattaaactaaaaaattaaagtgaagaaacttacaagaataagctttgttaaacgttctcatttgtaataaggaatccccagtgtgccaaacaaatgtttattttacatttaattacttgctaccagtaataaataacaattaaaatttccaaatattttgaacattataaaatttttacatgcatataatattgaaagacatcaatatttatattattcaaaaggaatgataacttctttatgtcaagagaagccatttctgaattaatttagtgaatttaataatttagtttctcaaaattaaattaatggctttgattcatctgtctgttctagattgcattaatcattttattttttacttttaaaatttacattgaaatttaacacaattttctgcaagatctatgagtttttgttgctgttaagcttatgattatatgcccttaattaaaaagacactgacctttctaatcccttgtaattaaaaatgtctcaagatttcagtaactctgtgttcaaaatattaagcatctttgctttttgtttttgtatataatctaatcattcttgatttttttgtcaattcttttgtaatagttctcaaaatgtttacttttttaaaattgtcataatcactagttcaaggccatgtcaccagacacttgtgcaattgctaaaattcttcataggctctactttcctgaagtgccctcttcttccaatacaaattacatagtcctaagagattaaatccttaaaaattcctaacaactctctgttatctagaagttcaagtccatagcttttagtttcatattaaaactattcctcaaactagtcttagtttcagctactaaatttattttgaatttcttctctgaacaaatcatctgttcttagactttatctgacctgcacacgcatcttctacagttttaagcctcttgataactatggcctaatttttcctaaactgttataacaattaacattcctgccagcagggtataagtgtttccatacgtcatttccaaaactccataattttgtgttttcaataatagcattttataattatgtattcatataatagttgtcttcagaagttgctaagtttgtaagacagttaataacaatattaacttgttaagaatagatgtaaaataattattaatataattaaaatatataatttgctatagtacaaccaccataactaaatagtttacatgtactaattcattgaatatcctcagcaacttggtttgattatacaaacgagaaaaatgcagtctrggaagataatatcccaaatgtacaagactagcaaagtgatgtggttgcacttcaagcctatgttt

SEQ ID NO: 84081 - DNA, 1047 bp, Homo sapiens
ttaggaagacccaagcttttggatgttgcttttttcttaaaaaataacttgacatctaattttcatttgttgttactttttaaattatgattttatagattcatttggttatttttaaaatgtgggctatatttgctcaaagaaaatatttcaatatttaaatatatttcagcaatgtataaatatagtgaagttacattattttgtttaatgagtgatacatatgcttggtttaaatgtgtaggaatttttttctttcacaataatgtatgaaaaatatttcatttcttgaaaggattgcttttatattgacttgaatttttacaaaaatatctgtttttgtctagctttaaaatctttttatttcttaaagtgagactatttcttattaatgaagtaaaagttaggaatcattttctctagattatttaggaaaactgctatgaaatgtaaaattccagaacctctttttacttgatgtagttttgcaaacaaaacaattttactgaaacttcccacctaaaaacaaaatgctatgtctttagatatattctttcaagaaatcacgggggacttatattgatttcttcataagggaaaattaatataaatcaaaaataaacaagcaaccaaaaaaaactgaaatccagacttttctaactaaggaaggtaatgataaaggaaaatgaataagtgttttctttgaatagcttaatgagagtcgcaggaaaacaacgacctattttactattaaagtacttatctacaaaaaattgtaatggaaaaacttctgctgagcaggctagcaatgggtatcccctaggacccagaacacttaatgggttttcagttctgttctaaatgttttttttttttttctttttttgcctattctcaaccagtgttgtgcaaaatgtcaggttttcttcaactttcttttcttcctccttagaaactcttgccctttgtcaattgtttagaggcagaaaagattacatttccrtacaagaagtccagattagttgaagacactagaattcaaagcct

SEQ ID NO: 84082 - DNA, 585 bp, Homo sapiens
tggtagtcacgcagaaatgctaggaggaggttggaaaatgttaggtgtgagccttttgaggggacctgttacaggggcacctgcttataatgaccttggacacaaagaagccgtgcgcatggtgaatttgtgcagcagggtagagataataactcctgtaagactatagtatgaggcggctctgctaaacctctgcatcgtgaaaaaccgtgttggctggattaagcaaatgagaaggaatattgtaccagaacgcattgatcttgataatctaacaattcgtgcagcccactggtttccaggaaggtgggcatcaggacattgatgtttttgctctgcaaattcctcagtgggaccagaaatacatttttagtgttttagataatgattagcaattagttggagcacatagtccttcagtacctgcaaattttaaaatctggtgtatttcttttctggaagagattctgattcttgstagataaaatgtagtattgcaactaagtgtgttagacattcattttcagtgtattttcaaaatatgctgagcaggtatgtttgcagaagcaaaattaaagcaaaaca

SEQ ID NO: 84083 - DNA, 1109 bp, Homo sapiens
ttcagggaatatttaatgctttattatttaatcataagacggcacccaggaagtagccagcatattcgtgatggatcaatttgtcttatgcctagttacatcgagtaatttcttatacatcactgcttatttagatattatgtaatcatttcttgtggcttacttttaatatttacaagactttatacttaccagcagttcactacacacaaatatattattttaaaatatttattctttcaatgcactagaattagtgtattacaaatatatatactaaagcacttgaagtaaacacatatctgaaaatcaagattcataaaattatgccaggaattgctttgtaaataaaactgatcaaaattaaacatccagccctcttggtgcattttggtacattgcaatttataaaacctttttggaatggaatctgttatacaatatgaaacataggaatatctgaacatcagctttaagcttcatgaaggttttaattttcattgaaattctaggcctaacacaatcctagcatgtgatagcaatacctaaccttaagcatacaatgtatatttttggatgaaacagtaaataaagatataaacaaaagatgaaataacattaatattctacrtaaatatataacatgtggatccctaatgcacacccatgacagacaacactaatcatcttttcattcgtgccaaaaaattttaggcattttctaaatgctgggcactgttctaggcactgtagcactaaattcagactataacacaaaactaaacagacaaaaatctctactgtcacagagttagtgtctactggctcaattgtgggctttttcaagtaacctaagtttaagcctcagactctcaatacagatttcccaagcagtcactaccagtggattagagttagcacaagagagaggcatatttttacaccactgtgctaagtaaattaacagatatgaaaaaaaaatacacctttcaaagcattttctgacttaatacaaataatataatggatatatattttaatctggtcacctattactaaacttgacatttgtcagttcctcaatcaaaaagatactattgagagctcat

SEQ ID NO: 84084 - DNA, 1278 bp, Homo sapiens
attccaatggactttttaaactcacagactcctttttacaatcttgtggaggctaccaacctttccacctataaaaggcacacatacacattcacatacaacttttcacatagtttcccagacctctttaaattgttsgtggatcccaggctaagaagtcttgaagggcgtacatatacatttgtgttcatagttctcaagcccatacaggtggcagtgcatctgaacattttgataatttttgtggaacataatctctgtgtattccatcatatactctaaaaaatgaatactataagtacatatatatgtatatgacaatattatatatactaaaatgtatgatatcatttacattactaaacagcagtggaattaaatacaattggctgcctcagttcttttattaatagttctctgctacttttttaggcagtcgtaagccccaagatgttaattatgtatacatttctaggagaaaaaccttaacattgatagagttttattcctgcatttaatatatgttggcttgctggtttgttttctgataatttttaaagactgccagttttctgcagaacacattggtctactttgcagttgtagcttctgtgaaaacctggctgaggaacaatgaacaaatatagaaagcagtgaattcctaaggaagagcggagatgtacatttgaatattgagtaaaatcatatagaattttgttattgatcctttgtcttttggagcctatccctacatttcagcaatttcacttgcatcctgtggctatgtctgaaggtggcttccacatatgggagtttgagagccccttcacctttaaattaatgtctctgctcacctgaggtctcaaacacacccctttgggagcagcctgaccaacccccaaagtcattcagtcaacagatatttatttatgccttttgggtgctaggcacaggtcccagcacagggctgggtactgaatacatggtgagaacaaaaaagacctggcccctgcccttggagaacttagaaacatttttaatagcaaatacggaaatgtgtatacaattatatgtatattatacaatcataagcattacgaaggaaaattaaagtgtattaggaaataaatcaaagatggaatcttctcagagtgaaatctcagagaaacttccctgagaaaaataaatgaattagaaatgggaccctaatttgggtgaacatcagaattctgccttgtgcagtgtgaagattagcataaaattgcttcccctgtgtgg

SEQ ID NO: 84085 - DNA, 1278 bp, Homo sapiens
attccaatggactttttaaactcacagactcctttttacaatcttgtggaggctaccaacctttccacctataaaaggcacacatacacattcacatacaacttttcacatagtttcccagacctctttaaattgttcgtggatcccaggctaagaagtcttgaagggcgtacatatacatttgtrttcatagttctcaagcccatacaggtggcagtgcatctgaacattttgataatttttgtggaacataatctctgtgtattccatcatatactctaaaaaatgaatactataagtacatatatatgtatatgacaatattatatatactaaaatgtatgatatcatttacattactaaacagcagtggaattaaatacaattggctgcctcagttcttttattaatagttctctgctacttttttaggcagtcgtaagccccaagatgttaattatgtatacatttctaggagaaaaaccttaacattgatagagttttattcctgcatttaatatatgttggcttgctggtttgttttctgataatttttaaagactgccagttttctgcagaacacattggtctactttgcagttgtagcttctgtgaaaacctggctgaggaacaatgaacaaatatagaaagcagtgaattcctaaggaagagcggagatgtacatttgaatattgagtaaaatcatatagaattttgttattgatcctttgtcttttggagcctatccctacatttcagcaatttcacttgcatcctgtggctatgtctgaaggtggcttccacatatgggagtttgagagccccttcacctttaaattaatgtctctgctcacctgaggtctcaaacacacccctttgggagcagcctgaccaacccccaaagtcattcagtcaacagatatttatttatgccttttgggtgctaggcacaggtcccagcacagggctgggtactgaatacatggtgagaacaaaaaagacctggcccctgcccttggagaacttagaaacatttttaatagcaaatacggaaatgtgtatacaattatatgtatattatacaatcataagcattacgaaggaaaattaaagtgtattaggaaataaatcaaagatggaatcttctcagagtgaaatctcagagaaacttccctgagaaaaataaatgaattagaaatgggaccctaatttgggtgaacatcagaattctgccttgtgcagtgtgaagattagcataaaattgcttcccctgtgtgg

SEQ ID NO: 84086 - DNA, 1278 bp, Homo sapiens
attccaatggactttttaaactcacagactcctttttacaatcttgtggaggctaccaacctttccacctataaaaggcacacatacacattcacatacaacttttcacatagtttcccagacctctttaaattgttcgtggatcccaggctaagaagtcttgaagggcgtacatatacatttgtgttcatagttctcaagcccatacaggtggcagtgcatctgaacattttgataatttttgtggaacataatctctgtgtattccatcatatactctaaaaaatgaatactataagtacatatatatgtatatgacaatattatatatactaaaatgtatgatatcatttacattactaaacagcagtggaattaaatacaattggctgcctcagttcttttattaatagttctctgctacttttttaggcagtcgtaagccccaaratgttaattatgtatacatttctaggagaaaaaccttaacattgatagagttttattcctgcatttaatatatgttggcttgctggtttgttttctgataatttttaaagactgccagttttctgcagaacacattggtctactttgcagttgtagcttctgtgaaaacctggctgaggaacaatgaacaaatatagaaagcagtgaattcctaaggaagagcggagatgtacatttgaatattgagtaaaatcatatagaattttgttattgatcctttgtcttttggagcctatccctacatttcagcaatttcacttgcatcctgtggctatgtctgaaggtggcttccacatatgggagtttgagagccccttcacctttaaattaatgtctctgctcacctgaggtctcaaacacacccctttgggagcagcctgaccaacccccaaagtcattcagtcaacagatatttatttatgccttttgggtgctaggcacaggtcccagcacagggctgggtactgaatacatggtgagaacaaaaaagacctggcccctgcccttggagaacttagaaacatttttaatagcaaatacggaaatgtgtatacaattatatgtatattatacaatcataagcattacgaaggaaaattaaagtgtattaggaaataaatcaaagatggaatcttctcagagtgaaatctcagagaaacttccctgagaaaaataaatgaattagaaatgggaccctaatttgggtgaacatcagaattctgccttgtgcagtgtgaagattagcataaaattgcttcccctgtgtgg

SEQ ID NO: 84087 - DNA, 1278 bp, Homo sapiens
attccaatggactttttaaactcacagactcctttttacaatcttgtggaggctaccaacctttccacctataaaaggcacacatacacattcacatacaacttttcacatagtttcccagacctctttaaattgttcgtggatcccaggctaagaagtcttgaagggcgtacatatacatttgtgttcatagttctcaagcccatacaggtggcagtgcatctgaacattttgataatttttgtggaacataatctctgtgtattccatcatatactctaaaaaatgaatactataagtacatatatatgtatatgacaatattatatatactaaaatgtatgatatcatttacattactaaacagcagtggaattaaatacaattggctgcctcagttcttttattaatagttctctgctacttttttaggcagtcgtaagccccaagatgttaattatgtatacatttctaggagaaaaaccttaacattgatagagttttattcctgcatttaatatatgttggcttgctggtttgttttctgataatttttaaagactgccagttttctgcagaacacattggtctactttgcagttgtagcttctgtgaaaacctggctgaggaacaatgaacaaatatagaaagcagtgaattcctaaggaagagcggagatgtacatttgaatattgagtaaaatcatatagaattttrttattgatcctttgtcttttggagcctatccctacatttcagcaatttcacttgcatcctgtggctatgtctgaaggtggcttccacatatgggagtttgagagccccttcacctttaaattaatgtctctgctcacctgaggtctcaaacacacccctttgggagcagcctgaccaacccccaaagtcattcagtcaacagatatttatttatgccttttgggtgctaggcacaggtcccagcacagggctgggtactgaatacatggtgagaacaaaaaagacctggcccctgcccttggagaacttagaaacatttttaatagcaaatacggaaatgtgtatacaattatatgtatattatacaatcataagcattacgaaggaaaattaaagtgtattaggaaataaatcaaagatggaatcttctcagagtgaaatctcagagaaacttccctgagaaaaataaatgaattagaaatgggaccctaatttgggtgaacatcagaattctgccttgtgcagtgtgaagattagcataaaattgcttcccctgtgtgg

SEQ ID NO: 84088 - DNA, 653 bp, Homo sapiens
tcatgatgttgtttctgcaatacagacggttgctaccaccatggaattcttcagggatccacttgggtaattttttttgcagaatttctcctcaactcaaattgatctcaaaatcgcagttggggttgtctcagactacatgaacttacatgaattctccaaattattcctcatgaatgtccaatgatattacatctgatggtgtggcaggtgccaggtgttgcasatgccaggagtcacaaacccttaggggacttcatccaagtctcaaccctgttgctaatagttgtgtgaactgggtcaagtctttaatttctctgaacttctaagtttcatcttgttcagtgagatgatctatgtacaggatctagcatagcgattctcaacagaaaatcatgcttccttgtaccttttgctccataagaagagcacacataggcatctggggactggcatgttgtgggtgaggaagggggtcacaaggagggagagccatgcagtctgaaagaagaacattctaaaattgccattgtgttggctttgtcacagttgcaaatacttaaggccttttaaaattgtaaatgaaattaaaataagttttttaacttttattatgtcaaatgggagtttgagttaaaaaattaaaaaaaaac

SEQ ID NO: 84089 - DNA, 1145 bp, Homo sapiens
cagtccatctgttctcataagggtctatgagaaacagagaatcccatatataaccttatcaaaaacaaaagtaaaccctttcaactcagagtagtttcctgactatttttggagtaataaatttccaacccgtgcgaacccttagaaggatgcctttaatttacgggcagaggttgcaatagcatgtatcaattctgtctttaagaaaaaaacaatatgttctgtgtatgtgaaacatataagaacacatgaaataagtataagctaatgggaagtctaataagattaggaaactattaaaagtttatcttattgtggtcatttcatttacaattctatcaatcattataaataagatataaaataaaagtaaaacctgagaataaaaactgggagccaccaggatccagtctatgcaggaaaccatattcaaagaaaacacaaatcccatttcattcacttaggcttccttgaagagacctccctaaggatttcacaaagcatgccaacatcgaaagtacttcctacattcttttaaaatatttcttcccatccccgaactttcactcacatcagcaactaaataccttycgtctctcttcaaatgcagtttcctcacaacaattatgcctccctttcccttttgtctcttactttcttgtacatgttcacattatccccattcctaaagcacccagtgccatgtgacctacccaccccaccccaccccaccacgcaaactgcatgcacatcttttggaagttcagtttttcttccactctggcaacatctcagactatcagccccctttgttccaacgaagatgaataaaattttatggaatctctctgtgtgagtgtgtgagtgagtgtgtgtgtgtgtgtgtgtgtgtgtgcatgtgcagactggaaataaaataaagtaaggttgtaaaagatttaaacaacataatcattatgttaaatatgaatctattgaactctataccctaatagtagagaacacattcatctcaaatgcccatggctcatgcatagaaattcatcacatataagtcacaaataaaatatcagtaactttaataaaggaaaaatattacaaacaatactctctgatcacatttaataaaactagagtttactatc

SEQ ID NO: 84090 - DNA, 462 bp, Homo sapiens
attgaggtataaagaaaagaataagaattaagtagtatatataatctccatcttttatgatcttaagtggagaaaactacgtgctaattttatctaaagctgaacagtgaaccatatcaggttattagacaaaggagccctgagctattaattacacagaatttttctatccaatgagatatgcaggtatgaaaactgtcatatccattaaaaagaaaaccaccccccttccaaccaacccacataatttcaggtttgcaccaaatatgctcccgtatctgagagcagaaaaaaagacaaagacattaagaaaaaacaaacccctatatgcataccttcgcaaagaataaraaatgctccaaagaaaaaaattaaagatagtgaaaatttgttatctctgtgagcacatggataacaaaaattgagaaagggaaaaggacaggccaggcacggtggctcacg

SEQ ID NO: 84091 - DNA, 1156 bp, Homo sapiens
ggtgacttacaaagatgtatgtataggataaggggaaataaggataagtatttcaggattctttgcttctactgagagaaaaccctacttaaactggaaataaccaagcaagcaaaaaaaaagtgaatttattgtaacttcatattattacaaaatataacaatggggctggcttctgataaagatttaacagtggcttaaatgatatcaccaaaatctcaaaatctgtctgcttttcagatctgccttctactttctgccttctacatgaaccccattgcccattcattgtttcagattttctggaaaggctacggcctaattcttccatattttcaagtatcacaattcgcagactccaaatgatactgaggctgaccatgttttattcttaaatatgataaattacagagagaaatgttgttatttccaaggcattgttctgtgttgccacctgttataagctgcaaatctgcgtgtcagttaaggctcctttctggtaatcagcttacactgtgtttactaagtgcaaagctacattgacatagttttcacactattattatgtgtatttaaattattacctttttttaatacacctaccaatattttccataacttaaggtgcctttgggtaatattttattttttcttaattgcagctggtttgtaaatatttgaatcacattatgggattgctagacagactttcagtcttgcttggcctgaagaagaaggaggttcatgttttgtgccttgggctagataatagtggcaaaacgacgatcattaacaaacttaaaccttcaaatgtaagtatctttgttagatgctttatgtattttctgctactaaagaaaattaatgtgcagaattatgttatatgacgttaaaaccgcatataatcacattaagatattctgttaacctttcagtacctttaagtatcctcagccataatttgcagtatattttayacagtaaattttaattattaaactggaatattattttcaaatgtcttttctttcaaaagttcttcacagatttactgagtttactttaaatgtcattgccttctttttagtttcctccttacaggaggagcaaaacagagaaaggtgaaacatttttataggttctatggataattaga

SEQ ID NO: 84092 - DNA, 2125 bp, Homo sapiens
tgcatgagagaactgtgctcagtaaaaaacagttcacagatagactctgaggtcttaaaaattctccaagcagaaacaggacccagagagtacctggttaaagtccttcattttacaaaggggaaaatcaagatccaggacttgtaatgagttctcctaatgccccaagtcagtgtctgcccaaaggtctctggtttttagggtatccttcattatcaagttctcttgctttaggcttctggaaactagccaataactgtagattattaataaagtaatataacaggaaaatcaaatgcttcctacacaacctttcactgagaaatgaaagcaaagcctaaggaaatgccatctgactaatttctaaccaatgcaaatcttctctcttagtcacccctaacaaaaatgtcaatgttctayaagcacagtgagaggtgccaaggcccaaggcagctttttagatctgctctgcctcacagaagggtctaggatctactgcacagtggagtggctcagagttgcacttgtttattgggcaaatagagaaaatccagaaccttcaacaaacaccctctttcttctatgccgtggagggttttctaccattatctgtggcatatttgttaattggttgcctttattcatgttcctgcttcttttcctcttcaagcctcaatgttgtcatctctaaaatagagtgattgatattggcagtctttttagccttggcattctttgaccaggattctccaaacagaaacaagatctagagagtacctggtcctgtttctgctgtacagttagttctcaacttcaaaggataaatatgatttgctgagcacattacttaggatctaccatgcatgggaaattagataatcatttcagctcctaattgcatcctctattgtcctgagcaagtataagatgctggtgaatcctggagctaacacttaggttttctgttccttaggactgtattgtctgctagaccatttattcaaagtgggaggatgatgttctaaaagccaatgataaagctcatggcaatgcagggtatatctgatggcatggaatgctttaggatggccaagattgcccatcaaatgccaagtcaccgaaggtactcatttattctaaaaatatccactaagcaaccctttctaatatgtgttgttctaggttctgggaaataagaaatcattagaaaaagatttctgccttctagaagtacacagtctaatggtgagataggcaggtaagctattacaacacagtgagatatgcacacgagtaaagctgtttttctttggtgtgctcacagtaaagggtataactaactccatctgtgggcttcagaaagggcttcccagaggaggatatttgaactagctcttgaaggatgagaaagagtttgcttcatagagataaaggagaggataacagcaggtagcaaagcagcagtacacaaaggtactgagtccaggcctggtctcctttggaaatggaggaggagtataagagaattttgtggtaacatcagtaaggaaaaagatgaaggagggagagtagaaatgaggctggatgggcggttttggaggccaactgaggagggtcttacatgctatgttaacaggcctagacttcattctatatgcaaacagggagatccggactaatgaggggtatgtgtgtgtccttgtatgtgcatgtgcacgaaggtgacataatcaggtatgacttttagatgatacttggtgacaaaggaagggtggagaatgtaaactagagaagcctgggataatatggctgcttgggaatggtgagaattctggcagctgcattgctgatgagtaaagtggagggaagctttggaaaagtgtttagggccaatcagtagaaggtcatacattcatactaaagggtttgtttcaataagtatagctaaagaatcccactcatagctttttttcctgtggtttacatgacagttattaatggctctcctactaggagcctgacatcatggtgagcatcgagaaaggaataacctaagctgaagacacgccttttcaggaggccaagttccacgttctgtgcatgcttttggcgaaagtcaggtaaa

SEQ ID NO: 84093 - DNA, 1020 bp, Homo sapiens
catttttaggtgagctaacaaagcaaacaccagttattcaggcaatgagcctaaagagacctaaagtacagagggtaagaaacagtgaaagctaaaatatagatgaagaggaacttcaacatggctgccgtgtgagcttcctgctcccttactggcatttctttgatatgggattttcaaagcaggtgctgttcttattgcaatcacattgtcacactccattatgaggaagcaattaagcccataataagttaaaaggtgatgttttgtatttttttttaaatctcacataattgttgatttgttagcttttgaaaacagataggaatttttcaattacaccctgcaaaataccttttctcattctgagtgtttaaaggcaaatatatcttggatccagtgcttttgtgtttacaaatctggatatgatttagtaagctttaaaragatagtaagcacacagtaaggaaatcagatttacataattttctgcttgcttacagaacacagcagttgagattatcttttacatttgggaagactgttttaatatgataagatgaaataccacctacagtacgcttgatcttgctagtttgactttttaaaataaattacaggctgatttgtcatcgtgacttttaacataaattgctattataatctaaaggagcaattctaaaggagactgcctttttacctcatctacataaaaagatttaggttatttctacatttattcttttctctgtgcaatttatttgctgtaactttacatggcaggaacaacaaaaatctatgttttgctcatttcatccattcttctattcatgctgataagtagcaaatagcagcttaaatggagaaatggcacaagtaaaagaaatacgtccactttactttttgtatataaaaaagtgttctttaaggggaggtgtgtgcctttttctcccattggaaacataattaaattacaagtttggggaaataagatgagctaaggcattactcattatcttc

SEQ ID NO: 84094 - DNA, 650 bp, Homo sapiens
aaactgattttatcagaatgcctcaataaaaatttgacactggagctcaaggtcttatatcaagtaccttggtcgtgtaaagggttttacattggacaccagctacacggaraaaaggggatgtgggaggattgccttggtactcaatacagttccagctcctgatttcagtccttcagtgaggctcagctgtacttgcacccctttagttccatgagcttctctcattgcctactgataaattaccatttttgattcaggtacttggagtggcatatgttatgtgagccaacataaccctgattaaaaccaaaatgaaatggtagcaacaaacagaggaaaaaaatctaagcctaataaaatattatattggctctgagcaattttcgtctcttttatagctttttaaactgtcagaaaaactattccacttattcatattatgacagagcttgaaaatttgatgcaattaagtaaggaaaaagctgcaaggagaaaagtcaaaggaaaaattaccaactcaggttgattaaggatatccaaagagggaattttatcacaaggccctttgaaatctcatgatgcctagaatttgttagtaaatggtggattagatttgcattccgtggaattttataggcaaatatcac

SEQ ID NO: 84095 - DNA, 1075 bp, Homo sapiens
acagccttgtttttcttgggacagtagaaagaccacaaggaactttctaactgtgtggcttagctgcccgaaatcccttttggaagaagtcaggctataaatgaataaagcaagctgtgtgaccttgggcaagttaatttcagctctccaagcttcattttcttgcattgatctgtaaactgcagatacatcaatactayctaccctttcagggttggctgttgattcacggtttgcatgaactagagcttgcccatgtctgaaacaccagctcctcactgagcctttaatgcctaccctctcccccaagcagactagaatgcttaggaaaaagagttttgtatttcataattatatccattatatcctctgcaggcctactactgtgaatggaataggtaaatcttctgaagacacaactatgttgactcacaaataaatgcttagtacacgaagtctttaaattgcagaaatggtgttaacctggctttgaacaaagcaaacgacaggctccttgtaggtccaaactcagacgatctccagaccatgctactgggtttctactgtgtcacagttgcacagctgactttctcactaaatattggacttctagaaagcatgacatgcttttttaatcttttgtacctgttcacatagcagcttaatgtttgctgaataaattaataattgtatacaaggatgctagcaacaagtatcaggtcatttaactattgttatgaataatttcagacataaatgtaagggaaaaagaataatataatgaactcctacatacatcatcacctagccgaatcaattactaactcatgaccaatcttagttcatctatattcccacccttaaaattattgtgaagcaaattccaggcagagtacagatctttagagcttccaatgattaggtttgactctgctctagaattctagataaatgtatctctgtcatatcaagaaaaacttacagaatactgcatgacaatcaaaagaattcatcactatctggtcaagaaagaacaagatataaacaaaagcaaaagccaaaccctgctcccaaa

SEQ ID NO: 84096 - DNA, 740 bp, Homo sapiens
actaaccttaccatggctccatcttatttacctacccctattttcccttagccagaatttctctgtttaaaaaaaaaggttgcatttatttttataagctgatttgaatacttttttataaaaggataaagaaggaaggaaaaggagggagagagggaagaaaagagaaaggaaagaaaagtatctccattaacccttgaaccttactatgctctgaggcattcagtccaacagcatatcattatgtaaacactgtagtagagcaaagtgtgtaagaacataagcktaaaagtttgacttcagggggttcagctctcagctctgtcacttataggtatgtgacattggacaagttgcttgtgtcttttgaaaaccttgaaggaagaaatctaaaactattttccatattgatattcagaaagtttttgtatattttgccttcctgcaccctctaattcataagccacatatggaggacttggttttctcaactgtaaaatggaaataatactattactttcctcaataggtgtaattaagctaattacattaaagttcttagagcagcctctacacataataattatgtgttagtcatttgacaattattccttgaacattccaagaagtgagctaaatcttgggaatatgaaaataaacaactcacagtctctttatttaagaatttcacaatctagtgcaagacatgctaaacaaataattttaacatagtttggtat

SEQ ID NO: 84097 - DNA, 854 bp, Homo sapiens
gggaaagtgtggcatgctgtgctgactgctgcattctgcaggtgtctgaggcctactctactgmccttcctcctgcactgtcccttcagccccctgtggtgacaaagcttaacattgtgtcagttgtgaaggagaatgcttacagagtctagctccattatcacagagcaggcaatacagggtgaggctggagatgagacacagtaaaccatggaggtcacatcattctacagcgtgctcttccccataagcacatgcacgtgtcaaagtcaaaggagggaaaaagagagtagtctatctctattattcccaagagttttgtttcccatacatgcaaccttatgcttgattggtttagatgtccaagggatgactgctgtaatcggaatttgcagtaaaactttcattaaataagaatctgaaactccttcctaagcatttattccccctatgatattacatcaccatgaggaaaggaggggcgctgtgcttgctggggtgattggctgtgattatcaaggggaaattctgttaataaaacgccattgtcaagagacatacatgtcaagaaagacaatgtgtgaaatccaaggaatgcactttgctgtctcttagaaatctcattccccaaaatatcagtcaacagaaaattgtggcaatccaataaagaaagatccactaaggatatgagtctcatgtcaatcaagccctcagccacagcaccaggaagaaattccaactgactgagaggctgtccgaggggctggggaagatgaaatgagtgatcatagaagaaggctatggtttgttaaatcattcctcccaatagctacataagcagtaatcagaatgca

SEQ ID NO: 84098 - DNA, 1009 bp, Homo sapiens
gcatacctaactaaaatagacagcatacattcattcatacatagacattttttactgaaaatatcccttattgtttcagaaggttttttccatatactctgacacatctttcagttaaaatgtgaaacagtttcacttgttggcttattgagagtgcacacagttcttttcaacaatgttgcatgatttcttattatctcctctttgaacaggaatgttaattgaaatggtgatcgcatttgtgtaatttcaatttgttcgcttaaggtattattcacttcctcattcaattattcagccattgagcattgtttgaacctctacaatgcctaccatgctaggcattcagagaaatatgaacaagttaagggtcctgtccttaagaggcgtagtctggagaaaggagatcaactgtacatgaccaaggaccattcaattctttgagagtgggagggaagtttgcacagagtacaaaagaaactcttctacgctgaatgcktccctgatccccagtctcctaaaacttgatctcgaattccatcagaggaaagatcaagtttcaggagcttggggatcaaggaagcattcagcatctctgatgctcaggaggaattctgaaagatgagggttagcggtcagctggcagaggacaggacatgtccagagaggccaacaggtgtatgcacagggcaggatgcagcccagcctgtgacaagtaaatgcacagggcaggatgcagcccagtctgtgacaagtaaagggacagggcacgatgcagcccagcctgtgacaagtaaatgcacagggcaggatgcagcccagactgtgacaggtgaatgcacagggtaggatgcagcccagtctgtgacaggtgtatgcacagggcaggatgcagccaagcctctgacaggtgaagggatacacagggcaggatgcagcccagcctgcaacaggtgaatgcacagggtatggcacagcccaactgcgacagttggatgcacaggacagg

SEQ ID NO: 84099 - DNA, 780 bp, Homo sapiens
tcctgtctactcctttttcttttgtccttgcatcttattttttattctcatgagttaccagagtgatcctgataaaaaataaaaaaacaatattattaacatgttcaaattctccagtgttctgcatraaaaccaaactacttccaatggtttaagactgtcataagaaagaatggttttttaaaattccaatagaagacgtttttctaactgacagagagaaagctttatgtaaaaaatgaggatttaggtttttctcttaggatagtatatatccttcctcccaacccctgtcaaccagcagtctattttctgcttctgtaagtttgactattttagatacctcatatctaacctctaacctcataaccaaggctcaaaatcgtggtgtcatgcagtgtttacacactatgaaattcagctagcatccttcatagtagaattcactgaatttgagggccaaaaggtaaggtaagccaaagtgaaggaggagctgaagatgacttctggtttctaacattccaacatttcagtccatcattttagaaaacaactttcaaacacaaaatattatccaagaaaaaacatgactaggtatgtacctagcatttgtaacttacaatatatttttaatatgaaacccatgtgtcatgcagtagagaatccaaactttgctcaagtcaagatatattacacctgtcactatcttcccatctttaaacagaatcaccctgtcatggaagattagattcatcaggtagaacatgttcccttggaaaa

SEQ ID NO: 84100 - DNA, 667 bp, Homo sapiens
agtcacatattaagatttatgaagcataattttccaaacaaaattttgcctgttggattttccttgactcatctctgaattctactagttttagaatagacaaattggaaatataaaaatcccttctccccttcctaattagtatgacggattattgaaatgagattgttccatcacagtagagatgatgccattgcttttaattaaccatacagggatttgagctggtgggaaaaaaaaaacataaaaagagaaaaatccctaacatattcatttgcctggcttgatgactaaagaagtccaagaaatagcatagctgtaggcttacctttactcttgagttcctaawacaacaacagatttatacatacccctttgcgtatttataatggtgtttccatgacatggggctgatgaaaacatggacagaaagtgttagaatcacaaaattcttcagcaccaaccttgcttccactgtcttcttggagtacaccattcattcttcagaaagtttaaatcatcatgttggtaggtgatgagtcattttccattattcatgattacattcttgtacgcaaacaccctcaatgcgccagcatttgttttactcactgtgatagagaccccagagcaccacacttgtggctctaggcccttccaaagcatt

SEQ ID NO: 84101 - DNA, 667 bp, Homo sapiens
agtcacatattaagatttatgaagcataattttccaaacaaaattttgcctgttggattttccttgactcatctctgaattctactagttttagaatagacaaattggaaatataaaaatcccttctccccttcctaattagtatgacggattattgaaatgagattgttccatcacagtagagatgatgccattgcttttaattaaccatacagggatttgagctggtgggaaaaaaaaaacataaaaagagaaaaatccctaacatattcatttgcctggcttgatgactaaagaagtccaagaaatagcatagctgtaggcttacctttactcttgagttcctaatacaacaacagatttatacatacccctttgcgtatttataatggtgtttccatgacatggggctgatgaaaacatggacagaaagtgttagaatcacaaaattcttcagcaccaaccttgcttccactgtcttcttggagtacaccattcattcttcagaaagtttaaatcatcatgttggtaggtgatgagtcattttccattaytcatgattacattcttgtacgcaaacaccctcaatgcgccagcatttgttttactcactgtgatagagaccccagagcaccacacttgtggctctaggcccttccaaagcatt

SEQ ID NO: 84102 - DNA, 675 bp, Homo sapiens
aataaagagctgagtgactgcagcaagctttacaaaagaagttaacttaagcagagtttggaaggttgaatacaagtttggcagctwgataaggtgttaggaagggcactctaggcagagaagacagcacttgtgaaagtgctaagcagctgaatacacagatggacaatggccgaaccatatacaaaaataaagttctgacttgcaattggcagcaatcagtccagaatgtcaaccaattatctgcagcaaccaatccagaaagccaaacaaccacccctgtaactatcagcctaaactggccaggttgtgataaataactgatagtttccccaacttccaacaactagagaaagcctaaattcactcctaagcaatcacatgggttgccctacttgtaattagcccaactccagcttccctgtgccttcagtcagggaatacctaataccttaccttttttttccattatacagctttctactcctctgtatgacaaatgtaagtgatggtggctgactctttgttatagcaaactccgaataaatagcctttgttttttctcattgggtgatattctttctcatagtacagagacataaaacctagtgttttgtgtaagtaattagtagtagatacttattgtaggtggtgtgtttgtgtgtgtgtttctgt

SEQ ID NO: 84103 - DNA, 675 bp, Homo sapiens
aataaagagctgagtgactgcagcaagctttacaaaagaagttaacttaagcagagtttggaaggttgaatacaagtttggcagcttgataaggtgttaggaagggcactctaggcagagaagacagcacttgtgaaagtgctaagcagctgaatacacagatggacaatggccgaaccatatacaaaaataaagytctgacttgcaattggcagcaatcagtccagaatgtcaaccaattatctgcagcaaccaatccagaaagccaaacaaccacccctgtaactatcagcctaaactggccaggttgtgataaataactgatagtttccccaacttccaacaactagagaaagcctaaattcactcctaagcaatcacatgggttgccctacttgtaattagcccaactccagcttccctgtgccttcagtcagggaatacctaataccttaccttttttttccattatacagctttctactcctctgtatgacaaatgtaagtgatggtggctgactctttgttatagcaaactccgaataaatagcctttgttttttctcattgggtgatattctttctcatagtacagagacataaaacctagtgttttgtgtaagtaattagtagtagatacttattgtaggtggtgtgtttgtgtgtgtgtttctgt

SEQ ID NO: 84104 - DNA, 675 bp, Homo sapiens
aataaagagctgagtgactgcagcaagctttacaaaagaagttaacttaagcagagtttggaaggttgaatacaagtttggcagcttgataaggtgttaggaagggcactctaggcagagaagacagcacttgtgaaagtgctaagcagctgaatacacagatggacaatggccgaaccatatacaaaaataaagttctgacttgcarttggcagcaatcagtccagaatgtcaaccaattatctgcagcaaccaatccagaaagccaaacaaccacccctgtaactatcagcctaaactggccaggttgtgataaataactgatagtttccccaacttccaacaactagagaaagcctaaattcactcctaagcaatcacatgggttgccctacttgtaattagcccaactccagcttccctgtgccttcagtcagggaatacctaataccttaccttttttttccattatacagctttctactcctctgtatgacaaatgtaagtgatggtggctgactctttgttatagcaaactccgaataaatagcctttgttttttctcattgggtgatattctttctcatagtacagagacataaaacctagtgttttgtgtaagtaattagtagtagatacttattgtaggtggtgtgtttgtgtgtgtgtttctgt

SEQ ID NO: 84105 - DNA, 675 bp, Homo sapiens
aataaagagctgagtgactgcagcaagctttacaaaagaagttaacttaagcagagtttggaaggttgaatacaagtttggcagcttgataaggtgttaggaagggcactctaggcagagaagacagcacttgtgaaagtgctaagcagctgaatacacagatggacaatggccgaaccatatacaaaaataaagttctgacttgcaattggcagcaatcagtccagaatgtcaaccaattatctgcagcaaccaatccagaaagccaaacaaccacccctgtaactatcagcctaaactggccaggttgtgataaataactgatagtttccccaacttccaacaactagagaaagcctaaattcactcctaagcaatcacatgggttgccctacttgtaattagcccaactccagcttccctgtgccttcartcagggaatacctaataccttaccttttttttccattatacagctttctactcctctgtatgacaaatgtaagtgatggtggctgactctttgttatagcaaactccgaataaatagcctttgttttttctcattgggtgatattctttctcatagtacagagacataaaacctagtgttttgtgtaagtaattagtagtagatacttattgtaggtggtgtgtttgtgtgtgtgtttctgt

SEQ ID NO: 84106 - DNA, 675 bp, Homo sapiens
aataaagagctgagtgactgcagcaagctttacaaaagaagttaacttaagcagagtttggaaggttgaatacaagtttggcagcttgataaggtgttaggaagggcactctaggcagagaagacagcacttgtgaaagtgctaagcagctgaatacacagatggacaatggccgaaccatatacaaaaataaagttctgacttgcaattggcagcaatcagtccagaatgtcaaccaattatctgcagcaaccaatccagaaagccaaacaaccacccctgtaactatcagcctaaactggccaggttgtgataaataactgatagtttccccaacttccaacaactagagaaagcctaaattcactcctaagcaatcacatgggttgccctacttgtaattagcccaactccagcttccctgtgccttcagtcagggaatacctaataccttaccttttttttccattatacagctttctactcctctgtatgacaaatgtaagtgatggtggctgactctttgttatagcaaactccgaataaatagcctttgttttttctcattgggtgatattctttctcatagtacagagrcataaaacctagtgttttgtgtaagtaattagtagtagatacttattgtaggtggtgtgtttgtgtgtgtgtttctgt

SEQ ID NO: 84107 - DNA, 451 bp, Homo sapiens
atctccaggtagatggtgtaaaaattgagttaaattagaggacatccagttgctgtccactgaagaatctgccggagaattgctttgtgtggggaacgtcctcccgccccaacagacaatggagtcaggattgttgagtgactgtgaaagagagtaggaaataatatcttggtttcttctatctttagtttacctcagtgttttctgtttacatgtattcaggggtggattcacatgaagctcacacaagttaaaaagccaggcatggttgcatgtggctgtactcccagctactcaggaggctgaagcacagacatcacgtgagcccaggagttcgaggctgcagtgagctatgattgtgccactgcactccagcctgggtgacagagcaagacggtgtctcaaaaatattagataagtaaataatacaratgagcacagggccttggaa

SEQ ID NO: 84108 - DNA, 546 bp, Homo sapiens
accagagcgaggtcacttggagattgtctttgacatagaaatcccactgagtggcaagaaaacagtcatcagaacacactgaatcaacccctaacccaccctcacctcctacctcccagcctgagccctcgaggactaggtcttggcactggctctccagactaccagaaacaatcgagtccccctggagagctgttccggttgagcctggcggaggtgggcagaggtagacaagaagtctgcctccaaaatgaacacaccctttctctcttccctgttcacgactgcccccacattgtccaagtttctcccccacctcaaggagccacagtgctatagaagcaacattttaaagttgccatacaggggagggtcctatctgggtctaagctgagggtgggtaaaaagamgaaagtaacaaataacctaggatgcaaataataagcgaccccatctcgccactagctgtaaaatcccacttctagtcatgatgcaggggttaaaagcaagagaaggaactccacatgaggtctgatagtccaggct

SEQ ID NO: 84109 - DNA, 745 bp, Homo sapiens
gtgagctgaaaaccttcacttagttgcttgtgggattttttttcttcttttgccaaagaaataaatagaatcaaatgtttacatatgtgtgttatttgtctacattgattttgtattttctcaaaggaaaatattgatttctgagttataaacatgggtaacttcactgatcagaataagttaatgacaggcatgtcagtgaaataatcaaggcacaaaaccaccatayatttctgtttaactgcctatgtagcctttcaaagacgtgttaaatagtcttcttttaaatagataaatttataagaaataattctatcgcacagattttaatgtcggtggcatattccatctggcttacttttggcactgaggagatgatattaatctttgctaattgtacttcgtactcactattgcctttagtcaatattatcttgtgtgcttctaaatagactccaggatagtctaggcataatagacattgtttctgtgcctgaagaacaatttattactctgggagtaaagggggtggtgggttgggcttcagggatgagatctagacatataattgttttaaatatataactacagtatagcctatgtaggtttttgaagatatgtctggaattgtgtttgtagtgtgaaagatggatggattcatcagggaacactaagggagatggaactacatattgaaatggaaagatggaagagctgatataaaaatggaggaagtgtctggttt

SEQ ID NO: 84110 - DNA, 616 bp, Homo sapiens
tgttcaagagcagattccgatttggcaggttgggggcagggcctgagtctctgcatttccatcaaactcccgggtgatggtgatgcggctgctgctgggccacaggtcacactttgagtgccaaggctatgaaaaacaatgcagacagcaacgtaaatgtgatttttaaataaccctgtcataaattgctttgggacatattttggattttccaagattgttggattgttactcagctgtcaggattctctagatatcagttgtttttcttggmctgtgacctttctgggtctccagctgttcctctataaatccaaggggttgaactagaagatctctgaagtcctttccagatctcacagtctatgattttaagcatccatgtcaaaggagaattatggtttcatttgcattttctttttgtataaacctaataaaacatgaacccaaagttttatgctacaacagttcttaacataatgttaaaaagtaacagtaaacatgctttactaaattttggatgattcaggaagattagtgtcaacattcaaaggtttttccatgttgaagtcttgaagagaaagggtgggggtcttgtttaactttatagttggaa

SEQ ID NO: 84111 - DNA, 642 bp, Homo sapiens
agaaacaatggagaagacggtcatttggtgtccctaacatgggccatttccttgtggttctctggtgttgcataactctgtatctttttgcagcccttatgaagagaaggctcagtggggtggtgaatactggtctaggtgcctagggggctgacctcgtattactgacttagcgaacccttgccttggstcctcgtaattttgtctttctaggcttcttcctgatctttcccagttttctcatatgtcctgaataacatgtgactcataactggccctctggagactttgaggagcattttgtaataactgtgcctacattggtcacctctgtgaaatcggttgggggctttgaactattgaatcatttgtttttatgttgggccacctaagagggtgttggctacactaatacataaggctttcctttcccatgtggttcctggctcctaacttcttgtgatacctcagagtatatccccctaaaatttgttttgaccacccaactgccagctagaaccaagactttgatatcctgggtggcaagatttaataagtagattttattaattcctagatgataaaacttaaatctcagatgcatttaaaaatgtgtcatgtattattttaggcatgtgagct

SEQ ID NO: 84112 - DNA, 609 bp, Homo sapiens
ggtgacaagacaggggccctggctctcatcaaaatcacgtttaaaggagttatatagaaaataaaaagtaaatacagaagataattctacttatatgttgcaccacacacaaaataaaataaaaccaagaaatgtgatagtgattggtggttttgtgggccacttgagacagcgaaatcatctcctctttacagtttggctgagacctgaaggaagactgtccatgtagtgacctgggggaggggatgaggaagacatttgagggtgaggtagcagcaaacacaaagttatgacatgggaatgaatttgatactttgaggaacagaatattccagtgtagtgggaaaattgtagctagaaggaaagttgctctaagaaagactggggaggtagaccaggacacacrtaccggctttactcagagtagcatcattatgaggataagatgagacagtggaagtgagaaccctggaatgagaatgtatcttgggctgctgcagaggctcataaatagccctttacttctccactttccaacagaaaagaacatctaaacaaaagcaaaaaatgaaacgaaacaaagcaatccagtatctcttcccagttgga

SEQ ID NO: 84113 - DNA, 1285 bp, Homo sapiens
tgagcttcttcatcttgtgtatgtgttatgacatacatatttttgtcagacactatgactgtgacatattatgtcagacaatgtatgattgtagtaaaaaaaaaaaataaaaccttgttatgtcaaccacagggcaccctgcaaaggctcaggagtgctctgacactattccaggatttggtagggattggactatctccagcggagctgttctaatgggctgttgctggagaaggtttgaggtggttgamtttggcctggattgtcatttcaaattgagagaacttttataataaaagtttggaaggtttgtgcgttcccctctaccccagctgtctaccctcacttcctctctcattttcctttccgagaatttgaatttccccaggaacttctggacactctgaagtttcaggcattactttgtcatggagggacaaagggttgagagcctttgacttaaaattctccataacatctttcttcctttattccttgtgtttccactggctgagtaacctgggtcagaagatgattccatcaggatgataatgctgcattgcattttcatcatctttttcatatatgaagctttcatgtccattatttgacatatatacacacaagggagacatttcattgtgccattgtacacagaaatatactgagctcacacaggctctaacatcatgcacatatttcacctctatccaatcatttcctctctatccttagagaaggcctgggctgctgggtatggagttagggccctttccttggctcctccagctttcttcctaaatccctttctgacctcagcatctgtcagtgtgaagcatgtgtggtgccctgcagggtgttccagattttctggagcaacaaaaggggtaaaggacatagcaaagaccttatgttggttcccaaacctgcatgatgttgaagtagtgagttcagaggaaatgtgggaggactctgtactgtttcacgtggtctacatatacaaagagaacgtgggagtgcaccctaactgaaaatacattttagctatacagttgtttttaaaggtttatgcttttgggtttacagtgtttataccagtaagctttggaattgctcctagtttgtgaaattgattgcaaaacatttgaccttccttattagcccctgatcgctagcagctagcatcaatgcttaggccctcaggatacggcaaagtaaaactaatggttgcttctaggtctctgtgtattatagtctctgtcctagtttccagtgtagaagtcat

SEQ ID NO: 84114 - DNA, 1285 bp, Homo sapiens
tgagcttcttcatcttgtgtatgtgttatgacatacatatttttgtcagacactatgactgtgacatattatgtcagacaatgtatgattgtagtaaaaaaaaaaaataaaaccttgttatgtcaaccacagggcaccctgcaaaggctcaggagtgctctgacactattccaggatttggtagggattggactatctccagcggagctgttctaatgggctgttgctggagaaggtttgaggtggttgactttggcctggattgtcatttcaaattgagagaacttttataataaaagtttggaaggtttgtgcgttcccctctaccccagctgtctaccctcacttcctctctcattttcctttccgagaatttgaatttccccaggaacttctggacactctgaagtttcaggcattactttgtcatggagggacaaagggttgagagcctttgacttaaaattctccataacatctttcttcctttattccttgtgtttccactggctgagtaacctgggtcagaagatgattccatcaggatgataatgctgcattgcattttcatcatctttttcatatatgaagctttcatgtccattatttgacatatatacacacaagggagacatttcattgtgccattgtacacagaaatatactgagctcacacaggctctaacatcatgcacatatttcacctctatccaatcatttcctctctatccttagagaaggcctgggctgctgggtatggagttagggccctttccttggctcctccagctttcttcctaaatccctttctgacctcagcatctgtcagtgtgaagcatgtgtggtgccctgcagggtgttccagattttctggagcaacaaaaggggtaaaggacatagcaaagaccttatgttggttcccaaacctgcatgatgttgaagtagtgagttcagaggaaatgtgggaggactctgtactgtttcacgtggtctacatatacaaagagaaygtgggagtgcaccctaactgaaaatacattttagctatacagttgtttttaaaggtttatgcttttgggtttacagtgtttataccagtaagctttggaattgctcctagtttgtgaaattgattgcaaaacatttgaccttccttattagcccctgatcgctagcagctagcatcaatgcttaggccctcaggatacggcaaagtaaaactaatggttgcttctaggtctctgtgtattatagtctctgtcctagtttccagtgtagaagtcat

SEQ ID NO: 84115 - DNA, 1165 bp, Homo sapiens
tttctgagaaaagaacaagatttgttatttgtttgtgtaatttctaagcacaccggtgaatagcaggagactgtcaacacccagtggccactttcctgagaagctgagtgagcccttctgctgttgagtgcacaagggggattttctgagtggaaatctttcctcattactgcgctgccacaaacaaatgaacattggaagagttcatgcacagataagggacatgtctagggaactgtggagaactcattacatcccttctgatggtaaccctataagaagaaggagaaaagggaaacaaacaaacaaacaaacaaaaaactactttcctgccaaagcaacattcccatcaccccaaaagtttgttgtgtctctttgcaatgaatccccattcccccaaccccagcttctgatccactgatcaattttctgtccctaaagttttgtctctcctagaatgtcgtacctatggaatyctgtctcgttgagttgtgagctttccttatagattctggattcaagccctttatcagttatgttttgtgagggcttctttcagtaaaaataccaaaaatatttcaaggacttgcaaataatcctttgtatagtactaaagcattctttgacacaaaaaatgtacagtaacaaaaaattgttctttttaaatcaatgccttaaataaactaggagtgtattaattacaacataatctaatgtatatatttttaaatcatacatggcgtttacttgaataggaagttttctttcagacctcttttgggaagatgataaaatacaatgatccttttccccctgcaagttgtcaaataaacacacatataaaatatttgcattcaatttcagaaggttcatagatgcctaaaattcactataaattacctagggatagctccatggccctaagatgaagcaagactaattgattcggtccatagacaaacgtaatgtacatgttggttcaggcatccctgcaacagctctagggtgccccagaggctcagagtccacaactgggaacccagcatgggtggcctctgagctcaaaaaaatctacagttctcacttcactaggacaaggacattcagatacttaaaatgacacatttgcccagtgctgagaaaaaaaaaaaaatccttgggaaaa

SEQ ID NO: 84116 - DNA, 739 bp, Homo sapiens
ttcctcagccacagacccgatgagttgcctggatgtcaaagaattaagcctgccttgaattagcagaagcaacaggaatccagagggaattgacttttttttctttttttccctggtctccactgtgattctctgattcaaatttgcggtggcagaatgaaaggaaggggggtgctcctggagggaagcactgccccagcagaggccctgaggggagcaggtcacgtggccgatgtcccgaaggcctgactgaagcagagcagaagcaaggctggctgggtgtggggggtgctgagcagaggggctttgagtggtgtctggggaaatcctgagccatttaaatgaaccatttaaatctgacagacaaattggtgttttaagaagatttaccaggcagtgatgtgcaggatgaggtgggggtggagccgaggcggggttggggggggtgcgatgttaacaggggtaggaggagaatgaagctgggagaataaagattctgctttgagtcaacaaacacttactaagcacctaytgtgtaccttgccttgcaccaggcaccaccttcaggcatgcgccctctcagtgaatagaatcagcatctgccctttcagctaagccagaacctagtttccttggtgatgccttcctctcccttttctccgcaatggatggagtcctcctgtaatgccacctcttacctccgcctcttctctccttcaagccactgacatctttcact

SEQ ID NO: 84117 - DNA, 641 bp, Homo sapiens
tcctgaatgctgggccgaggctcctgtttctaaggaactctgagtataaaagctatcttttcaatggtggtcacctcctgatctgttggcctcaccatacctgaataataacaaaaccaacatcttaaaacacagctccaatctcacactcccagaaagtgagaaacagaagagaaaccaaaacctatgattaccagttcaatccagaacactgagagacagaggaggctctgacggagaagggctgcgaccaacatcttctgactgtgaacactgtccaagtcagcttcatcaagagcttggaaagtggacgttttgtcaggctcattttgccgatgggcaactactgttatgggtggtgagtcyctacgggtctgtagtatcctcacttcttgcctcctcagataaaagaattcgaccgagaggcataaggcggaggagagacccaggcaagttttagagcaggagagaaagtttattaaaaagctttagagcaggaacgaaaggaaggaaagtacacttggaagaaagccaagtgggcaacttcagagatcaagtgtgcggtttgaccttttgacttggagttctatacattggcatacttccggggtcttgcatccctgctcctgtgattcttccct

SEQ ID NO: 84118 - DNA, 669 bp, Homo sapiens
agtatataagcattcctcaatacaaccatagaggcttgcaacataatgactttatggaccaaagctttagactcggaatacatgggctacacacacacaaaaccaaggcctgtggatatgccatgtgttctggggaagactttttacaaaaccaaagaattgagttgtcctcttggggtctatgaaggagtcatctggccttggcatgtgtgatggtgattttcttaattgcctactaatatggtttggctgttcccccacccaaatctcatcttgaattgtagctcccataattcccacgtgttgtgggagggamctgcttggaggtaattgaatcatgggggccggtctctctcatgatagtgaataagtctcatgaaatctagtggttttataaaggggagttctcctgcacacgctctcttgcctgcctccacgtaagacgtgcctttgcttttcctttgccttctgccatgattgtgaggcctccctagctacgtggaactgtcagtccactaaaccactttcctttatacattacccagtctcgggtatgtctttattagcagtatgagagcagacaaatacacctacctaaaattaagcattcatacgctgtgtgtagcagatatctctggaaccccatataccatgctttcaatcccctct

SEQ ID NO: 84119 - DNA, 1329 bp, Homo sapiens
  misc_feature (1)...(1329): n = A,T,C or G
tgaataatccactccttgtttagcatatcatcaagaaataaccataacagtgggtaaccagcagccctcagggcttctctgtctacagagtagccattcttttattcctctacatttttaataaacttgctttcactttgctctgtggactgaccctgaattctttcttatgcaaaatccaagaaccctctcttggggggatctggatcaagatccctttcctgtaataccaccatgccaagctaattgttttatgtttgtaaagatgatgttttgctatgttgcccaggctggtctcaaattcctgagctcaaataatcctcctgccttggcctcccaatgtgctggattacaggtgtgagccactacacccagccaatattatcaaataaagaatggactctcctactctctctattagattgtttgccttcatcagtaatttagataacagaaagatatgtgttctaagtgaaatctatatattagggttctgcacatgttttgaaaaggcttttaaaaagtaaaaattacacatgcacacaccccaaaaatatattttaagccagctgacctgttgcccaggctgccataagaaaatgccatagactggatggctttaacaatagaaatttattttctcacagttctcaaggctagaattctccagactttcaggttgccagcatggttgggttatggtgaggaccctcttcctgccttgcagacatcactctatccctgtgtccacacatggcatagtgaaagctctctctccttttctcttccttttctcataatggcactaattctaccatgggagccccaaactcatgaattcnnnnnnnnnnnnnnnnnnnnnnnnnnnnnnnnnnnnnnnnnnnnnnnnnnnnnnnnnnnnnnnnnnnnnnnnnnnnnnnnnnnnnnnnnnnnnnnnnnnnagcaaatctacagggctcaatccagccccaccacctggtttattggaaccctgggctcatttgcttacatattatgtatgactactttcacactgcaaaggtaagtttgaatagttgtgatagagattatatggcctccaaaacctaaaatacttgctatctkgttgtttacaggacaagtttgccagcccgactctagagaaatctcagctgagaaagtctgcaaagaaatttggctgtgtctaccttggtctttacctcattatcaatgagcaggggctaatttcttcacctgcaaccctattgcacggtcattatcaggactgagtcaataactgcaaaacatttcaaatagagccacatggtaagcactcagaaaatgttagct

SEQ ID NO: 84120 - DNA, 668 bp, Homo sapiens
agtttcagctttctacatatggctagccagttttcccagcaccatttattaaatagggaatcctttccccattgcttgtttttctcaggtttgtcaaaggtcagatagttgtagatatgcagtgttatttctgagggctctgttctgttccattgatctatatctctgtttggtaccagtaccatgctgttttggttactgtagccttgtagtatagtttgaagtcaggtagcaacctaaataaatcttgactctgccactgactgatattttgacctctggcaaatgattttaatctctctgattctcagtttcttcatgtgtaaaatgggactaatactgttggtaggtttaaaagaagtgaaagaatctgttaactgttcaatggcatcastgaagctgatagttcttgtctctttgttggtctctgtagaaagaggagggtaaagaacccaggaaaagcagatgaggggatttttggaattaaacctcatctcacatgctttgagatttgtcaccttacttttcgtttggtggcaagttaaactaagcagaaaggcttagtttcttatttccttcttatttcttattttctcagaagagtcacagggcgggcaataaagatttccactttgaagcatgtggggtttgaagggggttctatcact

SEQ ID NO: 84121 - DNA, 668 bp, Homo sapiens
agtttcagctttctacatatggctagccagttttcccagcaccatttattaaatagggaatcctttccccattgcttgtttttctcaggtttgtcaaaggtcagatagttgtagatatgcagtgttatttctgagggctctgttctgttccattgatctatatctctgtttggtaccagtaccatgctgttttggttactgtagccttgtagtatagtttgaagtcaggtagcaacctaaataaatcttgactctgccactgactgatattttgacctctggcaaatgattttaatctctctgattctcagtttcttcatgtgtaaaatgggactaatactgttggtaggtttaaaagaagtgaaagaatctgttaactgttcaatggcatcagtgaagctgrtagttcttgtctctttgttggtctctgtagaaagaggagggtaaagaacccaggaaaagcagatgaggggatttttggaattaaacctcatctcacatgctttgagatttgtcaccttacttttcgtttggtggcaagttaaactaagcagaaaggcttagtttcttatttccttcttatttcttattttctcagaagagtcacagggcgggcaataaagatttccactttgaagcatgtggggtttgaagggggttctatcact

SEQ ID NO: 84122 - DNA, 1557 bp, Homo sapiens
aagggggtcagtctgggaaatgctaactttgcaaaacaagcctatttaacaattactagcatacaagaagtgttcaccccaaaagttaagaagaaaaaaagcacaaaattattggttattcatggactatcatccacttccctttcacctatctggtcaccatgtgtattggctgagaacctagaaaggcttaaactacatgcaccgcctccccccacccaaacacacacatacagagtttactatctacggtgtttctgctgaacgaggcgattaactccttgaccttatggaactctagtgtgacctcggagaatagatagaatcttgttatcttgtaatgagttttatggcttatttcagtacatctcagccatgtttctctggtgattaaggcaattatcagcccatgcattttaggattatgaataatggagctctctccaggtgatggaaaggccttgggaacgttcagaccactttttatcccgttcaatacttattcccatactccctccccgatatgcataaacagacactgcattctgtttctggacgcaccatggtgccctttctaccctttacttggatatgattatcacagcaataacttttagatttaattgatgtaagtaaatcccctgtttaccattcatgggtgccacgcacagtgtttcaattactatcattattgcttaggatctggggaaaggtgtcacttgatctgagcttgccatcttccactacaatgttatggcttgagtgscagtgattatctgaacaaacgtagttgttcgagtgaccaaccttcccccgtgcacctgtcatagtgctcgatgagagggaaaacacgggcacaacatcagcggacctcagggggcctgcttttttctcaggctcatgctttgctctttgtcaagtccttactttacctttgaattcatgtaaccctgggtggtttttattcttctatgtcttctttctggatgtgccaccaaaagtagttcctgaatattccttaaaaaggcctcccagagaaatatgcaatatatgatagattctatatcttcccaccctttagtaagtatagtgaggaaacaagagtgtgacgatagtttacatcccaccatctactcactgttactgcctcttttttcatagtatgaataataaaggcatgttggtattacaaagaaatggggtttgtaagaatatatgttatcaaaagaaactaggtctgaagctgtacttgtcgcaggacacaatatatgcctaaaggaaattacctaaattaagaattgaaatcatcttttctaaagcacaatgagataccatctcattccagtcagaatggctactattaaaattcaaaaaataaatgctggtgaggttggggagaaaatggaacacttatacactattggtgggagtgtaaattagttcaaacattgtgaaaaacagtgtggtgattcctcaaagagctgaaaacaaaactaccatttgacccagcaaacccactgttgggtatatatacatacccagaggaatataaatcat

SEQ ID NO: 84123 - DNA, 1557 bp, Homo sapiens
aagggggtcagtctgggaaatgctaactttgcaaaacaagcctatttaacaattactagcatacaagaagtgttcaccccaaaagttaagaagaaaaaaagcacaaaattattggttattcatggactatcatccacttccctttcacctatctggtcaccatgtgtattggctgagaacctagaaaggcttaaactacatgcaccgcctccccccacccaaacacacacatacagagtttactatctacggtgtttctgctgaacgaggcgattaactccttgaccttatggaactctagtgtgacctcggagaatagatagaatcttgttatcttgtaatgagttttatggcttatttcagtacatctcagccatgtttctctggtgattaaggcaattatcagcccatgcattttaggattatgaataatggagctctctccaggtgatggaaaggccttgggaacgttcagaccactttttatcccgttcaatacttattcccatactccctccccgatatgcataaacagacactgcattctgtttctggacgcaccatggtgccctttctaccctttacttggatatgattatcacagcaataacttttagatttaattgatgtaagtaaatcccctgtttaccattcatgggtgccacgcacagtgtttcaattactatcattattgcttaggatctggggaaaggtgtcacttgatctgagcttgccatcttccactacaatgttatggcttgagtgccagtgattatctgaacaaacgtagttgttcgagtgaccaaccttcccccgtgcacctgtcatagtgctcgatgagaggraaaacacgggcacaacatcagcggacctcagggggcctgcttttttctcaggctcatgctttgctctttgtcaagtccttactttacctttgaattcatgtaaccctgggtggtttttattcttctatgtcttctttctggatgtgccaccaaaagtagttcctgaatattccttaaaaaggcctcccagagaaatatgcaatatatgatagattctatatcttcccaccctttagtaagtatagtgaggaaacaagagtgtgacgatagtttacatcccaccatctactcactgttactgcctcttttttcatagtatgaataataaaggcatgttggtattacaaagaaatggggtttgtaagaatatatgttatcaaaagaaactaggtctgaagctgtacttgtcgcaggacacaatatatgcctaaaggaaattacctaaattaagaattgaaatcatcttttctaaagcacaatgagataccatctcattccagtcagaatggctactattaaaattcaaaaaataaatgctggtgaggttggggagaaaatggaacacttatacactattggtgggagtgtaaattagttcaaacattgtgaaaaacagtgtggtgattcctcaaagagctgaaaacaaaactaccatttgacccagcaaacccactgttgggtatatatacatacccagaggaatataaatcat

SEQ ID NO: 84124 - DNA, 419 bp, Homo sapiens
acttttttctttatacgcatcaaaaatagaaatagagaaaagggccaggtagtagatcttcaggctagcaggccctctattctctgattcaactattcagctctgctgttgtctcatgatagcaaccacagaccatatgagaaagaatgagtgtggytgtgtttttatgacactttatttatgaaaagaagcaatgggttagatcgggcccatgggcacagtttgctgaccccgtcttagatgatcaattgcgtatttgcccttgaagcctgcccaggaagtgggcttatcctcttatcaatatctctgtgctaaccatgcacatacatgcagcttctaaatctttcacacctgtgctccgtactgacatgtctatagctaaggttgatattaggtttcatactttagattcttggtta

SEQ ID NO: 84125 - DNA, 503 bp, Homo sapiens
gtcattgtcatgagacaacttatgccctacatctggcatttagtatatctttacacttagtagatgctcaaatgttggattatttccttgtattttattttcccacaagtacaccctattgttttccaatctttatatcaagattcagttaggtttgggggctctggaggggagaaggaaggggttaccagcgtcttctctgctgcttttagatagaagcctgacatcaatccttgcctgcctgcatatctggacaaataacttttagttactcagataaacattgtgtcgctatgatgctgaacatcaaatacgaggatgatgatgtcarttgcgtgcatttcatccaacatggtattccgcaggcactgtggctgatgggattgcctgccatcatttgcccagtgggctagcaagagtggtatgagagggcatgagctatatttaataggagctaccatttgtggggcactatagaaaatgcttttttagaaaaggcttca

SEQ ID NO: 84126 - DNA, 629 bp, Homo sapiens
acatgtcctttagcctcatcatgccccagcccaaaaagcagacctggataccctgcccatgttttcccccctgtattagtcagggttctctagaggggcagaactcataggattgatgtatataaaaaggggagtttattaaggataagcgactcacatgatcacaaggtgaggtctcacaataggctgtcggcaagctgaggagcaaagatgccagtccaagtcccaaagctgaagaacttggaktccaatgtcgaggtcaggaagcatccagcaggggaaaacgtgtaagttgggaggctaaaccagtctcgtctttccacgttcttctgcctgcttttattctggccacgctggcagctgattagatggtgcccacccagattgagggtgggtctgcctttcccagtccactaagtaaaatcttaatctcctttggcaacaccctcacagacacccccagggaacagtactttccatccttcaatccaatcaagttgatgcttgatattaaccatcacacccctcaatacaacccacaccttcctaatcctaaccctgaccctcgactctgaacccctccactttgtgtcctgattccatccccaggagctgtgattccccctgaa

SEQ ID NO: 84127 - DNA, 629 bp, Homo sapiens
acatgtcctttagcctcatcatgccccagcccaaaaagcagacctggataccctgcccatgttttcccccctgtattagtcagggttctctagaggggcagaactcataggattgatgtatataaaaaggggagtttattaaggataagcgactcacatgatcacaaggtgaggtctcacaataggctgtcggcaagctgaggagcaaagatgccagtccaagtcccaaagctgaagaacttggagtccaatgtcgaggtcaggaagcatccagcaggggaaaacgtgtaagttgggaggctaaaccagtctmgtctttccacgttcttctgcctgcttttattctggccacgctggcagctgattagatggtgcccacccagattgagggtgggtctgcctttcccagtccactaagtaaaatcttaatctcctttggcaacaccctcacagacacccccagggaacagtactttccatccttcaatccaatcaagttgatgcttgatattaaccatcacacccctcaatacaacccacaccttcctaatcctaaccctgaccctcgactctgaacccctccactttgtgtcctgattccatccccaggagctgtgattccccctgaa

SEQ ID NO: 84128 - DNA, 368 bp, Homo sapiens
  misc_feature (1)...(368): n = A,T,C or G
cttatggctgttgctgcccagagattccgtgggagggtggagaagggagacagctaaagaatcccagaatcccctccccaccaggtgcyaacctgatgaccacagcagaaaccccctgcaccaggctcctgggatatgtcgtccacaatgtcacaggtgtgtgtgttgtgtgtgtgtggtgggagaggggtgtaagtgtggtgtgtcttaatnttttttggctcccataacaacataacacagacaggtggcttccaccacagaaatnnnnnnnnnnnnnnnnnnnnnnnnnnnnnnnnnnnnnnnnnnnnnnnnnnnnnnnnnnnnnnnnnnnnnnnnnnnnnnnnnnnnnnnnnnnnnnnnnnnnt

SEQ ID NO: 84129 - DNA, 649 bp, Homo sapiens
cggggcattcgaatctagaacccacaataggagcctggaatctggtgtttggaatctggcaatcgaggctggaaacctttgcacctgctatgagaagcctggggcctagactacaaatggtagatttgggattttgaattgtggggtctggattctttttttttttttttttctgagatgaagtttcgctcttgtcacccaggctggagtgcaatagcgcgatctcagatcactgcaacctccacttcctgggctcaatagattctcctgcctcagcctcctgagtagctgggattacaggcgaccaccaccacgcccagctaatttttatayttttagtagagacagggtttcaccatgttggccaggctggtgtcgaactcctcatctcaagtgatccacctgactcagcctcctaaagtgctgggattacaggcgtgagccaccatgccaggcttggggtctggattctacagggtggatctagcctctgagctttcaggagtagactttggaacatacagtctggagtttcaaatctgtttttgcattgaaaacctggactgtggctgggcccagtgactcatgcctttgggaggctgaggtaggaggattgctggaactgaagggtttgagaccagcctgggca

SEQ ID NO: 84130 - DNA, 645 bp, Homo sapiens
ctctcacttaccgagtcccaactcattgctctatgtccccaaaccctccttccctgttcttccacgttcttcatctcaggggcagcgtcaccgaccacccagttattcggccagacgcccttggcactgaccttgccccatctctccccttatcccctacagcccatcggtccccagccttgtcccttcggcccctgcctctctctgccccgtcccctcctctctgtccccttggcctggctccagctcagacgtcctcctctctctctggaccctcgcycctcctgtccgggaggacagcctcctgtcggtcaccacgtggccctagagggtctctctgcacttggagatcaccccgcccctcccctgctcacagccttcccttgcagctccccatcacccctgggcaaggtcccggcttctcggtctgcagttttaagccctttgagattccccagcaggaaaaagcctcccctcaaacccccttctcagggggcctgcagaccgcccacctccggagcgggactggactcgtggtgcccgaagggcctccccatgaggtgctggccctcttctaacttagtctcaccacggcctccgttccttctggaaccagacaagctgctgtttcagggcgctgggtct

SEQ ID NO: 84131 - DNA, 559 bp, Homo sapiens
agaccagcatttgattccagtacctcctgccctattctgatgtttatgtaggcaactttgaaaaagcaaaagttcatattcaaattctgtccttaggaataaagtgtcgaaagaaataagatattttgttaccgtcatgaagcatttcagctagagcttgctgaaaatataaacattagatatttgggttaggggatttctggctcatggcagctgggtgaataagcaacaaagtctaaaaatcttggtgctcagagcaatgaacaattcctttggttggtacacagagctcatagaggagaaaagagaaaatattagtaggttggaaaggtagctgatgtaagatggagaacctcaaattcagagttaaggagtaaagaattcagtaacattaattaatattaatattaaatactaatggcagataacatttgctatgggcaaggcatcaagcttagtggttgacaattcaytgtattattttactggtaataagcttccaaggaaggtgattctttttttttttttttttttttgagacggaatcttgctttgtcaa

SEQ ID NO: 84132 - DNA, 599 bp, Homo sapiens
gccgagattgcgctactgcactccagtctggacagcagcataagactctgtctcaaaaaaaaaaaaaaaaaaaaaaaaaaaagagrcgctgtatagtttaaaatttaagtattgcctgggcatggtggttcacatctgttatctcagctctttgggaggccaaggtgggaggatcacttgaggctaggagttcgagactagtgcaggccacatagcgagaccccgtcgctacaaaaataaataaaaataaaaaatttaagtatttaaaacaaaaatctaaattagcaaattttaatgttacattttaattctttgggaagtgaagatgcatatgttgcatttttccagttaaggtacatggacagcagagaagatgaacagatccgagggatcactatgaaatccagtgccatttccctacattatgcaacaggtaagtcagtctgttttaaagaaacacagctttgcatctttcatgtcctcctctgtctttctgaattaattgcatgcctcagtttctttgcttatattccacatattttattctggcgtctccacatgacctgttgtcagagttaggctgtccaggcttggatgca

SEQ ID NO: 84133 - DNA, 599 bp, Homo sapiens
gccgagattgcgctactgcactccagtctggacagcagcataagactctgtctcaaaaaaaaaaaaaaaaaaaaaaaaaaaagaggcgctgtatagtttaaaatttaagtattgcctgggcatggtggttcacatctgttatctcagctctttgggaggccaaggtgggaggatcacttgaggctaggagttcgagactagtgcaggccacatagcgagaccccgtcrctacaaaaataaataaaaataaaaaatttaagtatttaaaacaaaaatctaaattagcaaattttaatgttacattttaattctttgggaagtgaagatgcatatgttgcatttttccagttaaggtacatggacagcagagaagatgaacagatccgagggatcactatgaaatccagtgccatttccctacattatgcaacaggtaagtcagtctgttttaaagaaacacagctttgcatctttcatgtcctcctctgtctttctgaattaattgcatgcctcagtttctttgcttatattccacatattttattctggcgtctccacatgacctgttgtcagagttaggctgtccaggcttggatgca

SEQ ID NO: 84134 - DNA, 1097 bp, Homo sapiens
taggactggcaattaaagcagggttggtgctttctttacccttcattccttgtactttcatgtatagagtttctgctgaaatactttgttcttggtgatatgttgttttaataataatccttaaatcattttatgggtgactgttcccatccacccccatcctcctccagagcacttaatgcaatgtgctgcaggaagtaggtattcacagagctcagatctctctgactaactgactgactcaatgtgctacctgtaattatattttaaaatttaatcagggcaggtctaggaactcaaggggataaagtcaaaatcaactattcaagttaggtgtgcataaattgtctagaatgaataggcttcatcaaaacttgtcaaaatgcagagtttgtcagtggaaaccagaatataaaaaatttaaatcatgcttttgaaatacactcaagactgaaggtgaatagttcgtggtgaagttaacatttctagaataaattttgggctaaacacaaagttagcagtcttctttcatgcttgttattttatttcattttgctttttgtgataatcaagaatcataaatatgtcttgctgtggttgttgccatgtcttgagaaattctgcaaagagctgtaatagaaaggaccatgtatctctcttatcttcctctatagaattatgtgaactaaagccaaagctatgtaaagatatccagaattgggactgagttctgtgtaaaacagaaaaataaaaataaaaaagataccaagaatttgatacatctaacattagagattctcmaagtgtttctaatttatcttctcaatctttctaaaattcctataaaatagatgcaagacaggaattatcatcattttccagtgggaaaatggaaattcaaagagattaaaaatagtacccagattaaactacaaattgtaatttttaatcactgctttttaaactaatcatgtggcatattttagatccgtattatttaaattattaaatgaatacatccccatacatgtgcatataactcattttcttaattctgttaaggaagaaagctgagctctgggccatatggatccttt

SEQ ID NO: 84135 - DNA, 1027 bp, Homo sapiens
tgttaaataatattgactatatgttgagtattttgggggagtcattcaagtgtttctaccagtcagaggttcaagattagatatgtacttaaggaaaaccatttgaactcatgggtggacaccagaaagaaaagtgggttacagggagttaaaaagaaaaaatgggttacagggagttaagatagaactgttctacagtattcaagcaagaggagactaagacatacaccaggccatgggcactgtgaacagagctggcaagcagtgcaataaaactatgattaatgggaaaaattaactaatggtaggaataagtttggttagtcatttaaccaggtttctttgtgctcaaaatgaaaatattagaaaatataatttcaaagtgttttctccctgattcaaatctctaaaaccataaatttttctaataaatcctttacactggttaaggagatgagtcggtagtgatgatcaggacagtattgttggttgtttgtttctgaaaaatattggcttatattttaaatttttattaagatgggtgtgaaacccgaaaaactaccatactcaaaatgtattaaacttattaatttattaaatacatttcgatatgtcactttatatacaaatataaataggactgttatagtaagtagtcaggcatgagcagggcaggagagagctccccgcaacccccmaccaggaaagtcaggcggctatcaagtgatggtcaggcagttgtcaaactgtctctctaaaataataattggttgcagctggtgccagggaaaggcagtctcccaacagatggaaacacctgaaactggcaatcagcagcttcccgataagacctcaggaactgggtgagcgggctcacgcatgcacactgagaggcaaaatggtggagttcaacaggtatgtcacctcctagggacgtttgaccggaaagggaagaacgcctaaagcgagcatgcggacaactccagtaacacattgcacatggtcacctcccatgtgccagcaggcc

SEQ ID NO: 84136 - DNA, 423 bp, Homo sapiens
cagcctctagagggctaaattttctgmttctatgattcagtttcatattaaaataccttttcattagttcagaacactcactatattctttaagttgaattaaattgctattatctggaaaagtattggacagttggagaaggtagataaaggtgagttatagtgcagtgtaataccaggtattgccagcagatgtcacaaaagaaaacacaggtaaaataattcttccaagaacggcaagaatttaatcttatttagtaaacacagatcttaataaaattgatgggactaatatgaaaaaattgaatttttacaaaattttaaggtgcaaagaagaacttagagaataacttacattttatatttttccaaatatccctctcaaatcaccatttttcataactctggtagattttctatgat

SEQ ID NO: 84137 - DNA, 586 bp, Homo sapiens
tatcttgactcaaacaggatatttggaaggaagtttaatagcaaacactccttcctcaccaagacttactttgaagccaatagtgtcaccaaacactaaggtattggtatttaaaaaagacctctgtgcttattttatgtccccccaaatttatatgttgaagccctaatccctaatgctatgatatttggaagtggggtgatgagattcaagaaaaactattccaaaatatgtcacttcgacatttaagaaaatgacagaagcagaaaggtcactctcgctttcctcttcccttctcccctgaaactggccataaaatctagctagtcttactaaagyaaggtcataaaacctttgtttcagcagggccctccccatacgctgaaaaaagagaaattcttgtccttgcaaacacagagatgccaagaagaatctgaacaaatgggcctcactaagttctctccaatttattacctttaaatcttaccattttctctaattgttcttctatatgactgtataccattcatcaaatataagcataaatatacataaatttccgtctatttgggtcttcatttctgaa

SEQ ID NO: 84138 - DNA, 626 bp, Homo sapiens
gacataggaaatggcctaattgcatttgcgcaggaacaccaaatccctcgcagctgcacggggctgagccggggccacagcaagggtcggccatcccagagtcctgacagctccgtggtgcatgccaaggggcctgggcgctggctggggggcgcctttcccaggccagacgcccaccccaccccaggagagctgcccccctttcagttcccagaacggagcccagctgtggaatagtgatgcggtgaggtcatggggagggggcccgcatgactcatatcctgggggagggaaaagggaggagacggagaatgggccagaggcctccacgtyctcagctctgctgggtcagaggccaggggctggcgggcttctccccagcactgggttttaggggagacaccaggagatgcttactctgcatccccactctgtcccccaggcccctagccagggagagctcagtcagagtgatcctccaggggcccagctctgcatggatgatgttcccagagtacacacctgggcctcgtgccagggccggcaccgccgttgtcggggccatggcaaggcaaacagtcaatgtttgcctcactaaagtgaggctgcagcaccctgaagggatc

SEQ ID NO: 84139 - DNA, 626 bp, Homo sapiens
gacataggaaatggcctaattgcatttgcgcaggaacaccaaatccctcgcagctgcacggggctgagccggggccacagcaagggtcggccatcccagagtcctgacagctccgtggtgcatgccaaggggcctgggcgctggctggggggcgcctttcccaggccagacgcccaccccaccccaggagagctgcccccctttcagttcccagaacggagcccagctgtggaatagtgatgcggtgaggtcatggggagggggcccgcatgactcatatcctgggggagggaaaagggaggagacggagaatgggccagaggcctccacgttctcagctctgctgggtcagaggccaggggctggcgggcttctccccagcactgggttttaggggagacaccaggagatgcttactctgcatccccactctgtcccccaggcccctagccagggagagctcagtcagagtgatcctccaggggcccagctctgcatggatgatgttcccagagtacacacctgggcctcgtgccagggccggcaccgccgttgtcggggcyatggcaaggcaaacagtcaatgtttgcctcactaaagtgaggctgcagcaccctgaagggatc

SEQ ID NO: 84140 - DNA, 736 bp, Homo sapiens
cacaacatttttccactatttgcagtcaaaagtatcgttaacactctctttactctgctcaaagttacagagttcttttgtataaacattagaacacttatcacagcctgcctataatggagaataattccatgttgtatactatacaacactcttactaaagtccattagacagaaatatgtagcatttaagacaccttccaattataaaactctatgcaaacaaaaattaacaacgcagatctgagactattatattatcctgtgaaggagggtctgtctgtctgcacagttggtcctaggctggcttctgaggacttgaatttcaagagggttccmtaactggtaatcatggtttactgtatctagactatggaaataatgtggcttatcctgctattctttttgtgagtctggaaatttcacacatgctaggcagagtacacatatgtgaccagccaagataaaaactgtgtttcttgggaagtcacataggttgttgtattttcattaagggggaaagaaggtagtctgtgtgatcctcatggaaggcacagcacataaggaagccggtacatggatttttccagactctgtcagtgtcttttgccattgagatctttctactatatatccatactatgttacagtaataaatcttagccattacaaccctaagctgatcccatgagtccttctagcaaatctccaaacatggaggcagtcttgtggatcc

SEQ ID NO: 84141 - DNA, 736 bp, Homo sapiens
cacaacatttttccactatttgcagtcaaaagtatcgttaacactctctttactctgctcaaagttacagagttcttttgtataaacattagaacacttatcacagcctgcctataatggagaataattccatgttgtatactatacaacactcttactaaagtccattagacagaaatatgtagcatttaagacaccttccaattataaaactctatgcaaacaaaaattaacaacgcagatctgagactattatattatcctgtgaaggagggtctgtctgtctgcacagttggtcctaggctggcttctgaggacttgaatttcaagagggttccctaactggtaatcatggtttactgtatctagactatggaaataatgtggcttatcctgctattctttttgtgagtctggaaatttcacacatgctaggcagagtacacatatgtgaccagccragataaaaactgtgtttcttgggaagtcacataggttgttgtattttcattaagggggaaagaaggtagtctgtgtgatcctcatggaaggcacagcacataaggaagccggtacatggatttttccagactctgtcagtgtcttttgccattgagatctttctactatatatccatactatgttacagtaataaatcttagccattacaaccctaagctgatcccatgagtccttctagcaaatctccaaacatggaggcagtcttgtggatcc

SEQ ID NO: 84142 - DNA, 736 bp, Homo sapiens
cacaacatttttccactatttgcagtcaaaagtatcgttaacactctctttactctgctcaaagttacagagttcttttgtataaacattagaacacttatcacagcctgcctataatggagaataattccatgttgtatactatacaacactcttactaaagtccattagacagaaatatgtagcatttaagacaccttccaattataaaactctatgcaaacaaaaattaacaacgcagatctgagactattatattatcctgtgaaggagggtctgtctgtctgcacagttggtcctaggctggcttctgaggacttgaatttcaagagggttccctaactggtaatcatggtttactgtatctagactatggaaataatgtggcttatcctgctattctttttgtgagtctggaaatttcacacatgctaggcagagtacacatatgtgaccagccaagataaaamctgtgtttcttgggaagtcacataggttgttgtattttcattaagggggaaagaaggtagtctgtgtgatcctcatggaaggcacagcacataaggaagccggtacatggatttttccagactctgtcagtgtcttttgccattgagatctttctactatatatccatactatgttacagtaataaatcttagccattacaaccctaagctgatcccatgagtccttctagcaaatctccaaacatggaggcagtcttgtggatcc

SEQ ID NO: 84143 - DNA, 533 bp, Homo sapiens
tcaggagtttgagaccaacctgggtgacrtagtgcgacctagtctctaataaaaattaaaaaaaaaaaaaactatccaggtgtggtggtgcatgcctataatcccagctacttgggaggctgtagcaggaggatcaccagagcccaagagtttcagactgcagtgaaccatgattgctccacttcactctagcctggatgacagagcaggaccctgtccccctgccacaaaaaaagaaaagaaaagaaaagaaaaaagaaacatagaatagaaaacgtctcctggtttgcatcctggaatagagaaatgagcacaggctttcaaatcaaacagtagtgattcatatcctgcccctggcactcacccagcatctctgaacctgaatattttcatccaggttgacttaaggatgaaatggaaaaaggtttacaaagtacctggggcatagcaaaggattcaataaatgttctctcccttttcttctatattagttatctattgctaaataacaaattaacccagaacttagcagc

SEQ ID NO: 84144 - DNA, 533 bp, Homo sapiens
tcaggagtttgagaccaacctgggtgacgtagtgcgacctagtctctaataaaaattaaaaaaaaaaaaaactatccaggtgtggtggtgcatgcctataatcccagctacttgggaggcygtagcaggaggatcaccagagcccaagagtttcagactgcagtgaaccatgattgctccacttcactctagcctggatgacagagcaggaccctgtccccctgccacaaaaaaagaaaagaaaagaaaagaaaaaagaaacatagaatagaaaacgtctcctggtttgcatcctggaatagagaaatgagcacaggctttcaaatcaaacagtagtgattcatatcctgcccctggcactcacccagcatctctgaacctgaatattttcatccaggttgacttaaggatgaaatggaaaaaggtttacaaagtacctggggcatagcaaaggattcaataaatgttctctcccttttcttctatattagttatctattgctaaataacaaattaacccagaacttagcagc

SEQ ID NO: 84145 - DNA, 663 bp, Homo sapiens
tggatataaggaggaaacaaaatttagatgtatgggtgtcagcaaggctgtgaaaggaatgaaaaatgagagcttgcaaaaccttatgagataaaattatgaaaatctagaaatataatcctgtgtctgattacatttttttaaaattrcttttctctctatctctatatgtatgtatataatcaaagaaaatatgtgtaaaatctgttatgaaagagtatacagcccattttgtaccacaaaatagaaatttaattaccaaagtttgtatagactgtcaaacatatttgttgagatacaattagatacaatattatagtcagttgtattagtatgtatgtttattttgtgtaaaaatatcattcttcggaaagcaaattgcaactaaagtatctaacaagagactcaatctcattacttcatagattttattatactttctcattatgcaatgagctgtcttgttattatttcttcctcagaggatcattaaacatttacatatatattttaatagcctgcagtttcgattagatggaggacattggcattataattttgtgaacagatcactgtcctctgagctggtttatgtttgtttactgatcttccagcagatggtgcccttgcaacagatattcttgttttttgttttgttttttc

SEQ ID NO: 84146 - DNA, 713 bp, Homo sapiens
ttggcccaagggccttagtttgccttttcctatattagaccatccctagtcatcaatacctaattaagataagattattatacaacaatccagactgttagctctgtgagagcagggatcttttttatctagtacttgaaatgtctagcataatgcctaggccttctaggtgccaacaaatgaatacatacataaaggaaattttagttttcaaactactctatgttctattaaaagcctgaaggaatggaactcaagagaggtgaggtttgattaatagttcttaagaaagtttcaaataatgcagtagtgccagcccagtgggaagaacaaaatatcagcctctgagaatgaaacagttggcatctgaaaggaaggaaagcatggaacatggaagatgggaagaagcaaatgaaaaatcaggagtcaggtgaagaaatacggataggcggggctctgctttactagttttcctctggtgcaattaacagaactccaattctttattttaacttttattataaagggaacatgtgcagatttgttacatgggtaaattgcatgatgctgaggcttgcagtcccaatgataccatcactcaggccataaacatcgtacccaacaggtgcagaaccccatttctgattggcttaaactgagacaggatttcattagtccayataaatgaagagtttagggctataggcatgact

SEQ ID NO: 84147 - DNA, 1155 bp, Homo sapiens
ttttcttctaggccagcagaagtatgtttatctgatttcttcctctacaaccaaccagagaaaactctctacttttaaagagctcaactgattcggtcaggctgcggcaggataatctttcttttgccaaaaatcatagcatgaagactgtgtacatcaagggccaggaatcatgaaagacatctaaaaattctgcctactacagtgaccggggtcatttaagggatcattaaaagatgatataataatatttactctcaagtgaaagtrgcttggagctctagagttagtttatatttatagaaactgtcaattcgataagtaactttcagtttctggaaaaagtgagtattggtatgcagcaggtcaagctatcatgcttgattgcctctgtgaacttagattgcttgacctgccttaatcttaattcccacatttattaacttggaatttaataatgcttatctcgtagagtcattccaagcataagttataagatttcctttaaagaattttgcaaaccataaggaatgaaacaaatgtgagtcattgctattttcatcatgtattattacttttctttgaagccctaaacagctgtaatatttgggtttgttttatttaacctatttatggaaaagcatagctttaattttcaatttaagaatgttatgatgtctgatttcgtgtaggctttttcattttcttttcttcttctgattctttttttaatgtaggagttacaaaggtgctcctgtgcttctgatggcagatttagcacacgaatttctgggagcagcatttgtacatcaaaggatgttcttcttaaataatctgctaattaaattaaagctgcttcagagcatcttttgcagtatggaactttttgatactgtgttaatgttttataatcaagtctccaaacggatttctccaaaacacatggtgaatgggtgaaatatggagttagagtttgtgtgtgtattaatttttatgacaggaaaataaataagggaaaaagactaggcataggaataaacacctcttttacttaccataaaaaagtagcttctttattgttaaaaatcactgaacatgaacatgaaaagcaaaagaaaaacacagtcgaagagcctctttaactaccattcttgt

SEQ ID NO: 84148 - DNA, 1155 bp, Homo sapiens
ttttcttctaggccagcagaagtatgtttatctgatttcttcctctacaaccaaccagagaaaactctctacttttaaagagctcaactgattcggtcaggctgcggcaggataatctttcttttgccaaaaatcatagcatgaagactgtgtacatcaagggccaggaatcatgaaagacatctaaaaattctgcctactacagtgaccggggtcatttaagggatcattaaaagatgatataataatatttactctcaagtgaaagtggcttggagctctagagttagtttatatttatagaaactgtcaattcgataagtaactttcagtttctggaaaaagtgagtattggtatgcagcaggtcaagctatcatgcttgattgcctctgtgaacttagattgcttgacctgccttaatcttaattcccacatttattracttggaatttaataatgcttatctcgtagagtcattccaagcataagttataagatttcctttaaagaattttgcaaaccataaggaatgaaacaaatgtgagtcattgctattttcatcatgtattattacttttctttgaagccctaaacagctgtaatatttgggtttgttttatttaacctatttatggaaaagcatagctttaattttcaatttaagaatgttatgatgtctgatttcgtgtaggctttttcattttcttttcttcttctgattctttttttaatgtaggagttacaaaggtgctcctgtgcttctgatggcagatttagcacacgaatttctgggagcagcatttgtacatcaaaggatgttcttcttaaataatctgctaattaaattaaagctgcttcagagcatcttttgcagtatggaactttttgatactgtgttaatgttttataatcaagtctccaaacggatttctccaaaacacatggtgaatgggtgaaatatggagttagagtttgtgtgtgtattaatttttatgacaggaaaataaataagggaaaaagactaggcataggaataaacacctcttttacttaccataaaaaagtagcttctttattgttaaaaatcactgaacatgaacatgaaaagcaaaagaaaaacacagtcgaagagcctctttaactaccattcttgt

SEQ ID NO: 84149 - DNA, 1155 bp, Homo sapiens
ttttcttctaggccagcagaagtatgtttatctgatttcttcctctacaaccaaccagagaaaactctctacttttaaagagctcaactgattcggtcaggctgcggcaggataatctttcttttgccaaaaatcatagcatgaagactgtgtacatcaagggccaggaatcatgaaagacatctaaaaattctgcctactacagtgaccggggtcatttaagggatcattaaaagatgatataataatatttactctcaagtgaaagtggcttggagctctagagttagtttatatttatagaaactgtcaattcgataagtaactttcagtttctggaaaaagtgagtattggtatgcagcaggtcaagctatcatgcttgattgcctctgtgaacttagattgcttgacctgccttaatcttaattcccacatttattaacttggaatttaataatgcttatctcgtagagtcattscaagcataagttataagatttcctttaaagaattttgcaaaccataaggaatgaaacaaatgtgagtcattgctattttcatcatgtattattacttttctttgaagccctaaacagctgtaatatttgggtttgttttatttaacctatttatggaaaagcatagctttaattttcaatttaagaatgttatgatgtctgatttcgtgtaggctttttcattttcttttcttcttctgattctttttttaatgtaggagttacaaaggtgctcctgtgcttctgatggcagatttagcacacgaatttctgggagcagcatttgtacatcaaaggatgttcttcttaaataatctgctaattaaattaaagctgcttcagagcatcttttgcagtatggaactttttgatactgtgttaatgttttataatcaagtctccaaacggatttctccaaaacacatggtgaatgggtgaaatatggagttagagtttgtgtgtgtattaatttttatgacaggaaaataaataagggaaaaagactaggcataggaataaacacctcttttacttaccataaaaaagtagcttctttattgttaaaaatcactgaacatgaacatgaaaagcaaaagaaaaacacagtcgaagagcctctttaactaccattcttgt

SEQ ID NO: 84150 - DNA, 1155 bp, Homo sapiens
ttttcttctaggccagcagaagtatgtttatctgatttcttcctctacaaccaaccagagaaaactctctacttttaaagagctcaactgattcggtcaggctgcggcaggataatctttcttttgccaaaaatcatagcatgaagactgtgtacatcaagggccaggaatcatgaaagacatctaaaaattctgcctactacagtgaccggggtcatttaagggatcattaaaagatgatataataatatttactctcaagtgaaagtggcttggagctctagagttagtttatatttatagaaactgtcaattcgataagtaactttcagtttctggaaaaagtgagtattggtatgcagcaggtcaagctatcatgcttgattgcctctgtgaacttagattgcttgacctgccttaatcttaattcccacatttattaacttggaatttaataatgcttatctcgtagagtcattccaagcataagttataaratttcctttaaagaattttgcaaaccataaggaatgaaacaaatgtgagtcattgctattttcatcatgtattattacttttctttgaagccctaaacagctgtaatatttgggtttgttttatttaacctatttatggaaaagcatagctttaattttcaatttaagaatgttatgatgtctgatttcgtgtaggctttttcattttcttttcttcttctgattctttttttaatgtaggagttacaaaggtgctcctgtgcttctgatggcagatttagcacacgaatttctgggagcagcatttgtacatcaaaggatgttcttcttaaataatctgctaattaaattaaagctgcttcagagcatcttttgcagtatggaactttttgatactgtgttaatgttttataatcaagtctccaaacggatttctccaaaacacatggtgaatgggtgaaatatggagttagagtttgtgtgtgtattaatttttatgacaggaaaataaataagggaaaaagactaggcataggaataaacacctcttttacttaccataaaaaagtagcttctttattgttaaaaatcactgaacatgaacatgaaaagcaaaagaaaaacacagtcgaagagcctctttaactaccattcttgt

SEQ ID NO: 84151 - DNA, 712 bp, Homo sapiens
cttatgcagtgttctataatttactgtgttccctcatgtaccttttcagatttgaaagtgagaagaagcaggcaagtattcctattttctctatttagagaaaacagtcaagcaaataaaccaccaaacctagatggggaagagactggcccaggtgctccagtggtgagtgataaaggatgycttactgttccatttgtgaatctttctgaccagagacttcttaacccttccaatcttttcccacaactgaaattaaatatacagaaaatactgcccttgctctgcctttgaaatcaccagaacaatccacagacttccatagttataagaaattgttttgctttgatttctacctaagacaggaaggagaccactttaaaaggtattcaagatgattacatctgggttttatagagcagttattattgtctttgtcttctattaaatgggccaatgagagaagaattgagttcaatgaaataatttagattagccgtatatgtaaaattccatactgaaaatcttgggagattcaagagacaaattttaagcaaaactgtaatatcatttcctgatttcagaatagaattttatagaaaataaattaccttccagggtcatctctccatcttagataataggatcaatgatcatttattatgtgaaatttaggatattttaaaatcttcctttctgtgcccagtacttg

SEQ ID NO: 84152 - DNA, 828 bp, Homo sapiens
tgatctctttccactccttaagctttgtaagttcaataatgtgggtgcatatgtcaaagttcagaacaatggacataactgttcttgaggtgagccataagttgcctattataattcacatagagtgtcccttcgtggcacatatgtgcctctattttattgatcttgcctcayctacatcttaaacacctattcccaatgtgtctttcttcttatttctaggggttgaacatctctggatttctcaggaagtgtttatatcccttctttgggaacctctctttctccttagtgtccattcaactgtccctttgttttcttaaactcctgtcctctgccatctttgaggtgaggtttcaccgattatctttttgtcctttggtctagtttattggccatcttttattttttaaaattctgctggatatgactggacaggacttcaggtataagcaaatggaagtgggggtaaaggcaagtgaccatcactgatctcccttaggctcaagcattgataagataatcagaacttgtactggtgagtgtgaataaaggcttttggaagttagactcttatttaagagaactcaggatttaggaaaagacctgctgagtcagacttaggcttctcactcccaagtctcatcaaagttattgtaaatttgccaaacctaaagaaaaatgggaggaagcatcatatgaatggagcctggtagagtcaccttgcaaagagtcaaactttctggcatctcatacttagccacatcctatttggttgtgtgtgtatctgtgtgtgtgtgtgtgtgtgtgtgtggtatgtgcatatgc

SEQ ID NO: 84153 - DNA, 828 bp, Homo sapiens
tgatctctttccactccttaagctttgtaagttcaataatgtgggtgcatatgtcaaagttcagaacaatggacataactgttcttgaggtgagccataagttgcctattataattcacatagagtgtcccttcgtggcacatatgtgcctctattttattgatcttgcctcacctacatcttaaacacctattcccaatgtgtctttcttcttatttctaggggttgaacatctctggatttctcaggaagtgtttatatcccttctttgggaacctctytttctccttagtgtccattcaactgtccctttgttttcttaaactcctgtcctctgccatctttgaggtgaggtttcaccgattatctttttgtcctttggtctagtttattggccatcttttattttttaaaattctgctggatatgactggacaggacttcaggtataagcaaatggaagtgggggtaaaggcaagtgaccatcactgatctcccttaggctcaagcattgataagataatcagaacttgtactggtgagtgtgaataaaggcttttggaagttagactcttatttaagagaactcaggatttaggaaaagacctgctgagtcagacttaggcttctcactcccaagtctcatcaaagttattgtaaatttgccaaacctaaagaaaaatgggaggaagcatcatatgaatggagcctggtagagtcaccttgcaaagagtcaaactttctggcatctcatacttagccacatcctatttggttgtgtgtgtatctgtgtgtgtgtgtgtgtgtgtgtgtggtatgtgcatatgc

SEQ ID NO: 84154 - DNA, 754 bp, Homo sapiens
tagaaaaagcagtgttcagcatcaaaataaaggaagaattaaagtacaataaaaattcaagaaaaaaatcaactaatggatgtaagaaaaagtggcatttgaactgttaaggaagagatggcttggaaraagagcttttagcttaaacaatagcttaacaaaagccacacagagttctaaaagtgtagactgaaggaattaagaggagtatggtgtgtggatgtttgtgtgtgtccagcagcaaatagttgttaagaagactatttcatatggtagaggactttgaattctgggttgatgagattgtattttattttgtattgaatgagaaatcatgtaagaattttgagcttgaaattcgcaagttattgttttaataacacgactgttggcagcaatgcacaggatgagtcagaaggggagggatcagacataaaactaactgcaaagttgtcactatagtttcaataagaaataatgggagcatgaactttgcagaaaagataaaaatggaatgaagacagaactctgtgagagaaagaacatagtaactattctaatgatgttgggatcctcagtcttccagaggatggcaatgggatttgctaatacaggatgggagagagaatgatgtgtgagtgtctgtgatgaagatgtcacacttacagcagaaactgagaaacagtggataacttctgaaatctttgggtataatcatctatcttgtgtgatctaatgtatgttaattcttgta

SEQ ID NO: 84155 - DNA, 754 bp, Homo sapiens
tagaaaaagcagtgttcagcatcaaaataaaggaagaattaaagtacaataaaaattcaagaaaaaaatcaactaatggatgtaagaaaaagtggcatttgaactgttaaggaagagatggcttggaagaagagcttttagcttaaacaatagcttaacaaawgccacacagagttctaaaagtgtagactgaaggaattaagaggagtatggtgtgtggatgtttgtgtgtgtccagcagcaaatagttgttaagaagactatttcatatggtagaggactttgaattctgggttgatgagattgtattttattttgtattgaatgagaaatcatgtaagaattttgagcttgaaattcgcaagttattgttttaataacacgactgttggcagcaatgcacaggatgagtcagaaggggagggatcagacataaaactaactgcaaagttgtcactatagtttcaataagaaataatgggagcatgaactttgcagaaaagataaaaatggaatgaagacagaactctgtgagagaaagaacatagtaactattctaatgatgttgggatcctcagtcttccagaggatggcaatgggatttgctaatacaggatgggagagagaatgatgtgtgagtgtctgtgatgaagatgtcacacttacagcagaaactgagaaacagtggataacttctgaaatctttgggtataatcatctatcttgtgtgatctaatgtatgttaattcttgta

SEQ ID NO: 84156 - DNA, 846 bp, Homo sapiens
caggtccaatcccaggggttcctakttctccttctgtgcctgctgtaacctcttggccacagcagtgatcagtgctgccccttttccactgccatcttctgacagcatgaatgtcacatcacatcgaggggctagttccttcacagtttcctgcaatattctagaaaagctatgaaaaagagaaagaaacatcatcagcccttccatgtagaatcagaacatttataaatgatcataatctaatttctttagcttcttccctttggtttgcttttcaaggctctaaacagcttcttctaatttttttttttttttagacatggtctcactctgttgcccagggtgtagactgcagttgtgcaatcacagcccactgcagcctcgagttcccaggctcaagccccccagctcagcctcccatgtagctgggaccacaggtatgcactatcacgcccagctaatatttgtaatttttgttcattttgtattttatttatttatgtttgtggaaatggagtctccctgtgttgcccaggctggtctcaaactcctgggctcaagtgatcctcccgtctgccattacaggcatgagccactgcactcagccaacttacatttcttgagccccgtgtgaagcactttacatgtgctaactcatttcaacctcacacatttagccctatgtggtagggattattagtgctggccttttgtggatgaggaacctggggtttagagaggccggctaacattcccacatcgtattaccaggtagcagaggcaccagggctcacaccttgtctgtcagattgaataggtgacttgaccacacagcactcctttccc

SEQ ID NO: 84157 - DNA, 1213 bp, Homo sapiens
caaattaaatgctttgccagcgtgcatagctgggtttcattggctctatagtacctgattcagttttaaagccctgcagtccttttatcactaaactgtatttttagttctcagtacatgagaaatcagaaatttgtgatgttagtggtggcctgaggctaccaaggcaagagcattgcatgtgttgataacatattatcaggttcctcaagtaaggacctgatattttcagggatccagtataaaccaaagaaggcattcagatttatctacaattactacgagtgaaaaactagggaaagagaggtttctgggtgggatgagacattttgttgggcctgtcagaaaacaaatttgtaagtcatagcctgcacttcatggctattggtttcaggaacagttccaaaggatttttgatacagctgacagaaaggggctgtagatttcagtcatacatttccaagatggtcgggtaaactggagacacctctgtgctttccagatgaaagctagtgtgtttcattctagccttcctggtagcaatgggtggactagaaagtcatattcctgttcctgtagtccatttaatagtgagtatgggtgttttgagttatgctaatcaaaagcaacagtagcagaggggatatataacactgtaagaaaatatctccaacttgatgcacactcccatcaccaagaataacctttctggtgtatgtctgtggaggtcctgatagcaaggtttacccwgcagtggcttccatgaggcccaggtctatcaataggaactgaatctatttggttaaaagaccttaaaaattatcttcctggccattatggagacaaatcatgacttcttgataagaattgttgggctggggcatactattgaatgttttctaactttattagaattgggcattagcaagactcattcaactataaaaatggataaaatactttaaaaattatttatttgaagacatcagactggctaaggcaacaaggacatgaggagtccaatccctgaaagaagaaaaatgcattgaagtgagtcctgtatataacttagtctttttcctttcagggaaattgccacattctcagtggaagacatagaggcagagcagagagcagcagcctagagcttgctttggtctcaagacaaaaattagagttcaggttttcagggcaactaaaacttgagagacca

SEQ ID NO: 84158 - DNA, 2336 bp, Homo sapiens
tgaagaggacagagacttcttcatgaagaagaaacagtatgacctcacgaggctgatggccgcaccaactgctgttggacttggggtctagaaccagttgtgttaagtaaaccattcaagccttctgggcctcaatttcttaatctgtaaaaggaaagatgatctccctgaggttccttcccaccttgattattctctataaagaaggatttggctaaaagcagctagtgctcattgagcacttcctggacatgattttcatattaatcaacacagtagcctcatggtagagctgcagcttttattcccattttacaaaggaggggagtgaggctcaaggagattaagggatttgcccttctacatccaaacccagatttgagcaaatctaaagccttgaatccctgtgttacaaaaccttcaaggaaggggatgcatttaggggaagagccaagaagggaagagcattccagggaaggcaagcagtgtggacatagtcaggacctaagtggcaagactgtagtgtgttcaggaacagcaagatgacctcgatggctggagcaaagagttgcacagcaaactgggtcaacgtgcttctagcacaccttccaacagccccaaaggaaacctatacaccctccccaggccctcctccagcaatatcagaatgttagtttcctgtacaggtggaaagagtctttaaaaggctgcctcctctgagatatgttgcataaattattttgaggaaaaacatgatttatgaacttccccaaccttcagaactgtggcaagggacctcccccaaaggttggaagcattttctttcttttttttaggatggatcctggctctgtcatccaagctggagtgcagtgacacaatcttggctcactacaacctctgcctcccgggttcaagcgattctctcgcctcagccttccaagtagctgggattacaggcacatgccaccaagcccagctaatttttgtatttttagtagagatggggtttcaccatgttgaaagccaggttggtcttgaactcctgacctcaggtgatctgcctgcctcggcctcccaaagtgctgggattacaggcgtgagccactgtgcccagcctggaagcatcttttcatcagagatggagctgaagttaggcatcagcatcccccagcctctgtcattggatgttggtctaaagagaccttgtgatctgccaggggagcttctggttggataaggacaaccgcttcaccagattatgaccaggctatgacaggcagcagagcccagaaatgtgctgcagggccttcctcccgtgagctcccctgagctcctcagcaccaggttcatgaattacgggatagaatctcctttaccctgtggttacaggtattgttctagccccaccataagatgrtcatttcttaaaaaaaaaaaaaaaaagactatttttattacagcaacacacacacatcatcaaatagcattaaaagactgaatcctctggacttattttctgctatctacttactgattcataccttttagataatatgccaatatgcattgttttgacttcctatcataataattgaccgttttagtttttttctacttcgttttatccctttttttttttttttttttagagaaatagggtcttgctatgttacccaggctggtcttaaacttctggccttaagtgatccttccacctcgacctcccaaagtgctgggattacaggcatgagccaacatgcccaactccccctgtattgttatagcacaatttttgtttaatgttaatgtgctgatgtcttcgttaaagtttttgaaaatttaataagtaaatgctggtcactggtaagccaagtagtaatgtcctctgatgatatctgattaaactacttgacatggtcagtatccatctattttgacttatgaagatggcaatttcacattggtcagcctaaactttggtgtaagttttgtttcttggagttaataactgattttttttttgtatgtgtttctctgaggctgaaagattttatatcttttaaagaccttttcttagttcctgggagcctgttctaatatgacagttggaagcctggaaaaagtttccaggcagactgtggaggaaggcctagagaactgagcgtgccagttggatctgctctccccagcctgattctcggcaggatctggaggagactcgtgtaccaagacaccaaggagtgagtttttgggagcgccacactgcagagaagctcagagcgggtggggggaggctgttccctagagaggagatgctgttacagaactggagc

SEQ ID NO: 84159 - DNA, 521 bp, Homo sapiens
aacttaaggtctgagaagatgaaccgtgctctagagaaaataagagatccggccgggcgcagtggctcatacctgtaattccagcactttgggaggccaaggcaggtggatcacttgggctcaggagttcgagaccagcttggccaatacggtgaaaccccatctctactaaaaatacaaatattagctcagcatggtggcatgggcctctaatcccagctactcgggaggctgaggcaggagaattgcttgaacccgggaggcagaggttgcagtgagccragatcgagccactgcactccagcctgggcgacagagtgagactttgtctgaaaaaaaaaatgagagagagaaaataagagatcctacagagaactctgaattactaaagccacttatcttagactggccctgtccaccccaggccagaggaaagggtctgtttggatgtttgaaatctaatacaaagtcagatagagaaagtctgtgtgaagagcagccttgcagaaacatacaagcca

SEQ ID NO: 84160 - DNA, 521 bp, Homo sapiens
aacttaaggtctgagaagatgaaccgtgctctagagaaaataagagatccggccgggcgcagtggctcatacctgtaattccagcactttgggaggccaaggcaggtggatcacttgggctcaggagttcgagaccagcttggccaatacggtgaaaccccatctctactaaaaatacaaatattagctcagcatggtggcatgggcctctaatcccagctactcgggaggctgaggcaggagaattgcttgaacccgggaggcagaggttgcagtgagccgagatcgagccactgcactccagcctgggcgacagagtgagactttgtctgaaaaaaaaaatgagagagagaaaataagagatccyacagagaactctgaattactaaagccacttatcttagactggccctgtccaccccaggccagaggaaagggtctgtttggatgtttgaaatctaatacaaagtcagatagagaaagtctgtgtgaagagcagccttgcagaaacatacaagcca

SEQ ID NO: 84161 - DNA, 980 bp, Homo sapiens
tggtaccagtctaccaagagtagggcatgtgctcccagatgtgtttctggctgtggtgatagtgatgacgattcccaaatttatccccacctttcttaccaagtaactactcttgtttatgtccacacgagaatcactagcagcagttagagaatgtcaaagtggctgtcttagtctgtttgggttgctatactataataaaatgccgtatattgggtggcttataagcaataagaaacttacttctcacagttctggaggctaggatttccaagatgaaggtgccagcagatttggtgtcttgtgagggcctgcttcctggcaccttctcactgtgtcttcacatggtggaaaggatgaaggatctctctcaggcctcttttgaaagggcacaaatcccatttatgagggctccaccctatgacrtaattatctcccaagtgtccaatctcctaatatcatcactttggaggtcaggattttgttttttttttagacagagtctcgctctgtcaccaggctggagtacagtggcacaatctcggctcactgcaacctccacctcccaggttcaagggattctcctgcctttgtctcccaagtacctgggactacaggtgcgtgccactatgcctgactaatttttgtatttttagtagagacgaggtttcaccatgttggccaggatggtcttgatctcttgaccttgtgatctgcccacctcggcctcccaaagtgctgggattacaggcatgagccactgcgcccagccggcggttaggattttaacatacacattttaagaggacacaaacactcagaccatagcagtggcccatcacaaagtagaatgtctatttgcaaaattgtggtccattacttttaacttccttatatattttgctcacctcaaaaccaactccaccatggtaggctgatagaatgatggataagcagtggatgataagtatacgcatgca

SEQ ID NO: 84162 - DNA, 980 bp, Homo sapiens
tggtaccagtctaccaagagtagggcatgtgctcccagatgtgtttctggctgtggtgatagtgatgacgattcccaaatttatccccacctttcttaccaagtaactactcttgtttatgtccacacgagaatcactagcagcagttagagaatgtcaaagtggctgtcttagtctgtttgggttgctatactataataaaatgccgtatattgggtggcttataagcaataagaaacttacttctcacagttctggaggctaggatttccaagatgaaggtgccagcagatttggtgtcttgtgagggcctgcttcctggcaccttctcactgtgtcttcacatggtggaaaggatgaaggatctctctcaggcctcttttgaaagggcacaaatcccatttatgagggctccaccctatgacgtaattatctcccaagtgtccartctcctaatatcatcactttggaggtcaggattttgttttttttttagacagagtctcgctctgtcaccaggctggagtacagtggcacaatctcggctcactgcaacctccacctcccaggttcaagggattctcctgcctttgtctcccaagtacctgggactacaggtgcgtgccactatgcctgactaatttttgtatttttagtagagacgaggtttcaccatgttggccaggatggtcttgatctcttgaccttgtgatctgcccacctcggcctcccaaagtgctgggattacaggcatgagccactgcgcccagccggcggttaggattttaacatacacattttaagaggacacaaacactcagaccatagcagtggcccatcacaaagtagaatgtctatttgcaaaattgtggtccattacttttaacttccttatatattttgctcacctcaaaaccaactccaccatggtaggctgatagaatgatggataagcagtggatgataagtatacgcatgca

SEQ ID NO: 84163 - DNA, 980 bp, Homo sapiens
tggtaccagtctaccaagagtagggcatgtgctcccagatgtgtttctggctgtggtgatagtgatgacgattcccaaatttatccccacctttcttaccaagtaactactcttgtttatgtccacacgagaatcactagcagcagttagagaatgtcaaagtggctgtcttagtctgtttgggttgctatactataataaaatgccgtatattgggtggcttataagcaataagaaacttacttctcacagttctggaggctaggatttccaagatgaaggtgccagcagatttggtgtcttgtgagggcctgcttcctggcaccttctcactgtgtcttcacatggtggaaaggatgaaggatctctctcaggcctcttttgaaagggcacaaatcccatttatgagggctccaccctatgacgtaattatctcccaagtgtccaatctcctaatatcatcactttggaggtyaggattttgttttttttttagacagagtctcgctctgtcaccaggctggagtacagtggcacaatctcggctcactgcaacctccacctcccaggttcaagggattctcctgcctttgtctcccaagtacctgggactacaggtgcgtgccactatgcctgactaatttttgtatttttagtagagacgaggtttcaccatgttggccaggatggtcttgatctcttgaccttgtgatctgcccacctcggcctcccaaagtgctgggattacaggcatgagccactgcgcccagccggcggttaggattttaacatacacattttaagaggacacaaacactcagaccatagcagtggcccatcacaaagtagaatgtctatttgcaaaattgtggtccattacttttaacttccttatatattttgctcacctcaaaaccaactccaccatggtaggctgatagaatgatggataagcagtggatgataagtatacgcatgca

SEQ ID NO: 84164 - DNA, 980 bp, Homo sapiens
tggtaccagtctaccaagagtagggcatgtgctcccagatgtgtttctggctgtggtgatagtgatgacgattcccaaatttatccccacctttcttaccaagtaactactcttgtttatgtccacacgagaatcactagcagcagttagagaatgtcaaagtggctgtcttagtctgtttgggttgctatactataataaaatgccgtatattgggtggcttataagcaataagaaacttacttctcacagttctggaggctaggatttccaagatgaaggtgccagcagatttggtgtcttgtgagggcctgcttcctggcaccttctcactgtgtcttcacatggtggaaaggatgaaggatctctctcaggcctcttttgaaagggcacaaatcccatttatgagggctccaccctatgacgtaattatctcccaagtgtccaatctcctaatatcatcactttggaggtcaggattttgttttttttttagacagagtctcgctctgtcrccaggctggagtacagtggcacaatctcggctcactgcaacctccacctcccaggttcaagggattctcctgcctttgtctcccaagtacctgggactacaggtgcgtgccactatgcctgactaatttttgtatttttagtagagacgaggtttcaccatgttggccaggatggtcttgatctcttgaccttgtgatctgcccacctcggcctcccaaagtgctgggattacaggcatgagccactgcgcccagccggcggttaggattttaacatacacattttaagaggacacaaacactcagaccatagcagtggcccatcacaaagtagaatgtctatttgcaaaattgtggtccattacttttaacttccttatatattttgctcacctcaaaaccaactccaccatggtaggctgatagaatgatggataagcagtggatgataagtatacgcatgca

SEQ ID NO: 84165 - DNA, 980 bp, Homo sapiens
tggtaccagtctaccaagagtagggcatgtgctcccagatgtgtttctggctgtggtgatagtgatgacgattcccaaatttatccccacctttcttaccaagtaactactcttgtttatgtccacacgagaatcactagcagcagttagagaatgtcaaagtggctgtcttagtctgtttgggttgctatactataataaaatgccgtatattgggtggcttataagcaataagaaacttacttctcacagttctggaggctaggatttccaagatgaaggtgccagcagatttggtgtcttgtgagggcctgcttcctggcaccttctcactgtgtcttcacatggtggaaaggatgaaggatctctctcaggcctcttttgaaagggcacaaatcccatttatgagggctccaccctatgacgtaattatctcccaagtgtccaatctcctaatatcatcactttggaggtcaggattttgttttttttttagacagagtctcgctctgtcaccaggctggagtacagtggcacaatctcggctcactgcaacctccacctcccaggttcaagggattctcctgcctttgtctcccaagtacctgggactacaggtgygtgccactatgcctgactaatttttgtatttttagtagagacgaggtttcaccatgttggccaggatggtcttgatctcttgaccttgtgatctgcccacctcggcctcccaaagtgctgggattacaggcatgagccactgcgcccagccggcggttaggattttaacatacacattttaagaggacacaaacactcagaccatagcagtggcccatcacaaagtagaatgtctatttgcaaaattgtggtccattacttttaacttccttatatattttgctcacctcaaaaccaactccaccatggtaggctgatagaatgatggataagcagtggatgataagtatacgcatgca

SEQ ID NO: 84166 - DNA, 980 bp, Homo sapiens
tggtaccagtctaccaagagtagggcatgtgctcccagatgtgtttctggctgtggtgatagtgatgacgattcccaaatttatccccacctttcttaccaagtaactactcttgtttatgtccacacgagaatcactagcagcagttagagaatgtcaaagtggctgtcttagtctgtttgggttgctatactataataaaatgccgtatattgggtggcttataagcaataagaaacttacttctcacagttctggaggctaggatttccaagatgaaggtgccagcagatttggtgtcttgtgagggcctgcttcctggcaccttctcactgtgtcttcacatggtggaaaggatgaaggatctctctcaggcctcttttgaaagggcacaaatcccatttatgagggctccaccctatgacgtaattatctcccaagtgtccaatctcctaatatcatcactttggaggtcaggattttgttttttttttagacagagtctcgctctgtcaccaggctggagtacagtggcacaatctcggctcactgcaacctccacctcccaggttcaagggattctcctgcctttgtctcccaagtacctgggactacaggtgcgtgccacyatgcctgactaatttttgtatttttagtagagacgaggtttcaccatgttggccaggatggtcttgatctcttgaccttgtgatctgcccacctcggcctcccaaagtgctgggattacaggcatgagccactgcgcccagccggcggttaggattttaacatacacattttaagaggacacaaacactcagaccatagcagtggcccatcacaaagtagaatgtctatttgcaaaattgtggtccattacttttaacttccttatatattttgctcacctcaaaaccaactccaccatggtaggctgatagaatgatggataagcagtggatgataagtatacgcatgca

SEQ ID NO: 84167 - DNA, 978 bp, Homo sapiens
aaaatatattaagtccatgaattcaagtgggaggttgggagaaacagatggcagaagggaatggagctgtgcctgtgtgcaactcctagagatgattagagaatgcagggagcacacgtcccgatggagcccagagtctcagggagactgggctgggcagcccctcttcgagtgagtttacttatggaacccgcacccaacctcaggcaaatgaagtcaatagtacacagtgggtgagccacacattggggaccgttgggctgggaagggtggttgggagaaactcatgcagtggacaaagagtgagaccacacacaggtggccttgggttgcaactcaaagtgactgggccatcatgtccccagtacgtcccctcaatgtgtgggagtccatgttgccaygcctgtttgacatggtgcctctagctgttaagacatgtacaagagaagacttgctaagctttggctgcactggtgaaggatcccgggccctctggaatcatacacaatccatcagagattcctagattccatgataaggaacccaactgcaaacggagagtccaccttgcagatcaaccagagccccgcgttcagaatcttgcctttcttagggtaccccggtcctcttttttttgccctaaatatagccctttcaatctgggctcagaaatacataaactgaactcacacctgaatgatgcagctctttcttgccatgtgaaaaatacattcagctttgattcagaatgctttcgggtggtcttacttgccataattttaaggtgaggaggacccagcctgagaaacggagctggagctgtggctggggaggtgttgatgaactggcttagcttgtcagccgttcttgcctgggtaacttttcctacccttggctgccactgacaggggtgaagctccttctcccaagggatggacacagtgggtgggaggaggtgccactgccatctttcatgca

SEQ ID NO: 84168 - DNA, 1142 bp, Homo sapiens
atatcccaatattaaaaatttgttacctaaattttgaaacgtatcagggtaaatgtttttctaaatttcctaatcctcacaaagcctgtttataattttagtcaccaatgcacgtatataattccagattatttcttaatgctaacttttcattactagtcctttaaattatgctattacttttttttcttaaatctcaccaaatgattgtcttaattttcatttttttgtcagagtactgatacttcttttggtgatttttctcatcgttcatttggactttcacatttttcattacctttgttcatctctttagttatattgacttctaaatttggaagtttattctgttaattccctatttcttctttttaatagaaccttttagagctgtatacttcctcctgagtactgttttagaaaaattctacaaaaataatttttatatttaaattctaagtgttttataatttttatgacatcattatatttartatacatttcaaagcatgtgtgtgtgtctgcatgtcatgaactactaaatgttggagtttaaagtcactgcaatttagtggcagtaactggagtggtgagaggcaggagcctggagcgagactgctggcattggaatcctaactctctactcctcagctgcataaccctgggaagacattgtaagacatttctccttttttggcctcagtttcattaactacaaaatagagttgtcatgaggtctcagtaagtgtatacaagtgcttagaacagtggtcggcacatactgagtttcatataactgctactatattgttacttattttgtgtggtcaaaaaatgttacctgtatgttattctttgaaactgaagagactgttgctttataatttagtagtagatcagttttcatgaatgtttcctgtgtgtttatcaatgatctaactctttttttttctcccaaaccctgtgatttctcctcttcacatttagcccattcaaattcagacactaggtcaccaggcatccgtggggtccttctccaccctgtcatgtcagtgcagatactgtgttcactccacccccagacgcacactgtcttatcactgttgcccactggagatcaattgcctttactctgataccaa

SEQ ID NO: 84169 - DNA, 1142 bp, Homo sapiens
atatcccaatattaaaaatttgttacctaaattttgaaacgtatcagggtaaatgtttttctaaatttcctaatcctcacaaagcctgtttataattttagtcaccaatgcacgtatataattccagattatttcttaatgctaacttttcattactagtcctttaaattatgctattacttttttttcttaaatctcaccaaatgattgtcttaattttcatttttttgtcagagtactgatacttcttttggtgatttttctcatcgttcatttggactttcacatttttcattacctttgttcatctctttagttatattgacttctaaatttggaagtttattctgttaattccctatttcttctttttaatagaaccttttagagctgtatacttcctcctgagtactgttttagaaaaattctacaaaaataatttttatatttaaattctaagtgttttataatttttatgacatcattatatttagtatacatttcaaagcatgtgtgtgtgtctgcatgtcatgaactactaaatgttggagtttaaagtcactgcaatttagtggcagtaactggagtggtgagaggcaggagcctggagcgagactgctggcattggaatcctaactctctactcctcagctgcataaccctgggaagacattgtaagacatttctccwtttttggcctcagtttcattaactacaaaatagagttgtcatgaggtctcagtaagtgtatacaagtgcttagaacagtggtcggcacatactgagtttcatataactgctactatattgttacttattttgtgtggtcaaaaaatgttacctgtatgttattctttgaaactgaagagactgttgctttataatttagtagtagatcagttttcatgaatgtttcctgtgtgtttatcaatgatctaactctttttttttctcccaaaccctgtgatttctcctcttcacatttagcccattcaaattcagacactaggtcaccaggcatccgtggggtccttctccaccctgtcatgtcagtgcagatactgtgttcactccacccccagacgcacactgtcttatcactgttgcccactggagatcaattgcctttactctgataccaa

SEQ ID NO: 84170 - DNA, 638 bp, Homo sapiens
agtccaaaatcaaggtgtcagcagggacttgctcccttggacactgggtagcattcttccttgcctctccccagcttctgctgggggctggcactccttggcatttcttggtttatagctgcagccctgcagtccctgcctctggcttcacctcatgttctctgctgtgtctgtgcctccatatctatgtccattgctttgtaaaaggacacaaaacatgttgggtttaggaaccatcctattcccgtatgagtccatcttaattaattacatctgcaatgaccctatttccaaataaggtcacattctgagggactggggwaggggaggttaggactctaacatattttttacgggggaggcacaattcaaaccataacaaacactctcatttgggtaataacttttaagctacatatccttactcagtgattttgcatgatcctcccaaatgacttttgagttagtcagtctcctcagtttacaaataagaaaagagcacttatctaccctttcttctcactctttcctcgcattttttttcctgaacactcatttgaaactattgacatatatcctatgatatatgtcaatatatatgtaagagaaagagagctctttgtaagagatctcccagg

SEQ ID NO: 84171 - DNA, 1359 bp, Homo sapiens
tttaggcttccaggtcaaagagaaaactctgcttttgttttggtgcaaaggctgaagctacaaaaggagattaacttcggacaattctgcttttagtcttgcaacaccaactgcctctaaggaaagggtggcccaagkgcttaaatcaaagccagaaaaaacacagcaagaacaaagaataaagtagaatttaatatcccagcaaagtacttcacagcagttgtcaactagttgagttggagagctgctgaaatgctagaaaattattagttgtgtgtcttaatgggattctgcaaaggtttggggcctttgcaagacccctctggggtcttgacacatctataggctgctacctgcttccctcttctgattcaatcattcctcttttgacttgattttgagaaatgcccaattttccctacaccttcttttatttatttatttgtttactgctgtggtacttgagcccttcttatgtgaagcaaacacatataactggtgttcctaatgtaactgcaaaatgttccaggaaatctgaaattgtattcagttcaatataggagtcagaaccccagagtgttggccttcttttttcttctgattacatgctaatttttctccttcggtatcatttattcacaaactcttggaccacctttagtcctacttcaaccaggagaattttttgttcttttctctggttgctgaagccttgcatatgatacttgcattttaccactttcaaatcacagatttttttcctctccattacaacacaatgtgccccattgtcataaactcacaagttcaaggatgtctgagagaaggcaatttcagtaagactgatgaggtgaaaatgaatacatgcccttctatccaagtgcagatggagtgtagagaaacaggatatctcagttttggggatgaatcacaggtattgaacactggaaaaagttttgaagaagtaatcattttgtggtgctgttatgcattctaccaaataaaagcaaaaaactgcaaaacaagtatactccaagcacaacaagtatactccaatgcaggataattactgcattatctctgcagcagaataggttataagaaacaatactggagtttaatgctcttaataaatcataagaatattaattcaacatttcccaaagagtctgaagctagttaactgggaaagactaagatgaattgtgcggccttgagcacatgtcttccctttgtttggcctcactttcctttattagccaagtaagggatctgaactagaggagatctgaagtcacttccaggtccaccattcgcagtatgaaggatataataatgattgtccttgaattgacggga

SEQ ID NO: 84172 - DNA, 1329 bp, Homo sapiens
agtcactctatccatgctgtttttcacaaagcctagcacctgtaagaagctcattgaccagtaaagctgctgaagttgtgagaaaaaaaaaatgtagtaatcgaaagactatatatagtctttgatcctatttctcctactagctgggtgtttctggtcaaatcacttagccacctgggacacacttggttcttcatctgtgagatgggaatttctaccccacaggaaggttgtgtggaagagagattcagtgtcttctcacacaattttggtgcacagtaaatgttagcgyttttctaatactcttgcttctattttccagctaattgcctcagcctctgctgctgccgtgaacctaccaggaagagctctcatgtctaagagctctgatgtccatgatgaattagggttcagctttcctctctcttctatcactttactccacaaaggcataaatgtcagagccacgggaacaagaagacaatggctgcccttgggtaggagagagcagaccaggagggagagatggttcttccaatctcaaatcagctgtcatcatcccagcttgtctcctttgacaaaaccgacttggggagttctggatgctcaagccatcagcctgtccagggtaacatgctcatcgcttcctaacttgctctgtctttgttattgttaggacaggatgtgtgaaaatctgaacagccccagtgaccagagctcagcagtttatcaaacaaaagctgacatttcatctgaacaattttatttctctctaaagcaccataacacaaaaaagctcagattgttagtgtgatctgtattgtaatggatcttcaggctttgctgttagagaggggatgctggtacttggagccagcaatgggaatgggacaagggagaagcagcaagtagctaacattcttagcgtgtgtcctgcgtgtgtcaggcagtgggctgggcatcctgtgttctccatccttactgtaatcattattttggatgtgatgaccttcattgcaaaggtgaagactgattctctgagaatagccattcattccatctctccctttagaaagtgtgaagtgaggtttaattcctggtacatcactttcctctacatgaaattctcctaacctgcagataaaaagctcaggttgcgatcctgtctctcctacataagagctgggtgagcctgggcaagtcttatagattctccctgagcttctttctctcatctttaaaattaaaatacttattttagcccttaactacttttggggtcactgtgtaactcggtcaagataatccatcaccaaacccttgtatgcc

SEQ ID NO: 84173 - DNA, 1329 bp, Homo sapiens
agtcactctatccatgctgtttttcacaaagcctagcacctgtaagaagctcattgaccagtaaagctgctgaagttgtgagaaaaaaaaaatgtagtaatcgaaagactatatatagtctttgatcctatttctcctactagctgggtgtttctggtcaaatcacttagccacctgggacacacttggttcttcatctgtgagatgggaatttctaccccacaggaaggttgtgtggaagagagattcagtgtcttctcacacaattttggtgcacagtaaatgttagcgcttttctaatactcttgcttctattttccagctaattgcctcagcctctgctgctgccrtgaacctaccaggaagagctctcatgtctaagagctctgatgtccatgatgaattagggttcagctttcctctctcttctatcactttactccacaaaggcataaatgtcagagccacgggaacaagaagacaatggctgcccttgggtaggagagagcagaccaggagggagagatggttcttccaatctcaaatcagctgtcatcatcccagcttgtctcctttgacaaaaccgacttggggagttctggatgctcaagccatcagcctgtccagggtaacatgctcatcgcttcctaacttgctctgtctttgttattgttaggacaggatgtgtgaaaatctgaacagccccagtgaccagagctcagcagtttatcaaacaaaagctgacatttcatctgaacaattttatttctctctaaagcaccataacacaaaaaagctcagattgttagtgtgatctgtattgtaatggatcttcaggctttgctgttagagaggggatgctggtacttggagccagcaatgggaatgggacaagggagaagcagcaagtagctaacattcttagcgtgtgtcctgcgtgtgtcaggcagtgggctgggcatcctgtgttctccatccttactgtaatcattattttggatgtgatgaccttcattgcaaaggtgaagactgattctctgagaatagccattcattccatctctccctttagaaagtgtgaagtgaggtttaattcctggtacatcactttcctctacatgaaattctcctaacctgcagataaaaagctcaggttgcgatcctgtctctcctacataagagctgggtgagcctgggcaagtcttatagattctccctgagcttctttctctcatctttaaaattaaaatacttattttagcccttaactacttttggggtcactgtgtaactcggtcaagataatccatcaccaaacccttgtatgcc

SEQ ID NO: 84174 - DNA, 1329 bp, Homo sapiens
agtcactctatccatgctgtttttcacaaagcctagcacctgtaagaagctcattgaccagtaaagctgctgaagttgtgagaaaaaaaaaatgtagtaatcgaaagactatatatagtctttgatcctatttctcctactagctgggtgtttctggtcaaatcacttagccacctgggacacacttggttcttcatctgtgagatgggaatttctaccccacaggaaggttgtgtggaagagagattcagtgtcttctcacacaattttggtgcacagtaaatgttagcgcttttctaatactcttgcttctattttccagctaattgcctcagcctctgctgctgccgtgaacctaccaggaagagctctcatgtctaagagctctgatgtccatgatgaattagggttcagctttcctctctcttctatcactttactccacaaaggcataaatgtcagagccacgggaacaagaagacaatggctgcccttgggtaggagagagcagaccaggagggagagatggttcttccaatctcaaatcagctgtcatcatcccagcttgtctcctttgacaaaaccgacttggggagttctggatgctcaagccatcagcctgtccagggtaacatgctcatcgcttcctaacttgctctgtctttgttattgttaggacaggatgtgtgaaaatctgaacagccccagtgaccagagctcagcagtttatcaaacaaaagctgacatttcatctgaacaattttatttctctctaaagcaccataacacaaaaaagctcagattgttagtgtgatctgtattgtaatggatcttcaggctttgctgttagagaggggatgctggtacttggagccagcaatgggaatgggacaagggagaagcagcaagtagctaacattcttagcgtgtgtcctgcgtgtgtcaggcagtgggctgggcatcctgtgttctccatccttactgtaatcattattttggatgtgatgaccttcattgcawaggtgaagactgattctctgagaatagccattcattccatctctccctttagaaagtgtgaagtgaggtttaattcctggtacatcactttcctctacatgaaattctcctaacctgcagataaaaagctcaggttgcgatcctgtctctcctacataagagctgggtgagcctgggcaagtcttatagattctccctgagcttctttctctcatctttaaaattaaaatacttattttagcccttaactacttttggggtcactgtgtaactcggtcaagataatccatcaccaaacccttgtatgcc

SEQ ID NO: 84175 - DNA, 741 bp, Homo sapiens
atttaaattccaacattttgtcacagagataataragagtcactggattttagaaattgctgcttagactctacccagtgtaatcattatgactctaattatgattgagtttcttcacctcaataacaggttctccaactactcaagtacttccattttatgaatttcaaatatgcactgaattacatttgttctgcctggcatggaatttagcaaatgtaaatctgcttcagaacacattcactcccagaattttttttttttttttttttttttttgtgatggagtctcactctgtcacccaagctggagtgcagtggtgcaatctcggctcactgcaacctccacctcctgggttcaagcgattctcctacctcagccttcagagtagctgggactacaggtgcctgccaccacacccagctaatttttgtatttttagtagagacggggtttcaccatgttggccaggatgttctcaatttcttgacctcatgatctgcccgcctcggcctcccaaagtgctgggattacgggcgtgagccaacgcgcccagccatataaaaaatattttaagatttcactggacttggtatgttaaaacatacaaacaaacaaaaaaactaccttaatctcaaggcagaggacaaaatctcattctttccttttgacgtgtccagtagctagcacagtgcttgacaccaggtatatactcaataaatggttgaggaattgaatgca

SEQ ID NO: 84176 - DNA, 691 bp, Homo sapiens
aaacccctgcctacactgaatggtgttaacttgaggacaggtaagtactgaaatgatatttgtgatagagtcaggaagaggagggaaaattttgattccaatgaaaggcttagggagagaggacaattcacaatgagtaggtatcatgaaaacactggggatctgtaaagggggcgtggggcacaggatggaaggaaatgagccagcaagaggtgaaggggttcgtattagtctgttttcatgctgctacgaaggcatacccaagactgggtaatttataaagaaaagaggtttaactgagtcatttccacatggctatggaggcctcaggaaactaataatcacagtggaaggtgacataggcacatcttacatggtggcaagtgagagaaatgaggagtgaagtggggaaaagccccttagaaaactgtctgatcttgtgagaactcacacactatcacaagaacagcacgggggagacgtccccataatctaatcacctcccacaaggtcccttccccaacatgtggggattacaattcagattacaaktcaagatgacatttgggggaaacacaaagccagaccatattagagttttagagaataataggaagttcagaaaaacaattttttcatactcttcaatttttaccaaaatattttggagacaagtggagtgacattggaa

SEQ ID NO: 84177 - DNA, 713 bp, Homo sapiens
tttgaaacagtgttagttgtcatagaaatgattttgttgcaatgtaagttttgcatagatgcagtcttttgttttattaaaaaacactaattttagttattcagtgcttaataagagtggctgaggctgggggccgtggttcacgcctgtaatctcagcagtttgggaggccaaggcgggcggatcacctgaggtcaggaatttgagaccagcctgaccaacgtggagaaaccccgtcctactaaaaatacaaaattagctgggtgtggtggtgcatgcctgtaatccccagctactcaggaggctgaggcaggagaatcgcttgaacctgggaggcagaggttgtggtgagccaagatcgcgccattgcactttagcatgggcaacaagagcaaaacttcatctaaaaaaaaaaattagaaaattagtggcatggaaataagtagtgggcaagatttgactgtgggcttttgtttgtcaatcactgaattagactgatatggcctttggagtcagactccttagtttgaattctggccacactcactcttgaattgtgtaatttggggcggattactcaacctctctaaaccctctaagacaggacaagagttctccccttatagaataaagattaaataaggagtatgcatgaaataatacaaacrattagtaaatagtattttaaaattctactataatgctctaaatgg

SEQ ID NO: 84178 - DNA, 1268 bp, Homo sapiens
atgtacatagaaatgtataaactagtcatttttacgtactctcttcagtgcacaaaatgcaaatgtgactggaagatgaaccatgcytatatctctatcagcatgatatattataggaacaaaataaaactgtcacactgtggagaagtgcggaagtaaatttacatgattacttgaaattttggtaacattgaacaaattagccatagtatttcacgttgtttaaacactcattaacataattttcaaaagtaaaatagattcagggacaaatattcaggggattatttctcatttcacagaataaaatgcttaacagaagttatcagtatatttggccaagtgttcaatgagaggtgtgcattatacacaagtgtattaatatgaaaccttgtacatggcaaatttaggattacataattaaaaacatccaaacatccgattatggatctaaacacactgaaaccacttgaaggcatagttcatacaagtatgtcttctgctttgaattttaattatcttgagttctcattatggagcattggtgggagtttcttttgtaaattacttaaaattattgatgagctttgtgaatcccatttgttttatgaaaaaaatattttatagttaattttctgtgagaatatagttgtaacatgatttaaagtgtttctgttgtataattattggctaacagcagattttttaaggaagttacactgttgtgcttcagaccttaggttattacaaggtgctactaggatttccaaaatgtgtgccacaagataagttatgacattatacttataaggctccaacatttaaacacctaccttctctttccttgttcttcataatgtcaaagtagctaaattttgattttgaccaagtaatttcattttcctttagtgattaaaaaaagtcataaaatcaacttctttttttgctatcaaatcactttcatccatattaattttaaaaaagaatgagttttgttttaaagtaagttttgccttttctcctggtcagtaatgtacattttaaatttcaagatttgcggtatttcatgtccaaattaaaagttaagagattcatttcatgctattccattaatgatgattttttttcttaaagctatctatgagcagtcatgtgaagcctataagcacagaggaaatacttcagggttttactatatagattcagatggaagtggtcccctggaaccatttcttctatattgcaatatgaccggtgagttaatcagc

SEQ ID NO: 84179 - DNA, 958 bp, Homo sapiens
attgtactttataagatacaatttcagtatcttaattgtattgggagaccatttcaagtaatgcaaaaatccaggactgattgtacaagataatagcactgtagatggaggaaaggtgttagatttttctctttgcatagctatgaggtgtgagaaaacaaaaagccaaaaataacgacacagtttttgccctgagtaattgagtgtttgaattgtcattatttaagatgtgatcagaaaaggtttaaggtgaaagatcataagctctgttttacacawttttcttttttttttagtttgagatgtctgtttttccatgttcaaacaagattctgaggaggcatttgaatatgggagcaaccgcttctttatactaatgaatgtttagttctaaaaactgcaggtggtggcaaactctgtgccaacacatattttggcagaaattgctataaatttgtatcttcaaaggtttttcatttaacacaacttggtagcttctatctgtctcacaaccattgaggacattgcctcatacaccaaaacagcccaaacaaatggtgttcctgcatatgtgtcttctcaatgaagctctcccgcctgtgcagtacaaatgcccagacagcactgcaggtgcttctcatccagtgcaaccactgagttgggccaatggaaataatatcatcatggatcttcccaaatgattcttatgtgtacttaggtttgggaatcactgttttagacttcatggttctcaaacttcagtatgcactggcaactctggtatgcgagaattaaacataacaaatgtgagaggactttacagagaaaaaaagagagaagactttacaagtgtcagatatgaattccagtgccaaaatgttttattattttttttccagcttggataggttggattgtgagtgagatttatgtaacaatccaccactgcaaacctgta

SEQ ID NO: 84180 - DNA, 1352 bp, Homo sapiens
aaacttccattgagtgtaatattcgcttccagcatgaagatttttcagtgttatttctgtagtcttcaaataaatagccaagccattaaatggaagataaaatatatacttccaaataaatcttaaatcatgacaagggagtgccaaatcatgcctaacgttttttaacagctaggatatttttagagaataaatttattgagataaatcagggactttacataacattccataatgctttaatgggcatttcatgatttcaaatcaattttgctttggtatgttaattactatgatttatattttgatgctaacttgtttcaaaattatttttaaagaaattgcatatgtgagctgctctcaattcattttttactatcatgcctaaattaaataggaactgctggtttcttttctacccaaaaacaaatgtattggtcatttaagcctaaataataacttttttataaaaaaagtgttcttaaggaaatgccagcaatcatactgttttgcatatccttaaatccaatcaatctttctccttttctccttttattctttttaatgattttggaagaaaaggaattatattgggagagaaggtggtggaacataaaacagatgtcacatttttcacgtttttctttcagatggaacccctctgagttggtgggtaggaagaaccaatgaaacgcaaacctactggggaggttcttcgcctgatcttcaaaaatgtacttgtggattagagggaaactgcattgattctcagtattactgcaattgtgatgctgaccggaatgaatggtgatttccatacgatttctttatgcaagaaaaagttcatttaaaaaaattaatcactcaaagtatgtatagctagccagatactgaacaagttagtgcaatgaagtaattaaataaaggtttgttttaatgaaacrtggtgtagtcaatataatccttagtattaagtcaatgcctttttgagttattttctgtaatggaccataagtcatgtatattttaattttataatcaaacagagacacctgttacatggggaattaattattattccttttaaaactatatataagtagatattctattatcttaaaaatacgtttacagccaaagcacatttcttcaatagtctacctataaaagctttaaaattatcaacttagaatttactacaattattttaacatgcaattgttttatatttttaaaaagacaaatcataccacaaagaactaatgttctgtggattatatttgaaaaaatagatctgtaacattttaggaattttaaaatcaaatttaaaatattcctctaagcagagaaga

SEQ ID NO: 84181 - DNA, 1352 bp, Homo sapiens
aaacttccattgagtgtaatattcgcttccagcatgaagatttttcagtgttatttctgtagtcttcaaataaatagccaagccattaaatggaagataaaatatatacttccaaataaatcttaaatcatgacaagggagtgccaaatcatgcctaacgttttttaacagctaggatatttttagagaataaatttattgagataaatcagggactttacataacattccataatgctttaatgggcatttcatgatttcaaatcaattttgctttggtatgttaattactatgatttatattttgatgctaacttgtttcaaaattatttttaaagaaattgcatatgtgagctgctctcaattcattttttactatcatgcctaaattaaataggaactgctggtttcttttctacccaaaaacaaatgtattggtcatttaagcctaaataataacttttttataaaaaaagtgttcttaaggaaatgccagcaatcatactgttttgcatatccttaaatccaatcaatctttctccttttctccttttattctttttaatgattttggaagaaaaggaattatattgggagagaaggtggtggaacataaaacagatgtcacatttttcacgtttttctttcagatggaacccctctgagttggtgggtaggaagaaccaatgaaacgcaaacctactggggaggttcttcgcctgatcttcaaaaatgtacttgtggattagagggaaactgcattgattctcagtattactgcaattgtgatgctgaccggaatgaatggtgatttccatacgatttctttatgcaagaaaaagttcatttaaaaaaattaatcactcaaagtatgtatagctagccagatactgaacaagttagtgcaatgaagtaattaaataaaggtttgttttaatgaaacatggtgtagtcaatataatcsttagtattaagtcaatgcctttttgagttattttctgtaatggaccataagtcatgtatattttaattttataatcaaacagagacacctgttacatggggaattaattattattccttttaaaactatatataagtagatattctattatcttaaaaatacgtttacagccaaagcacatttcttcaatagtctacctataaaagctttaaaattatcaacttagaatttactacaattattttaacatgcaattgttttatatttttaaaaagacaaatcataccacaaagaactaatgttctgtggattatatttgaaaaaatagatctgtaacattttaggaattttaaaatcaaatttaaaatattcctctaagcagagaaga

SEQ ID NO: 84182 - DNA, 1352 bp, Homo sapiens
aaacttccattgagtgtaatattcgcttccagcatgaagatttttcagtgttatttctgtagtcttcaaataaatagccaagccattaaatggaagataaaatatatacttccaaataaatcttaaatcatgacaagggagtgccaaatcatgcctaacgttttttaacagctaggatatttttagagaataaatttattgagataaatcagggactttacataacattccataatgctttaatgggcatttcatgatttcaaatcaattttgctttggtatgttaattactatgatttatattttgatgctaacttgtttcaaaattatttttaaagaaattgcatatgtgagctgctctcaattcattttttactatcatgcctaaattaaataggaactgctggtttcttttctacccaaaaacaaatgtattggtcatttaagcctaaataataacttttttataaaaaaagtgttcttaaggaaatgccagcaatcatactgttttgcatatccttaaatccaatcaatctttctccttttctccttttattctttttaatgattttggaagaaaaggaattatattgggagagaaggtggtggaacataaaacagatgtcacatttttcacgtttttctttcagatggaacccctctgagttggtgggtaggaagaaccaatgaaacgcaaacctactggggaggttcttcgcctgatcttcaaaaatgtacttgtggattagagggaaactgcattgattctcagtattactgcaattgtgatgctgaccggaatgaatggtgatttccatacgatttctttatgcaagaaaaagttcatttaaaaaaattaatcactcaaagtatgtatagctagccagatactgaacaagttagtgcaatgaagtaattaaataaaggtttgttttaatgaaacatggtgtagtcaatataatccttagtattaagtcaatgcctttttgagttattttctgtaatggaccataagtcatgtatattttaattttataatcaaacagagacacctgttayatggggaattaattattattccttttaaaactatatataagtagatattctattatcttaaaaatacgtttacagccaaagcacatttcttcaatagtctacctataaaagctttaaaattatcaacttagaatttactacaattattttaacatgcaattgttttatatttttaaaaagacaaatcataccacaaagaactaatgttctgtggattatatttgaaaaaatagatctgtaacattttaggaattttaaaatcaaatttaaaatattcctctaagcagagaaga

SEQ ID NO: 84183 - DNA, 1352 bp, Homo sapiens
aaacttccattgagtgtaatattcgcttccagcatgaagatttttcagtgttatttctgtagtcttcaaataaatagccaagccattaaatggaagataaaatatatacttccaaataaatcttaaatcatgacaagggagtgccaaatcatgcctaacgttttttaacagctaggatatttttagagaataaatttattgagataaatcagggactttacataacattccataatgctttaatgggcatttcatgatttcaaatcaattttgctttggtatgttaattactatgatttatattttgatgctaacttgtttcaaaattatttttaaagaaattgcatatgtgagctgctctcaattcattttttactatcatgcctaaattaaataggaactgctggtttcttttctacccaaaaacaaatgtattggtcatttaagcctaaataataacttttttataaaaaaagtgttcttaaggaaatgccagcaatcatactgttttgcatatccttaaatccaatcaatctttctccttttctccttttattctttttaatgattttggaagaaaaggaattatattgggagagaaggtggtggaacataaaacagatgtcacatttttcacgtttttctttcagatggaacccctctgagttggtgggtaggaagaaccaatgaaacgcaaacctactggggaggttcttcgcctgatcttcaaaaatgtacttgtggattagagggaaactgcattgattctcagtattactgcaattgtgatgctgaccggaatgaatggtgatttccatacgatttctttatgcaagaaaaagttcatttaaaaaaattaatcactcaaagtatgtatagctagccagatactgaacaagttagtgcaatgaagtaattaaataaaggtttgttttaatgaaacatggtgtagtcaatataatccttagtattaagtcaatgcctttttgagttattttctgtaatggaccataagtcatgtatattttaattttataatcaaacagagacacctgttacatggggaattaattattattccttttaaaactatatataagtagatattctattatcttaaaaataygtttacagccaaagcacatttcttcaatagtctacctataaaagctttaaaattatcaacttagaatttactacaattattttaacatgcaattgttttatatttttaaaaagacaaatcataccacaaagaactaatgttctgtggattatatttgaaaaaatagatctgtaacattttaggaattttaaaatcaaatttaaaatattcctctaagcagagaaga

SEQ ID NO: 84184 - DNA, 1671 bp, Homo sapiens
  misc_feature (1)...(1671): n = A,T,C or G
annnnnnnnnnnnnnnnnnnnnnnnnnnnnnnnnnnnnnnnnnnnnnnnnnnnnnnnnnnnnnnnnnnnnnnnnnnnnnnnnnnnnnnnnnnnnnnnnnnnctaaaatatttttatttttattttaaataattttgcttttattaaaaatactattttaaaatcttgctggctgttgtggtcatataaataccaccaattcacataattagaaataaaatgctgtttaaacaataaatacacttgtgatgtgctttgggatttgctgacacatgagcttaaatttacccactttggattttaagcaatgaaagaaatttattcaaatcaatatgtgcctgtattttattatcaaactggtaaagctagaaaccatgtttcccaggatccccttacttgtctgcttctgagtaaaagccaaaaaagagagcttgggtgatacttgatagttagaattaaaacaccagcaacacattttgcccctaaggttgtttttctaatcatgtgcgatgaggggtggtcacacagcagctggtttgttccagtctgtcctggctctcctgcactatggcccatctcttcttcctgacagctggcccaaccgaccgacagcaagcccaggcccatcgctggatgcatggctggggacacacaggggtggtggctacccacaggcaacaactgccaaagttctcttcaaccctcctaggctgaaaacgtctgtaagttccaacatgcctccacacatcactgctttgggcagaattaatgacttctctgatcctcgcacttcccctgccaggccattcattttttagttcctctgaaaattgctgaggtccaagtcctaatatagatccactgttcacaatacctagcattggtgctgcttccctaactgaaacctaaccaagacagctatatttaaattgtccccgtttccacagaattagaatgtaatgcagtctsaccaacattgccatttggacagattggccgatgcaatattgtaacacatcctgtatttgcttgcggtagtaagatctcttggtgcagatttcctacatgtgatgtttcttacatgctgttgtctgttcgtctcttttatttatcatgaatgactatggcaaaatacaagtttttcaaatgtctccctaatatacatggttgttatctgattccagaaactctttatgctcatctggtaagtttgtcagggaatatcttatttaaaaaatcacagagcaggctgggcatagtggctcatgcctgtaatcccagcactttgggaggctgaggcaggcggatcacccaaggtcaggagttcaagatcagcctggctaacatggcaaaaccttgtctctacaaaatatacaaaaaattagccaggtgtgttggcaggactacaagtcccagctactcaggaggctgaggtaggagaatcgcttgaatctgggaggcggaggctgcagtgagccgagattatgccactgcaccccagcctgggtgacagagtgagacttcatctcaaaaaagaaaaaaaaaatacagattaaaagaaattaggctcctgtgagtaatgacatcacaataaaattaaaatatcaaccataaaaacactgctttacttcatataaaaataaaataattatgcccccaaaattataattcc

SEQ ID NO: 84185 - DNA, 1721 bp, Homo sapiens
tgggagtgaactagaggggaaagggttctaagtggacacatcatcttttcttgtgaggccttttggtaccatgggcaagagcatgactggaggagggctaaagtagggtccctaaaatgcaagactgccacagggacctggctggtacaggcagtggggtgatcaactcttgccaactttagctgaacgaccttcatcctgggaacaacctccttcccccagtcctgttgaactgtgacagtcgttccccctggaaagttctatgtagataaggctgctctctatcactgggatctgtgttgtctaggtggaaagtgtttttatagataattcttcagccagtttatgttcaagtaaaaagttactccgtgttgtgagacacgtctcatcagttctccttctctctaaatttaactgcaagtttccagttattttatctgggctgttccaacagcccgggttatacctccactctttaccagtcttgacagtggctgtcatattgggagagtgggctgctcctgaactagcagcactgtgtatatgccacaccagacttctcttatccatccatcactttttactctgtagctttttttccaccctcaaacaggtgcttttcacaaagtcggactgtattgtggtggtacattctgctcagcttttatcatttataaattatacattttaaatttagattctctagattgagaatggctgggtgtctaatttctgtacattcccctatggaatcttttgcaatgcctaacacaacatgcagcacaatctggggatactgtgtgcaaaattctcacatccccctcccttgtgtaaagcaaacattctccatccaatgaactgactacagcactgtgaagtctaacctgacatctcacttctgctgcagtgacatatagcgataatttatctgttatcctcggaggtgcttaacatgctgactgcctccagtaatggatccatccattaattcagcactaagtattcttcagaaatcttcctattttaggactttcatctcaaattgggctcagtgctgagcttctctctggtattgcattatattaacttgttgctgcctcttatcatagactaatgaggctaacctgggttgaacccctctttgttcatagaatctcttgcttattgaacattgtagctaggaatatgaattgcctcatgataggatagtatgctttctgtaaaatwccatgatctttcctggtgactctgggtttgcttagctttgttccctacaggcatattgcacaatttattttattctgagttagtttgagatgtgtcaggaaacgccacctggagaaaagaagattagcagagttatttatatgcctggcatattatagttgcttcaaaatattatggaactattatcctttcagtttttaccctaacattcttaattggctaataagtcattcagaatacatactgagattatggtaaccatatcttacactacagaagaaatttaagcgctggaaatgtgtgtagtaccatgtacaataaattaacactcaaaaagctttgatgaatttttcttgatatattaaatttgaaacttcaaagtctccattaggttaaaataaaatgtttcggtgtgtctgataatagttttaaatttgaatgctgtcctttacttgccatgtaaatgtattttgtcagcaaaacaaagcattaag

SEQ ID NO: 84186 - DNA, 746 bp, Homo sapiens
ccaccgtgcccggccctcacctttttttttttgagacagagtctcgcactgtcacccaggctagagtgcagtggcgcgttcttggctcactgcaacctctgcctcctgggttcaagcgattctcctgcctcagcctcctgagtagctggaattacaggcacgtgccaccactcccagctaatttttgtatttttagtagagatggggtttcaccatgttggtcaggctggtctcggctgacctcctgatctgcccgcctcagccgcccaaagtactgggattacaggcgtgcagctctgcctagccactaagttacatttttaaaaaatcagcttcgggacatacagtatctcaaattgatattatactgtatatagttttttgtggagacaatgtcttcctatattgcccagactggtctcaaactcctggcctcaagcagtcctccttcctcagtctcccaaggtgctgcgactacaggcatgagccatcatgccaggccagtccttgcttttttcgttcagtataattctcttccaaccataatatctgacatagtgataatttattcatttttactgctttattaaagtacatgttatacaaatactaccatgatattcctgtcagtggacattaggttgtttattttctttatmttttgttgttaaattgacagtgctgtcatgaatatttctgtatatgtatcctggcacacagcagcaagcatttttctagggaggtag

SEQ ID NO: 84187 - DNA, 470 bp, Homo sapiens
atggtgaaaccccgtctctactaaaaatacaaaaattagctgggcgtggtggcacggttttaccatgttggccaggctggtcttgaactcctgacctcaggtgatccacccaccttggcctcccaaaaagtgccggcattacaggcttgagccaccatgcccagactgctttagaattgcatttatactgtgtatttttttaccctaatgacagtgtaagagacttaaatgaatatgactgtcacacaaaaaaggtgtgtcctacttcaacactcaacattcaagaaatatttgtcaaagacctgctgtaagccaggtaatgtaccatttgaacctatggcggttattagtagaacagctcaggaatgtacttctttagtgctgcttatcagctttaccaagggataattggtyacctctattcacagaattcataacaactttttgcaaattaattttttttattggac

SEQ ID NO: 84188 - DNA, 1201 bp, Homo sapiens
tgcatgaattcattaagattcagaagcttctaacatccatttccaccactgttttacaaacaaacaaacacacaaacaaaacagagtccagaattttacccagcattgcactggaggcagraatgaacccaggatttaaacccaggggtctggtccagagtctgcactcttgccagcacaccattagcccccttgtttctaccttaactcacttttcaccttctgctattaactacattttcctatcattagattgttaatactcacattgtcctgcacaacaaccaagttgttaaaagcttcgtccttagttgaaaacaaatagcatctgtattattatgactgcaaacatttttcacggctctgccaagtacagctttcatactcttttcttctcctctgggccccttgagggagatgattcctagcactataaaatctacttttccttatactgcattattgcttgaaatcacagtaatgtttccttcatatttactctaaaacttttatatagacttttatttgaaatggtatataattaccgtttttttcttatgtgacatacctttcataccattcattctttcaatcacaggtcttttccgttttttagctccagctccttctccctgctcaaatttggactggttgctcttctaggctggctgaacagctacaaccagcgatttccctttgattgcgctcttgtattgttagatccgttgtgtcctgaattcttaagcttagttcctcattttgctagagttcctcctccagtagcatccaaagaaaaataactttctggctgggcatgttggctcaagcctgtaatcccagcactttgggaagctggggtgagagaagtgattgagcccaggaagagtctgagaccagcctgggcaacaaggtgagaccccccaaccccccgctgcttcaagaaagtaaaaaaaaattagccagccaggcgtggtggctcacgcctgtaatcccagcactttgggaggccgaggaaggcagatcatgaggtcaggagtttgaaaccagcctggctaacatagtgaaaccccgtctttactaaaaatacaaaaattagccgagcatggtggtgcgttcctgtagtcccagctaactgggaggctgaggcaggagaattgcttgaacccaggaggtggaggttgtggtgagccaagatcatgca

SEQ ID NO: 84189 - DNA, 965 bp, Homo sapiens
tgcatcagggtctagtgttagctcagcttcaatccaggtcaacataaaagaacaacccctgccatagccgttacatatgcctgcatgtcccatgaaatcagaaatgtgaccacagasacagcagtgattctgtgaaatcaagaacaccagactttcaagtcgaaagcattctcgtctaaatcacctgctgagcgagtgtgcaattttggtgaaatcacgtaatcactgagtcttggttttctgatccgtaatttagaaaaataatgcctacatcgcaggaaagttttgagaattaagttaatagcatataggagtgctttataaactgtaaagtagtttagagatgttaacatacctcaaaggcatactgtagaatataaaatcctcaggagtgatataacctcactgccactctcttctatgggatatttccctgaattcagaatatttaaaattacatcatcctctccttccaacccaatgagatctcattatctcttttgtttctgtcaggggtaccactgttcttcctactccaagaccagtgactttttttttttttttttaagagacgaggtctcgctctgtcatccaggctgaaatgcagtggtgtaatcacagctccctgcagccttgacctcccaggctcaggcaatcctgcctcagcctcctgaggaggtgggattacaggtgtgcaccatcacgcccagctaatgtttttattttttcttagatatggggtctcactatcttgcccaggctcaagaccagtgatctttgaatcagcgtcgactcccctgtctgccttgcccttctcccgacaccaaagaagcaaacactgaatgctgttacttctgtctctccttctgttacttttccttcttctgctcagtccagcctgtgagctttcagttgggcatagatgccactgttggcttacattgtctacacttcttctttcatca

SEQ ID NO: 84190 - DNA, 965 bp, Homo sapiens
tgcatcagggtctagtgttagctcagcttcaatccaggtcaacataaaagaacaacccctgccatagccgttacatatgcctgcatgtcccatgaaatcagaaatgtgaccacagagacagcagtgattctgtgaaatcaagaacaccagactttcaagtcgaaagcattctmgtctaaatcacctgctgagcgagtgtgcaattttggtgaaatcacgtaatcactgagtcttggttttctgatccgtaatttagaaaaataatgcctacatcgcaggaaagttttgagaattaagttaatagcatataggagtgctttataaactgtaaagtagtttagagatgttaacatacctcaaaggcatactgtagaatataaaatcctcaggagtgatataacctcactgccactctcttctatgggatatttccctgaattcagaatatttaaaattacatcatcctctccttccaacccaatgagatctcattatctcttttgtttctgtcaggggtaccactgttcttcctactccaagaccagtgactttttttttttttttttaagagacgaggtctcgctctgtcatccaggctgaaatgcagtggtgtaatcacagctccctgcagccttgacctcccaggctcaggcaatcctgcctcagcctcctgaggaggtgggattacaggtgtgcaccatcacgcccagctaatgtttttattttttcttagatatggggtctcactatcttgcccaggctcaagaccagtgatctttgaatcagcgtcgactcccctgtctgccttgcccttctcccgacaccaaagaagcaaacactgaatgctgttacttctgtctctccttctgttacttttccttcttctgctcagtccagcctgtgagctttcagttgggcatagatgccactgttggcttacattgtctacacttcttctttcatca

SEQ ID NO: 84191 - DNA, 965 bp, Homo sapiens
tgcatcagggtctagtgttagctcagcttcaatccaggtcaacataaaagaacaacccctgccatagccgttacatatgcctgcatgtcccatgaaatcagaaatgtgaccacagagacagcagtgattctgtgaaatcaagaacaccagactttcaagtcgaaagcattctcgtctaaatcacctgctgagcgagtgtgcaattttggtgaaatcacgtaatcactgagtcttggttttctgatccgtaatttagaaaaataatgcctacatcgcaggaaagttttgagaattaagttaatagcatataggagtgctttataaactgtaaagtagtttagagatgttaacatacctcaaaggcatactgtagaatataaaatcctcaggagtgatataacctcactgccactctcttctatgggatatttccctgaattcagaatatttaaaattacatcatcctctccttccaacccaatgagatctcattatctcttttgtttctgtcaggggtaccactgttcttcctactccaagaccagtgactttttttttttttttttaagagacgaggtctcgctctgtcatccaggctgaaatgcagtggtgtaatcacagctccctgcagccttgacctcccaggctcaggcaatcctgcctcagcctcctgaggaggtgggattacaggtgtgcaccatcacgcccagytaatgtttttattttttcttagatatggggtctcactatcttgcccaggctcaagaccagtgatctttgaatcagcgtcgactcccctgtctgccttgcccttctcccgacaccaaagaagcaaacactgaatgctgttacttctgtctctccttctgttacttttccttcttctgctcagtccagcctgtgagctttcagttgggcatagatgccactgttggcttacattgtctacacttcttctttcatca

SEQ ID NO: 84192 - DNA, 965 bp, Homo sapiens
tgcatcagggtctagtgttagctcagcttcaatccaggtcaacataaaagaacaacccctgccatagccgttacatatgcctgcatgtcccatgaaatcagaaatgtgaccacagagacagcagtgattctgtgaaatcaagaacaccagactttcaagtcgaaagcattctcgtctaaatcacctgctgagcgagtgtgcaattttggtgaaatcacgtaatcactgagtcttggttttctgatccgtaatttagaaaaataatgcctacatcgcaggaaagttttgagaattaagttaatagcatataggagtgctttataaactgtaaagtagtttagagatgttaacatacctcaaaggcatactgtagaatataaaatcctcaggagtgatataacctcactgccactctcttctatgggatatttccctgaattcagaatatttaaaattacatcatcctctccttccaacccaatgagatctcattatctcttttgtttctgtcaggggtaccactgttcttcctactccaagaccagtgactttttttttttttttttaagagacgaggtctcgctctgtcatccaggctgaaatgcagtggtgtaatcacagctccctgcagccttgacctcccaggctcaggcaatcctgcctcagcctcctgaggaggtgggattacaggtgtgcaccatcacgcccagctaatgtttttattttttcttagatatggggtctcmctatcttgcccaggctcaagaccagtgatctttgaatcagcgtcgactcccctgtctgccttgcccttctcccgacaccaaagaagcaaacactgaatgctgttacttctgtctctccttctgttacttttccttcttctgctcagtccagcctgtgagctttcagttgggcatagatgccactgttggcttacattgtctacacttcttctttcatca

SEQ ID NO: 84193 - DNA, 728 bp, Homo sapiens
cttgagcccaggagtttgagaccagcctgggcaacatagggaaaccccatctctataaaaagttttaaaaattagttgggtgtgatagtgcatgcctgtggtcccagctatgcagacggctgaggtgggaggatcacttgagcccaagaagtcaaggctgcagtgagctgtgatcgtgccactaaattccagcctagataacacagcgagaccctgtcttagaaaataaccccaaaaaacaagaaagcaagtacctcacgttagtgttggtgccagtcctataatctaatctatatgaatttaaatcagcatgttttctactacgttatcttatcatcttgagtttgctaattcctgtattctaccagtctccaactttgcttaaatgcccctatcagtgaaaagaaattatagggcatgcatccttgataaggatactcatttataaattataaaaatgtactgatctaatagcatagatatgtttaaaagatgaaatgaggaaaaaaaawacgaagttctaacgttttttccaaatcccaaagaatcatcttctgatacagaccttgaccctatcccattgtttctaattcctttagcaatcccatacactcagagtatgacgtgctgtctcacacttgttgctattaatatattcttttggaatttttccagctctttgtttagtccctgtgtgaactgaaagtaggaatgggacttctactttg

SEQ ID NO: 84194 - DNA, 820 bp, Homo sapiens
tgccttgcctccggtttctgttcccctgttgacctccaccatccgcagtccccgctcctggcctcgccccaacctcctgcttccaccacaacagttgtgctttttacacacgtgggattcccagtttgttcagaacgggattctctctgtactaagcacagcaaacttcccatgtgaccgtggtaagaagggaaggactggggctttcgagggacatcttgactcttgatattctaatcttatcttgggcctcagttttctacacgtaaagttacggttattgggccggctaaatgagattatgcacgtaagtcacttaccttagaactggatatgctgcgtgcaccgtacattgtttactattgttattaacggtggcagtagtaggagtagtaaattttaaattctgtctctggtgttttaaacctcctagttcaatctttgtggtcaaggtcaagaggttcaagcagcctgtttaagctcaattttagagccaaacatgtttcccagattccgtttcttaayggaaggttggagttttgccccgtaacagtgagtgttttggacggtgttccattttggaacataatacaggcaatcacccagtttcattttgaaagaacaattgagattactatgtgtgagatgagacagatttgggttgttttcctcctcaggctgctatgttagcagggtgtgtcctgaagtattctctctttccaatttcctttctgccttccagatttaaggtgccacttctaaatctgagcctgtgtatagtagtattgtattgtgtgtagatcctgatattttcccgaag

SEQ ID NO: 84195 - DNA, 557 bp, Homo sapiens
cgcatgcctgtaatcccagatactcaggaggctgtggcaggagaatcgcttgaacccaggaggcggaggttgtggtgagccaagatcacatcattgcactccagccagggcaacaatagcaaaaactccgtctcaaaaaaaaaaaaaaaacaacaaaaagacactgccgagaaagcagagaaaggagaatgctcgcactgctgctgggaacataagttagtaaggccactaaggagaacagtataaaggttcgtgaaaaaactacaatagatctaccatatgatccagcaatctcactgctgggtacatatccaaaagaaaggaaatcagtgcattaaaattataagtgaattctacagcatttagaatttatagcattcatttatttattaatgaattcagtgcagagatarctgccacccgtgtttactgtagcgctattcacaatagccaagatgtggatcaatgtaagtatccatcaacagaataatggataatataaatgtgtcatatatacacaatgaaatatcactcaaccacgtccatttgcaacaaca

SEQ ID NO: 84196 - DNA, 664 bp, Homo sapiens
cttgatcccaggagtttcaggttacagtgatctatgaccatgccactgcattcctccaacctgggctaccacagaatcagaccctttaaaaaaaaaaactaacaattataaaaaagataagggaaataaaggcatcaagtatcagagaacacattaatagagatggatctaggtcaattgatgaagtacagttgtccctctgtatccacaggagattggttccaggagtcctgtggatactaaaatccaaagatgctcaattccctgatataaatgatctagtatttgcatawaacctatgcatatcctccctgcatacttcaaatcatctctagattatttatacaatgtaaatgttgtataaagagttattatactgtatttttttatttctataatttttattgttggtgtttttgttgttgttgttgagaaaaggtctcactttgttgccaggccagagtgcagtggcaaaatgatggctcgccacagcttcgacctctcaggctcaagcaatcctcccacttcagcgccctaccccacccagtagctgggactacaggcaagctcctcacacccggctaattttatattttctgtaaatatggggtctcactatgttgctcaagctgttctcaaagccatgggctgcaccaatcctccc

SEQ ID NO: 84197 - DNA, 644 bp, Homo sapiens
gggactggccaggtataaggctaagtggtgggcatctgtcccctgtgtcatccacacatacactggctgtgactatggttttgataatggatgaagcttttcaagcctgtctccttctctctgaatgagtgctcatccagtacctgtagtgatcaaaaaaggcttcgttgcagcagtgctccaccagtttgacagacaagcttatacatgtttatattccataatagtcattgtttgggcttaagctgcaatttaccagccttatcccaccacttttcattttgtctttactggacttcaaattaagaagcacatcatttttgatacatactcaatactggtcagaatgtttkagataaaatcttatcttggaacatgtacatatctttaaacatttcaaaaaggaaattctgcaagtgttcaagtcacattaacaataaatactaagaaagacaacaggccatttattcaatattaaccgcatttaaatgtgagaaaaatcaaagattgttaaaggaaacacactacttgtcagaaatggtatgtgttaataattctgagagaaaaattctaattcatctacaacttcaaagggtaacatttcccaggggaacttaaattaatcatagaaaaggaagatgcaa

SEQ ID NO: 84198 - DNA, 1732 bp, Homo sapiens
aaaaaaaaatcacttcccggccaggtgcggaggctcacgcctgtaatcccagcactttgggaggccaaggtgggcggatcaagaggtcaggagttcaagaccactctgaccaatgtggtgaaaccctgtctctctaaaaatacaaaaattagccaggtgtggtggggtgtgcctgtaatcccagctactcagaagtctgaggcaggagaatcgcttgaccccaggaggcggaggttgcaatgagccaagattgtgccactctactccagcctgggcgacagagtgagactccgtctaaaaaaaaaaaaaaaatcacttcccagactttacacacatgatgaacccagcttagaatgttctccttcttcttcttatccttattttagctcatcttccttcaaggtcatgtcctatattctacataaacttcccaacaactttccctccccatctgggtaaaatttattacacccaattgtactgattatctgtctggctactttgtcctccaagcgccttcccaaygaaactgtgaactctttgaggccattcttcactttctagacttctcttacttcctttatggcacctagttcatccagaacacaagtaaactcaatcaatggtttaaatattcaagctgatggctacacaatgtattcctaccaataagcaactgaacaaaaatgctaactaaggacacagaattagagggatgtttgaatagcagaagcggcggggtctcagttaatttatggaatcctggcagtcaaacattgaggcagactggtgttcctctcagtgtgttttgcagttgggatagaaagatgaataaaatgttgtctgttaccttagaatgcttacagttgatggggtgatcatcaagtccaaaccccattttgcagatgaggaaactgaaactcagaagagtagagacttgttcaagtcatgcagttaagaacagcaagagaccactgtttccccagttaactccacgacagaccatctacacaatttttgtcatatatgaataacaaccattcaattcctaatgctttttctacttaaatcacttaaaaaagaatctttagatttattattaataaagggaaaaccagtattattttctataagtaaaagacacatactaatatgctttaaagtagatgcataacttctaaaataaaaataatagaagttgtgttatcacttaaagtccacatttttgggaaacgctacattacatcaaaatccatattgaccaaaatcaggtagattagcatgcatttcatgtaagatgttactacagacatgtgatcactcacgtatgaaatatcaatctttttgcagaaatcatatctagctgacttgatcagttttacctcaaatgcaaaagaaaagaaaactcagggccattaaaaactagtcaagaaaaaatgtctatccaaaagtgaaggtgccgataggtatttgttaattaaaaaaagaagaaattaattagaagtcatgtgtgagacagttggacttgaagaatacagatttaattagtgtagaaaggtagagaaaaacagcactagtttctaactgttatttcaaatttgctaaaatcagagttgagagttccattgagtctgtaagacgcacctgttctctgtagagaaaacactgtagtttctgaatacaggacaatcaatcttttattaacctgggtattttctaaattgggcacact

SEQ ID NO: 84199 - DNA, 685 bp, Homo sapiens
tttgcttcagactctaccagatacattaggtttttagagacctcagtatgaagtttcagtaaaggctttagatgcacaattaattctttcctctgaccaattagaaattcagatgaggaaggtatttagtccayaaacttggagaaacaagaagtaattacactaaaacaatgctttcagtcaaaatacttccgatgctgaactgaaatcctgacaaataacatccttgggataaggatatctatatttagcatagtcatttacgatgccatttggacttcgacatgtcaagtgagaagggtccacctgacaaatggagttacaaaaaattagagacataatatgctctggccaataactcagatgaaccttgcggcaagggctgtcagtccagatgtctccagttatcccacagatttgtaggcccctactattagcaaacatcatacaacggtctggaattccatgagggaccatgtttggaaagacccatgtgttattctttacattataattaaggtggttacttagaggatgccactcccattgggacttccaatcagaaggagaggctagattctgaaagctacccactagggtttctgatccttttagatcacccttgttgtgctttcctcccctaatctttgaactatcagcaattacaattgtgatgttacaatat

SEQ ID NO: 84200 - DNA, 685 bp, Homo sapiens
tttgcttcagactctaccagatacattaggtttttagagacctcagtatgaagtttcagtaaaggctttagatgcacaattaattctttcctctgaccaattagaaattcagatgaggaaggtatttagtccacaaacttggagaaacaagaagtaattacactaaaacaatgctttcagtcaaaatacttccgatgctgaactgaaatcctgacaaataacatccttgggataaggatatctatatttagcatagtcatttacgatgccatttggacttcgacatgtcaagtgagaagggtccacctgacaaatggagttacaaaaaattagagacataatatgctctggccaataactcagatgaaccttgcggcaagggctgtcagtccagatgtctccagttatcccacagatttgtaggcccctactattagcaaacatcatacaacggtctggaattccatgagggascatgtttggaaagacccatgtgttattctttacattataattaaggtggttacttagaggatgccactcccattgggacttccaatcagaaggagaggctagattctgaaagctacccactagggtttctgatccttttagatcacccttgttgtgctttcctcccctaatctttgaactatcagcaattacaattgtgatgttacaatat

SEQ ID NO: 84201 - DNA, 1205 bp, Homo sapiens
acaaatgctaatttctattatgctttctgaaatatcatattctacccaacatatattctattctttcttccctagcatccttccctacctcctggccacagctaccatatcaaacttaaatttacatttcaaattaagattagtaatcaagcaagcccataaatttaaaccaacatttcagtagccaaggtaaacatttttggaacactgcagaaggaggatcgtggaatagttaaggcaaagataatgaaagctatttcccagaaaaagatgggagaaactaaatgatacattttagctttatcccaaaattaatttagaatttctcattttatagtccaatcattcaagtattaaaaaatccttctataaaaaatttgttatgaaatgtttcattcagcccaggagtgaaatttttcctgtgttcaagaaaaagtgaaaagaaaaacaacagatgttgaattataggaataaaaatttcagatggtttattttctttggaattcatgtaattttaggacagatccatttatttaaattacattttgcagatgggttatctgagaagagattattcttaggagaggagaaaaatacaataaaaaaaggaaatgtgacttctcttctgctgactcctcatgtttttgggcaagagcttcctcatgaatggattgttttctttagctacacttgtaccaaacatgtcaaggccttacctccactaaaaagcacacacacctgcctctcgaacacccggttgaatcaaatccttctacttttgacaatcaagttttcttttatgcaggtttgtrcgctgtcattctctgtatgagctgcttcttccgtgacagtaaagttcaatttaagaagaaaaaaatcctgcatgcctttcatactgaataaaccttcttttcttacctgataaagtaaaaaaaaaaaaatcttaagaaagaactttgtgaataatcttgctttcaaaagggaatttgctggaagcaattgtataaattccaatcatacttccttatgactgttctcttctactctatttttcttgggtgctctggtatttttatttgtcttttttggtatctcaatctctctgttcctcttgatctctctgtcttctacctccatttcaattccaccttctgattctcagtcgtattggctaacatatttatctctgtggtaatgaaacttat

SEQ ID NO: 84202 - DNA, 656 bp, Homo sapiens
gtgatgttatgtcctcacagctcatcgactatgggaagctgggagacactaacgaacgagccatgcgcatggctgacttctggctcacagtgagtgcgacctatctgccttcaaaatcccaccctttgctccctgggggtgggggttggaaaaaggagaactatgcagaattaamcttgggtactcacttatgggccagtgctgctaactaaattagaaactgtgtcttaagttagttgaagtcgatgtgaatatacctctgcacaactgcctataaacgacccctttgtgtaacactgactatgccagattggcgaggggagggggaggtctttctatgtgtggatggaccttacctttgggaatggtgtaaagttaaatgcctctgcagttttgcctgactctgctgtctcttggataattctccctctaggagaaggatttgatcccaaagctgtttcaagtactggcccctcggtacaaagatcaaactgggggctacacaagaatgctgcagatcccaaatcggagtttggatcgggccaagatggcagtgatcgagtataaagggaattgcctcccacccctgcctctgcctcgcagagacagccaccttacactcctaaaccagctgctgcagggtttgcggcaggacc

SEQ ID NO: 84203 - DNA, 1383 bp, Homo sapiens
  misc_feature (1)...(1383): n = A,T,C or G
tatctggagatagaatcttcactgtcttcagagttctggttgtcgggtgacagtagggagctaaatttctgaaaatcatactgacataccctgtatccatctccctgtccagataaataaagttatatataatatgggctaagaaaaaaagcatttaaataaatatattgatggcaatgcttagccacagaatgcaatttacaggtgtaagcagtccagcattatctagccagcattttagtcatattccttctagtcttgtttaaacaagcaaatatggctgatatttttgatactgttatataacataatatttttattaagttagaaatattttttctttcattaactctatttagatcactttatttcaatttctgcatagttttccatgtaacatatgagctacaatttatttgaccagtgccctgtttgcgaaagttgagcatattttgcgtatttcccctccttgtttctgtatatataagtgaaagtgtctatctgcacaaatctttccggaatcagatggttgcgatatttttaggatttgtaatacacattttcaaaattgttttctgggcaaggctgagcccaatntgtatctctctgcatactagtaaagtatgaggggtttacttcctgcacctgccaaccccacatataggcatgacacacatgccttgcctacatggttccaaactatattcattcattatacatattcatagccatcatgcactagatactgttcctgcccatggtaataaaaggatgtaaaagaaaatctgatcctgtcaccatggtgcttatagtctaatcagggagacagagtattgatgaaacaactgcactcagccactagttcaatgtggacactgaccacagtaaatttgaaaataaacctagaaaccattatgttttgataggtgatatgttcccaaaacaaaaattcctagtttcttatctccttgccttgtaacacacgctagaatgatatctcctgggcctctgctacctaatagagatcttatcaaaaagtcttgtgttgcttttccataatgaagcctgtgcttccttgattggaaccttgtctatgcaaattacaaagggacagacaatagtggacccagctctatcctgtattttatggccctgtcctgcagaaatccattttctagcttgcaacctattcctctctctcctcttggactagttaaagaaagtattcctagwtccatagtgatgcctttgaaactctggcccccaatttaggccctaagaactccactggacttcatagaacacattgatcccaagtttaatagcattttatcagatttcacacatcccttctatacatttctgctagctttcttggggtca

SEQ ID NO: 84204 - DNA, 809 bp, Homo sapiens
ggatccatttccccagcttgctaaactcacaaattgcaactccttcttcaagactcaactcaaaggccaatttctcagataagttttccctaacaacctgtgaaaaattggctgtgcaccttcctctttctttccctggcatcctgtgcataccatgaatcaaggtgtattataaatagattccttttagactgtaagccacagatatatgatttattcaatgtctacatctaacaaaagtatttgcctttggtagcactttactaaacacagaaaagamgtaagaaaggaagaacattttttaaaaagagtaaggaaggaaagaactaatacaagtcatttatgaaaggttgccaacatagtctagaaaaactacctgcacgtggtcctgtttaaagaaacaactgggagcaagcagggtaagaaccacgcaggttctcggcatatttatcagcaaatgttcagctccagaaatagcctgaaattagggtaggatgacatggtcagtgggaatcagtcatctgtaaaattcttctgatcagaaaaaaacatttgtattccttgattgaattcaaaaaaagacttgtcagtatctgggtcctgacctttgaagattgcctgaggtgtaatgggaacacaaatatgctgagcaggacaaatgagtaaccagatctgctttgggaagtgacttggcactggctggggctggctgtcatagcactaggccaacaccagggctgggaagaggctaagacgccctggaaaactaaccatgcctggtgtgaaggataaggtctaaactaaaggca

SEQ ID NO: 84205 - DNA, 809 bp, Homo sapiens
ggatccatttccccagcttgctaaactcacaaattgcaactccttcttcaagactcaactcaaaggccaatttctcagataagttttccctaacaacctgtgaaaaattggctgtgcaccttcctctttctttccctggcatcctgtgcataccatgaatcaaggtgtattataaatagattccttttagactgtaagccacagatatatgatttattcaatgtctacatctaacaaaagtatttgcctttggtagcactttactaaacacagaaaagacgtaagaaaggaagaacattttttaaaaagagtaaggaaggaaagaactaatacaagtcatttatgaaaggttgccaacatagtctagaaaaactacctgcacrtggtcctgtttaaagaaacaactgggagcaagcagggtaagaaccacgcaggttctcggcatatttatcagcaaatgttcagctccagaaatagcctgaaattagggtaggatgacatggtcagtgggaatcagtcatctgtaaaattcttctgatcagaaaaaaacatttgtattccttgattgaattcaaaaaaagacttgtcagtatctgggtcctgacctttgaagattgcctgaggtgtaatgggaacacaaatatgctgagcaggacaaatgagtaaccagatctgctttgggaagtgacttggcactggctggggctggctgtcatagcactaggccaacaccagggctgggaagaggctaagacgccctggaaaactaaccatgcctggtgtgaaggataaggtctaaactaaaggca

SEQ ID NO: 84206 - DNA, 2183 bp, Homo sapiens
atctatgcatcctattggtctgtttctctggagaactctgactactacaaagagaattcaaaatcttaagataaaggataatgttttagagtgtgtaaactcaggaagagaagagagaaagacttacaaggcaagtccagaaaatgtttgctgagctaaattccttagccaataacagagccatctctttatccaaacgttctgtttgtcctacacttggagcatcttattgttccccctacttcaataacctcaacaaacttgcttctaccttttcaatttattccttgaggctcattttctgaatctgacaaaaaagaatcatattttatggttattgtagagattaaacctatgtaaagcatctagactagtacctgtgcaacaaatgatggttgtaattatcaattttgttcttgtttctccttctaccatcattatcagactatcttggaattttctgtttcatacctgcccttctcagcagactgtgagcaactcagtggcatggggtccacatcagctcacctctgcatcttagctctcagcatagagcttggtacagagaaaattttcaaatatttgttgaaggaatgaaagagtgaatggctttctccttttctgaacactgttctgccaggcccaactgcttgcagttacttgaatggcacttgaaatttactcttcagaggacagtggtaaaggaggccttttgtgaagatgacctttaggttttggttctattcagttgcattttccttcttttatttcacaagaagagaaactggatgagacatcaagggaaaagacataaaatcctggagagcctagatggaatttgcacctccccaaattgccctgaggtccttagattgcaactaattatcaccaataattagggctgctcttcagagaagcagaaatagtgtcctgtagagagcataccatgttcctcaaagagaaattcaaatgggacagatgtcagtcccctcccagcatcttttgctgatgagggggctctagtctgcttcagtaactgacccagagacttactgcctggactgacaagataataatgagaaaacaacacaacgcatcttgaaagtgttttgaaattttaaaaattcttttatagccaatatcttactagattctcacaccagtcatataatggaaataagatttattaattcattgtagacctaccatgtacaatttacttggctaagcactgaaaatatagtagtaagcacatcacacaaaatacctgcctttaaagaatttgaagattcatgcataagacagtaaataaatgtcattacagtacagtgtaagcagtactataaataaaagtataggtaactatgctaaaaattatgttcacattgtgtgattctgtgactagatgacttggagaaggtagtatttgactgttacagcaaatgaaagtaatgtaatatctccaacataaaaaaagcaaattcacagaaatgaaataacttgttcatggttgtataataactagagagccaaaaccaaaacctaggttctttaacttcaaatctttggcttgttataagaaagcatctctattcaatatacaatttgcctctacagctttcctaaaaatgtctatctagactctgcttgaatacatttagtgacaaaagcttaccacttcataaggtagctcatttcatcataggatagagttcatctttaaaactttcttctttaacagaaatagcaatggggaggaaatattgtgtttaaagaaagaaggggcttgtgtatagctgtggatacagaaagtgtgacttttcgcatagttttgtgagatagacagaaaactagagctctggctaaaatgaaaaggatggaataggccaagagttgatacagatgcagagcaactaggattctcatacagtgctggcagaagtgtcaattggtagtactggcactatttataaaayaaaacatatgggcagtaggttgaatactaccccccactcccctacccccaccaaagatgtccacgttctaatccctagaacctgggaattttaccttatatggcaaaaggcattttgcagatgtgattaaattcaggattttgagatggggatattatctgggattatctggatggatctcatttaatcacaagggttcttttaaga

SEQ ID NO: 84207 - DNA, 702 bp, Homo sapiens
tcccactggctctcaagcaccctgggggtttgactgttagagcacatatggcartgtgttactggaacttgttacatgtacacctatagcaatacttatccagcccttagcatcatctatctaaccttcaccatgaccatcttaggtaatattagtattgttcctactgttttttattatcgttattttgcaaaagtttagtctttcaatggcttgttcagggtctaacagtgagtaaatataaaaggcagagtttaaacctagtttttttttttttttttctacccaactaataacaatgtacgattatggaaataagagaaaattcagaggactgaagattggcacacagtagataatttagcaacacgtgtcaaatgcttcaaaaatgtgcataacctgtgagttatcctttttatttctagggatttattctacagatgccactgaaaatgccacattagttttgaaggtagaaaaaaagcaagaggctgggtgcagtggctcatgcctgtaatcccagcactttgggaggccgaggcaggtgggttacctgaggtcaggagttcaagaccagcctggccaacatggtgaaaccctgcctctactaaaaatacaaaaatgagctgggcatggtggcagacgcctgtagtcccagctacttgggaggttgaggcaggagaatcgcttgaaccagggagg

SEQ ID NO: 84208 - DNA, 702 bp, Homo sapiens
tcccactggctctcaagcaccctgggggtttgactgttagagcacatatggcaatgtgttactggaacttgttacatgtacacctatagcaatacttatccagcccttagcatcatctatctaaccttcaccatgaccatcttaggtaatattagtattgttcctactgttttttattatcgttattttgcaaaagtttagtctttcaatggcttgttcagggtctaacagtgagtaaatataaaaggcagagtttaaacctagtttttttttttttttttctacccaactaataacaatgtacgattatggaaataagagaaaattcagaggactgaagattggcacacagtagataakttagcaacacgtgtcaaatgcttcaaaaatgtgcataacctgtgagttatcctttttatttctagggatttattctacagatgccactgaaaatgccacattagttttgaaggtagaaaaaaagcaagaggctgggtgcagtggctcatgcctgtaatcccagcactttgggaggccgaggcaggtgggttacctgaggtcaggagttcaagaccagcctggccaacatggtgaaaccctgcctctactaaaaatacaaaaatgagctgggcatggtggcagacgcctgtagtcccagctacttgggaggttgaggcaggagaatcgcttgaaccagggagg

SEQ ID NO: 84209 - DNA, 702 bp, Homo sapiens
tcccactggctctcaagcaccctgggggtttgactgttagagcacatatggcaatgtgttactggaacttgttacatgtacacctatagcaatacttatccagcccttagcatcatctatctaaccttcaccatgaccatcttaggtaatattagtattgttcctactgttttttattatcgttattttgcaaaagtttagtctttcaatggcttgttcagggtctaacagtgagtaaatataaaaggcagagtttaaacctagtttttttttttttttttctacccaactaataacaatgtacgattatggaaataagagaaaattcagaggactgaagattggcacacagtagataatttagcaacacstgtcaaatgcttcaaaaatgtgcataacctgtgagttatcctttttatttctagggatttattctacagatgccactgaaaatgccacattagttttgaaggtagaaaaaaagcaagaggctgggtgcagtggctcatgcctgtaatcccagcactttgggaggccgaggcaggtgggttacctgaggtcaggagttcaagaccagcctggccaacatggtgaaaccctgcctctactaaaaatacaaaaatgagctgggcatggtggcagacgcctgtagtcccagctacttgggaggttgaggcaggagaatcgcttgaaccagggagg

SEQ ID NO: 84210 - DNA, 702 bp, Homo sapiens
tcccactggctctcaagcaccctgggggtttgactgttagagcacatatggcaatgtgttactggaacttgttacatgtacacctatagcaatacttatccagcccttagcatcatctatctaaccttcaccatgaccatcttaggtaatattagtattgttcctactgttttttattatcgttattttgcaaaagtttagtctttcaatggcttgttcagggtctaacagtgagtaaatataaaaggcagagtttaaacctagtttttttttttttttttctacccaactaataacaatgtacgattatggaaataagagaaaattcagaggactgaagattggcacacagtagataatttagcaacacgtgtcaaatgcttcaaaaatgtgcataacctgtgagttatcctttttatttctagggatttattctacagatgccactgaaaatgccacattagttttgaaggtagaaaaaaagcaagaggctgggtgcrgtggctcatgcctgtaatcccagcactttgggaggccgaggcaggtgggttacctgaggtcaggagttcaagaccagcctggccaacatggtgaaaccctgcctctactaaaaatacaaaaatgagctgggcatggtggcagacgcctgtagtcccagctacttgggaggttgaggcaggagaatcgcttgaaccagggagg

SEQ ID NO: 84211 - DNA, 666 bp, Homo sapiens
gaggtagaggttgcactgagccgagattgcgccactgtctgtactccagcctgggtgacagagcgagattccgtctcaaaataacaacaacaamaaaaaaccacatacaataagtgttacgaagaaaagtgacaaacataacaggtgtctattacagagagattaaagtctccagagtcagaacatattgttaggagaaggcagtttttaatccaatccttgttgaatgaattgagtcagcaaagtcagaaggcctggaagaggacaaggcttatgtaatcagagtaataacagtaagtccaggctgtctagcggccctcaaagagtggccaaatgttcattttgctaattaagtaatccattaaagcaattatttaatattatcattttatgaaacaaaagacattttaataccaagaaaatcaggagataccattagattaatgtcagccctttaaattgaataaattttatgttataaagaattcacttcattttgcttccttttacttaaaaatatgtctgtgaccactataggttcctgagagaggtgaagagtgagcaaaatcattcttactaagtagagcttttggccccaagtcaataacttattttctaccagggaggcaacccagcggatggaggagcaggaatgagctgcatgca

SEQ ID NO: 84212 - DNA, 666 bp, Homo sapiens
gaggtagaggttgcactgagccgagattgcgccactgtctgtactccagcctgggtgacagagcgagattccgtctcaaaataacaacaacaacaaaaaaccacatacaataagtgttacgaagaaaagtgacaaacataacaggtgtctattacagagagattaaagtctccagagtcagaacatattgttaggagaaggcagtttttaatccaatccttgttgaatgaattgagtcagcaaagtcagaaggcctggaagaggacaaggcttatgtaatcagagtaataacagtaagtccaggctgtctagcggccctcaaagagtggccaaatgttcattttgctaattaagtaatccattaaagsaattatttaatattatcattttatgaaacaaaagacattttaataccaagaaaatcaggagataccattagattaatgtcagccctttaaattgaataaattttatgttataaagaattcacttcattttgcttccttttacttaaaaatatgtctgtgaccactataggttcctgagagaggtgaagagtgagcaaaatcattcttactaagtagagcttttggccccaagtcaataacttattttctaccagggaggcaacccagcggatggaggagcaggaatgagctgcatgca

SEQ ID NO: 84213 - DNA, 666 bp, Homo sapiens
gaggtagaggttgcactgagccgagattgcgccactgtctgtactccagcctgggtgacagagcgagattccgtctcaaaataacaacaacaacaaaaaaccacatacaataagtgttacgaagaaaagtgacaaacataacaggtgtctattacagagagattaaagtctccagagtcagaacatattgttaggagaaggcagtttttaatccaatccttgttgaatgaattgagtcagcaaagtcagaaggcctggaagaggacaaggcttatgtaatcagagtaataacagtaagtccaggctgtctagcggccctcaaagagtggccaaatgttcattttgctaattaagtaatccattaaagcaattatttaatattatcattttatgaaacaaaagacattttaatrccaagaaaatcaggagataccattagattaatgtcagccctttaaattgaataaattttatgttataaagaattcacttcattttgcttccttttacttaaaaatatgtctgtgaccactataggttcctgagagaggtgaagagtgagcaaaatcattcttactaagtagagcttttggccccaagtcaataacttattttctaccagggaggcaacccagcggatggaggagcaggaatgagctgcatgca

SEQ ID NO: 84214 - DNA, 666 bp, Homo sapiens
gaggtagaggttgcactgagccgagattgcgccactgtctgtactccagcctgggtgacagagcgagattccgtctcaaaataacaacaacaacaaaaaaccacatacaataagtgttacgaagaaaagtgacaaacataacaggtgtctattacagagagattaaagtctccagagtcagaacatattgttaggagaaggcagtttttaatccaatccttgttgaatgaattgagtcagcaaagtcagaaggcctggaagaggacaaggcttatgtaatcagagtaataacagtaagtccaggctgtctagcggccctcaaagagtggccaaatgttcattttgctaattaagtaatccattaaagcaattatttaatattatcattttatgaaacaaaagacattttaataccaagaaaatcaggagataccattagattaatgtcagccctttaaattgaataaattttatgttataaagaattcacttcattttgcttccttttacttaaaaatatgtctgtgaccactrtaggttcctgagagaggtgaagagtgagcaaaatcattcttactaagtagagcttttggccccaagtcaataacttattttctaccagggaggcaacccagcggatggaggagcaggaatgagctgcatgca

SEQ ID NO: 84215 - DNA, 684 bp, Homo sapiens
ggatccaaatctccactcctgccttcccatgctcagcgacgtgatagatagctttaattacaccagctttagaactcttcccggccttctctgatgcatttcatttccttctgctatgggcccctgatgcctggtgatataactcagcgaaagacattactgggagggattttgaaatctaaacctccaactccactgatgttgcaggtattgactgaactgggctccctgggcctcctttcttagagctgtgattcacagtttcaggagctcatgaaaatctgggcaagccagtcttggaccgaaactcctgtatccccatcatctgcaggacagagtccaaattcctgctgtggtctaaagggtcctctaaatcaggcctcatttgcacactggcccctaccacagccctcgctattccacccactgtcctcatctttaccagcactttaccagcagcatttattaagtccccactgtgttatacacattacactgaaccctgtgcttggatcatgtcatctcatccccctagtaaacctttgagacyaaaaatgttcttatcttcattctacagataaaaaatatatgtatatatatctatatctatatagatagagagatatagatatagatatatagatatatagatatatatacacacatatatatggaaggggaata

SEQ ID NO: 84216 - DNA, 1289 bp, Homo sapiens
cctagacaagtaacttgatgttcagctgacttctgtcataccaagatcatctaataagttagtggtagaatatgtgttcgagacaggtttatgaagctccaaaacccacactctttctcctaagactttttcatccacttctaccactaacttattccctgactcagcttcgcaatgacacaatagaattcacatatgaaagaaacattctgacaccagtaattcaagacaaatgctacagtaagacctgtgcaccagctgcaaatggcgcattggcataaggtaactgtactcaggtgggaattcttacatcttcgtttgcctagattagtcctggtttatttctgttgtcccatccagttagtggctctgttaactctcaaaagtgtcccagttttcctttctataggaaacatcaggatgacatccatgtacatgaaagtcatggtttgcaccaagaattaatgtcttatgggctaatgtttccactcagttgtcatcattgtcatcaacgtgtttcttgatgtctgtcataaagtgtcactatagatgtttgcatgttcctctatttttctgcagctgaatatgttaaggagaaaatagggtgtttgtgacttttcttaagctgaaaatcattttgaagttgcgagcaactcctttaagaattaatttaacagtctgatcacaagcaaaggattgccactttgcaatcagctttctggagttttgagagatgacatttaaagagctggagatttctcagcactgcagcatttacaggtgcagccaacacattgttatctttgcttctgaaattcaggcagcacatggataattaaaatatatagaaaactcccagccatattttactcttaagagatgcagtagaatattatagttaggcgttcaattggatgtaagattagagatgggaggacatagtattactcggagatggtctctgtaggcaaactgcctgggtttgaatttagattatcccactaaccaatcatgtggccctcttcaaggtatttaatttatttatgaaatatcaattttartaagacacggagactctactgaaaattatatgatagaacatatgcaaagcagttgggatagttccctagcctatagcaaaaatttgatcttatcattgttaacttaaagagagatggaggcagtgcaatacacatctggattctagagatgagggtcaaacactggggaaagtgagtatcaatatctatttttacctttatatctaattatgcagaaattcatgtcaa

SEQ ID NO: 84217 - DNA, 1980 bp, Homo sapiens
tctcttgcctctgggatttcaatcctgtactctctctgtttgtgtactcttccccactacccctctttaactgctattttcagctctagtgtcacctgctgtatgaagccttctgacctggattgaatatctccccttctacttatcacacaatagtgattgcctgtttctcctcaatagaagttaaaagtatacacaaatatccactttccaccctgcatacatcgtaaacattaagctttttgaggtcagggaccatgtttatacatcattgtgtttccggggctaattaaatgcaggtatggcatcagatgggggctcaaatgaaggcatcaacataaactaggcctcctaagctgtgcagggctctcttggtgcctttgtcaattctctatcccattccctgtatgtaacttaaaagatcctccccttcccaggatacttgctctttgacattgcccttgaccttcaaaagagggctttggatccttcggtgcatttgaaggtgaaaatttattacttgtcttttctttttttttcgtggaggtgggggcaagatctcactctgtcacccaagttggagtgcagtgttgcaatcatgactcactacggcatcagcctccggggctcaaacagtccttccatctcagccttccaaatacctgggactacaggcatgcamcactacactcagccacattttcaactgagaaaagtaaaacagatttggagcaagatattggatatatggcgaggaaaactgtagtggaaaatggaagaggggagtagagagaagaagaccacctatgtggcagtgttaaatatatttgcttatccaatcaagaaacacgttccagtggtcacaggaatttcactcatcagttagatgtcttcttccatgcagtagaatgaggacattatagaagtttccccatagaaactttgaggaaaggagtttaccttccaatcctggttcacagaggaaatagaatgtctggacttacatgagtcttttctctccctttcctttttttctcttgtagaaatggaaaagaaaaaactcttctgcctggggctgcttccttcttacacagtctcctggaaattctactctttccaccttccactctgtactagtttccatgcatcagctttttaaaggctgcacacaaaagctttcatttgccactcctaataactaggacagccctttcaccctaccttcgtaatcaaagacatacacctggttctcggttgaagaggcactgaagcataaattagaaagagaaaggaatgcatgtttccccaaacatgtactctcggaggtcatattagtctcttgcttccctgctcttttgtgacaagcaatgttaggatagcagtggatgatcccaaacttcctttgctccctaacatccaaccaaccacctctgcttctttctttcaataattctatcatgttcttggactggccaaatacaaatggccattttaagtgatagctttccaggtaagaaaaagttacaaattgcccaatccaaatgaatatttgcattgccaggattatggttatagttatgtgtgtcaactcattgtcagaacatcagcctctagactccctctctcagccacatgaaagggcttaggtgataaactcaatcacagccatgtggcaaaaaccaaaggagttcaattcagcatataatagtctcaatcccatatgagctaaaatccatctgtgttggtcaatatattatgtctgccataacagatatgctttgggttaagagtagtaaaatagtaataaatccttgttttgaggaccagacacttttttgtttttagcctctttttttggccaacatgtaagagaaacagacgacccaacgataggtagtttgtcaagtaacgagaattgaacctagtctaataacaggtaagtctgtggatgtgggcaagaatccttcttatttgggcaga

SEQ ID NO: 84218 - DNA, 1980 bp, Homo sapiens
tctcttgcctctgggatttcaatcctgtactctctctgtttgtgtactcttccccactacccctctttaactgctattttcagctctagtgtcacctgctgtatgaagccttctgacctggattgaatatctccccttctacttatcacacaatagtgattgcctgtttctcctcaatagaagttaaaagtatacacaaatatccactttccaccctgcatacatcgtaaacattaagctttttgaggtcagggaccatgtttatacatcattgtgtttccggggctaattaaatgcaggtatggcatcagatgggggctcaaatgaaggcatcaacataaactaggcctcctaagctgtgcagggctctcttggtgcctttgtcaattctctatcccattccctgtatgtaacttaaaagatcctccccttcccaggatacttgctctttgacattgcccttgaccttcaaaagagggctttggatccttcggtgcatttgaaggtgaaaatttattacttgtcttttctttttttttcgtggaggtgggggcaagatctcactctgtcacccaagttggagtgcagtgttgcaatcatgactcactacggcatcagcctccggggctcaaacagtccttccatctcagccttccaaatacctgggactacaggcatgcaacactacactcagccacattttcaactgagaaaagtaaaacagatttggagcaagatattggatatatggcgaggaaaactgtagtggaaaatggaagaggggagtagagagaagaagaccacctaygtggcagtgttaaatatatttgcttatccaatcaagaaacacgttccagtggtcacaggaatttcactcatcagttagatgtcttcttccatgcagtagaatgaggacattatagaagtttccccatagaaactttgaggaaaggagtttaccttccaatcctggttcacagaggaaatagaatgtctggacttacatgagtcttttctctccctttcctttttttctcttgtagaaatggaaaagaaaaaactcttctgcctggggctgcttccttcttacacagtctcctggaaattctactctttccaccttccactctgtactagtttccatgcatcagctttttaaaggctgcacacaaaagctttcatttgccactcctaataactaggacagccctttcaccctaccttcgtaatcaaagacatacacctggttctcggttgaagaggcactgaagcataaattagaaagagaaaggaatgcatgtttccccaaacatgtactctcggaggtcatattagtctcttgcttccctgctcttttgtgacaagcaatgttaggatagcagtggatgatcccaaacttcctttgctccctaacatccaaccaaccacctctgcttctttctttcaataattctatcatgttcttggactggccaaatacaaatggccattttaagtgatagctttccaggtaagaaaaagttacaaattgcccaatccaaatgaatatttgcattgccaggattatggttatagttatgtgtgtcaactcattgtcagaacatcagcctctagactccctctctcagccacatgaaagggcttaggtgataaactcaatcacagccatgtggcaaaaaccaaaggagttcaattcagcatataatagtctcaatcccatatgagctaaaatccatctgtgttggtcaatatattatgtctgccataacagatatgctttgggttaagagtagtaaaatagtaataaatccttgttttgaggaccagacacttttttgtttttagcctctttttttggccaacatgtaagagaaacagacgacccaacgataggtagtttgtcaagtaacgagaattgaacctagtctaataacaggtaagtctgtggatgtgggcaagaatccttcttatttgggcaga

SEQ ID NO: 84219 - DNA, 1980 bp, Homo sapiens
tctcttgcctctgggatttcaatcctgtactctctctgtttgtgtactcttccccactacccctctttaactgctattttcagctctagtgtcacctgctgtatgaagccttctgacctggattgaatatctccccttctacttatcacacaatagtgattgcctgtttctcctcaatagaagttaaaagtatacacaaatatccactttccaccctgcatacatcgtaaacattaagctttttgaggtcagggaccatgtttatacatcattgtgtttccggggctaattaaatgcaggtatggcatcagatgggggctcaaatgaaggcatcaacataaactaggcctcctaagctgtgcagggctctcttggtgcctttgtcaattctctatcccattccctgtatgtaacttaaaagatcctccccttcccaggatacttgctctttgacattgcccttgaccttcaaaagagggctttggatccttcggtgcatttgaaggtgaaaatttattacttgtcttttctttttttttcgtggaggtgggggcaagatctcactctgtcacccaagttggagtgcagtgttgcaatcatgactcactacggcatcagcctccggggctcaaacagtccttccatctcagccttccaaatacctgggactacaggcatgcaacactacactcagccacattttcaactgagaaaagtaaaacagatttggagcaagatattggatatatggcgaggaaaactgtagtggaaaatggaagaggggagtagagagaagaagaccacctatgtggcagtgttaaatatatttgcttatccaatcaagaaacacgttccagtggtcacaggaatttcactcatcagttagatgtcttcttccatgcagtagaatgaggacattatagaagtttccccatagaaactttgaggaaaggagtttaccttccaatcctggttcacagaggaaatagaatgtctggacttacatgagtcttttctctccctttcctttttttctcttgtagaaatggaaaagaaaaaactcttctgcctggggctgcttccttcttacacagtctcctggaaattctactctttccaccttccactctgtactagtttccatgcatcagctttttaaaggctgcacacaaaagctttcatttgccactcctaataactaggacagccctttcaccctaccttcgtaatcaaagacatacacctggttctcggttgaagaggcactgaagcataaattagaaagagaaaggaatgcatgtttccccaaacatgtactctcggaggtcatattagtctyttgcttccctgctcttttgtgacaagcaatgttaggatagcagtggatgatcccaaacttcctttgctccctaacatccaaccaaccacctctgcttctttctttcaataattctatcatgttcttggactggccaaatacaaatggccattttaagtgatagctttccaggtaagaaaaagttacaaattgcccaatccaaatgaatatttgcattgccaggattatggttatagttatgtgtgtcaactcattgtcagaacatcagcctctagactccctctctcagccacatgaaagggcttaggtgataaactcaatcacagccatgtggcaaaaaccaaaggagttcaattcagcatataatagtctcaatcccatatgagctaaaatccatctgtgttggtcaatatattatgtctgccataacagatatgctttgggttaagagtagtaaaatagtaataaatccttgttttgaggaccagacacttttttgtttttagcctctttttttggccaacatgtaagagaaacagacgacccaacgataggtagtttgtcaagtaacgagaattgaacctagtctaataacaggtaagtctgtggatgtgggcaagaatccttcttatttgggcaga

SEQ ID NO: 84220 - DNA, 649 bp, Homo sapiens
ctgatcatagtgattaatctctcaccagccagtttattacatagtcctgctcaatctaaagctggcatgcaagacaccattttcaaaaattaaacaagccaggtgtggggacacatgcctgtaatcccagctacttgggaggctgaggcaggaggatcgcttgagcccaggaatccaaggctgcagtgagccatgactgtgtcactgcactccagcctgggcaacagagcaatactcttggagcaagggacggaggggggagggagggaggactgaccggagtttgagtcctgggtttatcatttgctaattgagtgattttaggaagttatttaagccttgaagtctccatttcctaatctgtaaaactgaaaaaatagtattacctcaccctaaatgagataattataattaaagttaatttcattgcatgccatctgccagatactatgttaagccctttatgtgtagaaatgaaaggagagttctgtgcgcacgctaggtgctctgtatacagcgtaccacccactccaaagctgagagtggaaggcagagctcaagcaatcattaaccacagcacacgttcaggcagytttgccactaaattttaaccagtacatatataaaagtgtcccactctcctcctcat

SEQ ID NO: 84221 - DNA, 702 bp, Homo sapiens
aactcagactaaaacctaaatctgcccctaactccaacccccattcgtaaagaccccagtctccaagtcaacagaggcaagagatcccaggtccatcatgagtcaggacaggcggctcatgtggggaaaaggatgcattctttgtttttgctcctggctcagatttcggacacatcattgtaatcctctggccttctgttgcaccatcatgtcttcttacttgcaaagagtagtctgatattctacaggaattgcagatggaaagtttatttttgaacattctgtagtgaggcaagggaagaagaaatccatcacatggaatatcaccctccatgttatcatcttacatctttggcacaaackctcggaagtaaaggtaatagtgtgaaatacctcctttctcacttaaaaatggaatgaatgatctagatcttcaacaataggctcatttttccaatttccaacgcgaactgctgaagagggccctgcacctgtcagaatgcaaagcccatttgtcagttcctggatagtttctttcagctatttcaagaggtgacctgggttacttcccccatcttctctgtactcaggccttgtagctccttctctctaaggcaataaagtaaactgtcattgttccagagaatgtggagccctcctcgtccccaggtgggaggtgaaatgagagagtctcagcaatgg

SEQ ID NO: 84222 - DNA, 720 bp, Homo sapiens
cccaggctggagtgcagtggtgcaatctcagctcactgcaacatccacctccgccttctgggttcaagtgattcttgtgcctcagcctcccgagtagctgggattacaggcgtgagccactgcgcctggcctgtgttcctgttttgtattctgccacagtacatagcagattcttatcccatgtgtattgatcccttaggggaaaaaactctgggaagcaaaattagatatatcttctaactaaatatggtacttaaaactttaaaaaatgtctttgaaaacttgtgtatgttaaagaggtcctctgagagggaaccttggtgatgcctctgccacgttcactacattctcacatcagcctgttttttgttactgatttgtattgtacatttgtrtaggccccagggaatccagtgatttgatggccttaccctgccctctgttaatatgcattgatggtgtcttttgtcttggttgttggcaggtacaggtgctgacaaagctcaggtttgatgctcctttgggttattgtcttgaggtagtttgacagctactcagccttgggctggacaaataacccagatctattttggttctctttagtcaagcataacatagagacaatactaagagcaggaatcaaagagaccccatgtcacccattctgctctgccctctatagaattagaacccctcatcacaagaagtgcagggagagat

SEQ ID NO: 84223 - DNA, 799 bp, Homo sapiens
ggccgcatccgcctctagcacatagagcagcttctcagagtccaacaccttctgcagggtcacgtcccggtgctcaggctgccgaccctcctgcagccgagccaggtcctgtgagggtcacaagagaggggacaatgaacaggagccgagagcgggcacggtggcaatgggaggggtgggaggaaaggggtcagcagggtgctccccttctttccctttgaataacgtcttccaggcttgtccatatggagcgcagtcggtagttccatctctttgctgctacgtggtatttctcaagttcactttgcaaagcaggtatttctcttatgccccctccagcctgtcctccagccactcagcaaacagagctcaagtacctactgtatgcaaggagttgggacacagctgtgaacagaagagacatggcctccctgcctggcactcacaacccagtctgcraggccaccaggaaggccagtcaaaggatgagcctcatggaggtgactgcaagtccctccaagtcagtgtttatgaaagaaatgctccagaggtggaacgaggggacctacttcagctctggtggtcagggaagcctcttcgtggtggagacacaagctaagaacaaaggatgaaagggacagtgttccagccacaggaacagcctgtgcaaaggtcctgaggcaggagagagcgagctacgactgggccatagtgaaaaggtctctgtggatagggaggaaacagggcaggcggggggcggggagggtgagcagctagaacacacaatggctgcaaggag

SEQ ID NO: 84224 - DNA, 799 bp, Homo sapiens
ggccgcatccgcctctagcacatagagcagcttctcagagtccaacaccttctgcagggtcacgtcccggtgctcaggctgccgaccctcctgcagccgagccaggtcctgtgagggtcacaagagaggggacaatgaacaggagccgagagcgggcacggtggcaatgggaggggtgggaggaaaggggtcagcagggtgctccccttctttccctttgaataacgtcttccaggcttgtccatatggagcgcagtcggtagttccatctctttgctgctacgtggtatttctcaagttcactttgcaaagcaggtatttctcttatgccccctccagcctgtcctccagccactcagcaaacagagctcaagtacctactgtatgcaaggagttgggacacagctgtgaacagaagagacatggcctccctgcctggcactcacaacccagtctgcaaggccaccaggaaggccagtcaaaggatgagcctcatggaggtgactgcaagtccctccaagtcagtgtttatgaaagaaatgctccagaggtggaacgaggggacctacttcagctctggtggtcagggaagcctcttcgtggtggagacacaagctaagaacaaaggatgaaagggacagtgttccagccacaggaacagcctgtgcaaaggtcctgaggcaggagagagcgagctacgactgggccatagtgaaaaggtctctgtggatagggaggaaacagggcaggcrgggggcggggagggtgagcagctagaacacacaatggctgcaaggag

SEQ ID NO: 84225 - DNA, 752 bp, Homo sapiens
ccatttttcagactgaggaccagaaagtttcrggaattgtcccaggtcacccagccagtaaatgttcttgatctcacacttgagttttcgctgcagttttctttatttccatgtatgaatttatcaaatccttctcctggccctgtaaggtaggctggttctcttatttttccccttgtgcaggtagggaaactgagtcagacatgggtggctagaaagtggtgaggtcaggactggaaccctgttcatcaaagtccattttcttaccactctggcatttttgtcatcctatttttcactggcaccaagagcctggggcctgggatgtcccggctgggaggtgggaagccctaagcatgctccccaccagcctctgacttacctgtgaccaggaggaaatcactattcccatgattacatgttatgggaccccaaagcctccagggtggccacaaagatgcaactaaagagcctggcatggtgcctcctccgaccccggtgcttccaggaccagctctctcattttgccccacactggcaatttctccctatgcagcttctgcctgcaccagtctctccacccagagtgccttttccccacctcttcccattcagattctttgcatccctgaacaaaggctggaaaaaaaaattacagccttttaaacagtgttttcaggggctgccctttggcagtgagaagcaaagcttgaagccctcctctgggtctgtgccaccacaagaggaaggaa

SEQ ID NO: 84226 - DNA, 752 bp, Homo sapiens
taaagcagggaggcctcctggaggaagtgacactccagctaagaaatggaggatgagtaggatttggttgggcaaagcaggcaagaggagggaatggaggagcatggtgaggggtcagcacatgctaagacacagatgtgaagagcagggaacagtcctgggaactgaacagtgataagatgctgatgcagagacgatgaggggcagagtggcaagacaagaggtgggaccatcacacctgtaatcccagcactttgggaggctgaggcaggcagatcacttgcgttcaggagtttgagaccagcctggccaacatggtgaaaccctgtctctaccaaaaacacaaaaattagctgggtgtggtggcagatgccggtaatcccagctacttgggagactgaggcaggagaattgcttgaacctgggaggctgaggttgcagtgagccgagatcacgccactgcactccagcctgggtgacagagtgagactctgtctcaaaaaaaaaaaaaaaaaaaaaaagaagaagaaaaagaaaagatgtaggaccagcgagcagaggctgggctctggaagacctgaaggcaggaggagatgctcctataaaagggccagagcaggcaccagtgttggccagggacttcctttccatcgcgaacagcatcytaaacctggaggagaggaaaagggcttcaagagaggcctcaaccaattccatctgtgggtttgtgccctgatatgggtttaaaagga

SEQ ID NO: 84227 - DNA, 581 bp, Homo sapiens
agagaaggactattagatgttgtctggatatggaggagcctcagtcctgagataggttgcttcattcatttgttcatccactaattcatttatcaaatatttattgagcacatactatgtgccaggcactctttcagtcactggggaaacacagtaaacaaaacagaccaatgtcccttcttccactcacttcctcactttctagtggtagagacaggcaagaaaccaaatragccatacccacttcttgcaaaccatcaggaccaggactttctctgttgcacaagcccattgtaaagagaggcaggtccattttcctttctccagggactgaggctggagtccctggatgggcccagcctggtgcactgtggggtaggaaggtgcactagactacaagtgaagagacctggcttggagttctcaatctggtgatggccaagtcactttgctaccctgttcttcgatttactcacctatcttaaaggggccaagaaaccagtcctacttacctcccaagaatgctgtgaggttacatgggacacagctgtaaaaatatttcacagatcctaaagagctct

SEQ ID NO: 84228 - DNA, 581 bp, Homo sapiens
agagaaggactattagatgttgtctggatatggaggagcctcagtcctgagataggttgcttcattcatttgttcatccactaattcatttatcaaatatttattgagcacatactatgtgccaggcactctttcagtcactggggaaacacagtaaacaaaacagaccaatgtcccttcttccactcacttcctcactttctagtggtagagacaggcaagaaaccaaatgagccatacccacttcttgcaaaccatcaggaccaggactttctctgttgcacaagcccattgtaaagagaggcaggtccattttcctttctccagggactgaggctggagtccctggatgggcccagcctggtgcactgtggggtaggaaggtgcactagactacaagtgaagagacctggcttggagttctcaatctggtgatggccaagtcactttgctaccctgttcytcgatttactcacctatcttaaaggggccaagaaaccagtcctacttacctcccaagaatgctgtgaggttacatgggacacagctgtaaaaatatttcacagatcctaaagagctct

SEQ ID NO: 84229 - DNA, 643 bp, Homo sapiens
gatgggtggagctccacgcagtgcaagggtcttggccagcagaagaaggctcagacatgcagcacctgcagcgaactgcccagacagccctgtgcagaggcctctggtgacactcccggaaaaatgccactggaggagagacttgaagggtggtggcacaggctgaattctgtccctccctcaccccatattcatatgttgaagccctaaccccagaacctcagaatgtcactgtgtttggagataggatcttcaaagaggtgattaagttaaaatgatgctgttcgggtaagccctaatctaatgtgtctggtgtttttatataagaagagaaaatttggacacacagagagacaccgggggacatgcacgcacagaaggaagaccatgtgaggacacagcaagaagtgtctgtccgcaagccaagggcagagacctcaccagaaaccaagcctgctgacaccctgctcctgcactcccagcctccagcactgggaaaagatacatttctatcaatcaagccacccagttggtggtattttggaaggggayatctaagttccaggcaaaaagagctaggtaggaaggccctgaagaaaggaagtacttggtatgttgaaagaccagaaatgtggctggggct

SEQ ID NO: 84230 - DNA, 596 bp, Homo sapiens
ccagccatagccctcttcatatgctaggagattccactccatgtgacccttaggggacagagtcygtcacccaccagagtggctgacactttcctgccccccttgcaggaggcagaggcatataacctggtcctgaccaatgacctgcatctgccacaaatttaccaggacccatgccaagaagaagcaggaatggactgcttcagcagtgcccacagtgttgggtggccagagcctggttccagctgtgggatatggtattttgtggtggcagcagggactaccctactggactggggagaccttcactctggctccttgcacacacttccttccccagccctcccaagaagtctgggatgctttcaacatagtcttaaaaattctctttctgcttaaatcagctagtccatttctgttgattgcaactgcggttctaagtgataccctttcctttaaggtttaatctgagcaaccttgtccatcaagtgcaggaaacgagttcaagggcatttgactgtttgccaccctggcccctctgtcatgaggttgcgtaggtaagtgggcattgctagaagacacggagacattcatta

SEQ ID NO: 84231 - DNA, 596 bp, Homo sapiens
ccagccatagccctcttcatatgctaggagattccactccatgtgacccttaggggacagagtccgtcacccaccagagtggctgacactttcctgccccccttgcaggaggcagaggcatataacctggtcctgaccaatgacctgcatctgccacaaatttaccaggacccatgccaagaagaagcaggaatggactgcttcagcagygcccacagtgttgggtggccagagcctggttccagctgtgggatatggtattttgtggtggcagcagggactaccctactggactggggagaccttcactctggctccttgcacacacttccttccccagccctcccaagaagtctgggatgctttcaacatagtcttaaaaattctctttctgcttaaatcagctagtccatttctgttgattgcaactgcggttctaagtgataccctttcctttaaggtttaatctgagcaaccttgtccatcaagtgcaggaaacgagttcaagggcatttgactgtttgccaccctggcccctctgtcatgaggttgcgtaggtaagtgggcattgctagaagacacggagacattcatta

SEQ ID NO: 84232 - DNA, 535 bp, Homo sapiens
agggccccaggccacagaactgcagggtgagaccagggtaggatgagacactgcctctcactgtctgagcctgggccatttgccattgggttgaatgaagagtggccaatgggagaaacagtgagtgaccctcttccatgtgggtgttcaggcatctacagcaccaggtatgtcaaaaagcccttccaaacctgaatccaatcatggcttagctccggccctctcatcatcctggtgcctttaagggtttggcatctcaggctattttttagcccctggagtggatgtttccatgacgttttccctcagtcatttggtttatggcattttccccaacaatgacagatctaaggccaactggacagggcccaaaagtagccagagtactgcaacaagattaccaggtgccaggggtctacaaaaaaacccacgaaagttctggcacaggtgtgtttgactgcctgaaaaaaataaacrgaaaacatgatagaaaaatgatattgttcaaaatcatgaagcagatgatctcttagtg

SEQ ID NO: 84233 - DNA, 581 bp, Homo sapiens
taatttgttacaatccaatccttcagtcataacacacaaatagcctcctaacgactgcaatgggacctggaaactttttgaatattttgtctttctttgatattttagttttcagataaaatcttttctttccttwttcagccatctattcaacagaacttatttacatttaatctgtgtcctgcaattgtattttttaaaatagtcttaattaaattatattgccaataattaaaaaatgtgatggcataaagtttgcaaatatcaatatcaaactagtctctccttgtaattaaaatctactatgccatgtttgacttttatttcttatgtaaattgaagccaaaatgcatgttaatccttctcctttggtgtatatttacgcttaaaaatatttagtgtcttccctcccatggctaccatagctaataatgtccttattacctcatgcagtgttcatattttaaaatgctggataatattgctttaatattcttaaatagaattgagtagaatcctattttaaatagaatataatgctttacaatgctcttttatatctatttttctatcatattcat

SEQ ID NO: 84234 - DNA, 581 bp, Homo sapiens
taatttgttacaatccaatccttcagtcataacacacaaatagcctcctaacgactgcaatgggacctggaaactttttgaatattttgtctttctttgatattttagttttcagataaaatcttttctttcctttttcagycatctattcaacagaacttatttacatttaatctgtgtcctgcaattgtattttttaaaatagtcttaattaaattatattgccaataattaaaaaatgtgatggcataaagtttgcaaatatcaatatcaaactagtctctccttgtaattaaaatctactatgccatgtttgacttttatttcttatgtaaattgaagccaaaatgcatgttaatccttctcctttggtgtatatttacgcttaaaaatatttagtgtcttccctcccatggctaccatagctaataatgtccttattacctcatgcagtgttcatattttaaaatgctggataatattgctttaatattcttaaatagaattgagtagaatcctattttaaatagaatataatgctttacaatgctcttttatatctatttttctatcatattcat

SEQ ID NO: 84235 - DNA, 581 bp, Homo sapiens
taatttgttacaatccaatccttcagtcataacacacaaatagcctcctaacgactgcaatgggacctggaaactttttgaatattttgtctttctttgatattttagttttcagataaaatcttttctttcctttttcagccatctawtcaacagaacttatttacatttaatctgtgtcctgcaattgtattttttaaaatagtcttaattaaattatattgccaataattaaaaaatgtgatggcataaagtttgcaaatatcaatatcaaactagtctctccttgtaattaaaatctactatgccatgtttgacttttatttcttatgtaaattgaagccaaaatgcatgttaatccttctcctttggtgtatatttacgcttaaaaatatttagtgtcttccctcccatggctaccatagctaataatgtccttattacctcatgcagtgttcatattttaaaatgctggataatattgctttaatattcttaaatagaattgagtagaatcctattttaaatagaatataatgctttacaatgctcttttatatctatttttctatcatattcat

SEQ ID NO: 84236 - DNA, 581 bp, Homo sapiens
taatttgttacaatccaatccttcagtcataacacacaaatagcctcctaacgactgcaatgggacctggaaactttttgaatattttgtctttctttgatattttagttttcagataaaatcttttctttcctttttcagccatctattyaacagaacttatttacatttaatctgtgtcctgcaattgtattttttaaaatagtcttaattaaattatattgccaataattaaaaaatgtgatggcataaagtttgcaaatatcaatatcaaactagtctctccttgtaattaaaatctactatgccatgtttgacttttatttcttatgtaaattgaagccaaaatgcatgttaatccttctcctttggtgtatatttacgcttaaaaatatttagtgtcttccctcccatggctaccatagctaataatgtccttattacctcatgcagtgttcatattttaaaatgctggataatattgctttaatattcttaaatagaattgagtagaatcctattttaaatagaatataatgctttacaatgctcttttatatctatttttctatcatattcat

SEQ ID NO: 84237 - DNA, 581 bp, Homo sapiens
taatttgttacaatccaatccttcagtcataacacacaaatagcctcctaacgactgcaatgggacctggaaactttttgaatattttgtctttctttgatattttagttttcagataaaatcttttctttcctttttcagccatctattcaacagaacttatttacatttaatctgtgtcctgcaattgtattttttaaaatagtcttaattaaattatattgccaataattaaaaaatgtgatggcataaagtttgcaaatatcaatatcaaactagtctctccttgtaattaaaatctactatgccatgtttgacttttatytcttatgtaaattgaagccaaaatgcatgttaatccttctcctttggtgtatatttacgcttaaaaatatttagtgtcttccctcccatggctaccatagctaataatgtccttattacctcatgcagtgttcatattttaaaatgctggataatattgctttaatattcttaaatagaattgagtagaatcctattttaaatagaatataatgctttacaatgctcttttatatctatttttctatcatattcat

SEQ ID NO: 84238 - DNA, 1661 bp, Homo sapiens
ggattggatggtcctttgcttctgcggataagaatgtttaataacccaggattccgggcaataacagcattacagggtttctagaactctgttctgatcctttagaaattgttagaacaatagtaatgatagtaggaggagaagtaggactatgtttttcaaggcacttgcaagcaatctgctacatcgtttatgggagaacttaaaaatattccccttgattaagactcacaggtcaaatatcatctctcttttctgcatgctaattaaaagcaactctgttcttaggtatttgacagtcatttgaatcaagatacttgaaaatttctgactcaatagcaatgtgcttcagtacacacaatcaagtataatcatatatatgtgagatatgactttgaagaggagatgacttttttaaaaaaaagacgcatactcaaagacaactagaaatggctgctgcaggcaaccagtcactgctctgactacaacatatttgtgcaattaatagtctcacaacctagtccaaatcccctctttacttggagcaggagtgttaatgaactgtagatgcaaagctcttaatgtatagatgtagtgtcctcttgaaatttaacaagctttgaaaatgtaataaaacagagataagtattcaggttatttttagtttgtgttggcttgttgtgtttttaatattgtttaaaatatgacacagttatcctcagttcctatcccatatgtccattctggaggatccagaaaacatatcagtagttagggtaacaaaaaatcctccaaaaaagacccaagttttgccagtaaactttaagtctttattgagcatttcataatagctttaaaaaaacaaagtgcggttcatgtttctagstactttcatacaatgttgaaataatactataatttgactaggtaagattcttattgattgctaatttggtgttagaattgattatatttcacataatgatatcccactgctcaatgagatgaatatttatgtaatagggaaataccattgctggtttctttacaactcagtgtgaatagccacatcgttgacttccaaagaataaaagaatctttccataaaccttctgaagtcgtttctataaacttgctccactttctaatattgtgaaagagttgatgtaatttaatttctattctgtcaattataaatttatttcatcttggcaaggtgccctatttggaaaagttgattgtgggaaaggatgatagtatagcaggaatatggaggttgaaataatgtttaattttataatcaagataaatggtgtaattgacctcatcatatcaggagcagggagaatctgaaatggtttgatttgcacacacttcattgagtctaccaaaagcatactgatatcaaattgcccagggctatatatttattatgagaattcataattccaatcctgttacatatgttttttttttaattttgctggatcttatggaataaggataagggaagatgaagaaaactatactaaatgtgtcaaaatgctccttgtatcacaacaaagtggatggtttactcaatgcagctaaattctcagaagaaaaactgaagtcacatctttaaagagcatttttcttaatgtactacctatctgtaaata

SEQ ID NO: 84239 - DNA, 719 bp, Homo sapiens
agtgccaggaagaaatgcagggaamagaggttggagggctctgaaaactgggtggtagttgacgcattgaggaagaagacaagattttgaagtactaccaaagtggaggaaagcgccctatttgtctgcagaattctccagcttggattgaaggcaacttggagacagcagcctctcttttagctctggcccccaaagctcagagctgggagggccatccaccatcccaagctcgcccctctcctctctcaagccgcgctctgcagggtaaggactgtgaaggcagcaggtgcggggagcgtgagcttcaaggcagggacctctctttctaaggtggtgaggaaaagactggcttctttttctctgtatctcctgcttggagcagccgcagttgcaggatgtgcacagcagagctgagtaactaaaagcccagctttctggctagatgatcaaaacgaggaaaggagaagctgtggccggggagatcctggaaagggaggagcttgggaagacagcctcacagtgtggcttgggcagaggaacggatcaatggcacaggataaaggaactggacatagacctgcataggtgcagtcaacttaattttttaaaatgaaaatgcaaagcaatcccatagaggaagattagaatttgcaacaaaagatgttgggaaaattaaacactgtaggccaaaaaagaaaacacacaaacaaaaagct

SEQ ID NO: 84240 - DNA, 719 bp, Homo sapiens
agtgccaggaagaaatgcagggaaaagaggttggagggctctgaaaactgggtggtagttgacgcattgaggaagaagacaagattttgaagtactaccaaagtggaggaaagcgccctatttgtctgcagaattctccrgcttggattgaaggcaacttggagacagcagcctctcttttagctctggcccccaaagctcagagctgggagggccatccaccatcccaagctcgcccctctcctctctcaagccgcgctctgcagggtaaggactgtgaaggcagcaggtgcggggagcgtgagcttcaaggcagggacctctctttctaaggtggtgaggaaaagactggcttctttttctctgtatctcctgcttggagcagccgcagttgcaggatgtgcacagcagagctgagtaactaaaagcccagctttctggctagatgatcaaaacgaggaaaggagaagctgtggccggggagatcctggaaagggaggagcttgggaagacagcctcacagtgtggcttgggcagaggaacggatcaatggcacaggataaaggaactggacatagacctgcataggtgcagtcaacttaattttttaaaatgaaaatgcaaagcaatcccatagaggaagattagaatttgcaacaaaagatgttgggaaaattaaacactgtaggccaaaaaagaaaacacacaaacaaaaagct

SEQ ID NO: 84241 - DNA, 1106 bp, Homo sapiens
  misc_feature (1)...(1106): n = A,T,C or G
ccacagaactttttctgtacaagcatcaccgggtggcccaacatccctctcaggacagcagtagatctttaggaggctctagatcctggtgtcccagggtgcaagaagtgcgtgtttgtgttctccattcatcctgcattgaccctacatttaaaggccagttgcttccctgtgtccatcagaggcttccagagctcctacctgattccaggtggactaaatccattgtcaagttctcccggccccctagacctgcataaaagacagatttgttacaattggaagggaccctaccaacatcccattgtgatctattcactttacagatgaccaaaccaaagcccagggaagttaagtgacttggccaaggccacacagctagtgaatgatgtcactggaattagaacccatatctcttggcacctaattcaatactgcttctgtcactgacctgtttcctgagcacccagtaaatggtaattatgtattgcctgataaatgatgactccagactttgggtcttggtgatgtttcttgaccctgaatccgagaggtcttgcacaggccacagaggattcttgggtggtagcactgcacaaagcagaagggaaacttctggaggaaggccatacctcttacctccaccctcaggnnnnnnnnnnnnnnnnnnnnnnnnnnnnnnnnnnnnnnnnnnnnnnnnnnnnnnnnnnnnnnnnnnnnnnnnnnnnnnnnnnnnnnnnnnnnnnnnnnnnctctgtggagttgcccgacttaccccctcaccagcacggtcgcatccgttagttggtgatcctacggggttggcggggatggtcacacccactttacagctgagaaacagagcctcacagaggttaagcggcttyttcaggtccacgcagtgagcccagggctgagtctgaaagagatgccggacattagcaaggactaggggagccgctgtgtcaggataagtggcaagtgacagacgaagagactgtcaagctggctcttacaaaacaaagcaaaataaacaggcaataggaatattatactggttcatagaactgaaaattccaggaatagggcctgcttcaggcacagat

SEQ ID NO: 84242 - DNA, 1404 bp, Homo sapiens
tacagccttcaagatgcggttcaaatgctcttgctacatgaatggtttcccagcctctcctcaagttgtgaagtcttccaactccctgttcgcgtaacacacctctcttcttccacttaccccatctgtgtgttccccaccagcccaaggaaccaagacccacagcctccattctcccaaggcctggcctctgcataccctctgtaaacattcatccatgaagctcagtccaaacacgcaagttccagaaccatgcagccaacacacacgtggctttgcagaaaacatatgttcccaaacacacggaaaagccatcagaacgggctacagttaagctaaaaggagttatctcggcagcagggcacaaagagggtatttttactttcttctttttatttgcccgttattttttctgatcttctttcactgagagtcactctttgtgtaatacagctgtttttgaaaatgtgcttaacaacaaaggaagcctgcattcagttatccatggacgccttcatcccaccagctaaagtctggtgcacccaggctgtgctggaaacactctcaggataaggaggttagaaaaaacaacccaggcctcacctgtgcagccctgggttcaaatcccagccccctctgccactctccagttccgtgacctccagcaggtcattcaactgcttcctgcctcagttcctcatctgcccaatggggagaacagctggcacctccccggtccttgtgagtcttgaatgagttaatggctctgagcctggcataccgtaagcctcaataaatgttggctgggatggtcctcccctagctgggctccagaacccagcccccgccctgtgccatccttggggccaagccggcagctgctggcagacaaggcccagagcagcgccaggccaccacctccccgcccccgcagcagctgcacccagaggacacagggtgcattattctccggacaactgcagcccgggggccaccgagtgccccaccaacctcaggattcacagaggctgcatcatcttctgtccactcctgccatcctcagggcctctgtcctcccctcaccccacagagccccagcaagacccacaggggccaagagtcttggagtcacattaggtttgcctctggcctctgttaccatgtgagatgtgggggcaaggacagcaggggcctggacaacccggtgctccctccacacacacggactcctcgagggaaacagagaaaagggctcatatccctcaatcgccccaatgcagtcctccatgctcctcaggccacctcccccagggacacctagaaatcacacctggggcygctcacagctcagcctatcccagtcctctgcacaccccatgaagtcctctgcacaccccatgaagt

SEQ ID NO: 84243 - DNA, 1290 bp, Homo sapiens
ccccttattgctgtgtgacgtggacaagccacttaccctctctgtgcctctgttttctcgtctttgtgtggggcttcttgtaatacccacctcacagggttgctgtagggatgaaattaactaatatatttagagcgtttagctgcaggtacacaaaggcaatttattactgtggggtattattgttgttttttatgattaatgttgtcgcgttggggagctctcctgcttggagacgtggcgaggtggtttccagcctgggcgtattccagctcatgggaccccttgggctccacctcaggtcagtttctctggtggggcctccccaattcttgccttcccctagagcctccaggtactcttgttgggggagtccctgggctcaaccctggtgacctgcttcaagcctagtggtgggggccagtgtggaccgagtgtctcccagggtttagggtccagtaacaaaatgcccacagattttgggcagaaacggcacccaagatgctcctaggaggatctcctaaattgggaaacgaaggccaaagggttcatgcagaggcctccccagcccccacttcgggcctcctccaccatggttggctgccgtgggcactatcgggccgaggccctcttcccagggactggaccgtccgccctgcttctctgcccacttggccttggtatgggagagctgggtggagaggatcctcctggcagactgtgaggcctgctgctttcttctcacacctctgtgtgtgtggcaaggtctttgcctggcagctgcgtcattgtcagcccagtggcctcctccactccctccctccagccccgtcttctcccttytcctcccactgagagcacctagagtcttgtgctagacactgtgggatgcaggaggaggctcgtgccttttctgccttctggaggctgctctcagccttgggggaatccctcagagaggtgagggagatgagtgtaggaggtgcaggcctcctttaatctgggctgggcacccatttcaaagaggagaaactgaggctcagagggttagaataacagggccaaagacacaccttctgttggaggccttgcagcttttggtatctacatcggactgtccagggaggtcctttccccagcttttccagcttctgaggctgccagggtccccatggattccacttgctcatccttcctggcctctgggctcccgggctcttatgtgctgattttgttgggtctgcaacagatacattatcaacgcacccacctggcattgtctctgattct

SEQ ID NO: 84244 - DNA, 1074 bp, Homo sapiens
tatagatgaaagtamaatgtaaacaaatgaaaagcaatatgtgaagaagaaaacaaactctaagtaaagaaaaattgtatcagaaaagtttaatgtgttcctggggccatgaagatcctcaggtatatacatgcgttcatgaattaagttatgctggtagtttaacatgcacgtattttgctgcaatgtgcaaataaaagtatgtaagaaatttaaatgattcctcttaaaggagcatttcatcctactcagggaaacaaatttattttgacctcatatttcaacaataatactgtcataaacccttacacttactaaattaatcctcataataaccctataatacaggtactactgtatctcattttaaagatgaggaagctgttggccgggcatggtggctcatgcctgtaatcccagcactttgggaggccacggtgggtggaacatttgagatcaggagttgagaccagcctggccaacatggtgaaaccctgcctctactaaaaatacaaaaattagccggacgtggcagggggctcctgtaatcccagctacttggaaggctaatgcaggagaattgcttgaacctgggaggcgaatgttgccatgagccgagatcgcgccactgcactccagcctgggcgacagagtgagactccatctcaaaaaacataataaataaataaataaaaaagatgaggtatttaagtgacttatcatagtcactagtaaattgtggagtaatttcaagatctagagaaaaaattttagcagataaagatttaaagcaaactaaaattattagaaataggtccgggacattatttattgccacatttaaatactcactacgagaatacaatagcattagacatgtcaggaattttataaagcatgatcaaaatttgatttgatgtaatgcacagtaacatgtcaaacatatcagaaatattgtttaacagtgacctagtaaggatgattttgacccaagttgttatttgaagagaaaactggagactatttctagcagcatattctttttcctctggagacctttcacatgccaacaac

SEQ ID NO: 84245 - DNA, 1074 bp, Homo sapiens
tatagatgaaagtacaatgtaaacaaatgaaaagcaatatrtgaagaagaaaacaaactctaagtaaagaaaaattgtatcagaaaagtttaatgtgttcctggggccatgaagatcctcaggtatatacatgcgttcatgaattaagttatgctggtagtttaacatgcacgtattttgctgcaatgtgcaaataaaagtatgtaagaaatttaaatgattcctcttaaaggagcatttcatcctactcagggaaacaaatttattttgacctcatatttcaacaataatactgtcataaacccttacacttactaaattaatcctcataataaccctataatacaggtactactgtatctcattttaaagatgaggaagctgttggccgggcatggtggctcatgcctgtaatcccagcactttgggaggccacggtgggtggaacatttgagatcaggagttgagaccagcctggccaacatggtgaaaccctgcctctactaaaaatacaaaaattagccggacgtggcagggggctcctgtaatcccagctacttggaaggctaatgcaggagaattgcttgaacctgggaggcgaatgttgccatgagccgagatcgcgccactgcactccagcctgggcgacagagtgagactccatctcaaaaaacataataaataaataaataaaaaagatgaggtatttaagtgacttatcatagtcactagtaaattgtggagtaatttcaagatctagagaaaaaattttagcagataaagatttaaagcaaactaaaattattagaaataggtccgggacattatttattgccacatttaaatactcactacgagaatacaatagcattagacatgtcaggaattttataaagcatgatcaaaatttgatttgatgtaatgcacagtaacatgtcaaacatatcagaaatattgtttaacagtgacctagtaaggatgattttgacccaagttgttatttgaagagaaaactggagactatttctagcagcatattctttttcctctggagacctttcacatgccaacaac

SEQ ID NO: 84246 - DNA, 1074 bp, Homo sapiens
tatagatgaaagtacaatgtaaacaaatgaaaagcaatatgtgaagaagaaaacaaactctaagtaaagaaaaattgtatcagaaaagtttaatgtgttcctggggccatgaagatcctcaggtatatacatgcgttcatgaattaagttatgctggtagtttaacatkcacgtattttgctgcaatgtgcaaataaaagtatgtaagaaatttaaatgattcctcttaaaggagcatttcatcctactcagggaaacaaatttattttgacctcatatttcaacaataatactgtcataaacccttacacttactaaattaatcctcataataaccctataatacaggtactactgtatctcattttaaagatgaggaagctgttggccgggcatggtggctcatgcctgtaatcccagcactttgggaggccacggtgggtggaacatttgagatcaggagttgagaccagcctggccaacatggtgaaaccctgcctctactaaaaatacaaaaattagccggacgtggcagggggctcctgtaatcccagctacttggaaggctaatgcaggagaattgcttgaacctgggaggcgaatgttgccatgagccgagatcgcgccactgcactccagcctgggcgacagagtgagactccatctcaaaaaacataataaataaataaataaaaaagatgaggtatttaagtgacttatcatagtcactagtaaattgtggagtaatttcaagatctagagaaaaaattttagcagataaagatttaaagcaaactaaaattattagaaataggtccgggacattatttattgccacatttaaatactcactacgagaatacaatagcattagacatgtcaggaattttataaagcatgatcaaaatttgatttgatgtaatgcacagtaacatgtcaaacatatcagaaatattgtttaacagtgacctagtaaggatgattttgacccaagttgttatttgaagagaaaactggagactatttctagcagcatattctttttcctctggagacctttcacatgccaacaac

SEQ ID NO: 84247 - DNA, 1074 bp, Homo sapiens
tatagatgaaagtacaatgtaaacaaatgaaaagcaatatgtgaagaagaaaacaaactctaagtaaagaaaaattgtatcagaaaagtttaatgtgttcctggggccatgaagatcctcaggtatatacatgcgttcatgaattaagttatgctggtagtttaacatgcacgtattttgctgcaatgtgcaaataaaagtatgtaagaaatttaaatgattcctcttaaaggagcatttcatcctactcagggaaacaaatttattttgacctcatatttcaacaataatactgtcataaacccttacacttactaaattaatcctcataataaccctataatacaggtactactgtatctcattttaaagatgaggaagctgttggccgggcatggtggctcatgcctgtaatcccagcactttgggaggccacggtgggtggaacatttgagatcaggagttgagaccagcctggccaacatggtgaaaccctgcctctactaaaaatacaaaaattagccggacgtggcagggggctcctgtaatcccagctacttggaaggctaatgcaggagaattgcttgaacctgggaggcgaatgttgccatgakccgagatcgcgccactgcactccagcctgggcgacagagtgagactccatctcaaaaaacataataaataaataaataaaaaagatgaggtatttaagtgacttatcatagtcactagtaaattgtggagtaatttcaagatctagagaaaaaattttagcagataaagatttaaagcaaactaaaattattagaaataggtccgggacattatttattgccacatttaaatactcactacgagaatacaatagcattagacatgtcaggaattttataaagcatgatcaaaatttgatttgatgtaatgcacagtaacatgtcaaacatatcagaaatattgtttaacagtgacctagtaaggatgattttgacccaagttgttatttgaagagaaaactggagactatttctagcagcatattctttttcctctggagacctttcacatgccaacaac

SEQ ID NO: 84248 - DNA, 1074 bp, Homo sapiens
tatagatgaaagtacaatgtaaacaaatgaaaagcaatatgtgaagaagaaaacaaactctaagtaaagaaaaattgtatcagaaaagtttaatgtgttcctggggccatgaagatcctcaggtatatacatgcgttcatgaattaagttatgctggtagtttaacatgcacgtattttgctgcaatgtgcaaataaaagtatgtaagaaatttaaatgattcctcttaaaggagcatttcatcctactcagggaaacaaatttattttgacctcatatttcaacaataatactgtcataaacccttacacttactaaattaatcctcataataaccctataatacaggtactactgtatctcattttaaagatgaggaagctgttggccgggcatggtggctcatgcctgtaatcccagcactttgggaggccacggtgggtggaacatttgagatcaggagttgagaccagcctggccaacatggtgaaaccctgcctctactaaaaatacaaaaattagccggacgtggcagggggctcctgtaatcccagctacttggaaggctaatgcaggagaattgcttgaacctgggaggcgaatgttgccatgagccgagatcgcgccactgcactccagcctgggcgacagagtgagactccatctcaaaaaamataataaataaataaataaaaaagatgaggtatttaagtgacttatcatagtcactagtaaattgtggagtaatttcaagatctagagaaaaaattttagcagataaagatttaaagcaaactaaaattattagaaataggtccgggacattatttattgccacatttaaatactcactacgagaatacaatagcattagacatgtcaggaattttataaagcatgatcaaaatttgatttgatgtaatgcacagtaacatgtcaaacatatcagaaatattgtttaacagtgacctagtaaggatgattttgacccaagttgttatttgaagagaaaactggagactatttctagcagcatattctttttcctctggagacctttcacatgccaacaac

SEQ ID NO: 84249 - DNA, 1074 bp, Homo sapiens
tatagatgaaagtacaatgtaaacaaatgaaaagcaatatgtgaagaagaaaacaaactctaagtaaagaaaaattgtatcagaaaagtttaatgtgttcctggggccatgaagatcctcaggtatatacatgcgttcatgaattaagttatgctggtagtttaacatgcacgtattttgctgcaatgtgcaaataaaagtatgtaagaaatttaaatgattcctcttaaaggagcatttcatcctactcagggaaacaaatttattttgacctcatatttcaacaataatactgtcataaacccttacacttactaaattaatcctcataataaccctataatacaggtactactgtatctcattttaaagatgaggaagctgttggccgggcatggtggctcatgcctgtaatcccagcactttgggaggccacggtgggtggaacatttgagatcaggagttgagaccagcctggccaacatggtgaaaccctgcctctactaaaaatacaaaaattagccggacgtggcagggggctcctgtaatcccagctacttggaaggctaatgcaggagaattgcttgaacctgggaggcgaatgttgccatgagccgagatcgcgccactgcactccagcctgggcgacagagtgagactccatctcaaaaaacataataaataaataaataaaaaagatgaggtatttaagtgacttatcatagtcactagtaaattgtggagtaatttcaagatctagagaaaaaattttagcagataaagatttaaagcaaactaaaattattagaaataggtccgggacattatttattgccacatttaaatactcactacgagaatacaatagmattagacatgtcaggaattttataaagcatgatcaaaatttgatttgatgtaatgcacagtaacatgtcaaacatatcagaaatattgtttaacagtgacctagtaaggatgattttgacccaagttgttatttgaagagaaaactggagactatttctagcagcatattctttttcctctggagacctttcacatgccaacaac

SEQ ID NO: 84250 - DNA, 1074 bp, Homo sapiens
tatagatgaaagtacaatgtaaacaaatgaaaagcaatatgtgaagaagaaaacaaactctaagtaaagaaaaattgtatcagaaaagtttaatgtgttcctggggccatgaagatcctcaggtatatacatgcgttcatgaattaagttatgctggtagtttaacatgcacgtattttgctgcaatgtgcaaataaaagtatgtaagaaatttaaatgattcctcttaaaggagcatttcatcctactcagggaaacaaatttattttgacctcatatttcaacaataatactgtcataaacccttacacttactaaattaatcctcataataaccctataatacaggtactactgtatctcattttaaagatgaggaagctgttggccgggcatggtggctcatgcctgtaatcccagcactttgggaggccacggtgggtggaacatttgagatcaggagttgagaccagcctggccaacatggtgaaaccctgcctctactaaaaatacaaaaattagccggacgtggcagggggctcctgtaatcccagctacttggaaggctaatgcaggagaattgcttgaacctgggaggcgaatgttgccatgagccgagatcgcgccactgcactccagcctgggcgacagagtgagactccatctcaaaaaacataataaataaataaataaaaaagatgaggtatttaagtgacttatcatagtcactagtaaattgtggagtaatttcaagatctagagaaaaaattttagcagataaagatttaaagcaaactaaaattattagaaataggtccgggacattatttattgccacatttaaatactcactacgagaatacaatagcattagacatgtcaggaattttataaagcatgatcaaaatttgatttgatgtaatgcacagtaacatgtcaaacatatcagaaatattgtttaacagtgacctagtaaggatgattttgacccaagttgttatttgaagagaaaactggagactatttctagcagcatattctttwtcctctggagacctttcacatgccaacaac

SEQ ID NO: 84251 - DNA, 1057 bp, Homo sapiens
tgcatgctcatctttcagcttcaaaagcagaaaccatgattcttaggatcactaaaaggaaagtaacacttcttttctcctattaaaatgcttaaaaattatattttactttggaataattttaattaacagaaaagctgcagcgatgttagagttcatatatactctttgactggcttcttttaatgctaacgtctcgcctggccatggcatatttgtcaaaactaagaaagcaacattattacaatatattaactaaacgagaccagcctgaccaacatggtgaaacccygtctctactaaaaacacaaaaattagctgggcatggtggggcgcgcctataatcccagctactcaggaggctgaggcagaagaatcgcttgaacccaggagggggaggttgcagtgagccgagatcatgccattgcactccagcctgggtgacagagtgagactctgtctcaaaacaacaacaacaaaaacagattttaattggattatatctatttttttccactcatatctttgatctgttccaggatccaatccaggataccacattgcttttagagagttatttttaaggaagtagctgactcatgaaagctacatcagcataggatttttaaaatgaagttaatcattatttctgccttatgacggaaatgattttcaccagcactcatgtgtagcattgacaatattagggtgtgtggttactctgagataatgacccctcccttctctcaggtgcaatgattctgggcaggcaacagcatcacccttcctctgagcaaattatttagttaagccacacatcagccctcaagtagttacaggctttacggtaaagaattttgaattatgtatcatagcttagaagataaatattatgtgagatctaattctcacataagtcataataacttgatattctttttaaaaacatacttcaagagcagatcttttgttttctgaatactggatacaaaatttggcatatggcttaaaatatatatattattaaggcaatatatcatgttaaagcctttatgtt

SEQ ID NO: 84252 - DNA, 643 bp, Homo sapiens
tccaaaaaataacttgctgtgatttgttcatktgatttttggtatgattaaccccttagattttattctatttttttaatcttcaattttaaaactatcactatacaaagatccaaattattttctccaatacaggattaatcttaacctttaagcagttcattttatatattgaggccacaatttgttttgaacatcaattaaatatactgcctaataatttattttctattacctccagcctaaaataaagaataacattttgtcttttttgtttaataaatcagtattaaaattggaactgggttgagaagaattcacaaagaaacaaacaacaacaaaacatcttcacagtaggaaatagtaatatggcagagacggaagcagactccatcaaaaaatccttgaagttttttttctttgttttgttttgttttgagacagagtctcattctgtcaccaggctggagtgcaatggcatgatcttggctcactgcaacctctgcctcccaggttcaaatgattctcctgcctcagcctcctgagtagctgggattacaggcgcctgccaccaagcccagctaatttttgtatttttagtagagaaggggtttcaccatgttggccaggctggtctcaaact

SEQ ID NO: 84253 - DNA, 1311 bp, Homo sapiens
gcctctttctccaggaggtagtgataaagggttgccaggattggagttggggaaacatgcccattatttttcaatttcagataaataagaaaaaaatagtataaatgtgtcccatgcaatatttgggacatactgatactaaaacaaaatcattctttatctgaaattcaaagtgaattggacgttttgtgtcttatctgccaaatctatggtggtcagattcagaaatactccaggtccttttatgtccacgatctacgtgaagtattaaatattttgcgaccaatttttagcaaactttttgaaaatgttccatccattctgagatatcgckttggaagctggtatttatggtgtcaggctatggctgaaatttctgttgaaatatcccactgcagttttaagaaaatgctcttgctcaccattctcagcacccaaacctccccagccctcaggaaacctgcatatttaggacatgttggttcaagtttaacttagccattataccaaagacatctttaccttcataatttggagacagatttcacaggcaatgcttatgctggaatagcaactcattcggaggtgtcgggattcctaatgtgttagaaatcactgcgcttgattccacttctgcagcacaactggctcctgcccagtattggagaacagggcgtctaattcacagggaactaaggccaagatttctacatacgattgtcttatggggccagagctttttttttttttcttttaagtggatgatatatgatacaaatattgttcttaatcaaaagtatattagcaatctaccacaactgcagagttacaaggaagcagtacagcatgtttggagaggattattttcacaagaaacacgtattcatttctctgtctgcctttatcaacatgtatttatcaaaatatggaagcttgtccatgggccgcattttaattactcataggttgcctgaagacagctgcagtctaggaaggaagagagattgaaaagaataaggtgcttttaaaatttggccataattgtaactagaggactctgttggctttattccaaaactctaaggagctgtcttcccctagttttttttcctatcactgacgtttccccatgcagcacttacactggctctcattgacttaatcagctgttattatgtatatttttattttttctttagtaatattttcataataaaattgtataaattcatcagaggagatttggaacatacacctatacaaaaagagaaagaagaatgtcttgaatcctactataaaggcattaccttt

SEQ ID NO: 84254 - DNA, 725 bp, Homo sapiens
tttttgtttctttatttaaactatttcttgaatctgtccactgatctccatttccactaacacctgcaaaattgcagctgcatcatctgtgcatcttgatatgatagactcatgagtggtctctttattgtcctctctcttcttccccaaaccrttctctgctcacatccattgtttttatttttccactgcttgaacccatttaatggttttgccttacttttttttttaattttttctgagacagagtctcactctgtcactcaggctggagtacaatggggctatcttggctcattgcaacctccgcctcccaggttcaagcgattctcctgcctcagcttcccgagcagctaggattacaggtgcccaccaccatgcccagctaatttttgtatttttattagagatgagatttcatcatgtttttcaggctggtctcgaactcctgacctcgtgatccacctacctcggcctcccaaagtgctgggattacaggcgtgagccaccgcacccggccacattttttaaataaaatttttttttgttacaggattgtctagatgagaaaagttgcagagatagtttggtgagtttccttataccctgtacccagtttgctctatttttaacaacttacataattatatttttcacaactaatgaactaatgctgatatattcagatttcattactttttgcccaatgtcatttttccgttcta

SEQ ID NO: 84255 - DNA, 725 bp, Homo sapiens
tttttgtttctttatttaaactatttcttgaatctgtccactgatctccatttccactaacacctgcaaaattgcagctgcatcatctgtgcatcttgatatgatagactcatgagtggtctctttattgtcctctctcttcttccccaaaccgttctcygctcacatccattgtttttatttttccactgcttgaacccatttaatggttttgccttacttttttttttaattttttctgagacagagtctcactctgtcactcaggctggagtacaatggggctatcttggctcattgcaacctccgcctcccaggttcaagcgattctcctgcctcagcttcccgagcagctaggattacaggtgcccaccaccatgcccagctaatttttgtatttttattagagatgagatttcatcatgtttttcaggctggtctcgaactcctgacctcgtgatccacctacctcggcctcccaaagtgctgggattacaggcgtgagccaccgcacccggccacattttttaaataaaatttttttttgttacaggattgtctagatgagaaaagttgcagagatagtttggtgagtttccttataccctgtacccagtttgctctatttttaacaacttacataattatatttttcacaactaatgaactaatgctgatatattcagatttcattactttttgcccaatgtcatttttccgttcta

SEQ ID NO: 84256 - DNA, 725 bp, Homo sapiens
tttttgtttctttatttaaactatttcttgaatctgtccactgatctccatttccactaacacctgcaaaattgcagctgcatcatctgtgcatcttgatatgatagactcatgagtggtctctttattgtcctctctcttcttccccaaaccgttctctgctcacatccattgtttttatttttccactgcttgaacccatttaatggttttgccttacttttttttttaattttttctgagacagagtctcactctgtcactcaggctggagtacaatggggctatcttggctcaytgcaacctccgcctcccaggttcaagcgattctcctgcctcagcttcccgagcagctaggattacaggtgcccaccaccatgcccagctaatttttgtatttttattagagatgagatttcatcatgtttttcaggctggtctcgaactcctgacctcgtgatccacctacctcggcctcccaaagtgctgggattacaggcgtgagccaccgcacccggccacattttttaaataaaatttttttttgttacaggattgtctagatgagaaaagttgcagagatagtttggtgagtttccttataccctgtacccagtttgctctatttttaacaacttacataattatatttttcacaactaatgaactaatgctgatatattcagatttcattactttttgcccaatgtcatttttccgttcta

SEQ ID NO: 84257 - DNA, 725 bp, Homo sapiens
tttttgtttctttatttaaactatttcttgaatctgtccactgatctccatttccactaacacctgcaaaattgcagctgcatcatctgtgcatcttgatatgatagactcatgagtggtctctttattgtcctctctcttcttccccaaaccgttctctgctcacatccattgtttttatttttccactgcttgaacccatttaatggttttgccttacttttttttttaattttttctgagacagagtctcactctgtcactcaggctggagtacaatggggctatcttggctcattgcaacctccgcctcccaggttcaagcgattctcctgcctcagcttcccgagcagctaggattacaggtgcccaccaccatgcccagctaatttttgtatttttattagagatgagatttcatcatgtttttcaggctggtctcgaactcctgacctcgtgatccaccyacctcggcctcccaaagtgctgggattacaggcgtgagccaccgcacccggccacattttttaaataaaatttttttttgttacaggattgtctagatgagaaaagttgcagagatagtttggtgagtttccttataccctgtacccagtttgctctatttttaacaacttacataattatatttttcacaactaatgaactaatgctgatatattcagatttcattactttttgcccaatgtcatttttccgttcta

SEQ ID NO: 84258 - DNA, 725 bp, Homo sapiens
tttttgtttctttatttaaactatttcttgaatctgtccactgatctccatttccactaacacctgcaaaattgcagctgcatcatctgtgcatcttgatatgatagactcatgagtggtctctttattgtcctctctcttcttccccaaaccgttctctgctcacatccattgtttttatttttccactgcttgaacccatttaatggttttgccttacttttttttttaattttttctgagacagagtctcactctgtcactcaggctggagtacaatggggctatcttggctcattgcaacctccgcctcccaggttcaagcgattctcctgcctcagcttcccgagcagctaggattacaggtgcccaccaccatgcccagctaatttttgtatttttattagagatgagatttcatcatgtttttcaggctggtctcgaactcctgacctcgtgatccacctrcctcggcctcccaaagtgctgggattacaggcgtgagccaccgcacccggccacattttttaaataaaatttttttttgttacaggattgtctagatgagaaaagttgcagagatagtttggtgagtttccttataccctgtacccagtttgctctatttttaacaacttacataattatatttttcacaactaatgaactaatgctgatatattcagatttcattactttttgcccaatgtcatttttccgttcta

SEQ ID NO: 84259 - DNA, 2360 bp, Homo sapiens
atggggacttgttttactgaattttctatcaaatcacataacaatgacatctgtatggtcactgctttacatttatttataaacattaaacggaagtatatttgggtgaagtacaaagatagataaaattagatttaacaataggaaacatattttcaagaagtatagttcagttttactcttgggaaacatatttttatagagctaaaagtaaataatgtcctaatctgagaggcctgaaataacactgctgaaatttacatgctttgttgaatgcgacttttagaaatgtttactcccaagaagtctaggttcaagatgtatataaaatgatattgataattcacatgtattaattgtttattatttgctaagcattgtgctagatgccttcctcttacagtcttatgagrtaggcacagtatttgcatccttgttttaaagatgagaaaactgaagcttagggatgttaagtgacatgccatactcatacctcggcaggatttgagtgaaagtctgactctcaaatttaagcttttaattagtatcctatacagattttataggacaaatttgttaagtcagagatacaagccctctgttgttgtcaccttttaacaatctttcttccttcagagaactcccttacccttcaagtacacagcttcttcctgatttctagggatccttctttattgagaaatttcatgctttatttgcatgttaatgttttcacctcttttcaattaaaggctctgtttcctattgaagttttaggcaatatcaagtaggattttttttttgaacaaagaaaaattattggctttgaaatcatactatttctgaagttaagtttaaaagctgacctgcttgtgtcatattaagattctttcaatcttaggagagtgagaacaatggaattcttgaacttttcccattctttcttctggctgtgctctcgatgagctctatggacttgaccaagtcacctacccaatttacatctctgttctcattcaccttttgttttatgcatgcttagttttcatattttgacatcgctgtggcatgatcgctttgagcgcaatatttaaaaatcaaaggggccaaggctttcaatcattagacttgttttaaaaggcaaagaaactattgaaaaccagagttgcatttcatgcattttatgcatgcctctaacttacattagaggctaacttatcatgtttatttctggtttatgaaggtagattttgtaagaactattctgttctggtttttactttttattcttactaagagtctgtgagcactactcttgaaatgcttgatctgacccaagttgacatgtgcttattttccttcctgaagcaaaagcctattaacacttcaaaaggtttcaaaccataagattaccattactccaaatattctctccaattcaaattgacagagttcccactccatcaaacacttggtaaaagagcatgtttatctttaacttcagaagagtataacacagaaagtgtaaagtgttatataaaaattttattcccagagtatcaaaagataaaaaagcaaggaaaattacattatatgtctttcagcaatcatttttttcactaatttaacatttattgagggcccactatgtgttggggagggcccactatgtgtgagacagtgatgctgctagactcaaaccatctttaataacatttgaatgtgtaagatttttgccttggctttcttcatagaaatttccattggtataaaaacaaaatattcattaaaataatttgatagaatgttccacagccagttctatacttctatgtgtacaaaatcaagaagaacctcttattttccctaaaacaaatcttggggatgttgcataccagttcacatttattgagcacttgtaggtgctataccaagtgttgaatggatactctctcatttaatcctctcaagagtcctcaaacacaaccattattatcacacttctgaagttgtagaaacaggcatggagaacgaactcacttgtgcaaagttacacagcatcagtcaggattcaaattgttttctgttgactctgaagttcataccattaactgctatactacaaaaggtgcttgcctaaagatggtcctatacttttgactttgtagtctctgaagcttaagtacctctgggttttgcagcagctatggacatagaagcatgtatggtaataataatgataaagctatcaattgtaataattataatggttaataatataaatgatagcatttataacaatataattagataatatagtaattaatatttttataatgtgttatatgttagtaatatta

SEQ ID NO: 84260 - DNA, 619 bp, Homo sapiens
tctcaacttttcaaacaaatccccaatggcctccctgagttaaatcagcagaacaataatatttcatggctcattagtgcatgcaatcaagcaacagatcctgatmcagtagtggaaagggagaagcaatagttggtttcaattttgttaataccacaatatgcccataggcctcagccaaaaggtgtaaattaaggattgaacataaccacgaagcaattggctgacaacaaaaaaggggggaaaaagacttttaacagaaagagctactgcaacttaaattgttctcacattttaaatgtgttaacaatatctatttttatttgtaagccaactttgtgttgcaactctgctgagtttcatcttttaagcctcttttgcctctctgagccagttttatcttcgtatttgaggctttacattcaggtgacttctttcattgcatttcaagggttctctaacccaaaaaaaagatggaagcagcacacgacaatcctttggggtgagtaaagaaaaatattagaatttctatttccattttctctaaatataatatgagtctacatttgatatatggattttcacaggcattcttgttcagtaactatatcagaggatc

SEQ ID NO: 84261 - DNA, 1280 bp, Homo sapiens
tgtgactgcacaggttgtgaacctagccctgtttgtgaaatgtagtaggacaaaaaaaatcactcttctttaatcagggataaaaacaagacttacatttattacttcccacatgctgaatggtaggttaagtccttcacatacactatctcatttaaccatcaaataacagtttggggtaggtattattaccttcatttacagagaaggaaataggagattttagaaactaagtgatttacccaatatctattgactaaaaggtagtggagtagggattttaacccgggtttgactgaccccaaagcccagttaatctactacttccataaaaccatttagtgcagattttaaattacaaaatatttttaaactgttagtattagatatacacatataataaatacctacatgctaataagaccaagtatgaattaatgaaatagcatgattcacagattaattttttaaaatctcttctggccttctaatgtaatatgacaagtggaacacatatgtttatctcctttacctcctgaggcttcattaaaatgatgatagtgcttttttaaggtataagccatcaactacaaatatcacaggacagaggctattagtaaatgagcaatttcaataaatcaaatgagcaattcactaaaaaatgcattacaaatctatttataaagtttaaaagcaggcaaaactaaataataattgtttagtaatacatacataggtggtaaaactatttttaataacaaaggaatgattatcacaaccttcagtgtagatgttacctctggaggggaggggcacatgatgaagagggagaacacaggaacttttatgctgtttaaccaaggcaagaggtgcatgggtattcattttgttatacatttattgtacgcatatacattattatatatgtatatcacattctcttgaatgtgacttattttcctctaaaataattaaatttttaaaaaatactgcattcataaaataactataacatggtatgaaagaggaattattgaattacaagaataaaaactttggaaatyaaaatatgtttgccaaaataaaaatttaatagaaaacttagaaaataaatccaaacaaatctcccaaattacaatacaaggaaacttaaaaatgacataaaagacaaaagatccaaagggctattcgaagaggttttacatccaaatacaaattacagaaaaaacgaagagggaaaagattatcacagaaatgctaatagataatttccctaagat

SEQ ID NO: 84262 - DNA, 1041 bp, Homo sapiens
ctgtgagaaatacatttctgttgtttataagccacctggtctcaggtgttaggttatagtagcctgaatggactaagacactgtctctagtgaggycctaagagacagagcccaaagggactctccctagagagagtcccctgagtatcctaatatatgtcccttccaggctcccttgcccaagggcagaaaggcattatgactccctgcaaaaccctccctggagaccatgaggcaatgccaagtgaaagggcagggagaggaagagtggtcaggagggtgccgggggccacacggaggagagaactgatgtcagcttccaaggaaggctttctggctggagaagaagtaagtcttaggcacacagaccctggaacaatagaagtaactagccatcgtgcttcctttagctgcttcactctgggcaaatcccttctcctcctgggacctcattatccccatctgtcagatgggcaggtcagactggaagacttccaagggccctctcagcgctatctcttgaagctgaagcccagaaatgggacaggctggcatagagggtagagaggcatgggaaagggtatgagaagtagaagtgaacagaagggcaatgcacctggctaactcatcctcagcctgaggactctcccaggagtcaccccttccaggaagccttccctgaccccgctgtcttggtcctctttcaggctcacctttaccactccgccagtgtccagagcagtgcctggcccagattgagggaacattaatgaaggagctaacttttgagggcgagcatgtatgaacaaagcgagctgcagcccctgtgaggctggcaggtgccaggaaagctccatagaattgggctgacatggtgtgtgaatcaatgatgtatgggtacacatgggagtgagttggtgaaagaaggacagagacagggaagccacctccccaggagggggtttgggagggccagaccagctggctggttctggaagtggtgccaggggctggggcccagagacaggttctagaagtcga

SEQ ID NO: 84263 - DNA, 1591 bp, Homo sapiens
  misc_feature (1)...(1591): n = A,T,C or G
tcaggcccaaataccctctagaggtttcccattggacacttggtattcaccacctgtaaatgaagtgctggcccacaatcagtagttggggaaagcaaccaatcagaggctaaagtgaagttaacagagttgcacttctatgcaaacaaagacttggcccacaatcaatggttgaggacagcaaccaatcagaggctgaagtgaagttacaaagttatactcctatgcaaatggctgattggttacagaaagcaaccagtcagaggtactttcagtttcccacctgcggttcagaaaaggtgggggtttgcaaagttgcctttggtccatttgttacttaggcgtggaaagttaaggttttcttttcagtttagttctgggaagtcagcgtgaaacagccttaggttccctgccttcagaccctattctcctgcctcatgtccactttgaaaccagtgtgcttcccgttagaaataggttggaaatagactttggttcrcaggaaaaatagaaaatgagggtttggagttcaagaccagcctgctcaacatagtgagactctgtctaataagaagtgtgacatagtgagtccctgtctaataaaaaataatgaggagaagaagaaaaggaagaaactgggtttggggagaaactctntntagtgcccccnctggatctacttagtttcaaactttagttcaatcaatatatagactaatagatacagatgaattttaaaagattgcagattccatgtatagcatagatttatttgtgaaaataaattacatgccatgatgctgattatgcctggctttggtcgggcctaccccagtgggaaactgaaagtttccattaggtcctctgggaactaacctctgagcttttctttgtcctgacaatctttctttcaatgtgtgggaactgagaaaactatgtttgggattacatttttattataaaacctagcattttgggtgggttattgttttcttagggaggcaggtaccagccaaccacattgcttctattcacactggaggggaagaaacacttccatttgtgcaggaacccatccccctacttctgtagcttctagtaacaccactgcattctgcagttggacctgctatgcaacctgagtgaaattgatcgagtaacttaacacaggcaatgaaatgacctgaataactcaatttctttctagtaaattaatcttgggttgtatcatggataagacacctttgaaaacaactaatttggcttgacattgttcctttaaagattttataagtaattgcccgctctaagcatgtctaggcagctgcattttaattatgcatccccaccgaaaggtagaagtcatgaaaaatgatcctgaaaatagcaaaatacctgaagaatttcacatagatttaacgtattgatagacaggtgagtgttcagccactacccaccttaacaggatcttcagggaaattgttaggaggctagttgagcaccaggctgtccattggaaggccagtttgattcatggtggcgtaccaaatgaggcaatgtgttaccgtgaaagccaatggcagttgaattc

SEQ ID NO: 84264 - DNA, 547 bp, Homo sapiens
tttttcaatcagtattagacccccastagcaatctatgtaaattctagttgctccacattttttagaaaattttctgttgtcagtctttaaattttaatcattctaatgaacgcattataatatatcattttggttttattttgcagttgcctgatggtgttgagtgcccttccatggctatacaaacatcttcttttcaagatgtgtattcacatcttttgcttgtttttattttttaatgttatcagttacttaattaggttcttaagaaatttagagcaccactttgtgaggttaaattttatttgtcagggcaaacacagattataggtagccctggagctgaggaatggctttgatttttgttaaaatttgagtccacagctttctgatcaaccttgcactggtcatttctctttttccgtgtcgaagatatcaccttcttgatatctgggcttctgcagctgcctcttcttgaagtaagcaacagtaagatgttttgagatttttacattgcagataccaattttggttgaggtggcaatg

SEQ ID NO: 84265 - DNA, 547 bp, Homo sapiens
tttttcaatcagtattagacccccactagcaatctatgtaaattctagttgctccacattttttagaaaattttctgttgtcagtctttaaattttaatcattctaatgaacgcattataatatatcattttggttttattttgcagttgcctgatggtgttgagtgcccttccatggctatacaaacatcttcttttcaagatgtgtattcacatcttttgcttgtttttattttttaatgttatcagttacttaattaggttcttaagaaatttagagcaccactttgtgaggttaaattttatttgtcagggcaaacacagattataggtagccctggagctgaggaatggctttgatttttgttaaaatttgagtccacagctttctgatcaaccttgcactggtcatttctctttttccgtgtcgaagatatcaccttcttgatatctgggcttctgcagctgcctcttcttgaagtaagcaacagtaagatgttttgagatttttacattgcwgataccaattttggttgaggtggcaatg

SEQ ID NO: 84266 - DNA, 1069 bp, Homo sapiens
gaaaatcagaaaactttactgaaaatgctaaagaaaagctttaagtatatttataaattggaagaytaaatattaaagaactaagtctttccaaattaacttatgactacaatctcaattaaatcccacaaggtgtttatgaaagctgacaagcagaatctaagatttctatggaaattcaaaatccacaaatagccaattacactcaacaaagataaagtggaagaattcaccatatcaaacaccacaacttattataaaactgcatcatataagacagtgaatatcatgtgatatggtatgatatggtggtaattgtgtggtggatagacagggtagggaaaggtaaggatatagaaaacagcagcgggagagccaagacagaggcccatacatataatgtttagttgatattgttatagaggttgcattccaaatcagtgaggaataggtagggttttctaaatcttattttaaagttagttatctatattaaaataagttattctgcctacttaaaaaagacctgtgtgtaagaagaaaaaatataaaacttacagaagataatatggaagaatatatttataaacttagatatgcaattatttctttaaaattatgcaaaaagtactagtcatattaataaatatatacgcattatagttaagaacccacatacatcgaaagatgtcataatagtagtgaaacagcagctacatggagaaggtatttgctacacaaaccaacaaggcactcacatccagtataaataattctgaggaagcattaaaatagagacagttcaagagaaaaataaacaggaagttttaacgtacatcttgtaaaagaaatccaaataactcatgaacatataaacaagtgataatctcatttgcaaccagagaaaggctaattaaaacacacaaacaaataaacaacaaaagcagcctaacagaacttagtattatagaggacaagaaccaatgaaactcatattttgctaattggaatatattataatttggggtaaccatttgacaaacaactttgacactccagtagagttgaa

SEQ ID NO: 84267 - DNA, 627 bp, Homo sapiens
tgaagggagggaatacttgatgtctggtgtcccaaagacctgcagaaaaaaaagagttgtaagacaaaggaagtggtctggaatccagcagtgaggtcagtgaaattaaggaatgaatataattgttagataagccagtttcaggccattttacagtatcttgtagtgatattatttgtgraaaacaaaatattggaagagtgtccaatttgtccctgaaatcctcttatatctcatgcagtttatagaattgggaaatacctataaattatgagaggaaagtagcctatagtttagaagatttggggcaaatatataaatctatgcctacagaaaatgaaaattgccccttttgaaaacagagtagaaactaaaatcaaccaatggtcaggagaaaatatttgcaccagggataacagaaaaagaattataaatagtcaaaaacaaaaaaggaaactagaatccagtagataattgaagaaaacaaaaaagatattttacaatgtacaaactaaaattattaaataattataatgttccatttcactagcaaagatgtataaattaagaccataattagacagtattgttatcaaattatcagcagtttaaaaatatatgctctct

SEQ ID NO: 84268 - DNA, 611 bp, Homo sapiens
tgtagagtggggttggggggtgtgagtggagtgggaaagaatggatgaaatgtgactggcgccagctgaaatactgttgcagcaatgtgatgactacatgaggatatagtgtatgattctctggacttttgtatatgattaaaattttccataacaaaatgtttctaaaaggaaaaacagagtaacagtgtatatttcatataggtgttatgggtattaaatgagatatgtaaaagtgcaatactgtctgggatacagaaggggttttgaaaagwttattttcccttttattttctcttttaaaatacacctcccccacaacacacagaaaagacacacacacacacacacacacacacacacacacacacacaccaggagtcatccaaaaacagtctttgtgatgttctgcaagggttgaattgtcctagtaagggtttgtgaaagacttggatcttttttacattgaaatcaaaggctggtgtttttagacacacttcagagtcctggagccttgggtactggaccttcctactttgggaaaataatcaactcctgagctctgtaaacaataaccagtatagaatagaaagcaggattctctgaagaga

SEQ ID NO: 84269 - DNA, 1254 bp, Homo sapiens
gcatacaatcactgaaggctatattgattattagcatgttttagcacaaaagtattttaaattaaggtatacacatttttaagacataatgttattgcatgctgaatagattacagtatagtctaaacattactccctgagaagccaaaaagtccacatgacttgctttattgtgatattggctttattgtggtgatctggaaccaaacctgcagtgtttctaagatatgtctgcatgctgctggatgatactttttgtaatccactgactgctctttaaatagagggaaggaggtataggccaatccattaatttggataccttgattaaaccatctgattartaagttcatttatctgatatataacctcaaaaaatgtccttacatcctcatagagttatcatatttgaaataacttatttaaaccgattatgtacttatcacatacatacagcacatagtatgatttaaataaatgttagctatgagtattccaaagtgaataaaagtaaaattagtttttaaacatttttaaagtgttgaaaaatgattcttacttttggtagcacccaaggaaaagataatgctactcagcacagatttgcttaacattcattttgaaagcagtcttgtcttactaaagagggaaacaggaaaattcaagccctaatcatttctgtatgttgtttgaaaaagttaaagataaaagaagtattaatcaaataaatatcagcagtagaaagttataacaatataataggaaatcaagacagtaaatatatgaatttatatacctacaatatgtatttctaggataaatattcattataatagttttattctagaaattttttgaacatttttatacaagtgatcttttttcagctcatggaatgctgctattcatttttaaaagcaagaagaaatgaatagtacagtaaagcaatctattttatttagatattcttcaaaaagaagcaaattgttttttaacctccctggcactattgaaaggtatatatcaaggaacatgtattagtattgtaaaaaaaaaaaagccctacatagtaacaatgtatatcttattgcaaaaatacctaaaatcataagctttgatttaaactcaatctttcatttgctagctttatgatactacccatatctctttaaataaagaagtcagttttcttaccaacaaaatatgaaaaaataatacctactctgttttacctggatcaagaattcataatgc

SEQ ID NO: 84270 - DNA, 1254 bp, Homo sapiens
gcatacaatcactgaaggctatattgattattagcatgttttagcacaaaagtattttaaattaaggtatacacatttttaagacataatgttattgcatgctgaatagattacagtatagtctaaacattactccctgagaagccaaaaagtccacatgacttgctttattgtgatattggctttattgtggtgatctggaaccaaacctgcagtgtttctaagatatgtctgcatgctgctggatgatactttttgtaatccactgactgctctttaaatagagggaaggaggtataggccaatccattaatttggataccttgattaaaccatctgattagtaagttcatttatctgatatataacctcaaaaaatgtccttacatcctcatagagttatcatatttgaaataacttatttaaaccgattatgtacttatcacatacatacagcacatagtatgatttaaataaatgttagctatgagtattccaaagtgaataaaagtaaaattagtttttaaacatttttaaagtgttgaaaaatgattcttacttttggtagcacccaaggaaaagataatgctactcagcacagatttgcttaacattcattttgaaagcagtcttgtcttactaaagagggaaacaggaaaattcaagccctaatcatttctgtatgttgtttgaaaaagttaaagataaaagaagtattaatcaaataaatatcagcagtagaaagttataacaatataataggaaatcaagacagtaaatatatgaatttatatacctacaayatgtatttctaggataaatattcattataatagttttattctagaaattttttgaacatttttatacaagtgatcttttttcagctcatggaatgctgctattcatttttaaaagcaagaagaaatgaatagtacagtaaagcaatctattttatttagatattcttcaaaaagaagcaaattgttttttaacctccctggcactattgaaaggtatatatcaaggaacatgtattagtattgtaaaaaaaaaaaagccctacatagtaacaatgtatatcttattgcaaaaatacctaaaatcataagctttgatttaaactcaatctttcatttgctagctttatgatactacccatatctctttaaataaagaagtcagttttcttaccaacaaaatatgaaaaaataatacctactctgttttacctggatcaagaattcataatgc

SEQ ID NO: 84271 - DNA, 914 bp, Homo sapiens
aagaaaaggaagtgcaaacacatataggtgtaatctctgccagaatatcccctctagtagtttccctacagtgcttctctgccargagcctggcaaatttattttggcattcattacaagatatcctgatttcagaaaaaatgtgagaaatgtgttacttagactttggcaacgtattaggaagagtcaccatttcatattatgtcctccagctgaatttagaactgctgaattatgtcctaaaagaaattgagtgggaaaaataagagatacatttgttgattagcatgttcaacttgtctcactccttaagggaaagtggcactattatctactcttttattcaagccaggaaactgtatcatcagactactgccttttcgtttttcctgtctcctacacctaatccatcaccacattgtgtcaatgctgtctcctaaatatgattcacactggtccatttcttttccatttctgctgatatactttagtccatgccaccagcatctctggcttgaattgcactaatggcctccaactagtgtttctgcctccagtcgtgtttgcaaatcaaatccatttctacactgtagccaaaatgttctttttagagtataaatctgatcaagtcacatctctagtaaattatattagtggctccccagtgttcccagaataaatctctgtacagcttactagtctcctcatgttctgggccctattcaccttcccagcttcaacccctagcacttctcttccaatacccaataatacagtaaactgaacttctctcctggtagtttcacacactgttgatctctctgaatggaatgaccttctgccttctctctctatcaagccctgactggtccttttcatccttaactaagatgccattgctttaggaaaaccat

SEQ ID NO: 84272 - DNA, 914 bp, Homo sapiens
aagaaaaggaagtgcaaacacatataggtgtaatctctgccagaatatcccctctagtagtttccctacagtgcttctctgccaggagcctggcaaatttattttggcattcattacaagatatcctgatttcagaaaaaatgtgagaaatgtgttacttagactttggcaacgtattaggaagagtcaccatttcatattatgtcctccagctgaatttagaactgctgaattatgtcctaaaagaaattgagtgggaaaaataagagatacatttgttgattagcatgttcaacttgtctcactccttaagggaaagtggcactrttatctactcttttattcaagccaggaaactgtatcatcagactactgccttttcgtttttcctgtctcctacacctaatccatcaccacattgtgtcaatgctgtctcctaaatatgattcacactggtccatttcttttccatttctgctgatatactttagtccatgccaccagcatctctggcttgaattgcactaatggcctccaactagtgtttctgcctccagtcgtgtttgcaaatcaaatccatttctacactgtagccaaaatgttctttttagagtataaatctgatcaagtcacatctctagtaaattatattagtggctccccagtgttcccagaataaatctctgtacagcttactagtctcctcatgttctgggccctattcaccttcccagcttcaacccctagcacttctcttccaatacccaataatacagtaaactgaacttctctcctggtagtttcacacactgttgatctctctgaatggaatgaccttctgccttctctctctatcaagccctgactggtccttttcatccttaactaagatgccattgctttaggaaaaccat

SEQ ID NO: 84273 - DNA, 914 bp, Homo sapiens
aagaaaaggaagtgcaaacacatataggtgtaatctctgccagaatatcccctctagtagtttccctacagtgcttctctgccaggagcctggcaaatttattttggcattcattacaagatatcctgatttcagaaaaaatgtgagaaatgtgttacttagactttggcaacgtattaggaagagtcaccatttcatattatgtcctccagctgaatttagaactgctgaattatgtcctaaaagaaattgagtgggaaaaataagagatacatttgttgattagcatgttcaacttgtctcactccttaagggaaagtggcactattatctactcttttattcaagccaggaaactgtatcatcagactactgccttttcgtttttcctgtctcctacacctaatccatcaccacattgtgtcaatgctgtctcctaaatatgattcacactggtccatttcttttccatttctgctgatatactttagtccatgccaccagcatctctggcttgaattgcactaatggcctccaactagtgtttctgcctccagtcgtgtttgcaaatcaaatccatttctacactgtagccaaaatgttytttttagagtataaatctgatcaagtcacatctctagtaaattatattagtggctccccagtgttcccagaataaatctctgtacagcttactagtctcctcatgttctgggccctattcaccttcccagcttcaacccctagcacttctcttccaatacccaataatacagtaaactgaacttctctcctggtagtttcacacactgttgatctctctgaatggaatgaccttctgccttctctctctatcaagccctgactggtccttttcatccttaactaagatgccattgctttaggaaaaccat

SEQ ID NO: 84274 - DNA, 914 bp, Homo sapiens
aagaaaaggaagtgcaaacacatataggtgtaatctctgccagaatatcccctctagtagtttccctacagtgcttctctgccaggagcctggcaaatttattttggcattcattacaagatatcctgatttcagaaaaaatgtgagaaatgtgttacttagactttggcaacgtattaggaagagtcaccatttcatattatgtcctccagctgaatttagaactgctgaattatgtcctaaaagaaattgagtgggaaaaataagagatacatttgttgattagcatgttcaacttgtctcactccttaagggaaagtggcactattatctactcttttattcaagccaggaaactgtatcatcagactactgccttttcgtttttcctgtctcctacacctaatccatcaccacattgtgtcaatgctgtctcctaaatatgattcacactggtccatttcttttccatttctgctgatatactttagtccatgccaccagcatctctggcttgaattgcactaatggcctccaactagtgtttctgcctccagtcgtgtttgcaaatcaaatccatttctacactgtagccaaaatgttctttttagagtataaatctgatcaagtcacatctctagtaaattatattagtggctccccagtgttcccagaataaatctctgtacagcttactagtctcctcatgttctgggccctattcaccttcccagcttcaacccctagcacttctcttccaatacccaataatacagtaaactgaacttctctcmtggtagtttcacacactgttgatctctctgaatggaatgaccttctgccttctctctctatcaagccctgactggtccttttcatccttaactaagatgccattgctttaggaaaaccat

SEQ ID NO: 84275 - DNA, 1275 bp, Homo sapiens
acctcccaccaggcccctcctccagcatgaggattacaatttgacatgagacttaggtggggaaacagagccaaaccatatcagacacaaagttgagctcttcawaaagcacaaatgttccaaaccggaacaaaggtaggttagcattttccaaatgccaacctccaaagacctccagattaggacctcaaacacgtttcaagtttgtcacatggctctccttttacttgactgctctccaggaaaaccaaactttaccccacatgcctctgatattattaatgttccttcctaggcagacaaatcctatcagaatttcaaacctaccctaaatgtttcctctttaatgtagccattcacccagtgcttttaaatatgtgagacactctttctttttgcaacccatttagagcttttatctgtcgtgggaaatttgccttatattgcagttatctgggaagtcatattccccattaaactacatctgaaggtccagaacagtttccaaggtatccgtataatatggagcactcaatgtacactgaccatattgaatccaacaaaattgaaattaatgtagctttttatctttaaaacagaaaaataataacgaaaaagccacaactcacagagtacttgaacttgcatcattctgctaagtggcatttttatgagtcctaaatgctctgcactatgctaatgaaagacaaggttgcaaataattgcctgggcctcccagagagacgttggtacagcattctggcctgctagtttaaaaaaaaaaaaacttttttctcggcctagaaaaacaggttcctgatttgtatagtagaggctagctcctttctaaattatgtgcagacaacactggtctgtatatttgaagtgaattagtgtctttatgtaatccctgaaggtctccataattccttgttaacacgatggagtttctgatgtgctgtctccctgcacaatcacaggttactacagagaatggaactcagaagtcaacaaaaactctttatcaagtatgactacaaagtaatagaacttagatggcataatgtaaatgaacacttctttgtcctccaagttatatgagatgctatacatatagtacatccacgctatcattgatcaaaatgcttatgaaagtactttcagcagctagggcacattcttctaaacattcctaaaggtggcaaatccccaaaatatgaggggcatgtgggttttctgaatacccaaagttgttaaaaatcaattatggggcca

SEQ ID NO: 84276 - DNA, 659 bp, Homo sapiens
atcaatattagaggtttcagggtggtttttactatgtaaaccctagttctataatttcagagctggtaactctcatttcraacatatttttatggattccatctcaaatgtggttctaccaaaaaatactttgtttaaattgccttaacattgtgaattgtgctcacttgatgagagcacatgaggagttggaagtataatgatattctaaaaataccaatgatttgcacattcttttccatctcagagcaactggatttattacacatttttatctacttgtcaggcatggagtaagtggttagcacggactctccaagtactattgtgcttttaaaatgaaatgatcaaaccacaatctaaatttgtaaattgaaccatactgagtgtgttctcaatgagacaatgaagtccattcttcctttaaatcaaaagataattttacattctctaactctactcatcaacttgcatttcagcctttcagcaaatggagctgtagcaaatatctttgcacaatgtctttgcccagactcactcattctgtgagtctgaattatattgattatccatctgtcactattataaccgtccctcacctggacatttgatcaatagcacgcagtctttcttccttatcacatatcttcttaaattct

SEQ ID NO: 84277 - DNA, 659 bp, Homo sapiens
atcaatattagaggtttcagggtggtttttactatgtaaaccctagttctataatttcagagctggtaactctcatttcaaacatatttttatggattccatctcaaatgtggttctaccaaaaaatactttgtttaaattgccttaacattgtgaattgtgctcacttgatgagagcacatgaggagttggaagtataatgatattctaaaaataccaatgatttgcacattcttttccatctcagagcaactggatttattacacatttttatctacttgtcaggcatggagtaagtggttagcayggactctccaagtactattgtgcttttaaaatgaaatgatcaaaccacaatctaaatttgtaaattgaaccatactgagtgtgttctcaatgagacaatgaagtccattcttcctttaaatcaaaagataattttacattctctaactctactcatcaacttgcatttcagcctttcagcaaatggagctgtagcaaatatctttgcacaatgtctttgcccagactcactcattctgtgagtctgaattatattgattatccatctgtcactattataaccgtccctcacctggacatttgatcaatagcacgcagtctttcttccttatcacatatcttcttaaattct

SEQ ID NO: 84278 - DNA, 679 bp, Homo sapiens
atggaatgccaagagtctaccgaagcctctacggccctaacatcttcccctttctgctgattcagatgcacccagatggcactgccaaaagtgatctgcaatgcatcgcttgtgactgagtttctgccaagaaaactaaagggcttgaagccagacttctctgttttccacttggatattgtggtggtagaagaaaatggaaattagttgggcagaatcctgaggcggtcccagagagtcccattccctggtatatacgccctatataatctccaacccttatgcatgggcagagccttcggatatgatgggatatcactcctgtgattaggtcacttgtcaatcractttgatttaatcaaaagggagtgtcttggtcttttttctgtcgcttatagcagaatacatgaaactgggtaatttacaaagaaaatgaatttgttttttacagttatagaggctgagaagctcaagttgaggagtcacatctggtgcgggccttcttgctggtgaggactctgcagagtcctgaattggcacagggcatcacatggtgagggggttgagtgtgctagctcaggtgtctttttctcttcctataaagctaccagtctcactcccatgataactcattaatccattaacccattgatttataaatggattaatcctttcagga

SEQ ID NO: 84279 - DNA, 1342 bp, Homo sapiens
atccttcttctgttgtctaagaataggcagctcttgccatgaacctgagaacaaagaggtgcccgctctcaagtattccgacacagtgggcgccattagagaagctggactgctcccacataaatggcagctgccctccaggaaccttctagtctaaggaggctgcctgcagggttcaaggctctagttgtacatgaatttaggctctgaaaggaaagaccagggtatttgacaaggagattctacatgaccctcagtggagaattgagagatgaaaagcatcccatcaggcacccagtgtttaaatgccatctacagagacagcattaatatccagacagcatcatccagagaatgggacaaccagcagagcaaagaccagtattcttgcctgaaaactataaaggcaacacattttcatcctttttctcttctctcctttccaccacattacactgaagtagctgaaccttcaagaaagaggagacaagtgatgtctcagacagatcaagggcagactgctctcccatcctctttctattcaatcagcctgtgctctgaaggatttctgcaagagatttaaattggtcagttttaatagataacttgttagcttctctctatatttccctttctcattcaagggttaggtttgtttcatagttgaaagactgtacttcttgatttttccacttctcagttactgttcagaatcctctgtttcttcctgactgtctcaacttatccagaagctcttaccatgaccacagcttggtatttctggacacgtccctctaatggagtatcagtctgttggcacaggcagaagttgaaaggtaatgggctgcagatagcctacccttctactttattgtcttctccccttattcatgacaagttcatcactcaagaaggtttggatgccattgcattgaattttttaaggattagagtaatttaatgaacttatgaagaaatagaaaaactaaaatggcaggcaatatgactttttacccttgtaaggcacacaccccctaggagattattaatagaatagcagtttaagtagtaaaataacatgattggatttcattaagaaacagtactttagtagcagagaggaatgggcgaagttactgaaaccaatgagaatgatatagaagatgcatatttataggtcatcaatatgtcaattagtacattttaagaacttattactattatgtattttaaaaatatctcatggaaactaaatactccattctcagaaayatacacatgtaaaaatttcacaatttcgagggttgtatggatctcttttatccattggaaccccgggagg

SEQ ID NO: 84280 - DNA, 568 bp, Homo sapiens
ctccttaagtctcctaagtaataaaaactgtaaaatgcaaataagccttcgatgacctttactaacttttactaaagtatcaatgatgacttggttgtttaaacagctgacatttgggcaatttgagtatgtcaarctcaataatactggttttcatttgcaagatccacttaaaacttaaggaggctaaaaaacatcatttaaaataccctataaattatcatcatatatatcatacaaaaatatcctacttcagtaaatattgtaatgttatacattttatgagaaacaactaaaatgtgtaaatagcccagtaataaagttttataatcttttaaatcatacaatttttctttaagacattatggttaaatattctcttcgttagatgtggcttacccgtggattctagagaagaaagtagatgggagcaagtgtccaacacagcagcagctggaaagaaaaataaagaattatgttctttacctaaaacacttcagttgactaagtgtgcgtttaaaaactaaagagttgataactttatcagagttaataagaatgagaaata

SEQ ID NO: 84281 - DNA, 568 bp, Homo sapiens
ctccttaagtctcctaagtaataaaaactgtaaaatgcaaataagccttcgatgacctttactaacttttactaaagtatcaatgatgacttggttgtttaaacagctgacatttgggcaatttgagtatgtcaaactcaataatactggttttcatttgcaagatccacttaaaacttaaggaggytaaaaaacatcatttaaaataccctataaattatcatcatatatatcatacaaaaatatcctacttcagtaaatattgtaatgttatacattttatgagaaacaactaaaatgtgtaaatagcccagtaataaagttttataatcttttaaatcatacaatttttctttaagacattatggttaaatattctcttcgttagatgtggcttacccgtggattctagagaagaaagtagatgggagcaagtgtccaacacagcagcagctggaaagaaaaataaagaattatgttctttacctaaaacacttcagttgactaagtgtgcgtttaaaaactaaagagttgataactttatcagagttaataagaatgagaaata

SEQ ID NO: 84282 - DNA, 726 bp, Homo sapiens
ttataatttgataaattataaaatatagtgaatccattaattagccatcacctctttctttttatttttagtgaaaataaagaatgaacccactaattagccatcaactctttcttttctattcatttttagtggctatcttggattttatttattgagtatatatttattagctatctcaataaatggatatttatattgattttcataataacaattgtatttgatcaaatctagttctatctcattagatcaattgcatttgatcaaatccgctagttatacatcattatatctttcttttcattgtgttaaaccattaacaacatttccataacactgttaaataagcagacattctagtccagtgtctcattttatttatttwttttttcttttttttttttttaattgatcattcttgggtgtttctcgcagagggggatttggcagggtcacaggacaatagtggagggaaggtcagcagataaacaagtgaacaaaggtctctggttttcctaggcagaggaccctgcggccttccgcagtgtttgtgtccctgggtacttgagattagggagtggtgatgactcttaacgagcatgctgccttcaagcatctgtttaacaaagcacatcttgcaccgcccttaatccatttaaccctgagtggacacagcacatgtttcagagagcacagggttgggggtaaggtcacagatcaaca

SEQ ID NO: 84283 - DNA, 726 bp, Homo sapiens
ttataatttgataaattataaaatatagtgaatccattaattagccatcacctctttctttttatttttagtgaaaataaagaatgaacccactaattagccatcaactctttcttttctattcatttttagtggctatcttggattttatttattgagtatatatttattagctatctcaataaatggatatttatattgattttcataataacaattgtatttgatcaaatctagttctatctcattagatcaattgcatttgatcaaatccgctagttatacatcattatatctttcttttcattgtgttaaaccattaacaacatttccataacactgttaaataagcagacattctagtccagtgtctcattttatttatttattttttcttttttttttttttaattgatcattcttgggtgtttctcgcagagggggatttggcagggtcacaggacaatagtggagggaaggtcagcagataaacaagtgaacaaaggtctctggttttcctaggcagaggaccctgyggccttccgcagtgtttgtgtccctgggtacttgagattagggagtggtgatgactcttaacgagcatgctgccttcaagcatctgtttaacaaagcacatcttgcaccgcccttaatccatttaaccctgagtggacacagcacatgtttcagagagcacagggttgggggtaaggtcacagatcaaca

SEQ ID NO: 84284 - DNA, 726 bp, Homo sapiens
ttataatttgataaattataaaatatagtgaatccattaattagccatcacctctttctttttatttttagtgaaaataaagaatgaacccactaattagccatcaactctttcttttctattcatttttagtggctatcttggattttatttattgagtatatatttattagctatctcaataaatggatatttatattgattttcataataacaattgtatttgatcaaatctagttctatctcattagatcaattgcatttgatcaaatccgctagttatacatcattatatctttcttttcattgtgttaaaccattaacaacatttccataacactgttaaataagcagacattctagtccagtgtctcattttatttatttattttttcttttttttttttttaattgatcattcttgggtgtttctcgcagagggggatttggcagggtcacaggacaatagtggagggaaggtcagcagataaacaagtgaacaaaggtctctggttttcctaggcagaggaccctgcggccttccgcagtgtttgtktccctgggtacttgagattagggagtggtgatgactcttaacgagcatgctgccttcaagcatctgtttaacaaagcacatcttgcaccgcccttaatccatttaaccctgagtggacacagcacatgtttcagagagcacagggttgggggtaaggtcacagatcaaca

SEQ ID NO: 84285 - DNA, 726 bp, Homo sapiens
ttataatttgataaattataaaatatagtgaatccattaattagccatcacctctttctttttatttttagtgaaaataaagaatgaacccactaattagccatcaactctttcttttctattcatttttagtggctatcttggattttatttattgagtatatatttattagctatctcaataaatggatatttatattgattttcataataacaattgtatttgatcaaatctagttctatctcattagatcaattgcatttgatcaaatccgctagttatacatcattatatctttcttttcattgtgttaaaccattaacaacatttccataacactgttaaataagcagacattctagtccagtgtctcattttatttatttattttttcttttttttttttttaattgatcattcttgggtgtttctcgcagagggggatttggcagggtcacaggacaatagtggagggaaggtcagcagataaacaagtgaacaaaggtctctggttttcctaggcagaggaccctgcggccttccgcagtgtttgtgtccctgggtacttgagattagggagtggtgatgactcttaacgagcmtgctgccttcaagcatctgtttaacaaagcacatcttgcaccgcccttaatccatttaaccctgagtggacacagcacatgtttcagagagcacagggttgggggtaaggtcacagatcaaca

SEQ ID NO: 84286 - DNA, 1152 bp, Homo sapiens
aaaagtaagtagaatgagaaaatctgtgtataagaaaatgaacatccttaaaataaattagttgaacacagtcaagaaatgatttgatcccatttggagatggaaaattctacactcacagcaaaagacttaaccaaatttaaggtttaagcaaatttaagattttgcccataggaggagcttcattatctattacattttatgatcctatttattacttaagaaaaaatatatgtttttaacttccacattattaatgaaagggaattaatactcctgagtacagaagggcatgtaacacacgtcacccagtgaatggataaccgtgactttggatacagaggcaaactattggggcatttaattttgcagtccaggaatctattactgcaattctaggtctagttggttcctctaaaaaatgtgggctagtttacaagttacattataccaataaggaagcctttgattatttgatgaaagcagatacattactgtgcattgcaaatttagctctcccaaaaaarttgttgaatctttgcaaaatattggccttatattttctaactgctggaatcttctgaaatctaagagaacacaaacatctcagcagagaaaagataataattatctttctatggtcacaagaaaactttgggtgacccatgaggttgagaacacacaggactgtggtcaataagattctctctcatggatgtaggtcttgacagactttccagacctcagaacaactagtcaccccaggtgagaagcaagatcattgtgctttactatagttaaaacactcaagtacagtctattatgtaaactttgccatacctcctttctttctccctcattcaagctcacaaaggaaataatactttggggaaaattaagttattagtagttcagttatataagagtaagaaaagtcattctaaaagtatccaggctctttaaagtaaaaaaaaaataagaaaaaaagaaaaaaaagtcattcttagcaaactaacacaggaacagaaaacaaacactgcgtgttctcactcataagtgggagttgaacaatgaatgagaacacatgaacacagggaggggaacatcacacaccagggcctgttgcgtggggggaaaggggagggagagcat

SEQ ID NO: 84287 - DNA, 1152 bp, Homo sapiens
aaaagtaagtagaatgagaaaatctgtgtataagaaaatgaacatccttaaaataaattagttgaacacagtcaagaaatgatttgatcccatttggagatggaaaattctacactcacagcaaaagacttaaccaaatttaaggtttaagcaaatttaagattttgcccataggaggagcttcattatctattacattttatgatcctatttattacttaagaaaaaatatatgtttttaacttccacattattaatgaaagggaattaatactcctgagtacagaagggcatgtaacacacgtcacccagtgaatggataaccgtgactttggatacagaggcaaactattggggcatttaattttgcagtccaggaatctattactgcaattctaggtctagttggttcctctaaaaaatgtgggctagtttacaagttacattataccaataaggaagcctttgattatttgatgaaagcagatacattactgtgcattgcaaatttagctctcccaaaaaagttgttgaatctttgcaaaatattggccttatattttctaactgctggaatcttctgaaatctaagagaacacaaacatctcagcagagaaaagataataattatctttctatggtcacaagaaaactttgggtgacccatgaggttgagaacacacaggactgtggtcaataagattctctctcatggatgtaggtcttgacagactttccagacctcagaacaactagtcaccccaggtgagaagcaagatcattgtgctttactatagttaaaacactcaagtacagtctattatgtaaactttgccatacctcctttctttctccctcattcaagctcacaaaggaaataatactttggggaaaattaagttattagtagttcagttatataagagtaagaaaagtcattctaaaagtatccaggctctttaaagtaaaaaaaaaawaagaaaaaaagaaaaaaaagtcattcttagcaaactaacacaggaacagaaaacaaacactgcgtgttctcactcataagtgggagttgaacaatgaatgagaacacatgaacacagggaggggaacatcacacaccagggcctgttgcgtggggggaaaggggagggagagcat

SEQ ID NO: 84288 - DNA, 1596 bp, Homo sapiens
  misc_feature (1)...(1596): n = A,T,C or G
ccctaacagaatgattacattttattagaatcttttcgtgagtcattattcctctcaaatttgagtagtcttaaaatttgtattaaaagctttatttactcccaactcctcttcttctcaaccccacctccagatttatatgaagtagattgttacagtgttagttaaggcattctataaaacatagcagaggctattcataaatgaataataggcggtttctgacatcaggaagtttagaccgctgcaagaaagctaaaaaggatatataataattaagaggtagaatttttgaggtctaaaagtaattgctaggtggttaaagagatgggagaactcacttctgattaaggagaacaggaagggcttcatgaagaaaataatgtattttcatttttattcagtgctgagcccttgtgtctatgaatcaaggaacagattgaaggagactgatggatttttttgtatttcttttaaaggaataaagaaaatagtacattctctaggtggcactgaaggaaacagacatgccatcatgaggtgatgtataacattatccaattcaagggaagctggaaacttacagatcccctgtcccacccagggccaccatgttgcacaacatcatgagacactatacacaccctagtttatgtaaatgtaaaacagtaaggagccttaaggagcctttttagatttttttctgatcattttcccatgaaattttaatactacatatatatcgtatgtcgttttatgtaatgtatgtaatctgcgctacacataaaagtaaaatttgtgtttccttcccccatgtgcaaattgtcatcctcttgtggatcctatcacctgtgttgagaatgcatgttgtaaaagaaatgcccatttatattacagtaaacatctttcttatgacaatgtggatgattctcctgaaatggaagaaccctgttccctaatgccactttgaacctcaagagagagtcaacaataatttaggaattcnnnnnnnnnnnnnnnnnnnnnnnnnnnnnnnnnnnnnnnnnnnnnnnnnnnnnnnnnnnnnnnnnnnnnnnnnnnnnnnnnnnnnnnnnnnnnnnnnnnngtttattaattgtttgcaacaaaccaaaaagctgaacgaaatttttcacttgaaactgtctgcaaaattataccagtgagataaatctaacataacttacttcatgttgcttctaacttcacaagtgtagaaagtagaaaagttcctcttcaaagctcatcttggtttaacaataaaatatcagacacgaggaataatagcttcttactctaaagcctcctatcaactattagttcttacactttagcccagttaattgctttggcttactcaggcatatctggacaggcccaggcaagtcttagctcatagcttatgccccttccttatttggaaatgttattgcttccttaaacttttcataagcaactcccccttcttctttgttctcccttccacttacctgtttaggaaagttttaggttgttagcaaattgggtatcagtttagactgtgaggtccagctccagccaatagatacagmacacagc

SEQ ID NO: 84289 - DNA, 1017 bp, Homo sapiens
actttattctcccagcctctctttctgctaggtgaagcaattgactaaattgcagccaatgagatgtaagctgaagccgtatatacaattttaggaagtgtcccctacagggacagggtgggaccttcctccctttacttgttttgtttgtttgtttttgttttgagacaaagtgcaaagtgtcactctgtcacccaggctggagcacagtggkttttttttttttttttttttttttgagacggagtctcgctctgtcacccaggctggaatgcagtggcgcgatcttggctcactgcaacactgcaacctcccgttcaagcaattctcctgcctcagcctcctgagtagctgggattacaggtgcacgccatcatgcctggctaattttgcattttttgtggagatggggtttcaccgtgttggccaggctggtctcgaactcctgacctcaagtgatccacctgcctcgtcctcccaaagtgttgggattacaggcgtgagctactgcgcctggccctttccctcctttttgctgcctagaatatggacacaacggctggagcttcagcagctatcttggaccatgaaggaaaaataaacaattttgtttagttcatggtgctctggagttcgatttttgttattcacagctgcacctaattttgttgtctttcctattaattgtgtaacttggggtaaaactggctcagaccttctgttccctcagctgtgagatgggattgatgataatgcctacttcatattgcactatgctggtggctttcaaacttcagcatgcgtcagaatccccttggcatgttaaaacacagaatgctgggccccacctgaagaacttccgattaagtagcaacctgaaaaccagtaagtctaacaagttcctagatgctgttgcagctgctgcagatcagagactacactgaggcctgcagtccctgcagggaatgacctaggaaggtctaaattgcccatacaaagccagcgtgtttggcttct

SEQ ID NO: 84290 - DNA, 534 bp, Homo sapiens
gcatgcactctatagatgtgaccatatttttcttcaattattgtccagctctgggagccattctgggtctttaagatgatggtggttctgatcaattatatacggatcggaattttaacccccaaagaactcacttccaagtcctgtgtgtgtgtgcacgagtgtgtgtgtgtgcatgagtgtgtgtgtgtgtgcatgagcatgtgtgtgcatgagtgtgtgtgtgtatyggggagggttactgtcaagtatgtggtctacattcccttgaatgcagctattcctgaccccaggaaagtcaggaggacctaaaatagaagagcgagcacaacaagtgcccatgaaatgcccggcctgtgccaggcaatagacatacagcaacaaaccagacagacctggtccctgtcctcctggagcctagagtctggtggggacactgctgttcataaaatagccacatagattacagtaagagacttcaacaagtactgtgaaggaaaaggagagggaacagcttaataagaaacctgctct

SEQ ID NO: 84291 - DNA, 744 bp, Homo sapiens
tggatccaataataaggattacactgtggaaccttggggattgtgagactcttaaatactaaattccatagtcaggaatggggaatgccccaatttggggctttttggtgtctccatcatgggttgtgtgccgtgtttcttgttcctgatgttttattatgtcacccmcaaaaaaaaaaaaaaaaaaaaaaaacccaaaaaacattgcatgcctctgcagtagtcatccttcctttattttcatccttccctctcagattttcccaggcttctggctgattctgcaagagaaggctagagcctggaggtttcccatatcaagaacattttcagaatccttagcactgggactttaaggattcaaaacaaatggatgtcccttgagataaatggctccatccccccatttcttttctgccttggcccttaaggggcaatatagaccacatagcttaaatgaggcaaaatagaaataatcacctattttaaatggagaacatacatatatatctcatgaggaaactgaatgattaagcctccccatgttatctaggaactagataatgtttttttgttttctgcaagtgattctgagtaactggtactaggacgtaagtttccttgtgaaacaagacaaggtagtttttttcttatttgaggtaggaaaggatggtattggtgggttgaagaagttggggaagcacaggccagcaagaacttgtaaggcaggacagggaagcctgt

SEQ ID NO: 84292 - DNA, 1216 bp, Homo sapiens
tgtctcacttgtctattgtatacatttgatatagttgtgatctgctatggaatattataaaatgtgtactgaagatctaatatttccatacgtctaggctctttggtttttacagtttatgtatttcagatgttaaagggtttacatccatgggggaaagaaagagaggttggtaataaacacgtaaatatttcaataaatacatgtaaaaatgtagatcttatatatgctatgaataaaacaaaatagagcagaatagaagagaatgattgagaattttgtttagagaaagtgaccagggaagcaagctccttctaaggaggtagcacttgaattgcaatctgaatgataaaatgttagcaaatgcaacaggctgaaaacaataacaagaactttgcagctgcagtgtagtgactgaaagccaaaataattggaaaagacattgaagagaaactcagagtctagatttgataagccttcacaggcaatggcaaaggattggtatttttttttaatgcaatgatatgtcacttgaaggttttaaatgggatttgtggatcatctggctgctatatgcagcatggactctaaagaggccaaagtgatatcccaraaggagacatttcagtagtctaggagaagggtaaattggcctataattctacctgtggaggttatgagcagagcttgatttttgacacattttgaaagtagagcttgcaaaatttactaatggattggttgggggcagtacacacacacacacacaaaaggagcaggaatgtcccttcaggttttctccttaacatgtgggaagtgatgccattttctgaaatagacatgacttaggagtagtgagtggtaaagaatcaatatttcacttttgcctacgttatttctgccaactagacagccaattggagatgcttattcgatggctgaatatacaaatctggaattcatagagaaggtctggtctcatgatgtgtgcttgagtgaaaaaaaaaagcttgtccttttttattgtcattgtttattgtttagttaatatgcccaatataactttggtcactgtgagcttatgtaattgagttctagctaaagaaaataatatgagactacttttttgttcagtattaaaattaagacatccctaacaataaaaagtatacctttaatatttgcttccgacccttttcacttaaaaccaattcac

SEQ ID NO: 84293 - DNA, 731 bp, Homo sapiens
tgcatgtggaaatactccttcctacgctcagtctgcttctttgtcaagttcaatagcaaggttcactgaatggcctcattttctataagcaactccatagccccttaaaactcaccagtcagactgggagaatcagaagacatttgaccttttatcacaggatggatccatagactgacatgccaattaagctgggtagagtaggagaattgagtaacttgaacaaatctcacctgttaatgatataccagttttcaaaggttctatagcttctgaaatatcacaggctgaggaaacctttttgagcatctgtttcacaagtggagtcaagtagcctcaaataggatgcaaaccgcttctggggcatggcagggagcagtttacctcctgctttttcatatactttgtcaaagcagttaatcaaaccaccagcctctgtacctcaggggacagtcaaagctcttccggggatayttgaaaagtcaaaattagaaacaatgatagagttaaaatgtggggaaatccttatcccctgccttagacagtcgccacaacatctaaacagtaattttcatcaggcttgagtcagttgagaggattcataacctgggaagattatttataactaaatgccatttggaatggctcatatagattgctgaatattaaagattcacaggtccctaatttaaagttttttgttggtgtcatgaacagtactttctttcatg

SEQ ID NO: 84294 - DNA, 974 bp, Homo sapiens
atatattaattatacataaaacatcataaaattagatgacttacagaattacacagactttacgtagtgaattaagcattagaaaactggatttcttgaaatacctgaagagatgtcagcaagacagttgactagagttacttggtgatcatccctcccacgccaaggaaagagatccaaacaatgaataaacaactccctgtgcagaatagaatccatggatagcaccatagagatggaagtgaggcattctgcctctgccacactgtctccccagtgagaatgagttcagagtcaggggtacttctcacgggggaaaacgtaagctgaagttcctcagtagtacctgttgctgcaacaaacaccagcaatccctgctacaagagagttacccaagtcctcacaggctccaagccagtttgttgattagctgggagttcatgcagctgcactgccccagagtaggagctcaccttgagcacttccccttcccatgacctaagaagctatggcttggcaccatcctgcaactggatttattactagagtgcatctaatcctgagggatagtagcaacagattctctcaatccgkaagacccatgatcaatttaccacattcacattagtgtctgcagcactataaccccagtcacctgaagtctatgccataccaaacaattgaaatcccaatgtccaaacccatgcagcagcccccaacccaggaaatagatagatctgcatagcagcaaagccactaaccagctggccacctgccttacctgtgtgtacacatgctgcacagccaaatggctggtctagcctacatgtgtccatacctggcctgatagctggtcctccagtacctccacttcccagacagactgtcatagggctgcctcaccatactgcaatcatgtatacctagcccaacatccagtctggtggcattcccacctccctggagacagctac

SEQ ID NO: 84295 - DNA, 666 bp, Homo sapiens
atgggcacacattatatccaaaaaggtgctactataatagtgtgggtttatgtcaatctgaacacactcctacctaaaacctaaaattttagccatgacaaatggccattgaatatggtagcagagaatacaatggggaaaggaaaatattaagtaacaaagcagtactgctgcaatccctgcatcataaggtctaatttggtaatcagaatttccctctactgcaaagtacatgcyttctgttatttctggcatcacctctgcaggaagtgtttatacacctactgggttaaaccaaaacttcattcttgtaatgcctgagtccttggtgatcctgtctttattggcctgcttaaattttctattgatcaggatggttgggcaagaaagtactaggaagcgcctcaatgaatcctatagatcctaggcatggttctaattgtcccattgatggcagtggcaggccctctggagtggctgctgctatcacgccagctacagcagagaggcatagccagaactgcatgctccattgagccagtggcagctggggacaaacaggaacccaggaccgagcctgaatgctgttctatttaatccaactgcttctgtgtcaactgtaaaaatggtgacttttgtagttgtgaattccttgctcatctttcc

SEQ ID NO: 84296 - DNA, 1115 bp, Homo sapiens
tgcataccctctatacttgtcatggtattttgtactttaatttattgactaaacactggagtggctagaaaaagaggctgtttgacatacacaagacagcctatcgtgtccatatgattactgagattcatctctgctttagatggacatttacattggctaagaatatcttgacattctgttccagttccaagatgttcaccaacatttctcccatcaatattccaattctgaaatctttgtcatcaatataaaatatttgtcatcaatatttcaattctattcttactatccctggacaatatatcataaactttggatgaattagtatagatcagtactttgtgtcmgtcttgttctcacaaagtagatacagacataggacttaaggacttgcctttcaccattactttcagggctacccctgagtaggtagtacatatagtggccattcacattcagttggtgctggcataccagaagttgcagggaaatattcatgaggcagtaggtatcaattgagatagaagctataaacctacatatagcctaagaatctaagccacctgctcaggcagtttacttgtgttttctagacctgtgttttctagacttgggttttctaagacccaaatttatatatgccattttctaacttacagcagaatgttgctgcacacatccaattttataacgcagtagatcagataatgcccagtatatgatggatggttcagatcacatagtctattgggacttttgatcaggcattcagtatccatgagggtttagtatcatgccacaaattgattttcaaatgaaataaaattattggcaaaagaagggataacctcagatgaaaatccttgggatatacattctgatattcctattctggcttgcttaatgttccatatagtagaatttctctctgccacaggcactccttgtttccttaatttagccaacttgtaaggcccaagtactatgcagcttgtaccacagtgtggcctgatttaagcctctttttactctaccccactcaaaattggcaaattactggttaccaagaaaatggaacacagaaaaaaagaaaaaaaaatacaatatgatgc

SEQ ID NO: 84297 - DNA, 1115 bp, Homo sapiens
tgcataccctctatacttgtcatggtattttgtactttaatttattgactaaacactggagtggctagaaaaagaggctgtttgacatacacaagacagcctatcgtgtccatatgattactgagattcatctctgctttagatggacatttacattggctaagaatatcttgacattctgttccagttccaagatgttcaccaacatttctcccatcaatattccaattctgaaatctttgtcatcaatataaaatatttgtcatcaatatttcaattctattcttactatccctggacaatatatcataaactttggatgaattagtatagatcagtactttgtgtccgtcttgttctcacaaagtagatacagacataggacttaaggacttgcctttcaccattactttcagggctacccctgagtaggtagtacatatagtggccattcacattcagttggtgctggcataccagaagttgcagggaaatattcatgaggcagtaggtatcaattgagatagaagctataaacctacatrtagcctaagaatctaagccacctgctcaggcagtttacttgtgttttctagacctgtgttttctagacttgggttttctaagacccaaatttatatatgccattttctaacttacagcagaatgttgctgcacacatccaattttataacgcagtagatcagataatgcccagtatatgatggatggttcagatcacatagtctattgggacttttgatcaggcattcagtatccatgagggtttagtatcatgccacaaattgattttcaaatgaaataaaattattggcaaaagaagggataacctcagatgaaaatccttgggatatacattctgatattcctattctggcttgcttaatgttccatatagtagaatttctctctgccacaggcactccttgtttccttaatttagccaacttgtaaggcccaagtactatgcagcttgtaccacagtgtggcctgatttaagcctctttttactctaccccactcaaaattggcaaattactggttaccaagaaaatggaacacagaaaaaaagaaaaaaaaatacaatatgatgc

SEQ ID NO: 84298 - DNA, 1392 bp, Homo sapiens
tgcataacaaacaacgaagccttaaggtcttttaaagctagggacagaaggagaaacactttcttgctttactgggtatataatcaaaatcattcctccttttttttttttttttttttggagacaagagtctcgctctgtcgcccaggctagagtgcagtggtgtgatctcagctcactgcaacctccacctcccggattcaagcaattctcctgcctcagcctcccgagtagctgggattacaggcgcccgccaccatgcccagctaatttttgtatttttagtaragacgaggtttctccatgttggtcaggctggtctcaaactcctgacctcaggtgatccacctgccttggcatcccaaagtgctgggattacaggcgtgagccaccgcgcccagcccaaaatcattcctctcttaagtatctttttccaatatggcaaataagcctagagatgaacaggtaagaagtaaaaaaataaaattaagaaaaaactgaaaaaaatttttaatttttaaaatttaaggagaattgcggcgtggatccttcaatttcctacatccagattctgctgtccacaaggttcagctttggaagtcttctacgtgccttttaaatcctttcttaaaattacagagagtcttttctaccaagttttaaatctaacgctctatcaataatgtaatcttttatatgcagtaacattatacttcagatggattagtagtttagtttagatgcctttgggtctggaagcatacgaatggataaaacaattccttcaagtctctgacagcttcataactctattttatctacatagcttcttctcaacttcctctgtctattccaagatattttccaggtaggtctgaaacgctgagtcccgtaaagaaatgtttatgcatcaaataacagaagagctcttcccccaccccttcagctcccataatgttttaccattatatccagtaaacaaaataggttgactcaatcttaaacaattcccccatcacaggaagcccactgcacccacagctgcagaaagcatcccttaaaccatccccaactacctacagcaacacaaagttaaaccaatttccactgacaaaaggctatgtgtgcatttattctaatcagccccaggatttattgtgtgaaactcaggcgataaaaagtcacctcctcaagctacaaaacttttttttcatcccaaatattctcaatgaaagttctcttgtcaaccaggagagagtcaaaaacaaccacaaacactagcagaatgatccgctccaggaccacatcccagctggctttgctctgttgtcggtggctctgaagcagtttctcactttcctttcacccttctcccctttactccccaacatt

SEQ ID NO: 84299 - DNA, 949 bp, Homo sapiens
gtttcaccatgttggccaggctggtctcgaactcctgacctcaagtgatccacctgcctcggcctcccaaagtgctgggattacatgcatgagccacctcacccggcccattttaaaactttaaaaccctctctgttccccctgccaacacctccagcatctctggtaactgtgatgacatggactccccccagtctcctcargatgatgtgacagagaccccatccaatcccaacagccccaggtaagtctgcccctccccctccacccactgtgcccacccaggctgggggtgccagagagacaggatccggggccctgcaggaaggagaaagaatccaccattcctggggattgggacaagtggagtcatgggtccatggcatgtaggacgtttacggggaaggagtggagtattgaattctataaaacccatttgttatgaaacattcaaacagcaggatgcagtggaaaaagaactgtagcacgacaccatttatgtgaactaaaaatacatagccaggtgcagggctcatacctgtcatcccagcactttgggaggctgcggcaggaggatcacgaggtcaggagttcaagacaagcctgaccaacatggtgaaaccccgtctctactaaaaatacaaaacttagccgggcgtggtggcgcatgcctgtaatcccagctactgaggaggctgaggcaggagaattgcttgcaccctggaggtggaggttgtagtgagctgagattgtgtcactgtactccagcctgggtgacagagcaagactctgtctcaaataaaaaaaagaaaaaagaaacaaaaggagacatcaacgcgttaccatggttgcttatctggagtgggaggacagggaaggatagattttaaaagttcaaacaacataaaatatgaaatcttatattttcaaggtaatgtctttaataggc

SEQ ID NO: 84300 - DNA, 949 bp, Homo sapiens
gtttcaccatgttggccaggctggtctcgaactcctgacctcaagtgatccacctgcctcggcctcccaaagtgctgggattacatgcatgagccacctcacccggcccattttaaaactttaaaaccctctctgttccccctgccaacacctccagcatctctggtaactgtgatgacatggactccccccagtctcctcaggatgatgtgacagagaccccatccaatcccaacagccccaggtaagtctgcccctccccctccacccactgtgcccacccaggctgggggtgccagagagacaggatccggggccctgcaggaaggagaaagaatccaccattcctggggattgggacaagtggagtcatgggtccatggcatgtaggacgtttacggggaaggagtggagtattgaattctataaaacccatttgttatgaaacattcaaacagcaggatgcagtggaaaaagaactgtagcacgacaccatttatgtgaactaaaaatacatagccaggtgcagggctcatacctgtcatcccagcactttgggaggctgmggcaggaggatcacgaggtcaggagttcaagacaagcctgaccaacatggtgaaaccccgtctctactaaaaatacaaaacttagccgggcgtggtggcgcatgcctgtaatcccagctactgaggaggctgaggcaggagaattgcttgcaccctggaggtggaggttgtagtgagctgagattgtgtcactgtactccagcctgggtgacagagcaagactctgtctcaaataaaaaaaagaaaaaagaaacaaaaggagacatcaacgcgttaccatggttgcttatctggagtgggaggacagggaaggatagattttaaaagttcaaacaacataaaatatgaaatcttatattttcaaggtaatgtctttaataggc

SEQ ID NO: 84301 - DNA, 949 bp, Homo sapiens
gtttcaccatgttggccaggctggtctcgaactcctgacctcaagtgatccacctgcctcggcctcccaaagtgctgggattacatgcatgagccacctcacccggcccattttaaaactttaaaaccctctctgttccccctgccaacacctccagcatctctggtaactgtgatgacatggactccccccagtctcctcaggatgatgtgacagagaccccatccaatcccaacagccccaggtaagtctgcccctccccctccacccactgtgcccacccaggctgggggtgccagagagacaggatccggggccctgcaggaaggagaaagaatccaccattcctggggattgggacaagtggagtcatgggtccatggcatgtaggacgtttacggggaaggagtggagtattgaattctataaaacccatttgttatgaaacattcaaacagcaggatgcagtggaaaaagaactgtagcacgacaccatttatgtgaactaaaaatacatagccaggtgcagggctcatacctgtcatcccagcactttgggaggctgcggcaggaggatcacgaggtcaggagttcaagacaagcctgaccaacatggtgaaaccccgtytctactaaaaatacaaaacttagccgggcgtggtggcgcatgcctgtaatcccagctactgaggaggctgaggcaggagaattgcttgcaccctggaggtggaggttgtagtgagctgagattgtgtcactgtactccagcctgggtgacagagcaagactctgtctcaaataaaaaaaagaaaaaagaaacaaaaggagacatcaacgcgttaccatggttgcttatctggagtgggaggacagggaaggatagattttaaaagttcaaacaacataaaatatgaaatcttatattttcaaggtaatgtctttaataggc

SEQ ID NO: 84302 - DNA, 550 bp, Homo sapiens
cgtggaagacaatttttccacagaccagggtttggggagagggtttggggatgattcaagcacattacacttattgtgcactttatttctattattattacattataatatataatgaaataattatacaactcaccataatgtaaaatcagcaggatccctgagctggttttcctgcaacttgatggtcccatctaggacatgggagacagtgacagatcttcaggcattggattctcctaaggagcatgcaatctaggtcccttgtatgcacagttcacaatagggttcatgctcctatgagaatctaatgctgccgctgatctgacaggaggcagagctcaggtggtaatgcgagtgatgggsagcggctgtaaatacagacggaagcttcgcttgctctccagcagctcacctcttggtgtgcggcctggttccttaggaccggtactggtctgtggtctggggattggggacccctgttgcctaagtatttcccttgaagtttcattatttgttatagatgttgtctgtaacatgtctctatgca

SEQ ID NO: 84303 - DNA, 1654 bp, Homo sapiens
tttgacaaactgagaaactggatcagccccaagaaacaaggaagctccacttgtcttcatacatctcaccctaaagtatacagttgtgaaccttctacatggctcaaaaattgtaccaaaatatgcccagatttccaggataattggtggcccaattcttctaagtactgtcaagtatcaaaacacctgtgtgatgctgaagcctacatcttagagcttgttacgaaggatctggtgtttgtaggaatagaagattaatggagtttatagagcctcaatgagatgaggaggccattgtgacatcacattatcaaaattattatgggatatcatgttagcagaaaagagatacgggagaaagaaatgggggtagaaaatctttagttgtttactagaaaagaaaaaagccatatgtgttcactgtgatgacacagaggtgttggggggaaaaaataaaataagacaagaagccaaattcacgaatgtttagaaacaagtggaagctgcgcacatctctgatcattctgttgacgccagctttacaaaatggaggcccactttaaaaataagtgtactgaagggttaggcaaaggacatgttttgttttttttgtcctgaaatctgcagtcactgagattggtattaatgacatcactattatgaatgctgcgatttcatctagtatctattcagttaactgcgaacttgaggtctgaacaagtcctctcttcctgctcctccctgctaaatacaactttaaactctggaaataacctaagagacaaccaaaggagggtaccaaaaaaaggaagaggaaggtggggactgatgagggatccatacgggtgagggacaacgcagagccagtgtcctgtgtcttatccaggcatctaacctaacaagaaagagaaccccaggcctggcagaaggcagcccagataggcccatttctccttggatccaatgggaatcctactgaaaacaccaggtgggctggagcaccagctatcaaggattgaacaagagttatgccaagggccgacacctagggccagggccagggcagtgatcctgtttctgcaggtgtgaagggactctcttcttccatctggggacaactgggttcagtggggaggccaagcgccctgccagggagtccttttcacactgaccacaaaaccaatatccattaaaaatgggcgagtccaatatgatttataaataataatatgaaaacaaatacaatgttaacatataggattccataacattaaaaaataccatgatcaatgtgtttatttcaggaatgcaagcctatttaatatttatamatctattctcatccacattaatgaatttaagcataaaaattatatgctaatctccccagatattacaaaggaataagtaatagccaatcttaataaaaagaaaatttgttataaaacaagtgtagatgaattcttcattgacacgataaaatatatttataataatgctaaagatagtattatgactagcaagaaaaaaatgttagaaacattcccattaaaataagagataggaccagggtgtttgctgtctctggtctttagcacttttctggagctataagccaatgcaatgtgacaagagaataaagtttaaaaactga

SEQ ID NO: 84304 - DNA, 680 bp, Homo sapiens
tcgtttgtagactcatttcgtgtggtaggttttaatgttttttatataccttttttcctatctccccacaaactgccacgtgcacaggtctagcagttttgagcttccttccactcagatcttcttctaactccagaacaagactttttaatggaattttgagtttcttctccacagtgatttttgggaaatcacagagccagcagagagtttgattcatgtcctggttacagggctgcactgtgtcttcttgtctccctgagttgacagcctgatgaaaggtgtattttagacagaggccagtatactttttttttcttttttttttttctttttgagacggagtcttgctctgtcaccagcgtggagtgtagtggcgtgatctcagctcactgcaacctccgcctcccaggttcaatcgattctcctgcctcagcctcccaagtagctgggattacagatgcccaccaccacgcccagctaatttttgcattttcagtggagatggggtttcaccatgttggccaggatagtctccatatcttgacctcgtgatccacccrcctcagcctcccaaagtgctgggattacaggcgtgagccactgtacctggcccagcatactttttatattcactctccttcatactttttatattcactctccttcatactttttat

SEQ ID NO: 84305 - DNA, 622 bp, Homo sapiens
tgctggccaaggatagaaggtgtatggagaagaactaggcacaacactgtagcctgaggacaagtccaactttgcctggcttggatcagaggaccctcagcagttccctaagcatgcaagtgagagtaattgttttaagccattaagtttcaagttttggagcagtttgttgtgcagcaagaactaattgatataaaaatgaaaaaaaatgatggtgttctgaagagctgcctccaatggtcaagaaataaggaaactaaaatagtaatcagaaggttgcttggagtacatacaagaaatctaaataaagagagtttaagactcttatgaaatayctacccaccagaacacatttctgcaagtggcaatgttattagcagtagtcacctctgattttaaatatcagaaatcaactttggcaaactcaaggagactcaaaaagaatgcactgtagttgtatagtatgtactgtattatatagttggcaaaattaaaagaataactgagttatcagactctgagaagttcaaaactggggaactgatttagcagcagaaactcagagacagttttattcttaacattcaaataaccagagtctgatactgtagttgtatagtat

SEQ ID NO: 84306 - DNA, 1015 bp, Homo sapiens
ttcttcattccataaaatattgccctattttagactttcattctaaagatcaaagttttcaggataattggtaacaaggcagaagcagagaagaggttttagcctctcttggtttttatgtttctgtagcctttgtctcaggtcctcaggtcagggtaagtttctgccaaggtttccttttgctaagcctaaaattcagagtaaccaatcttaagtttgctgttgagatatcttgcaaatacaaatgctttcttgggtatatcaagaggcattctttatcacctccctagagatcttcaagtggtcagatgctcagcagttctgtaaaggtgagtaatcctgtaatagaggcatatttgggtctgtcgctgtatctggatgagataacatgttatgtttaagataaaagaccagtaaattcacatgtcatctcaagtgaagagggctcctgagtgctccatgcttccttttactcctaggggcactgggtatgagggttaagtcatgatagctggccaaacctattcatcctgtgatctttatgactttgatctatggtatccatactgtgttagggtgaggttagaagttagagacaagagatgttaatattacctcatcctcatcccattcaattcaaaaaatacttttaagtaactactagatactaagctctagaccagacagtggggcctgggagtgacataaaaatgaatctgatagtctttgcctttgagaaactcctacactagttgtaaaggccgactcttaaatatatattgtactatgaggtagttctcttatttaagaagtgctatgaggtcatagagaaataaatcataaatgctacctagaagaattagagaactataggccctctgagcagaggaaacagcatttgcaaaagcataagtgtgcaagaacatgatgtctctggaaaaaatcagtgttgttggagtataggctacatagtgaggaayggtagttgattaaatggattggagcttacttgtaa

SEQ ID NO: 84307 - DNA, 1067 bp, Homo sapiens
catatttaaatactattcccatgtttacataattcaattaaaatgtgatgagttttacagtgaataacaacagtagaaagtgacaacatccatatttacatgcaaagtttttttttttttggaaacaaggtcttgcactctgccacccagactggagttgcagtggtgggatcatggctcattgcagctttgacttcctgggctcaggcgatcctcctgccacagcctcccaagtagctggtaccataggtgcacctggctaactttttaaaaattatctgtagagacagggtctccctatgttgcccaggctagtctcaaactcctgggctcaatcaagcttcctgccttggccttccaaagttctgggattacaggtataagccaccacgcccygcctcaacatgcaaaatttaggacagcatttttaattgcttcactgagtaagtgattcagtttctaaaatgttccagaaagacacattcccttatgaaaatgacatcacgaaaaagcaaaatgtacgctccacacttaatttctaagcaaagccaacttttgaaacagattcttttttataaaattcataagcaataatctaatttccatcttttaggattaagcatagaataaaattaattttatgcaggcaaagtcagaaagaatttcaggtcagatgagtaatttatcttttaatatattatttaggaatgacattttaaaaagttattttaagtgtatgtttattatacagttatgtcattcttgtccttaagtacattttaaaatgaataaaaactttctgaaaattttaagcacttactgatgttttttgagagctacttgttttaatgttataaactaaaatataaaatgtataagaatattcctgtttctcatctatgaattaatgtttttctaaacccactgataggtattattatttatgtgaaggaatggaatctgaaactcgaaatggtacagaatcatctctactagaaaaatctcatagaataagttaatatagatcacattagtgaaacatactcctcctgtatggaattactaat

SEQ ID NO: 84308 - DNA, 1474 bp, Homo sapiens
tcttaaaagacaaaagtacaacaaacctagttttgcagatcttaattggcttgtctctgcaattccagaatcggacagcagtcaggaccaaaaatcattcagaatgttccacctcacaagtgcaggttttatttatagccagggacaaggaagtgacatacaaaaagcagaagtgaggtacagccagattaatcggttaaagctcagcatttgccttaattgaatgtggtttgaacagcctgctggctgccatggactgaagctaggctgsagtgattggctgagactcaactatttgttataaaggcaaattccgaagataagttttcagcttttttatataccatcttaagttgcagtttatttaggaggacttgtactgaagcttctaaagctcagacttagttcaatttaacaacaacaattattaaaattagaaatttagtcatatagctgggatatatctctgtgatacttaggtattgattcttcagaatcaacatttttcaaatgaaaatgccttatttgtttacaaaagatgagaattgaaatgtataatttctgagtatcatttttatatcaacgaattaatattataaaaaacttttctctccagtgtaaattagttgtctcaatatatttttaatgcataaaatggatatatggtcaaacatttttatgggagactatgcctatgattgaaattttatgaatctacgtgtgtctcctctgttttaccaacactgaagctctgtagcatccatgctccaggagcactaaacagttagtttatttatttgctccttttctgtcacattatcttatcttactgaatgacactctaatcccttaacttgtctgtcaccacacaccatgagataatgagctgacctctctctgaatatgtagtctaagtcagatataacactgaatatttgctagtgggaaaagtggataatgggcatgttcaagagataggcaatatacttggacagggacaaagtaaatgtgggtggtcaaatactctctccctcagggaagtgcccagcaggagggagaaatcctgagtacttgtttagatcaccttaatgaccattaatcaacgggtttggctaaaaacaaacaaacacacaccccaatcctaaatagttatccttggtataaggaaagggaacttgagacagctgatagcacattcttcatcacatggttaaggttcacaggtcaaatttattaagttaatttgattgacaatgattaagttcttaaattcaaaagtttagaatcaccataaacccacgatactattatttcatgtaaacatgctcattttgtcccaatagtgcagatgtctgctgttaaccattttaattgctgttatattttaagtgtttgtacattatttgaaagtgtaagtatgctattattttatggtttattaagcacaaagcacacacattcagtcatagttgta

SEQ ID NO: 84309 - DNA, 529 bp, Homo sapiens
ttgtcacgaaaacatcaccaaacttatcaataaagactagaacgcttctaatattgaatgttgaaataaatgtgagctatacctacatttaagcaaggttaattttacaaaataagataattacctaatttttccagttcagggccacaggtaaccagaggccatcactgcagctgagggtacaagctgggaaccagctctagatgggaagccatcccattgcagagcacactcacacacatacccacacttggacgcaccagttcacctaacatgcacatctctggaatgtggaaggaaacaggagttcccagagaaaacctaggcagacaggaatggaacaatcaaacttaacacagacaatgctctgctaggaatcaattgttttttctcatcaatgttataatgaaamgatatcgaagaaaatgacattattcaaggaccagctgcacgttattaataaaatataaattaaccttttacagattataaactccataaccaatttacatcaaataaaagactattg

SEQ ID NO: 84310 - DNA, 521 bp, Homo sapiens
ggataattataaatgatatcrgagaatgatttccatcttttctcaagaaacagcatagtgtcaggataggatgttttacatttgttggtggaaggagaactggaaaaggacagcccttgagaaagtttgtgaattaagtcatttgcctttttcctggtaccactggattctttctctgccaatttctagacactgaaactttccacacaacttttaactcttgcctctttgggtaactttcatcattgaaaatatctgatgcattgttagataataatttgcacattatttcggactagaacaataatggcatgactttagccctgtgattggttggcaaaagatatcttttcttgtgaaaaattcttggtaaaatacgtggttaacatatgttgaaggacacctcttgattggccaaatttatggctgggaaaaaactgaattaaatgtgtttatgagccttaaaagctgtatcattttattacctgtcttactattacaccgtttgctttttgatgaat

SEQ ID NO: 84311 - DNA, 718 bp, Homo sapiens
tagaaatgaggcacataataagagtgagaggtgagtagaattctcaggatgaagaaggaacagccccagatgccagttgtgcagtgggtcttagtaagcagccagattggaacaggrgtgcaggaagctcaagataaattcattaaggaaaataaggaggaaagaaagagaacttggaggtttctacatggggggcacttttacagggccccaatatattaggtttatataagagagtgggcaactattgctcgatattttcatttctcaaactggaaatacagatttttacatgagaactttgatttttatatgaaaatgcccaatttctaaatgttgacaacaaattcaaattcaaacattttgctgtataaacataacaaatctgtgggaacaaatccattccactagcataccaccagtttgcagtttgcagttttgctctgcagcatttattttctttgctctggcagtgttctaagctaaagcaagactcttaggatgctctgttcttattgctaatgtcctatccagccctattccttaagatcattgggtttttagttatttttttttccacaaatggtttggaattctgaatttgtttggttcactcaatgctgaatgcccatttactaccttaatctatagacatgggagatttcgtacttcctagtggattctccagtgggaagtcagctaccaagtttgagtcaag

SEQ ID NO: 84312 - DNA, 1237 bp, Homo sapiens
tgcataaatggagctcatcaaagaaagtaatttccctgcagaaaacactccatcttttgttttatgtaagttatcagcatgaatattttattctcaatgaaactgccttttcccctttgtgtttcaaagttttcacatggtgtctcaaataaataggcttccttccttccagcccactctattagccaggtcagttgcgataaaatatcttccttgcttactgtaagtagtaattatagattaagctttactaattcagtattttttattcttagtattgttatgttttggaaactagaaacactgaccacttgaattttcctgcagtaacagaaaatcatttgttttttccagattggagcacattatctagtgtacctatcaaattggaaagtatatcttagtttattttcattcttgatccaaactatggcataacgcctccatggaatgacaactctagttgtgcaatttactgcagccagtccaatcagcctaactggacgctataatcattgagtctcatttgcctagtactgcactttaatggatggtttttctgcctcctcacctactgacttaacattcaagtcacttactgtttctgcttgctctgactatacctggggtaactacatcgtggtgtatgcaacatcaatttttttatttgtagatatatcaaaataatattttattsttgtttacattaaagtttccagtcagaattaaaatgtactgataaccattgactgaaaaactaaagcaaagatagctattattcctatcatctgtgagtctaagagataaaattaaaaaattaattttaacccagaatgaaaatatgtttataattttaagcttttgaatggtaatatataagttcgctccctatgttttcagatactcagctaaataagaagttgttggttaggttgaaattcctatagttcaacttagaaataatcttacttataaaagtttcaagttatcaagccctcataatttataagcagaaatgtttttcacattggcgataatttccttatataccagaccataacattcaaatcttcacacaaccatttaacatctcaattgcataactgaagagagtattcataatttatttgatattaaaaattactctgattatagtggatgctggtagaacccaagctgaatatttgcaaagtaattcttttcaaaggagaataatgaaaacggaaagcactatgca

SEQ ID NO: 84313 - DNA, 451 bp, Homo sapiens
aaaaaggtaattttcaatatgctaatgctatgctgtactgcctagaacacagcgatccaatagaaatataatgtaagccttacattggaatgtaaaattttctagcagccacatttaagagtaaagaaaaatcggtgaaattaattacaatgtcatattttatttaatctgtcatatcccaaaatattattttttcaacatataatgaatataaawtaattattgagatattttacacttttttgtacttctaaatctagtgtatatattccacttacagtacatctcagtttggactagccacattcaggtgctttatagccacatcttggataatatgggcttagaaaaatacctatattacctcttgaattgaatttagtagaataattatcttcataaaatcatgtgtatctattagattcttaagagacgaaagtacaacagacct

SEQ ID NO: 84314 - DNA, 672 bp, Homo sapiens
ctgccagcccctctctgctctgatgtatgcccgaagcagcctggaacagcaagtacagactgtgtctctgccaccactgcgtctctagcatccagcacggggcttggatatagtaggtgttcatgaagattgtgttgaatgaaagagtggtggaaggccttggggacgccaagaaatgatccagaaagtgaggcagctacagggtagttaagttttccactcaagccaatcaggctagtggggagagctgtgtgtgatcctttattgagtgcttattgtataccaggtgcttcacatatgtgagctcatttaatcctcactacaactcctcctgctgggaatattgcatccaccatggcagccagcctccaagatacaccccggtggtccccacctcctgaagtcccatccttgtgtacacccctctcccttaacatgtgcagggttgaccggtgtcaccaataggatattgtggagatgaccaagtgtgacctctgaggctaggtcaggaaagacactgcagcttctgctttgctcccttggagaagttagccgccatgttgtgaggacactcaagtagtcctaaggagagggccrtgtggaaggaactgaggcctcctgccaacagccagcactaacttgccaaccctgtgggtgagccaccttggaagg

SEQ ID NO: 84315 - DNA, 798 bp, Homo sapiens
aagatcaccccctcctgagaactactggaatgcaaatatagttcttcagtttaaatgcttatctttttgtttgtttgtttttcctgaggcaaagcttagtaatagttttttttgtkttttttttgagagggagagtctcgctgtgtcacccaggttggagtgcagtggcacgacctcagctcactgcaacctccacctccctggttcaagcgattctcctgcctcagcctcccaagcagctgagactacaggtgtgcgccaccatgcccagctaagttttatatttttagtagggatggggtttcaccatattggccaagctggtcttgaactcctgacctcatgatccacctgccttggcctcccaatgtgccgggattacaagcgtgagccactgtgcccagccaaaacttagtaatattaagaattaaaatgatactgaaatcagtgattgtggaccaatagaaactttgcttttttataatacagattatttagacttgaacacttgctctcctttcctcatctgtgagctccatatgggcaaggattatgtcatactcactactatatttcctgtccctagaagattcctgccacatcacagttaatcaatatgtgtttattgaatcaactggggccaggtctcaagggaagatctttataattatatatgctgtattctttgtttgctcagaactcttctcttagaaatggccacctattttccacatatataatagattctttaagtatacaggctatgtttaattcaacaaatagttacttagctatctg

SEQ ID NO: 84316 - DNA, 798 bp, Homo sapiens
aagatcaccccctcctgagaactactggaatgcaaatatagttcttcagtttaaatgcttatctttttgtttgtttgtttttcctgaggcaaagcttagtaatagttttttttgttttttttttgagagggagagtctcgctgtgtcacccaggttggagtgcagtggcacgacctcagctcactgcaacctccacctccctggttcaagcgattctcctgcctcagcctcycaagcagctgagactacaggtgtgcgccaccatgcccagctaagttttatatttttagtagggatggggtttcaccatattggccaagctggtcttgaactcctgacctcatgatccacctgccttggcctcccaatgtgccgggattacaagcgtgagccactgtgcccagccaaaacttagtaatattaagaattaaaatgatactgaaatcagtgattgtggaccaatagaaactttgcttttttataatacagattatttagacttgaacacttgctctcctttcctcatctgtgagctccatatgggcaaggattatgtcatactcactactatatttcctgtccctagaagattcctgccacatcacagttaatcaatatgtgtttattgaatcaactggggccaggtctcaagggaagatctttataattatatatgctgtattctttgtttgctcagaactcttctcttagaaatggccacctattttccacatatataatagattctttaagtatacaggctatgtttaattcaacaaatagttacttagctatctg

SEQ ID NO: 84317 - DNA, 1595 bp, Homo sapiens
cctgtttcaaaaggctttttacgtattctgttagtgctccctatagaaatcccatgagtctggaaccgcaggtgctaataaacttatttaaatggaagaagtgaggctcagtaagtcaaatgcagccacccaatgtttttcagctgatatgtgaatgagtagggacacaaatttggaagttgtaactctgaaacctatactctttccactctagaagaaatgtagaattctgcagaatgtctaaaatgcagtctttatcgtgggaacctatttaacatgggttctcactacagtgtttctagttaataaaacatgagagtaagactatatctgactcgttcatacattcctagcacatagaagaatatggaatatgtgaaaggtgtgtgacttggggtgggcttgccagaaacaaactctgaaataagaattcatgtgaaaatggattattaggaggtgttctcaggaaaccagtagggatctagggaaatgggactaggaagggaaggaaatcaagcaaggatagtacattaattcccaaggatagtaactttgactcaatcccataggcaagttctggagtctaggtcacacctcagagtggtccccataaggggaaactgtgactggagcatttatttcttcccacctatcaatcattttttaagggatgcccacagagggatgtaaatttctaggcacttttagttattcaggcaaaatgggcctttgtcagtttgagggcaaacctttgacaatgcaacacagacgctggcttctgagagtaacagcacaccaggagtcatgtgcacagaaatgaaaaagggatccaaggaaatatggacagcacaatgatggcatctggcacagtgttcaataaatagttgttgaatgaaagaaatcgaggaagaaaggatgaaaaaaggcaggaaggaaggaggaagggaggaaagatgtaatattatctaaatatcgtagcaacatttggagatagatacatttttctccatttttytgatgaaggaactgaagctcagaacgattacaaagtttgcttaggtaacacagcttgtaatagtagagtcaaaattcaggcatgtctacctagctccaaagcctctgtactttcactactctatcacatcgagctgtcattcacatgctgcctgacctccatggaaactgccttaccacctttttcaacccaccaagagtcggctgtcatgggtgaaaatctggatcacgttgtagcatccacatacctttgtcccaagcacacatcttctcttgtgtcctaagatcttgtccatttgaaacaggattagaaaaaaagagttggacatacagatgttcagataagaagtgttgacaccattccctatgcaaaaacaatgaaacatgccaaggcctaatgaagagtccagtctcctgaactctcctggcattttcagcagactgcagttttctgagaatgtctgtgttttccagagcatgtctgctcagaatgtatgagccaaaacctcctagggattttccatcagttgtttatattgtgactggatctactcgaatgagtttattataaataagataga

SEQ ID NO: 84318 - DNA, 657 bp, Homo sapiens
gatataaaggagaaaagaaggagaaagagaatccgcttttgtggctccaacagatctttccagttggttttctcttaaagccctctgggttggggggcgggaggaaacactatttctttccagcaagctgcacttgcaagaagctatgggaagttattgttctctaccagaatgcygctgctgcaaaagatgaatccaatcttacaagacagccaagttcttttgtcttcacagaaaggagcctataggcctagaacccggcagatgtggtcattttaaagagcttggaaactttcaggtgggttaagatgtgactgggctgtgggcaggaccatggaatcagccatgcacatcattcagttttgggagtggagagactttctcacttaaatcaaggctttaaaatacaacatcttctacctcaggcaaagcttggacaaagtagagatgcttttttgtggctttgaaaggaacaataaaccctgacaattttctcctaggtatgatgactcttgctcttactctcatgagggcagacccgtggagaccagaggtgaatacaagattttgtgaatcaggggtcagaactgggcttgtcctgccaaagcttgcatggaagttgtcatgcttgttagcaagctgtttgagtagaagcct

SEQ ID NO: 84319 - DNA, 1006 bp, Homo sapiens
gtatcctttcatccagcaatccccttctaggaattcatttttcccatttcatgtattccataaataattatatgcctactatctacccacaaaaaatttaaaaattacaaaaaaatcaatgtgaaaaaataaatttgtagcccaaacaagaaaacaagaaaaaagaaagaaaaacatcttaaacctgaaaatgagaaagcagaggatgtcagtcaggaagcagagccatgaataaagacattgctagatattcaccaatgttggcacctctttgcatttgagccaaagttatcttcaaagtaggagacaaataaagctgtaaagttatccaatagacaaatgaaaatgcaataagtatttgatctgatattccagttttattccaggtaatcagttgtagctttctacattggagtcttatatactacttcagtgaattaatattatcagttgaatgaagaaagtgagatagaattgatagtctgatgacagacactagaaattttttttttgtattcaagtgttcccaccctatcaagagtttctgctcaaagattacttgtagccaaagatatttacacagcttcattaagaaaaaaccaaaattaaacaaaacatcccaccgtatacgttcaataataaaagggatttctaaataaattatggtacacctgtaagatgaaagattatgtggccattaaaattactcatgtgaagagtgagaaaatgtgttttataattttatgaaaatgcagacaataaaattagatctatgggatgatctcaattagggaaaatacgctttaaaaaagtgtggaaggaaatataacgacatgttaacaatgttgcctttgggtagtaagattatggatacttttctttttgtactaatatgtttactattttgtggataatttttttgtaatcagaaaacagtaaactattttttaagccaaaggcatcccayccgcacctttccttctcttgtgtactatgggaatatgca

SEQ ID NO: 84320 - DNA, 1980 bp, Homo sapiens
agtacttagcatagttgtaccacaatatcgagatgatagctcctattatgatatatatttccctgtagcagggttgagcaagctttttctctgtaaagggcccaccttttctttcaagtcatacaatcctttctgctacaaccactgaactctgccactgtagaaggagttagagatagtagataaacaaaagggcatgatcgtgttggagtgaaactttatttacaggtttagcccatgggccatagtttgccagcccctgctttataacagagattcccaatttcattacttaaatatgtgcaaaagaattgcctatctcatgtcaagtaatgcaaccaaaagcagtagaaataaccaaatcccacaaaataggtaaaataacttcaaataataaaaggctgatgtgaccaactaattcaagactatyattaaggcagtttggcatagcttaatagcacttagcattttttagaaataagggtgcacctgatagttggtgaagttttatgaaatattcttttatgcctaaaatatctacaattgtttctacttcttgcactgaaccttggctaatatagcatacattaatctaacttgcccagaataatttatatacattctgtctatagtattcctctgatctatgagtaaattatatgtatgtctgtgtacatgcatacatatccgtgtgtgtatgacacagatagttcgggtaactttctcttttgaaaagtttaattcataaagccacactttttaatataattatttaaaattattttgattatgttttagaatattttcaggttagtaagcaaatttagaatacctattttatagaatatgttttatctatttttattattaataaataatttattattaataaaaaccaagactatttgcctaactctagatttcctactttcctccctgatgactagtactggctcagtgatgtaaagtgcaacttctttcaatattatgaaaatgtaccattaggccaggcacggtggctcccacctgtaatcttagcactttgggacgctgaggcaggcagatcgcttgagctcaagaccggcctgggcaaaatggtgaaatcccgtctatacaaaaaatacaaaaattagctgggtatggtggcgtatgcctgtagtcccagctacttgggaggctgaggtgggaggatcacttgagcctgggaggcagagtttgcagcgagccaaggtcacaccactgcactccagcctgagtgacagagtgagaccctgtcaatagaaagagagagagagagaagaaagaaagaaagagagagagagagaggaaaagaaaggaagaaaggaaggaaggaaggaaggaaggaaggaagaaagaaaggaagaaagaaagaaagaaaggaagaaagagaaagaaaggaaaagaaaagaaaagaaaagaaagagaaagagagaaagagagagagagggagggagggaggaaggaaggaaggaaggaagggaagggaaaaaaatgtacactttatcaaaaaggaagcagattcattaagagtactcatatatgctacaagtaggaatatctctggcaaatggttcactcatgaggagaaggagccagaaatacaagattggcacactaaagcagaaaagagaaagggatgctaactcaaaacaggcaacaggctttcacttcagagaagtggccagatgagcaaggtacaatgtccaaaggaataataaaataaactgcatcacaatttcatttccaatcagatctatcttctagtgtattaattccatcttcagctgagtcaaatcttttcaatctgtctgctgagtttttaatatcagtgactatattttttatttctaaaagttcaatttggttgtatgtatttctttttttaaattttcttggtctttttgatagtgtttttttttctttcatgctttggatttcctatttatatccttaaccaat

SEQ ID NO: 84321 - DNA, 712 bp, Homo sapiens
cagtcaacattcaggagacagaattctggagctctttctctgcatagctctttcccgtctattactctgctagcaaattctacatctgcggcctctccaaacttcagtctgtctcttcaactcaatgatattactggactctggattctcactccttgtcccacaattctgaaactacgttgggaagaaatataggaagaacatggggctcactgcttattttccttctctctggaatyataatcttatactagctattgcacaatttctgaaaacagttgattaatattttccatcttttttgcttgtagtggctgaacaagtcccatagtagaggactttataggcagaagtggaagtcaataatttatcctgcttgggattcactatgcttataaatattcatgctttttattatgaaaaattattggcttgttgaatattgcctttttcccattctctccttatgcaatatctcgtaattgttgggctttgatttaactaataatattcaggaacaactgtgctagatcttgttctaggcccttgggatgcctcagtgaccaaaaccaatattctgccctgatggaattcacattgtgtataacctgtgtctcttaactcctttttcatattttccatctttttagctacattctttccatatcatttcgtcagttctatcttccagttcactcattctatccttggt

SEQ ID NO: 84322 - DNA, 765 bp, Homo sapiens
tgttttgttctatacatcaattgtccacttaaaatatttaagcacatatagataattgttttttaaatgatttttacataaaattatgaaaataaactaaagataaaagatcaatgtaaaagtcacaaaatgctatatactttgctagttagaatctatatacaataccaaaaaattaccaaatcaagatttaaaacagaaataactagcatgcattctggagaattcaatggaataaaaacatcagggaagatgggggtgtgggagaaccttttcgggaataattacaacaattaggtaacttttctattattagacaattagataacttttctattattcagtggagccagtgacattcacaattaaaatattttatcatgattattgatcacgtctatactcagaacataagcactgagtataaacaggcattttttttaaagaaacaggtttgattacactgaactaaacatacagattgayattgttaacaaaagctgtctgaaaattatggctgagatgtctggaatcttaattaaaattccagaaaacctggaaaagctaagaaatgaaaggaaaaaataaataattctgttttctggctagctcccaaataccagctttcttcatatgagaatatgagagacacacaagatatactaggtaacatgctactgaaacttgaataagtagtttgcctgagttcttaaaggtaaggtccccctgtaagatgtattttctgctcactctatttgccctggt

SEQ ID NO: 84323 - DNA, 1061 bp, Homo sapiens
atttttggtatttttagtagagatgggctttcaccatgttggccaggctggtcttgaactcctaacctcaggttatccacccgcctcggtttcccaaagtgctgggattacaggcatgagccactgctcctggcctgtctctggctgattttagccaggaataagagaaattcaatctgagggatgatgaagagaaatcagttagtggtctggagtcagattcacctggggtcacatgctgactgaaacacttagatgctacaaaaccttgggcaagcacaacctccccaactcttcccatttgtgaaatgagtaactatagggaaatgtgacaattaattgcaagtctaacgactttctgggtctggggtggaatgaacactcagttttcccagtggacaggttaaaattctgcccctgccttgcaagaatccaatccagcattagttacaattctgagagcagccctcataattcacagttcattctggagtcaccggggaaggcaacctttcagtgagtcacccctgcagtctccaccaccacctggatttactcatttattcaacaaatatttattgagtccctcaccatgccaaaggctcttctgggcactggacacagtgctgtgaatgcatgacaaatcctgggggcccccacatcgggtcttcatggatccaggccccaaaaggcatggtttccacatcagtggggcactgtaaggctcagagcatttcctgggcaaacctaagcaatgtgatgcattctcctacctaacyccctctgtgacctccagcaagtggcctctcctttcagacctacatttcacatttcacctccgcggtgaaatggggtgatagacaggaaggggtggaggcagaaagggaggagggagaggggattcacactcctagtaacaagtgaggttttggatgtgaaagcattgcaatgagtaaagctaaatgcacagttttctgattaccaaggcaggggctcttcctgccaatgatgaccagcagctccctccgaaggctgggcacagcctggggcccagcttcaac

SEQ ID NO: 84324 - DNA, 672 bp, Homo sapiens
tccgacctttttctcaagacagtgcaagtgtgcattcatgagtttgtttgagcctgtgtttgtcgtgcgtgtttgaatgccagtgtttgcctcggagggtaatgggggtgggggggaggaggaaaagtcgccaatatctagtgcctccctctcgtttgcaagtctcagaaataccggcttccaagtttgcacaccccaggcctacatatcattttgggaagcacatttttattcatggcacctggttttttataaaaacatagatgtctccaccccaccccaaattataccctcggtmattcctttccaaagcctcagtgatgactgtctcagcctggggaaggggagagcgagcttcgaggattagaggcctcggatctctccgctggtcctcaaaatgcctgacctagaaggttagcttcaaaagacttttttcaggctgcggctgtcttttcctatatctgaacgattatcctgcgactgacgaggtaaataggaagtcacccagttcaggacctcgcctacagcagatgcttgctaaacattccctagagcattggaagggagagacattgtttttaattatttaaatgaccaaggcttggaggctacctcccagttcaggagtattagaaacttgacccctagacctacagacccttatgtaccctt

SEQ ID NO: 84325 - DNA, 704 bp, Homo sapiens
cctaaagtaactagaaggcataggaggtccaggttaaaacattattgtatatcaaaagcaatcacaatgtatcgaatgctttctccctgccaaggatcgaaagataaggtgcatcccagagcttacggtaggttctttgtaaaatttccggggctgagaatttggctcggtctgagaagtgtccaggtttggggacagtgatctagcggagaactggctttgtcacgtagaaggcactcagtaaatgttagttcccagggatgtatgcgtagctgcaatatttgctagcaaaaaagcggggttccaataggaactcagccaccaggaagcatcaactctgaaggatgctttagtgcctggacctatccaggatcttattggtttcttccaacacaccgctgctagcagattatttttcccatttcacagatgaatgcctaaggctgggaagcgctaatactctgcccaaggtcgcgcaggtagaagtgggagacmcaggaatccctcccgcgcggctgaggcctctgagcgtagatcctcaaccctgcaccttcccgcgctccccggggcgcgttacacccgccaggccccttcttgaagcaaccgcgtacgcgcgctgcgagtcccaaggagaaaacactccttgcaaactgtggagcactgcgcgcagaacgcagcgtttgtaaccccgagggccgaaggct

SEQ ID NO: 84326 - DNA, 1505 bp, Homo sapiens
cagtcccaggaggtaaatattatttatccctgtgatgtgcgtgaggaaatggcaggaaagttatgtgattttttttttcaataacctacgggaaggcagcagcaggcaacagcgtttggccgtgagaatattttgacaatgcttttttaaaaaaaaaaaaaaatcagctttttaaaatttagcaaagtgtcatctttacccagtccctgggactgaccctgacccctgggttgagagatggagagaggggggagagagagagaaagagagagagagatgagatgcagggccaggatggcagagagccacccatgggttacctgtttgtccagcggtatttatggaacagcagtgtctaggcaaaagggacctcgcccacgagaactatgcattgtaggagggagacctagagtaagttatttatgaacatgatttttggacaatgttaaggacttcgaggagaggaaagcagggtagcaagagagaaagtgtctcggtagaagaaagaggcataactttggagagagatgtcagggaaccctccaccccaggaggtgacgtttgtcctgaatggtaggaaggagagcactggcaaagggccagccaagcaaagtcaacagtacatgagtctatgtacttaggaggtgagaacagactcgacatccagaagctgaaagaggacccatggctagagggcagggagtgaggggccaggcaccccgcaagctctccagggcctgggttttattytcagtgcaaacagaagcaaccggaaggttttgagtaaaggagtgcggtgaagccagaagcaagactaggagcacggagcccagagctgtctgtggctcccgacttccctgcgttctgacaggtcagttgggcctcgtcaaagcttctgtgttcagaagttctttccttaagaacagctcggggaatcaccacgtgctgttcagactgtccctggagttggagcgtgactttggggtatcctgaagtcatacctgtcccctccctcctgaggatcaataacttgaatgctttgggagtcaccagggaatgtacatctgaagcggggtgcgaggagccctggtgagctggcagagccctggtgctctgtccccagtggcggcccctacttgactcttgaaattgcaccacagggaggggagaggccgaccctagagccgtcagagcttctgattctattagagaagccagaaatccagatatgtgtgcaaactcttagtttttgaatgtcgacatcaaattcaaattaaactaacattcctgagctctgtccacgaaccctgaagccaaagagttgcataagacaagaccccagcctgcaagagcctccacgccagagtcactactgcctcttagctaaccagagcagagaattaaaggtaaaagatgcaaaagaaacagatgggtctcactcttgcattctaaagtgttttggtgaagtgggtctatttggcagtctgctgaaatggtggacttct

SEQ ID NO: 84327 - DNA, 1505 bp, Homo sapiens
cagtcccaggaggtaaatattatttatccctgtgatgtgcgtgaggaaatggcaggaaagttatgtgattttttttttcaataacctacgggaaggcagcagcaggcaacagcgtttggccgtgagaatattttgacaatgcttttttaaaaaaaaaaaaaaatcagctttttaaaatttagcaaagtgtcatctttacccagtccctgggactgaccctgacccctgggttgagagatggagagaggggggagagagagagaaagagagagagagatgagatgcagggccaggatggcagagagccacccatgggttacctgtttgtccagcggtatttatggaacagcagtgtctaggcaaaagggacctcgcccacgagaactatgcattgtaggagggagacctagagtaagttatttatgaacatgatttttggacaatgttaaggacttcgaggagaggaaagcagggtagcaagagagaaagtgtctcggtagaagaaagaggcataactttggagagagatgtcagggaaccctccaccccaggaggtgacgtttgtcctgaatggtaggaaggagagcactggcaaagggccagccaagcaaagtcaacagtacatgagtctatgtacttaggaggtgagaacagactcgacatccagaagctgaaagaggacccatggctagagggcagggagtgaggggccaggcaccccgcaagctctccagggcctgggttttattctcagtgcaaacagaagcaaccggaaggttttgagtaaaggagtgcggtgaagccagaagcaagactaggagcacggagcccagagctgtctgtggctcccgacttccctgcgttctgacaggtcagttgggcctcgtcaaagcttctgtgttcagaagttctttccttaagaacagctcggggaatcaccacktgctgttcagactgtccctggagttggagcgtgactttggggtatcctgaagtcatacctgtcccctccctcctgaggatcaataacttgaatgctttgggagtcaccagggaatgtacatctgaagcggggtgcgaggagccctggtgagctggcagagccctggtgctctgtccccagtggcggcccctacttgactcttgaaattgcaccacagggaggggagaggccgaccctagagccgtcagagcttctgattctattagagaagccagaaatccagatatgtgtgcaaactcttagtttttgaatgtcgacatcaaattcaaattaaactaacattcctgagctctgtccacgaaccctgaagccaaagagttgcataagacaagaccccagcctgcaagagcctccacgccagagtcactactgcctcttagctaaccagagcagagaattaaaggtaaaagatgcaaaagaaacagatgggtctcactcttgcattctaaagtgttttggtgaagtgggtctatttggcagtctgctgaaatggtggacttct

SEQ ID NO: 84328 - DNA, 1505 bp, Homo sapiens
cagtcccaggaggtaaatattatttatccctgtgatgtgcgtgaggaaatggcaggaaagttatgtgattttttttttcaataacctacgggaaggcagcagcaggcaacagcgtttggccgtgagaatattttgacaatgcttttttaaaaaaaaaaaaaaatcagctttttaaaatttagcaaagtgtcatctttacccagtccctgggactgaccctgacccctgggttgagagatggagagaggggggagagagagagaaagagagagagagatgagatgcagggccaggatggcagagagccacccatgggttacctgtttgtccagcggtatttatggaacagcagtgtctaggcaaaagggacctcgcccacgagaactatgcattgtaggagggagacctagagtaagttatttatgaacatgatttttggacaatgttaaggacttcgaggagaggaaagcagggtagcaagagagaaagtgtctcggtagaagaaagaggcataactttggagagagatgtcagggaaccctccaccccaggaggtgacgtttgtcctgaatggtaggaaggagagcactggcaaagggccagccaagcaaagtcaacagtacatgagtctatgtacttaggaggtgagaacagactcgacatccagaagctgaaagaggacccatggctagagggcagggagtgaggggccaggcaccccgcaagctctccagggcctgggttttattctcagtgcaaacagaagcaaccggaaggttttgagtaaaggagtgcggtgaagccagaagcaagactaggagcacggagcccagagctgtctgtggctcccgacttccctgcgttctgacaggtcagttgggcctcgtcaaagcttctgtgttcagaagttctttccttaagaacagctcggggaatcaccacgtgctgttcagaytgtccctggagttggagcgtgactttggggtatcctgaagtcatacctgtcccctccctcctgaggatcaataacttgaatgctttgggagtcaccagggaatgtacatctgaagcggggtgcgaggagccctggtgagctggcagagccctggtgctctgtccccagtggcggcccctacttgactcttgaaattgcaccacagggaggggagaggccgaccctagagccgtcagagcttctgattctattagagaagccagaaatccagatatgtgtgcaaactcttagtttttgaatgtcgacatcaaattcaaattaaactaacattcctgagctctgtccacgaaccctgaagccaaagagttgcataagacaagaccccagcctgcaagagcctccacgccagagtcactactgcctcttagctaaccagagcagagaattaaaggtaaaagatgcaaaagaaacagatgggtctcactcttgcattctaaagtgttttggtgaagtgggtctatttggcagtctgctgaaatggtggacttct

SEQ ID NO: 84329 - DNA, 1505 bp, Homo sapiens
cagtcccaggaggtaaatattatttatccctgtgatgtgcgtgaggaaatggcaggaaagttatgtgattttttttttcaataacctacgggaaggcagcagcaggcaacagcgtttggccgtgagaatattttgacaatgcttttttaaaaaaaaaaaaaaatcagctttttaaaatttagcaaagtgtcatctttacccagtccctgggactgaccctgacccctgggttgagagatggagagaggggggagagagagagaaagagagagagagatgagatgcagggccaggatggcagagagccacccatgggttacctgtttgtccagcggtatttatggaacagcagtgtctaggcaaaagggacctcgcccacgagaactatgcattgtaggagggagacctagagtaagttatttatgaacatgatttttggacaatgttaaggacttcgaggagaggaaagcagggtagcaagagagaaagtgtctcggtagaagaaagaggcataactttggagagagatgtcagggaaccctccaccccaggaggtgacgtttgtcctgaatggtaggaaggagagcactggcaaagggccagccaagcaaagtcaacagtacatgagtctatgtacttaggaggtgagaacagactcgacatccagaagctgaaagaggacccatggctagagggcagggagtgaggggccaggcaccccgcaagctctccagggcctgggttttattctcagtgcaaacagaagcaaccggaaggttttgagtaaaggagtgcggtgaagccagaagcaagactaggagcacggagcccagagctgtctgtggctcccgacttccctgcgttctgacaggtcagttgggcctcgtcaaagcttctgtgttcagaagttctttccttaagaacagctcggggaatcaccacgtgctgttcagactgtccctggagttggagcgtgactttggggtatcctgaagtcatacctgtcccctccctcctgaggatcaataacttgaatgctttgggagtcacyagggaatgtacatctgaagcggggtgcgaggagccctggtgagctggcagagccctggtgctctgtccccagtggcggcccctacttgactcttgaaattgcaccacagggaggggagaggccgaccctagagccgtcagagcttctgattctattagagaagccagaaatccagatatgtgtgcaaactcttagtttttgaatgtcgacatcaaattcaaattaaactaacattcctgagctctgtccacgaaccctgaagccaaagagttgcataagacaagaccccagcctgcaagagcctccacgccagagtcactactgcctcttagctaaccagagcagagaattaaaggtaaaagatgcaaaagaaacagatgggtctcactcttgcattctaaagtgttttggtgaagtgggtctatttggcagtctgctgaaatggtggacttct

SEQ ID NO: 84330 - DNA, 1505 bp, Homo sapiens
cagtcccaggaggtaaatattatttatccctgtgatgtgcgtgaggaaatggcaggaaagttatgtgattttttttttcaataacctacgggaaggcagcagcaggcaacagcgtttggccgtgagaatattttgacaatgcttttttaaaaaaaaaaaaaaatcagctttttaaaatttagcaaagtgtcatctttacccagtccctgggactgaccctgacccctgggttgagagatggagagaggggggagagagagagaaagagagagagagatgagatgcagggccaggatggcagagagccacccatgggttacctgtttgtccagcggtatttatggaacagcagtgtctaggcaaaagggacctcgcccacgagaactatgcattgtaggagggagacctagagtaagttatttatgaacatgatttttggacaatgttaaggacttcgaggagaggaaagcagggtagcaagagagaaagtgtctcggtagaagaaagaggcataactttggagagagatgtcagggaaccctccaccccaggaggtgacgtttgtcctgaatggtaggaaggagagcactggcaaagggccagccaagcaaagtcaacagtacatgagtctatgtacttaggaggtgagaacagactcgacatccagaagctgaaagaggacccatggctagagggcagggagtgaggggccaggcaccccgcaagctctccagggcctgggttttattctcagtgcaaacagaagcaaccggaaggttttgagtaaaggagtgcggtgaagccagaagcaagactaggagcacggagcccagagctgtctgtggctcccgacttccctgcgttctgacaggtcagttgggcctcgtcaaagcttctgtgttcagaagttctttccttaagaacagctcggggaatcaccacgtgctgttcagactgtccctggagttggagcgtgactttggggtatcctgaagtcatacctgtcccctccctcctgaggatcaataacttgaatgctttgggagtcaccagggaatgtacatctgaagcggggtgygaggagccctggtgagctggcagagccctggtgctctgtccccagtggcggcccctacttgactcttgaaattgcaccacagggaggggagaggccgaccctagagccgtcagagcttctgattctattagagaagccagaaatccagatatgtgtgcaaactcttagtttttgaatgtcgacatcaaattcaaattaaactaacattcctgagctctgtccacgaaccctgaagccaaagagttgcataagacaagaccccagcctgcaagagcctccacgccagagtcactactgcctcttagctaaccagagcagagaattaaaggtaaaagatgcaaaagaaacagatgggtctcactcttgcattctaaagtgttttggtgaagtgggtctatttggcagtctgctgaaatggtggacttct

SEQ ID NO: 84331 - DNA, 652 bp, Homo sapiens
acatgcctcccacacaagcggtctgtgcagatcgcatctgacgcctacccggaggactcagctgttctgtttacatcgtggcggcacctctcaccctgaccctcgcaaaggttctggagatttctggagaatatatttgttaaagtcacctcttcacttaaaaaaaaaaaaaaaaaaaaaaaaaggacaaaaagcaatagatactggtgaagtgtggagaaaagggaactcttatacactgttggtgggaatgtacattagtacaaccrttgtggaaaatactgtagagatttatcagaaaactaaaaatacagctaccatattcatcagcaatcccactactgagggtctatccaaaggaatagaaaccagtgaatatatcaaagggataccggcactggcatgtttatcacagctctattctcgatagtaaagaaatgggatccatgtaagtgtccatcaatcaacaaatagagaaagaaaaaatgtggtatacattcacaatggtgtactatttggctataaaaaagaatgtaatcgtgtatcagcaaccaggatgaaagtgtatatcattattttaagtgaaataacccaggcacagaaagacaaaccgcatgtccttactcatgtgtgggagctaaaaatgttaatc

SEQ ID NO: 84332 - DNA, 652 bp, Homo sapiens
acatgcctcccacacaagcggtctgtgcagatcgcatctgacgcctacccggaggactcagctgttctgtttacatcgtggcggcacctctcaccctgaccctcgcaaaggttctggagatttctggagaatatatttgttaaagtcacctcttcacttaaaaaaaaaaaaaaaaaaaaaaaaaggacaaaaagcaatagatactggtgaagtgtggagaaaagggaactcttatacactgttggtgggaatgtacattagtacaaccattgtggaaaatactgtagagatttatcagaaaactaaaaatacagctaccatattcaycagcaatcccactactgagggtctatccaaaggaatagaaaccagtgaatatatcaaagggataccggcactggcatgtttatcacagctctattctcgatagtaaagaaatgggatccatgtaagtgtccatcaatcaacaaatagagaaagaaaaaatgtggtatacattcacaatggtgtactatttggctataaaaaagaatgtaatcgtgtatcagcaaccaggatgaaagtgtatatcattattttaagtgaaataacccaggcacagaaagacaaaccgcatgtccttactcatgtgtgggagctaaaaatgttaatc

SEQ ID NO: 84333 - DNA, 455 bp, Homo sapiens
gaattcagagctatttcaaagcataattataccaatctgcatataaaaggctatacgtcctacagaggattctatggaaaagcaaactgtttcaaagaagaaaattagaagtaattcccacaactaaaattcactaaagttagtacatgtttcatctgrtaagtacagctttattttttttaagccagtagatcaatcccaaaaatagtggggatgattttttgtgtgcaaggtcagggaaagaggagtaagcaagaactgaaaattgaagacgaaggtaaagcaacagggtgtgtacattatacatattggttttgaaaatggccacatcacaccagaaaaatcaatacttcatattactgtatcagacaataggattctcacctacataatgtattaactatttattggccacatggcaatataccccaaaacctcacaacataaaaccacaa

SEQ ID NO: 84334 - DNA, 669 bp, Homo sapiens
tcattaagaagaaagaccacacagcctcattgctcaacctgaagtctgaagaatttagaactttcatccttccagaaacagtttttacggcagtcactgcctaccagaatyaactgatgagtgtacagttcacaatttagttcctgcataagagaaggatttaggaggttcttatattttcttggagagaagtgatatcccagtactcaaaatggatgttcactttgcagagagctattgagtttcagtgctaggacctctaagagtgtgttgagtgactgtgtattacactgtattttctagaatctctacattatgggtcaagtttttaactgcccacttccccacccacacctaccccaatctgccttctcacattttcttctccagaaggttacttgcctccttttcctcctcctggtaacatgtataaccatgttcttgttgcttcataaaatttaaaagttcagtttttctgctgaattaaacacacctattctatccaactgcccaaactgctgatactttagatattttgtgaggttttattcagctataatttagggtgagataattctggtaaaatgattttaaatgtctttttagatagtaaactatagtatgtaacatcaagatatctaatttatattattgagttatatgcagggt

SEQ ID NO: 84335 - DNA, 699 bp, Homo sapiens
gtaatcccaatgtttgggaggcagagacaggaaattgcttgagggtaggaattcaagactagcctagaaaacatatgagaccctgtctctacaaaaaatacttagtcaggcatggtgttgtgcacctctatagtcccagctacttaggaggctgaagcagaggaacgtttgagccctggaggtcgaggctgyagtgtgctatgattgcaccacggcactccagcctgggtgacagagtgagatccggtctcaaaaacaaaaaatgtaatgggagattttgaaacttgttgagaaaagtagagcatgagagcagtggtatttttttaaaaattcatatagacagcagggagacacattaggaggctgtagtaataatcttggaatagaactgggcctattcttaagaaagtggaccttctggaagtattaccaaaaacagaaaacaagaatcattttaaagagatagttataggacgttattaaataagaattataaataaaattaaaaaataaagtcaacacatctgcgttcaagaccagggaataatgggggtttcattattgacagatttattgaagacagaagggggggatccgatttggggatgattacaaattcagatttgagacatacatatttggttgagacaatagtagactatattaatacacactttcctaaaacatatgctgcttttg

SEQ ID NO: 84336 - DNA, 751 bp, Homo sapiens
ccatctctttagaagacactctgcctgggctgggtgtggtggctcacgcctgtaatcccagcacttcgggaggccgaggcaggtggatcacctgaggtctggagtttgagaccagcctggccaaagtgaaaccccatctctactaaaaatacaaaaattagctgggggtggtggcatgtgcctgtaatcccagttactcgggaggctgaggcaggagaattgcttgagcctgggaggcagaggttccagtgagccgagatcacacaactgcactccagcctgggctacagagcaagactctgtctcaaaattaaataaataaattaataaaattaaaaaaaaaagacactgtgcctcgagggagcttgttgggaggggctgggccaggctggtgcagccctaggtctcgtgcctgggagagtgggaggcacgatgcagtggccaagctccagagccagaccagctggggtcaggcccagctctggcatttccctgctacatggccccgggcaagtcacttgccctctctgtgcttcagtttggtcagctataagatggggatacttagagtggccttctgatcaggttggcctgaggaataaacaaggctagtatgttttgtgaagcttcaagtgtgctaggcacacaccaggtgctgtgaagtattggctttccttcactattcttaacttagacagctgamgggataggtcaggaaaaggagaacattccaaggtcaggtaggaacatt

SEQ ID NO: 84337 - DNA, 1257 bp, Homo sapiens
gtttgagcccttagcatcatggtttcatgacacccgcatttggttgggctgccatcttgcacgtgcatgcccgcgtgtctgtatgtctgggtgtgtacacaagccctccctgccaagtggtctggttggctggagcactgacctatatgaatcaagaccctgggtctggtcctggccccaccactagccacagaatctttcacaagccacttgatctctctggggacttcttagcctgggtccccagatactatgaagaggaggtcttttcaaaatttaaaaaagtctggtgaaaattaggcctttatctttgaggaggtctcccggattaaatactgcaattcttgccagtgaacttaatggtagcactagtccttttgtgcagaaccggcattcataggtgactttaagaaaaacagagatgaatttctactgaataaatgcaagtatttagttgacaaggacttgcaaaacaggggaatgcatggtactaaaatattaagaggggctcttggtaacaaacctattgagaaataccactcctagccttgatttcctcatcctgaaactaatgaaaaaatacctttcttcttcctttccacagacaacgtgagggccrcgtggggaagtatttgtatgggaacatgatttgaaaggtctttggagaaatattgccaataaaagtggccacaaatcttgcgatggcaggaacaatttgtttcctcgagtgtcccccaaagttccttggatccaaatgtaagcattcttttcattaatatcagcagaactagacatggttgggctttgtagggagcagggaggtatctcagattccagagctcccatcccttgggggaaatacaagctttgccacctctaaatttttcccccaacaaataaaacagagccatgacctcagcaaggtcacaatatgagtcagtgataggcgctagaaatagaacacaggcattctgagtccccacctgcaccattcaccaattcacccactcaccccctctccaggaagggaatctcttacccttgagggcaaacattgcaggtaacaaacattgcaggtaacagggaggaacgttgagagattccacttgtcagctctgtctccgtatgtattctcagagtctgcacactttgtaattcctattcaaaaggctcaaagcaggagcgtggcaaatacccaaggtatccctatgatttaaacacctgacgtcatgccttccccatcccccacccccagcg

SEQ ID NO: 84338 - DNA, 733 bp, Homo sapiens
cttaggtcaagcttgcagttggcttggcaccagaaggccagaccacagtgcccacaagagctggcacctggttcctggacactggtaatggtgagaaaggtgacaccccagtgactcaactctaagggacaagttaaaggtgcagtggactgtggcacacaggacatgcaccgactcatcaacagcaggacagaggtcacttgcatgaaaaccgagacttcagtaagcctctgcccaggaacacagctctctcaggtataaacacacacaaaatgttcactcgaccagtgagcaaataatgcaaattaaagcaataaggagatgttgttgtcttgcccatcaaattgaaaaacatttttaaaaaatgagaataaaaaacactgggggccaggcgcagtggctcacgcctgtaatcccagcactttgccaggccgaggtgagtggatcacctgaagtcaggagtttgagacaagcctggccaacatggtgaaaccccatctctactaaaaatacaaaaattagctgggtgtggtggcrggcgcctataatcccagctacttgggaggctgaggcaggagaatcacttgaacctgggaggtggaggttgcagtgagtcgagatcacaccactgcactccagcctgggtgacagaccaaaactccatctcaaaacaaacaaacaaacaaaaacaatgggaaaggtgtggctacacctgtactctctgctaatggtg

SEQ ID NO: 84339 - DNA, 733 bp, Homo sapiens
cttaggtcaagcttgcagttggcttggcaccagaaggccagaccacagtgcccacaagagctggcacctggttcctggacactggtaatggtgagaaaggtgacaccccagtgactcaactctaagggacaagttaaaggtgcagtggactgtggcacacaggacatgcaccgactcatcaacagcaggacagaggtcacttgcatgaaaaccgagacttcagtaagcctctgcccaggaacacagctctctcaggtataaacacacacaaaatgttcactcgaccagtgagcaaataatgcaaattaaagcaataaggagatgttgttgtcttgcccatcaaattgaaaaacatttttaaaaaatgagaataaaaaacactgggggccaggcgcagtggctcacgcctgtaatcccagcactttgccaggccgaggtgagtggatcacctgaagtcaggagtttgagacaagcctggccaacatggtgaaaccccatctctactaaaaatacaaaaattagctgggtgtggtggcakgcgcctataatcccagctacttgggaggctgaggcaggagaatcacttgaacctgggaggtggaggttgcagtgagtcgagatcacaccactgcactccagcctgggtgacagaccaaaactccatctcaaaacaaacaaacaaacaaaaacaatgggaaaggtgtggctacacctgtactctctgctaatggtg

SEQ ID NO: 84340 - DNA, 774 bp, Homo sapiens
catttttacattaaactctgggtcccaaaagtagagaaacaccatgggactagagagtgcaatgcttccatggagtatctcgctgcaagcacattcccattccccagaggctggtgggcaactcactgttagtcagcccactctgtaatcacctcatttcccaggagtcttatccctcaggggggagtgtttccataacctctaagggtctccaggtcagcctttccttatccaaatgcacaaagagacaagcggccccctgtggtaataatcatttattgtcgacaactgtcattagtcacttctaacacagtgaatagttctattttccaaatatttgtgaaaccagcactctatcccactgacattctttgaaagtagaatttggaagaatatattctgaagaaagttcctaaaagcataacttrtacaggaatctatgaagcaaactaagcagaatgtataattgtgttacatataacatcctcttttgtgacactaagtaattgttccaccttaccagatcaactgcagcagcacacaacataacgcagtcatttctttcatttaaaaaagcaataggccaggtgtggtggcttacgcctttataatcctagcactttgggaggctgaggcaggcagatcacgaggtcaggaggtcaagaccagcctggccaacatggtgaaataaaaattagctgggcgtggtagcaggcacctgtaatcccagctactcaggaggcagggtgaggtaggagagttacttacctggag

SEQ ID NO: 84341 - DNA, 990 bp, Homo sapiens
gttagtcctacaacggcattctagtccctgggcaagaaggaggtttgttttgggaaagggctgttattgcctttgttttaaactataaactaagttcctcccaaagttagccagtctatgcccaggaaataacaagggcagcttaaaggttagaagcaaaatagagtcagttagtttagatctctttcactgtctcagtcctaattttgcaaaggcggtttcacccagatgaacattaaatgtcttctacttcaaagtacttgagtctcttttctgaacttctcacttcgattgacattttgtgcttgaaaatcccaaatagccagtagaagtaaattatctataaacaaatgaaagactgatcttggatcaagcaatagatgaaagagataagctgtaaaactagaatggcttacaaagagaaggcaagcatttaagatcagagaacgttgtgacactataagaagttaatgagaactcctaaaagatgtaaaaataactgtccctacaaaccaaggaagataagacacctaagcagstggcaaagattctttattcttaattaattctctatttagttaatatgctgagtagaaggttttgccacatgtccatctgtactagggttattaaaggaatatatgagttaatgaaaaaacaaaggctgtactctagctctctagctcacattgtaaaaatcaaaactttataaaatttaatcttttaaaaaagggagccaacctgtgagaggaaggaaagcatagccaccttttccttttattttagctaatcttattttattttattgtaatttaacagcaagatgggcagctggacttaatgagcaaatgtagctcatcgctagcaacaaaaattctctcttccttccagattaaaatggagagaactgaagcttttgctatttaatcgaattgctggtttcatggagataatcaatgttgtcaataagaagtatctaatacatggcca

SEQ ID NO: 84342 - DNA, 1261 bp, Homo sapiens
ccaggcctgtcataggataagcactaaataacttgactattccattccattgccaccactgccaccacttatcatgatcctggttggaatggtgatgaacatttgagcatgacatcctggtttttgtacaagttttctattgctgctataacaaattattaacaatgtagtggcttcaaacaacacctaagtattatctcacagttttgtaggtcagaagtctggtgaacttggctattttctctgcttcagatctctgatggccaaaattcaggtaatggcaggattgtgtttctttctggagtttytggagatgatttcaccttcagtctcactcaggttcttggccagattcagttccatgtagttgtaggactgtggtcgtgtaaccggccaaagagtccggctgctcactgcttatgaaaagaagtcaaaataataagttgtgataaaaggaagcaaaattggtttattatccatgctagcaggggaagagtagaaagcaattccactcttcagttcccctattcaattccacagaggtttttaaaggaaagatttggaatgcagaagaagtgtgggggctgagaggtataaggtagcgtgacttgctccagtggcccctcttgaacagttgtcctatttggcaaaggggatgctgccatcgtagaccctgccaggttataaattactttcagtcaattttgtagtcactcatcatctgggagtgggttccatctttaagcaatcttttgttagagagagaattccagaggtgccttgtcactatcaggatctgactcctaaagtatataaggaaatatatgaccagataagaaagcatggtgcgtgcttgacaagcatttaggtaaataaatgtgcataaggcatgggagtattgtatggagaaggaaaaggaattgagattcacagcacatactgaggctgtattttaatatgagaggttacatagatgtgttataggttgttagacaggcatagagtagggcagaagagggctctcccctacccactaggaatgttgagtgatggtttggcaattatcacattgcctccctaaaagtgacagattggcagatggtgccaggaagaggccatttcctgatgggccacacctgttgcactgaagtgttaattgaatggagacgccaggaagaagcaacttcctgggcatatgcactaagagacaaaaatggcagagtttgcctttccaggggcacaccagcagcaaagggaagaa

SEQ ID NO: 84343 - DNA, 1675 bp, Homo sapiens
aatagagcttgcctagcaccttagaagtgctgcaccctcttagaagtgccaggcactgtcatagttgttgccctcttagaatgatttgcctctgggtgtcactctttgctctgtacctggtacaactatagtgatggcagatgctccatactcagtcctagcttttcagtgtttggctttgctgggttttttctttctttctttttgagagaaatggggacttccaagctgagtaaaacctggaaagggcaacttactgcagccatatattgatactacattatttcctatgtcataatattaacctcccttccatctgcttttgctgtttagtagtctcatgtcttcttgagctagactatcttatgtaaattcatgttatgtgaattgaggtctcagtaataacagccttctgtctttcctcaccgtaacaggagtcataggaaagggggtgtgatagtctcagaaacagcctagcatctcatacaaacttgtttctgtttttgagacagggtctcgctctatcacccaggctggagtgcagtggcacaatcatggctcactgcagccttgatctcctgggctcctgtctcagcctcccaagtagctgggactacgtgcatgcatgcaccactacacctagctttttttttcttttttcttttttcttgtaatagagataggatctcactttgttgcccaggctggtctcaaactgggctcaagttatcttcccaccttggcctcccaaagtgctgggattataggcatgagccaccacattcagcccaaacatttctgagaccactacttgaactatcaagtctcctcttgtaactgattctcattagaaataatacacatttattgaatgtcattgatatataaagataccattctttgagtgggggaaatataatttaaaagtcgcaactactgacaatcaacaaataaactctaatgagaatcataaagcttgttcccagagaaccatgatacagggtgggacagtacgcaaataatgggctcctgttgtcagacttcatggtgattacaytagtgctttctccagtatctttcttcctattgtactcctgaagcactcagaatgataaagataaatttctgatcattcctacaaagagtgcaggcaaagttaagatttaactgtgattgctggttgtttcatctcgaattcaaaatcctggatttccgaaacaatggagcttgatgtcacatttggctatcttgcttttgtctcctcttctggaaagaacaaatcatcttcctgaaaattacaggagacacttagtatgacaaaataaggcctctgaaactgtccaatctcacatgtaaaaagtgtaaaatcacagaactaaaatcaggttccggattttcctggaaatagaatgtcaccgggatctgttcaaaggtgagctttggctacattttataacagtgtttaaaactcgaatgcaaaaaactgctttcaatataatcagatatgtgcaaaaacaatttgttaaataacatgggaagattatattaacaaaagacatttccagaatactaacattcatgtgatttataaaggtgcattttctgtaaagagctatacagcccaaaaacatgaaattcttcaagggagtcccctttatcccatgagttggaagaa

SEQ ID NO: 84344 - DNA, 1675 bp, Homo sapiens
aatagagcttgcctagcaccttagaagtgctgcaccctcttagaagtgccaggcactgtcatagttgttgccctcttagaatgatttgcctctgggtgtcactctttgctctgtacctggtacaactatagtgatggcagatgctccatactcagtcctagcttttcagtgtttggctttgctgggttttttctttctttctttttgagagaaatggggacttccaagctgagtaaaacctggaaagggcaacttactgcagccatatattgatactacattatttcctatgtcataatattaacctcccttccatctgcttttgctgtttagtagtctcatgtcttcttgagctagactatcttatgtaaattcatgttatgtgaattgaggtctcagtaataacagccttctgtctttcctcaccgtaacaggagtcataggaaagggggtgtgatagtctcagaaacagcctagcatctcatacaaacttgtttctgtttttgagacagggtctcgctctatcacccaggctggagtgcagtggcacaatcatggctcactgcagccttgatctcctgggctcctgtctcagcctcccaagtagctgggactacgtgcatgcatgcaccactacacctagctttttttttcttttttcttttttcttgtaatagagataggatctcactttgttgcccaggctggtctcaaactgggctcaagttatcttcccaccttggcctcccaaagtgctgggattataggcatgagccaccacattcagcccaaacatttctgagaccactacttgaactatcaagtctcctcttgtaactgattctcattagaaataatacacatttattgaatgtcattgatatataaagataccattctttgagtgggggaaatataatttaaaagtcgcaactactgacaatcaacaaataaactctaatgagaatcataaagcttgttcccagagaaccatgatacagggtgggacagtacgcaaataatgggctcctgttgtcagacttcatggtgattacattwgtgctttctccagtatctttcttcctattgtactcctgaagcactcagaatgataaagataaatttctgatcattcctacaaagagtgcaggcaaagttaagatttaactgtgattgctggttgtttcatctcgaattcaaaatcctggatttccgaaacaatggagcttgatgtcacatttggctatcttgcttttgtctcctcttctggaaagaacaaatcatcttcctgaaaattacaggagacacttagtatgacaaaataaggcctctgaaactgtccaatctcacatgtaaaaagtgtaaaatcacagaactaaaatcaggttccggattttcctggaaatagaatgtcaccgggatctgttcaaaggtgagctttggctacattttataacagtgtttaaaactcgaatgcaaaaaactgctttcaatataatcagatatgtgcaaaaacaatttgttaaataacatgggaagattatattaacaaaagacatttccagaatactaacattcatgtgatttataaaggtgcattttctgtaaagagctatacagcccaaaaacatgaaattcttcaagggagtcccctttatcccatgagttggaagaa

SEQ ID NO: 84345 - DNA, 1675 bp, Homo sapiens
aatagagcttgcctagcaccttagaagtgctgcaccctcttagaagtgccaggcactgtcatagttgttgccctcttagaatgatttgcctctgggtgtcactctttgctctgtacctggtacaactatagtgatggcagatgctccatactcagtcctagcttttcagtgtttggctttgctgggttttttctttctttctttttgagagaaatggggacttccaagctgagtaaaacctggaaagggcaacttactgcagccatatattgatactacattatttcctatgtcataatattaacctcccttccatctgcttttgctgtttagtagtctcatgtcttcttgagctagactatcttatgtaaattcatgttatgtgaattgaggtctcagtaataacagccttctgtctttcctcaccgtaacaggagtcataggaaagggggtgtgatagtctcagaaacagcctagcatctcatacaaacttgtttctgtttttgagacagggtctcgctctatcacccaggctggagtgcagtggcacaatcatggctcactgcagccttgatctcctgggctcctgtctcagcctcccaagtagctgggactacgtgcatgcatgcaccactacacctagctttttttttcttttttcttttttcttgtaatagagataggatctcactttgttgcccaggctggtctcaaactgggctcaagttatcttcccaccttggcctcccaaagtgctgggattataggcatgagccaccacattcagcccaaacatttctgagaccactacttgaactatcaagtctcctcttgtaactgattctcattagaaataatacacatttattgaatgtcattgatatataaagataccattctttgagtgggggaaatataatttaaaagtcgcaactactgacaatcaacaaataaactctaatgagaatcataaagcttgttcccagagaaccatgatacagggtgggacagtacgcaaataatgggctcctgttgtcagacttcatggtgattacattagtgctttctccagtatctttcttcctattgtactcctgaagcactcagaatgataaagataaatttctgatcattcctacaaagagtgcaggcaaagttaagatttaactgtgattgctggttgtttcatctcgaattcaaaatcctggatttccraaacaatggagcttgatgtcacatttggctatcttgcttttgtctcctcttctggaaagaacaaatcatcttcctgaaaattacaggagacacttagtatgacaaaataaggcctctgaaactgtccaatctcacatgtaaaaagtgtaaaatcacagaactaaaatcaggttccggattttcctggaaatagaatgtcaccgggatctgttcaaaggtgagctttggctacattttataacagtgtttaaaactcgaatgcaaaaaactgctttcaatataatcagatatgtgcaaaaacaatttgttaaataacatgggaagattatattaacaaaagacatttccagaatactaacattcatgtgatttataaaggtgcattttctgtaaagagctatacagcccaaaaacatgaaattcttcaagggagtcccctttatcccatgagttggaagaa

SEQ ID NO: 84346 - DNA, 646 bp, Homo sapiens
aaaagaattgtaaaatctgatagtcccttctaccagctatgcaaagtattccccctccctatagaaggtatgttttattttattattattattattwttttttttggaggaagggtctcactctctcacccaggctggagtgcagtggcacgatctcagctgactacaagctccacctcttaggttcaagtgattttcctgcctcagcctcccaagtagctgggattacaggcacgccatcacgccttgataattttttgtattttcagtagagacaaggtttcaccatgttgcctagcctggtctcaaactcctgagctcaggcgatctgcccacctcagtctcccaaagtgctgggattataggcatgagccaccacacccggcctcataggtatgttttaaaagtaacatgggaggatatattcatggccttggaattggcataaatttattcaacagaatataaccacaaagaaaaatattgataaattatacttcataaaacttctgttcatcaaaaatacccccattaagaaagtaaaaagttaagccacagaagatatttctaaaatatacaaccaacatagaattcttattctgaatataaataaatcaactagagaagacatataccctaacttttt

SEQ ID NO: 84347 - DNA, 960 bp, Homo sapiens
  misc_feature (1)...(960): n = A,T,C or G
gccnnnnnnnnnnnnnnnnnnnnnnnnnnnnnnnnnnnnnnnnnnnnnnnnnnnnnnnnnnnnnnnnnnnnnnnnnnnnnnnnnnnnnnnnnnnnnnnnnnnnaaaaaaaaacctagaaaccaccaaaaagttccaggtcagaaatacctgtaatctattcacaatctaaacaaactgaaacacctttcacatacttaataataagtaatatttattaagtcctttctatgcagcaggcactaattaggcatgattttgtgtatatgtataatatttacatttgtatatgtattcaattattccttctaatagctctgtgatacagaaactattaccactatttaaagatgagtaaagtggaggacagggaagataagcaatttgcccaaggtcacacagctagtcagtggcaaagctgggctctgaacagcctggccccagagtttgtacgtttgactgctgccctacgaactttgaaagcacatgaatcctgtttctactttagttgtgccatacacagtagacaaagttaaagagggcacagtcacagatgatactttctccctctcattacaaaacaacaacaaaagctttttaaaatacagcaccagaccacctaagatactagcactatgtaaccttagaaacatctatcaccctccacaagcacagtagcttgtttcaaaagctcagataagcagagtgctactgatcaatcatgtaaaagatcattttttcctggccttcttcagtctcctttgaaggccagcttcttcagcacactcaaaacawttcaccctgagatccacatctctctctcaccccttttctttttcccttcacatcacaattctaatggggtctaaccacttttccgacccatgtagaaatgaccaaagagaaagagatagagagacaggttattttagggtttgctttttcaggccctggcctccaag

SEQ ID NO: 84348 - DNA, 1676 bp, Homo sapiens
agatctctttaatcccattaaactcagcaatttgaaaaaaaaatgagctcaagctggttaccaccaagaggctaaggaaatcacttctttgctagcaaacagtgtatcaggatcattcttagttcttcaattgcacaaataaaggcagtgattttggaatctagctgtttgcaaaaggatttagaaactgtcatggatatagtctgagaggcacagagctaatattatcatcttgagaacatcaaccacacaatctgaccagggagacatcttttcttcctccattttaggtggagaggagtttttccaattgatcaaaggattccttataaattggtgtatatgactccccaagactctagaactttaatagagctggcaatatcatttagcttgagccagtaatgatttcccaaaggccaatctccaactttatcccagttctccaatcaaatgaaaatgacttaaacgcattcagagtgtgctaaccacaccagatcctcctggttgggttatttatgcatacaaaaagaattcagtttctcaaaatggatgtagtttaccctaacttcatattttttttttgttataacttattctggtatatgcttgtgcaacccagaagaggggccaccattgccagatagcaatctgttcatttcagtcaaccaagaattttttaactctaaagtctcttcggtggaaatttctattaaaaacagcaaagcccttttagaaatctggactagtttattcttacatgccaaaaggaaatgaacgcatatacatatgcgtgtgtacacacagaagtgaaaattgatgtaatccaatcacttgtaaaggtttctcctctctccaccctctactccccactccagtgaattttgaagcttgcatcattccagaggaaactgtaatttggactcactctctggctcaggcattaagtaatcaacctcatagcctgccagcaaggagtggactgcctattttttcactgaaacatattatctcactccctatctcagcaaactgcctctgaacagcttggctgaagaatggtacaagaacaagtctagactagataatcactttttttctggtggctaaaaaacatttaaaacaaacatctagctgaacaatgggtttatataatccaagtcttgaaaagtctatgaagaatctacatttcctcagatattacgagtaacaaagaaaatgtttttaaaaagtgattttgacatctgaagattattgaaggtaggtgggaactggtacatttagttgaaaactcatcttgaacctgaacccttcagtggctgtggtcattttacttagtaaccaggtttttgatgatttaatatttagtagtgtttctaagtaagggaggcaaataaatttcttattaggtactatttccatgagtggggacagtgcaaatccctccctctaaaagatgcctattatgtaytagcaaacatgagcttttttgattgtcagtattatatttatataacaaatatttaagaattccattctaagtgacagatgttactgtcttacacaatataatttgatataacatttagaaaatgccatcattggtggctttaggattgtaaatcacctcttcaatggcagtactggcaaaatacaaatacacaacagcctctagg

SEQ ID NO: 84349 - DNA, 1676 bp, Homo sapiens
agatctctttaatcccattaaactcagcaatttgaaaaaaaaatgagctcaagctggttaccaccaagaggctaaggaaatcacttctttgctagcaaacagtgtatcaggatcattcttagttcttcaattgcacaaataaaggcagtgattttggaatctagctgtttgcaaaaggatttagaaactgtcatggatatagtctgagaggcacagagctaatattatcatcttgagaacatcaaccacacaatctgaccagggagacatcttttcttcctccattttaggtggagaggagtttttccaattgatcaaaggattccttataaattggtgtatatgactccccaagactctagaactttaatagagctggcaatatcatttagcttgagccagtaatgatttcccaaaggccaatctccaactttatcccagttctccaatcaaatgaaaatgacttaaacgcattcagagtgtgctaaccacaccagatcctcctggttgggttatttatgcatacaaaaagaattcagtttctcaaaatggatgtagtttaccctaacttcatattttttttttgttataacttattctggtatatgcttgtgcaacccagaagaggggccaccattgccagatagcaatctgttcatttcagtcaaccaagaattttttaactctaaagtctcttcggtggaaatttctattaaaaacagcaaagcccttttagaaatctggactagtttattcttacatgccaaaaggaaatgaacgcatatacatatgcgtgtgtacacacagaagtgaaaattgatgtaatccaatcacttgtaaaggtttctcctctctccaccctctactccccactccagtgaattttgaagcttgcatcattccagaggaaactgtaatttggactcactctctggctcaggcattaagtaatcaacctcatagcctgccagcaaggagtggactgcctattttttcactgaaacatattatctcactccctatctcagcaaactgcctctgaacagcttggctgaagaatggtacaagaacaagtctagactagataatcactttttttctggtggctaaaaaacatttaaaacaaacatctagctgaacaatgggtttatataatccaagtcttgaaaagtctatgaagaatctacatttcctcagatattacgagtaacaaagaaaatgtttttaaaaagtgattttgacatctgaagattattgaaggtaggtgggaactggtacatttagttgaaaactcatcttgaacctgaacccttcagtggctgtggtcattttacttagtaaccaggtttttgatgatttaatatttagtagtgtttctaagtaagggaggcaaataaatttcttattaggtactatttccatgagtggggacagtgcaaatccctccctctaaaagatgcctattatgtattagcaaacatgagcttttttgattgtcagtattayatttatataacaaatatttaagaattccattctaagtgacagatgttactgtcttacacaatataatttgatataacatttagaaaatgccatcattggtggctttaggattgtaaatcacctcttcaatggcagtactggcaaaatacaaatacacaacagcctctagg

SEQ ID NO: 84350 - DNA, 1496 bp, Homo sapiens
caccatgttggtcaggctggtctttaaaccctgacctcaggtgatccgcctgccttggcctcccaaagtactggaattacaggcgtgagccactgcaccagaccaactccaagctttttaatatgagactaatgacagagggaatttttatgactgggagatttattatcacatgagaaaatcagtcttcagttttcatgttgagtattggactctcacatcaaaccatctaaagtcttcttgtgcctccatctcccactctctgcttccagaaatgccttaacgtttctttagtggttggcaatcagctcggcatctaaggtgaaaaaacgaatatagccctgcagtctttctactgtcaaggtaaaccattttatatttatttatttatttatttatttatttatttatttatttattttttgagatggtgtctcgctctgtcacccaggctggagtgcagtggcgtgatctaggctcactgcagcctctgccgcctgggttcaagagattttcctgtctcagcctcctgggtaggtgggactacaggcgcacgccaacacgcccagctaacttttgtatttttagtggagatggggtttcactgcattggtcaggctggtctcaaactcctgacctcaggtgatccatcctcctcggcctcccaaagtgctcggattacaggtgtgagccaccacgcctgacctaaaccattttattctaaaaggagagttacttcatgggacagtcgtcccctcctctgtggttttgctttctaagatttccattacccacggtcaactgcggtgtgaaaatattaaatggaaaattccacaaataaacatttcataagttaaaaaaaattgcgtgttgttctaagttgatgaaatctcttgccatcccattctgtcctacctgggacgtgagtcacccctttgtccggcattccattaaacgcccattagtcactgacatcctctgctcctgacatctatcaacattatcatggctccacgatccaggatcaccaaaagcagatgatccttcttctgacacagtgtcagaaggtcagtagcagcctcacagtacgtcacagcagctgtcattcacctcacttcatctcatcatgtagacatttcatcatctcacatcagcacgggaagagtgagtatagtgcaagaagatcttttgagagaaggaccacattcacataacttttattatagtatgttgttattaaattgttctatttcattattattgttaatctcttgctgtgcctaatttataaattaaactttatcataggtatgtgtgtataagaaaaaacatagtatttccagggtttggtaccatctgtgttttcaggcctccactaggggtccgggartgtatcccctgaggatgagtggggactaatgcagtgtgagcaccgcattaggtagagaccaattctatttataaaaggctttattgtacattttatttttgcaagt

SEQ ID NO: 84351 - DNA, 1496 bp, Homo sapiens
caccatgttggtcaggctggtctttaaaccctgacctcaggtgatccgcctgccttggcctcccaaagtactggaattacaggcgtgagccactgcaccagaccaactccaagctttttaatatgagactaatgacagagggaatttttatgactgggagatttattatcacatgagaaaatcagtcttcagttttcatgttgagtattggactctcacatcaaaccatctaaagtcttcttgtgcctccatctcccactctctgcttccagaaatgccttaacgtttctttagtggttggcaatcagctcggcatctaaggtgaaaaaacgaatatagccctgcagtctttctactgtcaaggtaaaccattttatatttatttatttatttatttatttatttatttatttatttattttttgagatggtgtctcgctctgtcacccaggctggagtgcagtggcgtgatctaggctcactgcagcctctgccgcctgggttcaagagattttcctgtctcagcctcctgggtaggtgggactacaggcgcacgccaacacgcccagctaacttttgtatttttagtggagatggggtttcactgcattggtcaggctggtctcaaactcctgacctcaggtgatccatcctcctcggcctcccaaagtgctcggattacaggtgtgagccaccacgcctgacctaaaccattttattctaaaaggagagttacttcatgggacagtcgtcccctcctctgtggttttgctttctaagatttccattacccacggtcaactgcggtgtgaaaatattaaatggaaaattccacaaataaacatttcataagttaaaaaaaattgcgtgttgttctaagttgatgaaatctcttgccatcccattctgtcctacctgggacgtgagtcacccctttgtccggcattccattaaacgcccattagtcactgacatcctctgctcctgacatctatcaacattatcatggctccacgatccaggatcaccaaaagcagatgatccttcttctgacacagtgtcagaaggtcagtagcagcctcacagtacgtcacagcagctgtcattcacctcacttcatctcatcatgtagacatttcatcatctcacatcagcacgggaagagtgagtatagtgcaagaagatcttttgagagaaggaccacattcacataacttttattatagtatgttgttattaaattgttctatttcattattattgttaatctcttgctgtgcctaatttataaattaaactttatcataggtatgtgtgtataagaaaaaacatagtatttccagggtttggtaccatctgtgttttcaggcctccactaggggtccgggaakgtatcccctgaggatgagtggggactaatgcagtgtgagcaccgcattaggtagagaccaattctatttataaaaggctttattgtacattttatttttgcaagt

SEQ ID NO: 84352 - DNA, 733 bp, Homo sapiens
ggatcctcctggtgcaaatcctctatgaatccactttgggtcatcagtcattatccaatcatcttaytggggactaagtgtcaggtaaatagaaatgatttaaaatcctatattgagccaggcacagtgtctcacacctataatcccagcactttgggaggctgaggtggggtatcacttgaggccaggagttttgagaccagcctgggcaacatagcaagactcccatctctacaaaaagtttaaaaattacccaggactggtggcatactctagtaccagctacttgggaggctaaggtgggaggatcacttgagaccagtaagtggaggctgcagctgatgatcacacaactgcactccagcctggactataagagttaagatcctgtctcaaaaattaaaataaaaacaaatcctatattgagtatttaaaagaggagaggcaaaaacaagaaagatcttatcctaagggaccacccgtacttgttcagatttgtggaaattcactggacagccaaatcaagagagttcccaagtcccacatatactcatgaaagggagagctcattcctgcatcactctgcttagagcactgggaaaagcagaatgctttagcaaaggaaggaccactgagctgagactcagagacctggttccactttgaatttggaatttaccagctatataacttctgatgtttatttaacaaaaattgaaaaccctactataaa

SEQ ID NO: 84353 - DNA, 1050 bp, Homo sapiens
aaagagaatgggaaccaaactcatcctttttgtgaagaacccattcccaaattaactaatccactcccttgataaaagcattaatccattcttgagggaagagccctcatgatcgaaaaacctttcaaaggtctgacctctcaacactgttgtattggaaatgaagtttacaacacataaaccttggaaaacacaattgaaccatagcagctgccctattctatccctctgaaagaattgctcatctagaaaactagcatttctggctcccaacacagaggtgtctatgatttacccccaagagaagagggcttggtgtcattattcaagaagtaaccacacacttacagaattatgagttttctctcttatggttggactccagctaccaccctttctatatgcacccaaacctattttatgcacccaaacctattttctgctctctgcctcactacatgctacccaaaacacattatttttttagaagcaccaaatttgcattttagaaatccactatatttcttttgtatagattaatttaaactaagtatgtgttttcttagtcataaagatgtgctaaatgtctgtttagatagagcactgtagtaactagcccctcagcaaacacgttatttcattcattcccagacacaaaggaattgcaagctagaaggaagagtaagtgctgggtgctcagaacagccatttaggtacctaacctaccatttagatacatgaccatgagtaggttatttaacattttcatgccttggcatttttattttcaaaatttacacttaaaaatttctatcacaccaggactgtgataggcagaattttggccccagtgatctctgtgccctggcattcctcccaggaatggttatggtacgttacatgacaagtgggattttgcagatgtaattaagtttactaatmagttgaccttagaataggaggatttccctggattattcaagttggctcagtgcaatcacatgagcccttaaagcagaataggaaaacagaagaggagtaaaagaggaa

SEQ ID NO: 84354 - DNA, 1014 bp, Homo sapiens
tccttcattacaatttgcaatatttaccaaaattgaagacacatagcctttaacccaagcaatgctccttctaatgagctaactgatcttcaaagatactgacacatttgagcacaattacatgtactaagtagttcatggtagcagtgatttatggaaaatgcaaattggtttgtctaattcttctacatttgttgaaaaatatatctacaaacacatatatggttgtataaacataatatttctggaaggacacagaaaaattggcagtactaggtgcctctacagagagagtttgagggggactcactgggggaaacaagattgaatttttactwtcatccttttggttctaaatgttttctattggcaaacgttgtttttacataacaatcaattaaaatgacaaaaccaaaatgaatgagaatgtgaaatgcacaagcatattttacaatgaaatcctgtgaagtgtttagcactattgactaatggttccttaaaacattagctaagagtttgtttttcagcacctattcctgtgtctaccagctctatcaatagaactccaattaaactcctcttaagctaatttagagagtcaaataccttgagtgttttaaaagagaaacttgatcattgttcatttacttttattacttagggtttattttacttgagtcatttattattcctgtgcaatgcactaggactgaaaagtcattctattttaagtcacattcaattcatgtggtcatgtttgttaacacaaatgaaattttaggtctgttagaatctaacatgggtataatttatgaaaataatttagttcacataaaattttctaaagagggacaattggggcttgaatacttggctttacctatttgagtacaaatgatggttatatccctgtgccagattaataatttgaatatatttgagttctaagtacactctgaattggtcttaggcaaaattgtgaagtatggagcttgtcctcatcacattcttatt

SEQ ID NO: 84355 - DNA, 1014 bp, Homo sapiens
tccttcattacaatttgcaatatttaccaaaattgaagacacatagcctttaacccaagcaatgctccttctaatgagctaactgatcttcaaagatactgacacatttgagcacaattacatgtactaagtagttcatggtagcagtgatttatggaaaatgcaaattggtttgtctaattcttctacatttgttgaaaaatatatctacaaacacatatatggttgtataaacataatatttctggaaggacacagaaaaattggcagtactaggtgcctctacagagagagtttgagggggactcactgggggaaacaagattgaatttttactatcatccttttggttctaaatgttttctattggcaaacgttgtttttacataacaatcaattaaaatgacaaaaccaaaatgaatgagaatgtgaaatgcacaagcatattttacaatgaaatcctgtgaagtgtttagcactattgactaatggttccttaaaacattagctaagagtttgtttttcagcacctattcctgtgtctaccagctctatcaatagaactccaattaaactcctcttaagctaatttagagagtcaaataccttgagtgttttaaaagagaaacttgatcattgktcatttacttttattacttagggtttattttacttgagtcatttattattcctgtgcaatgcactaggactgaaaagtcattctattttaagtcacattcaattcatgtggtcatgtttgttaacacaaatgaaattttaggtctgttagaatctaacatgggtataatttatgaaaataatttagttcacataaaattttctaaagagggacaattggggcttgaatacttggctttacctatttgagtacaaatgatggttatatccctgtgccagattaataatttgaatatatttgagttctaagtacactctgaattggtcttaggcaaaattgtgaagtatggagcttgtcctcatcacattcttatt

SEQ ID NO: 84356 - DNA, 694 bp, Homo sapiens
acagcagccccttctggtctggcacgtagctgaccagggctgtgaccttggatgagcagggctggcatctggcaagaagccacctgagcagcatgggcttgcagacactcctggcaatgatcccaggctgattttctaagaaactcagaaatttcaggtccagtctgctttycaaagcatttctaatttataccctacataaatgctatgttttttagaaataatctgttacaaaagggggaagcttgcctggtgcaggggaaagagccagaatgcctggctccatcttcagttctacccccatcatggtcaatcattctctgagtcttggttcctcataacatggagaaaatgcctacctcacaggaggatgaaaaaacggagagttagagaacagcacagtgtggatctttacttccaattctagccttaagttcctgaatctacaatctgaataatgtgtttggtgctatgttgaaccctaagtcttaaatgcaatgtcagtctatgcaaaattctacacagtaattttctcacagatcctaaataagttggccctgtcctcattcttgaaataatatattcttgctgtccctggaaaccaaggcatggatacaggggggagggaatgaaaggcagtcatagatcaagtgtctcaaatgtcaataaatggcaaaggagagttatggagcac

SEQ ID NO: 84357 - DNA, 1272 bp, Homo sapiens
gcatgggtgcctggagctcagctagaatgccaaatccattctctcctctctctccctttctgttgcagagacagaggcaagggcaaaaatcgttgcagctctcgtattatgaaccaggatgtttattggtgatttctctataatttgcagggagaaatagaatacgatctaagaacattggattcaactaaatattcaagctttagggttaataaacttgaaaagattttatgtaagaataatgatggctttatctttattgcacaatacacaggtttttaaaaaataaaatactgtcgagcctaatttcttagcctatacttcgggaccaagagtctttccaaggtctggggcaagctacttggtgagtgctggtaaaggagtctactgcatcccaaggcacactgggagcactggtgaagttgaagagtgaaaggtgcggggaatggagttttctctttcgattaacagctgcttaagcagccatctagagaaagcttttacagaaaaattcaggtcaacctataccaggtcaacttctatgccttgaagaataagaatacagcattcccattcagcacataatacaatgctcttcacacagaaataaatcaataaatgctgttgactggtgtctgactttacttaatgtctacccttttcgtgcctcaaactgctttgacagtattcattcactgagtttttgagtaaccctctctaacacacaaaatatctctccttcctcataattacacaaacaaggcaaaggagtcaggagactgggttctttctaggcctccacctatcactaacatkggcagtcatatcacctctatgttgccacaatttattccctgtgaaacagtgtatttgaaccaagcaactttgaaagttaagatttcttccagttccaaaattaaatcttgaacgctgatgacaatgttgctgcaataaatgcaataatatctctctgcactgttattgcagtaccatagtcattattatcatcaccaagtccagtgttgactgtgcttagcactttacatatatgagctcacttaatcctcacctgaggcttaggaagtagttactattactacctgcattttacagacaaggaaacaggcagagagaagctcagtaacttgctggaggtcacacagctgttagcgacggggctgttagttgttgtccattcagttagatttcaaactcttaaagttatgttttctgcttttactattaccctgcagtcccactttcaacatgccc

SEQ ID NO: 84358 - DNA, 541 bp, Homo sapiens
ttcaccatgttagccaggatggtcttgatctcctgaactcgtgatctgcccgcgtcagcctcccaaagtgctgggattacagccgtaagccaccacacccggcccctatctcacatacttycttaaggtttgtattagctcaatctattccccctatttacttaaaatctctttttttgagagagagagagagaaagagagaaagagagagagagagagactcactgggtcacccatgctggaatacagtggtgccttcctgggctcaagtaatccttcctcctcagtctcccaagtagctgggaccacaggcatgtgccaccacacccagctaattttttaaaattttttatttcatagagacaaggtctccctatgttgcccaggctggtctcaaacccctaggctcaagcaatcctcctacctcagcctcccaaagtactaggattccaggcatgagtcaccatgcctggcctacttaaagtcttttcttgatatttaaaattaatcaattttttgatacttaaaattaacagctttt

SEQ ID NO: 84359 - DNA, 702 bp, Homo sapiens
aaaattagccaggcatgctggtgcacgcccgtagtcccagctattcgggaggctgaggcatgagaattgcttgaaccccaggatgcagaggttgcagcgagctgagatcacaccactgcactccagcctgggtgacagagtgagactcatctccaaaacaaaaacaaaacaaaacaaaacaaaagatgaagcggtaactcaggaaacctttatattattgtattattcataaatcaaaataaacctttgtaaaacaaaataactaagtttttaaacattcagtatatagagtagctgcttaaataatttatatctggaatggactcaagtacagaaaattcactgtgtattaacaacagtggtgtcttaatgaaagccagtgctgtgttgttcatcttgttggaggcagtgtggcagaatgatgcaaagctgactcygaagccagactagagaccaaaggattttgagaacagggagacctctcctacctgtgcaggtacatgaaaggcaaggctcctccggactgtacatcggtggaaaacctttagattctgctgccaccttgtggtggtcagattacaacatggtgccccatgctcttgggttttgctagggctcctgcttcattcaggtctattgtagggacaaaaaaaaaaaaaaaaaaaaagacgaaggcaagcatacatagtattttgtatatgc

SEQ ID NO: 84360 - DNA, 702 bp, Homo sapiens
aaaattagccaggcatgctggtgcacgcccgtagtcccagctattcgggaggctgaggcatgagaattgcttgaaccccaggatgcagaggttgcagcgagctgagatcacaccactgcactccagcctgggtgacagagtgagactcatctccaaaacaaaaacaaaacaaaacaaaacaaaagatgaagcggtaactcaggaaacctttatattattgtattattcataaatcaaaataaacctttgtaaaacaaaataactaagtttttaaacattcagtatatagagtagctgcttaaataatttatatctggaatggactcaagtacagaaaattcactgtgtattaacaacagtggtgtcttaatgaaagccagtgctgtgttgttcatcttgttggaggcagtgtggcagaatgatgcaaagctgactccgaagccagactagagaccaaaggattttgagaacagggagacctctcctacctgtgcaggtacatgaaaggcaaggctcctccggactgtacatcggtggaaaacctttagattctgctgccaccttgtggtggtcagattacaacatggtgccccatgctcttgggttttgctagggctcctgcttcattcaggtctattgtagggmcaaaaaaaaaaaaaaaaaaaaagacgaaggcaagcatacatagtattttgtatatgc

SEQ ID NO: 84361 - DNA, 1707 bp, Homo sapiens
cttagacagaaaccccccccgcccccaatactgaatgtattctccttgggtctaatcagcagattaatttcaggccttaggaaaacaaccttaattttattgtgcatcccttttttggtctcatgatagatgctagtctacatacaatgtggtgtgggatttaatccctagcctcacagttacataataaggaaaaagcaattgcagaaacatttcatattaaacatcatataggacttcaagtgacagatctggatagatttcatatttattagggcacatattgctcagcaagttctgagtttttaaataagtagatttaagccattggcaaatagatactaatgtccctaaattctaaacttattattaaatataatcaagctgttttctcctttatatgacatttttcatgttatatttcaacaaagaactaaaataaaacataaacactaagctcagcagaggyatatgagaggcaacaaatattcttttataaaaaacagccaaaaactatgacaaacctgagtttacacaggaatatcagtgtcttagagctgatttttagaagccatataatcatagtgtgatgatttggggagggtatggattttgtcaatacatattttgtcaatacgtattgaatagatatatgaattttggaaaaatcaaaataaatacgtatgttctttagaaaatagattttaaatgttgagaataattcttttagggatcctttaacttttaaaatcatatttttatgagataggttattaatagattattattatagtcttatcttcaaggtactctagtatgaaaacattaaaataaagctggcaagtgtataaaatgatgtgtgttcctctaagtgaaggtggactaatcaaataacttctagaaatttcctgttcttgctatattttgttatgctgatgttttcattcttcatgctggtgctcaaacagctttattctttggtggttataacgtaagagatactggaacagttatctagcctggtttttaaataacagctactactctcatgcatcggtatgacatataacacattctacagggaaagaggtattcctagttcagtggaaaatcctattccagccatttttttcacttgaaaattcaaatggcgactgatgagagagggtcttgactaataagtggggtaaggtttgccttcagctcctttttctaactctagggagctgtgactacagggacatcttttaaaaacaaacatgccagaatttatttatttatttatttatttaaattttttttgagacagagtcttgctctgacacccaggctggagtgcagtggcacaatcttggttcactgcaacctttgcctcccaggttcaagcgattctcctgcctcaggctcccgagtaactgggattacaggcatgtgccatgatgcccagctaatttttgtaattttagtaaagacagggtttcaccatgttggccaggctggtcttgaactcctggcctcaagtgatctgcccgcctcggcctctcaaagtggtaggattacaggtgtgagtcaccacgccctgccaaacataccagaatttataccattgtctgcctctgaaactcctattggcccttcacgattcagctcaggagtgccttctgagcaggccttagcccatgatatcaagtaattaccctattttaa

SEQ ID NO: 84362 - DNA, 1707 bp, Homo sapiens
cttagacagaaaccccccccgcccccaatactgaatgtattctccttgggtctaatcagcagattaatttcaggccttaggaaaacaaccttaattttattgtgcatcccttttttggtctcatgatagatgctagtctacatacaatgtggtgtgggatttaatccctagcctcacagttacataataaggaaaaagcaattgcagaaacatttcatattaaacatcatataggacttcaagtgacagatctggatagatttcatatttattagggcacatattgctcagcaagttctgagtttttaaataagtagatttaagccattggcaaatagatactaatgtccctaaattctaaacttattattaaatataatcaagctgttttctcctttatatgacatttttcatgttatatttcaacaaagaactaaaataaaacataaacactaagctcagcagaggtatatgagaggcaacaaatattcttttataaaaaacagccaaaaactatgacaaacctgagtttacacaggaatatcagygtcttagagctgatttttagaagccatataatcatagtgtgatgatttggggagggtatggattttgtcaatacatattttgtcaatacgtattgaatagatatatgaattttggaaaaatcaaaataaatacgtatgttctttagaaaatagattttaaatgttgagaataattcttttagggatcctttaacttttaaaatcatatttttatgagataggttattaatagattattattatagtcttatcttcaaggtactctagtatgaaaacattaaaataaagctggcaagtgtataaaatgatgtgtgttcctctaagtgaaggtggactaatcaaataacttctagaaatttcctgttcttgctatattttgttatgctgatgttttcattcttcatgctggtgctcaaacagctttattctttggtggttataacgtaagagatactggaacagttatctagcctggtttttaaataacagctactactctcatgcatcggtatgacatataacacattctacagggaaagaggtattcctagttcagtggaaaatcctattccagccatttttttcacttgaaaattcaaatggcgactgatgagagagggtcttgactaataagtggggtaaggtttgccttcagctcctttttctaactctagggagctgtgactacagggacatcttttaaaaacaaacatgccagaatttatttatttatttatttatttaaattttttttgagacagagtcttgctctgacacccaggctggagtgcagtggcacaatcttggttcactgcaacctttgcctcccaggttcaagcgattctcctgcctcaggctcccgagtaactgggattacaggcatgtgccatgatgcccagctaatttttgtaattttagtaaagacagggtttcaccatgttggccaggctggtcttgaactcctggcctcaagtgatctgcccgcctcggcctctcaaagtggtaggattacaggtgtgagtcaccacgccctgccaaacataccagaatttataccattgtctgcctctgaaactcctattggcccttcacgattcagctcaggagtgccttctgagcaggccttagcccatgatatcaagtaattaccctattttaa

SEQ ID NO: 84363 - DNA, 927 bp, Homo sapiens
taaacttccagtttgaggagttttaaatagcaagtaagaaaagagagattggtctttgtaacctccaaaagaacgtggctatattaaaattttcccaataacaaaactgactttaaatacttgccaaaaacagtgactcttttagtcatgagtgtgcttagtttaatcccacacactgatatcacattaagaactgaaggctgaggatatacaggaatcaagggccaatttgggacaacttggccaccacacatctgagttcactcacccatgcttggctaggagtacatttattttatttttaatctattcattttttttctttctaactattattttaggttcagaggcacatatgcaggtttgtwatctggataaattgtgtgtcgtgggggtttggtatgcagattattttgtacgcaggtaatgagcataatacccaataggtagttttgcaatcctcaccctcctcccacccttggccctgccactctcctccctcaagtgggtcccagtatctactgtttccatctttgtgtccatacatactcaatgtttagctcccacttacaagcgagaatgtgtggtatttggttttctgttcctgtactaattctcttaggataatggcctccagctccatccatgttgctgcaaaggacgtgatttagttcttttttacggctgcatagtattctagtgtgtatatgtaccacattttctttctccagtccactgtcaaggggcacctgagttgattccatgtctttgctattgtgagtagtgcactagcagcatatttaagtgatgtgtcccttttcactttcaatttagctttcctggcatacctgcacacccagtaactacttcatatagggcagttactttaataggactcccactctcaagaatgtgctgaggatagaa

SEQ ID NO: 84364 - DNA, 665 bp, Homo sapiens
caagctcttttatgtctcttcttataaggacactaattctattggatcagggcgtgctgtaaactaaattgtgtcctcccaaaattcttacgttgaagccctaactaaatttgactgcatttggagatagggcctacaaggaggtaagtaaggttcaatgagytgataaggatgtggccctgaactaataggactagtgtccttggaaaaaaagaaacaccaaagctttctctgcctgccacatgagggcacagtaaggaggtggccatctgcaaggtaagaagagaaccttcactagaaatggaatcagctggcaccttgatcttgtactttccagactccagaactatgacaaataaatttctgtcatttaaaccacccagtctgtggtgttttgttatagcagcccaagcagactagtacagggcactgctgttattatctcatttaactttatctccttaaaaactccgtttacaaatacagttgcatcggggggggttgcaacttcaacatatgaatttggggggtggacacaatcattcagtatccattgtagtgagttccacagcagtcctgcactgcagagctcagttaggaacttgcttcacagccatctgtagaggacataccgtctacagatgcccacatcttgcccattgact

SEQ ID NO: 84365 - DNA, 531 bp, Homo sapiens
ccaagcamgcttgagtgccaccccgcacacagggctggaaccccagcttccaccatcagggactgattccgttgccctctccttcctgtcctttactgtgaaaataataataataatttgaataataatttccaccaaagctgtgaatgatttgcatttgtatagtgctccgcaatttacaaagtgctttcatgtgcattatctcatttgatcctcccgataatcctgagagaggtcggtagagcaggtattcttgttattcaaacgtttattcattcatttgactaacatttattgagtttctactttatgccaggccctggggatataaagacaagaaaaaaggtgggctccttcctcaaggatttgcaatctgttagcgagagcctactaagtgaggcctagggacaaacggttccacttcacaggggagggacgggaggctgggaggggcccagcaagctgaccacagttgtgagtgacagggccagatcggcccccacatttgctgcatatggctctaagtatgcg

SEQ ID NO: 84366 - DNA, 531 bp, Homo sapiens
ccaagcaagcttgagtgccaccccgcacacagggctggaaccccagcttccaccatcagggactgattccgttgccctctccttcctgtcctttactgtgaaaataataataataatttgaataataatttccaccaaagctgtgaatgatttgcatttgtatagtgctccgcaatttacaaagtgctttcatgtgcattatctcatttgatcctcccrataatcctgagagaggtcggtagagcaggtattcttgttattcaaacgtttattcattcatttgactaacatttattgagtttctactttatgccaggccctggggatataaagacaagaaaaaaggtgggctccttcctcaaggatttgcaatctgttagcgagagcctactaagtgaggcctagggacaaacggttccacttcacaggggagggacgggaggctgggaggggcccagcaagctgaccacagttgtgagtgacagggccagatcggcccccacatttgctgcatatggctctaagtatgcg

SEQ ID NO: 84367 - DNA, 2161 bp, Homo sapiens
atcatctagtccaaagtgccagtagtgccatggttgagaatttctgatctaggacaatgtctcttcattctgtgtcaaataagttaggcaaccaagatacattaaataacttaagttactaaaaagtcctaaatgtttttctttgattttggaataaartaagataccattgacacgagtatatgagttttagtatgttctttagggaggaaaatgtagagcaatgaataaaaaaaggaaaaaaattacaataatgttttgttttcattaggagatccaacttgttttcaaatataaattctcctaagggttgcttttttttttggtcagcttgagtagattcttctaaggaaaagaatatgtcatgtaattatacgtgacaaaattttcaaggttctgttaaagagatacaactaagagaaatgtgttggaacaccctttcttggaataggaagagttgtcaagattgaaaatattatttcattaaatcttacttatccccagaaaatttcaaaagacatcccctccctccccaaataaaattaatggttatcattttgttccagagctcttaaagagcaaagtatttttaaaattttcttgattgctctacttgatcactattagtatgtagttaaaatttttaaaaatgtgcttttaaacaattctggtgaagcttggagtaaatgctacagagatacagaatgttgaaactcaattgactcgtgaacataactaattcagtagaatagaaactccatggaggcagggatcttgtctgtcaggaaattagctctagtctcaattactggaacagtttcttatagatgagataaatccgggaaatattactgggattgacatattcaaatcagttgtgtcagtctgtatatatccagtaaatgtatctgtatttaaacaagtaatacatgcattcagaagaggctgattagaataagaagtgctatcagatagtctacagttgtgttgtatactcaaaaaacccagaataaactagtataggatatgatttctctaatctaaattttttttagatacctgtgacccatatttgctattgagactcatttttcttgctttctttatctagaaatgttgtgtaagctataggctatgaaagttagcatgatgacagtgaattgcacatcttacacatttgccacaccactccccatgctgtgtactactgcagactgactgcttccaccagctagcacatttacccacacaaaatgaagtttcactcaaacaagccgttgtttgattctttcaaggatattttatctatttgaaaatttattcctttgactttcttttagctttatttctgtattcattattgaagtatatttaatttatttagttttcccgcttgaacaaattatagctcataatggagcaggagaaattaaaactgacttggatacatcatttgaaattggtgaatggataatatcttcaccccgaagttttaattttcacctgccgactgatgactcccaatttataactccagttcagctttcttaggcaactccagacctacatttctaactttctactaaaaaattctatttagctttccataggtccccaattacccttgccttaaaccaaaacacactggattgtctccacccaaactcgattttttattttcaccaaaatgaatttattttcccaatttctgagaactgtggcaaaactcacaaaccataattcagtatttatccacaactcaaccttgtttatcagcaagttagaattttgatcactgaataaacaacaggttatttttttcatgactcatgcttgtactctattattgcatggttagcaggtcaccataaaaaataaaaattaggaaaacactggttgtcagtatgaaaatattttaggtctttaggattgctctgtggatatttgctagtattagtagggtaataaaaaaggtaaaattaggagaaggtacttttaattgaaaatcaatgaggacaaatgcttgcccctatttgtatgttgaagggaagctgccagtagaggggagggagaggaggaatttcatgagatgctactctgagaagatgagtagggatgaagttgctgtacaggtatcaggagcagctccactcctgtagga

SEQ ID NO: 84368 - DNA, 1297 bp, Homo sapiens
cctctcagatttctaaacacttttggatttctcttgtggatttgctatcccacttccaggttggtgattcctgctctcctggaatattttctctggaagtcaccagatattcacagttcaccatcaatttagatttttgtgtatcacatctgtttggcttggtgtccaagaaaaatattccaagaattatttgaagccttatgctctgtgtttttatcgcatcacaatttattcaggtggatgatagcttttggcaaatagaaggacgtttttgtttgtgagtcattcatgcacttgccatatgactatggaaagacattgaaaattgatgtctattttatttcaggggaagatgaacaaaccaaggaaataattttccaaacttttaggtacatttaaaagaaatgtcttgaatcctaaatatccccaacagatttaagtaagatccacaggggcaccgacatacctggaacataaagagggaaagaggggagataatagaggggaagggtgaccagccatccaggtttgcctgagactaaaggttttcccaggaagtgggacttttagaacaaaaaactcagggaaagtcctatgcaaaccagaatggttggtcaccctataaagggatccgagaagaaaagaatgtggtggatgttattagcgtgccactcacaagcaattctattacttcatcactcattgtgtcagtgttttccaagcatttactatgggccaagaactgtgctaggcacggggactacaatgaggactaagcctcatggtgcacacagtccacaaagtccgctggctaatagaatctgagagactrgaagtgtgaaggaacctaaatagcttgtagtaaaaactaatttcctctgatttacaggtaagaactctaagactgagaggttgtgaatgactgatgttcttacggtgcattagaccatttagtcagattctcagctcttaaagggcttctctgtttattgcactaaactctctcctcctctgtctcctattagcagctatttgtatttcagcccatggtaaagtaagcccctcatcatactgcatctgtggcagctaagaatataaatttacattctcctatttctaccttgagttctaggcatcagattaaattacaactcattcctgaaataagaacaaaaatttacagaggaacgctgagataacgcattgacaaacaagagggagaattattcatatagaaatatatacattgatcttttgtgtgtatatacactcagatcaaacctacatattttcatct

SEQ ID NO: 84369 - DNA, 722 bp, Homo sapiens
taaactaattaattttactttgcataatgagtgctttttctgaggttgaagtaaaattttagtatgttaactagccacaacgcaaaagccactataattcagaaaaattgattgtagctttttagtaatatcatgacagaatgaatgaatgattttaatttggtataggtataaatgtattttagccacccaaattattctaatgcaattccttaggaattattcttgtcagtatgctttctaaatgtctcgacatctacaatttgaagggttattcaagaacaatttgatagttttcccacttccttcctcaaccctcaaacatttccattgtatctcaaaattgtaagagctagtatcagtggtttagtttaaaactataaactatagtggtaatatagccttttagttgtgaggacagcaaatgatggccaagaggaggaaagtctccttgagtgcaatattcaaagtacaatgcaaggtctcaccacaagtaactaacccagtataaatggttttgatggtcaagaccgtaacccaacctttctctgtgtaatggtatagaagtaagtatgtgttataaaacaattatgtacattggtttttatttccttacattgattgtttcaagttgcatttgactttctcggtgctatagaacaagatggarcacattgcacagaattaacgagattatctttgtaatcaggaaccttaaattt

SEQ ID NO: 84370 - DNA, 2071 bp, Homo sapiens
atgctctccctcccctttcccccacccccaaacaggcccctgtgtgtgatgttcccctccctgtgtgcatgtgttctcattgttcagctctcacttatgagtgagaacatatggtatttggttttctgttcctgtgctagtttgctgaggatgatggtttccaacttcatccatgtgcccgcraaagacatgaactcattcttttttatggttgcattatggctgcatagtattccatggtgtatatgtgccacattttctttatccagtctctcattgatgggcttttgtgctggttccaagtctttgctattgtaaatagtgctgcagtaaacatacatgtgcatgtgtctttatagtagaatgatttataatcctttgggtatatacccagtaatgggattgctgggtcaaatggtattcctagttctagatccttgaggaatcgccacactgtattccacgatggatgaactaatttacactggggaaaagattcactatttaataaatggtactgggaaaactggctaaccatatgcagaaaacagaaagtggacccctaacttacaccttatacaaaagttaattttaattagagagaaaactgcttacctatccatccaagttagtccattacttttttttttttttactaatgacaaatatgttccattatcataactagattccagttctgagtgtgtcagtttctggaaaaaaaaaaaaggtttctgtgcagagcttatttcagtctttgaaagatgtactgtggttcattatttctgtcttaattaatgtcttagtctcttagtatctatttcttctcgcacagttcctttgggctgccaggcacatgaattctttattcttgctgacgatataactatgtttcctaagtagaagaaactcatccattctttatttaatttttttgccattatcaacctctaatgtaaacaatattctttattgctgggaataaatgcaaaaaatagaatacagggtgttttgtggaaagataggtcccctttgattggcaaagacaatggataatgcattcatcttctaatatacaggcaagtcaagggccccagactttagaactttagacacggaaaaggttaaaaagtcaaataggaaagagaattttgttgaaatgctgagcaaaaaatattacaaatattacaaagttgctgtaacatttctgtgacagttaatctctgggaactggagatatcgctcctaaacctaattgtatatttttctttcttttctgactgaagaagtgattagacatagagatagaaatgacagagcaggacttacagacataattttttggatttcacaagaacacattgcgcagtgaaaggtgaaatatgccacgtgtaaatgaaatttactttatcacgagtgacataaaatcacttatcatggccaggaagtacatggttccactagagttcaaggtgtatacactgttctgccttgacaacattcaccttctcaagatctctgaagcatatactcaatcttcaggcaaatgttttatacacattgttttcaaagaagatcctggtacaagcttaattggagtggcccgttgtgtcttgaatacagggaatccaatgatttataatgacaaacacaaataaagttgcatcacaagggactcaccttgagtgaaattaacttaaggagtgaaaacacacagatggaagaataatatgttaaacacgataatagattcagcttgctattctatttaaatcacgtgtgctctggagtgactgtgagatgaggaattcatctttccttctgttggtttcagttctctctctcaaagtgtgaacatctcaggctgagggtggttctagtctttcaagatacatcgtttttgtatcagataaatcccaaatgccagtcaacttgctcatctattgtttatttgaagaaaaaaatcagtcagatctaatgcaggagaaaagatggcagtgtcagacttaatgaaagatgtatatctctcacagatgctttattaaaaggttgccaagggtccttttggcca

SEQ ID NO: 84371 - DNA, 592 bp, Homo sapiens
cttagaaaccccttgtggcctcggaggcgcctgcctgcctccctgagaatggaaccctgttgggccgccaggctcgctgggcaggtgctggggaaggctgggtcaccgtgctgagcccctcacaggcctgggagttgtgcttggggaggagagctcccagctctttggctgcctcccaatcatggccacatctcacaaacaataccactgtccacgaaaaatgaaaaggtgcctggttctaacccatggccccaaccatgaaagagcccttagaatgtgggggtttgactcgaacagtggctttgagtctcccaggggggattagtgtcctaatgccctgagttaatgaattgacttgttggacagggaaactcagtgaggttcattttctgtggggggacgtttgtcaaatgctgtgaaatcagttgtagcatacgcgacgctcagctgctccgacagtgactcagccacggctccagctgcttccccagccctgtagtggaggtggcagatggtgtcatcagcctggcgcagagggctgtgcccrctggcatcacaagggccaggcctgctggtcctccagccactggat

SEQ ID NO: 84372 - DNA, 1735 bp, Homo sapiens
aaaggctccaaggcccaggcctcgggggagcagacacaggactcagggtctggctccttactccagaggagccccccactccgccaagaggtgcccctggacccctcagccctcatcctcttcctgacccacagagggctggagtgcactcccactccctcccagagctgccccactgcactctggactggctgagctggagaggatgatcacgcggggcctccagagtccctaccaccaggtctgcgagctcatttgcctggagaactcacacagcatctcgggggtccggatcctccccatcaactacctacgccaggtaggcccagccccaccactgtgtgccccccaccagcctgatcctggcttcctgtgcccctggcccatcctggggttcagtcccctctgatttatgccatgggcacccatcagcggccagacctgtcacaggaaggacacatgtgtggtcctaggctgagacacaaagggaattattaccccaggtcagggcccctagtccctgcaccagcccaacagcagagatgcccccacccccaagtccccagagctgagtcccagagcagcaccaggacctgctgccctggcgcagaaacgtgtgccccatgaggctgcaggaacaagctcgtgtgagtgccctccacctggtccttgccacccacgtgcgaggtgaggaggccgcagtgtctgarctctgctgtttaccagacactagttaggcagcagcctaactctccaagccttgcgttccttgcctgtgaaatgggagcagcggcgtctccctcgagttgttgtgcagcctaaatgaggtgacacacatttacccttggcccacggtcgtttggcccatgctcagtgtgcgacaaagctgggttaaatgtgcacccccagatcctcccagagcccagcatggaggcttaggcagcacagcctgactgcttgggtcccagatcaccagagccagtcaccagccaggtctcctgatccctcctgattcctcaggcagctaagcccaggaccctcctccctctatgcctccctcaggcctggcccctctgactctgcctgcacctcacccccaggtgcacctcctggcccagacctatggggcctgggtccacctggacagggcccagctgatgaacgtggtgctggccctgcatgtcccgcccacctacattgtggagcactgtgactctgtgtctttctgcctctccaaggtgggaaagccctgggctggcctcccacagacaggtggggtggggcgccccagcaggaggcagggttggattcctgagctccatccctggcagctggccccaggttcccctttaacacctctgcagatggggctacgcatctgtccccaccctggcccaaggacagggatgtgagctggcaggagtctctcctctccacctcccagggcctgggcgccccagtggggtccctggctgggaggcccaaggacttcattgaagaagcctggcgcctccaaaaagccctgggtggaagcatgcaccaggtggggatgctggctgcggtggccctggtgggactggttgacacaaagcaggcactgtggcaagaccatgggaacgcccagagattcacccaaggtgcctggacaggacgccccaccctcgcttccctgtgcttcctctgacttggcctgagctgtgccgtcgggggtcccccagcaggcctgcaggcttct

SEQ ID NO: 84373 - DNA, 641 bp, Homo sapiens
ccctgcatccccwggaagcatccccccaggccccagcccccttccccctgcagcttcgcttccagaaacagcatccacacctcctgtcctccctactcccatctcccacccttgcctgcagaacttaaaactactagctccaggtccttggctctttcccctccctcagacccctctcctgccccagcaccaaccccggcttacaggcaggcagaaagacctccgaaggcacagagcgtcttctagggtgccactcgactccgtccttctctcttctagccccatggaggactaagccagtggcaaggaaggggatgggggtgaggaggaaatgcaggcctgatagggattccagtgaccgggaatcccctggacacaagcccttatcgcctcactccacggctttcccccaggccctctttgtggttctctcttccgctttccttttacacaggggagatgggggtggactcctccaaacagccttctgccatcttttaaaaacctctccagggccgggcgcgtggctcatgcctgtaatcccagaactttgggaggctgaggcgggcggatcacctgaagtcaggagttcgagaccagcctgaccaacacggggaaaccctgtctctactaaaaataca

SEQ ID NO: 84374 - DNA, 2295 bp, Homo sapiens
cttgatcctggggggcggaggttgcagtgagctgagatcatgccattgcactccagcctgggtgacagagtaagattctgcctcaaaagaaaaaaaaaaaagtctgggcacggtggctcacgcctgtaatcccagcactttgggaggccaaggcgggtggatcacctgaggtcaggagttcgagaccagccttaccaacatggtgaaaycctgtctctactaaaaaaaatacaaaattacccgggcatggtggcgcatgcctgtaatcccagctacccgggaggctgaggcaggagaattgcttgaacccgggaggcagaggttgcagtgagctgagatcgcgccattgcactccagcctgggcaacaagagtgaaactccatctcaaaagaaaaaaaaaggggcacaggaatgagatttttggagagtaaaataattcacaaaaaaatgttagacttttgtcttaggacaaaagaagggttcttaggagggcagtgggtcttgctgggtccagatacctagaagcatcctccactagctgccagaactcagcagagagtgagacactgacaggatgaccaagaggccaggctgagactctctgtgaaggagatgcccagctgagtgcctcctctcctacaggagattgcatcctacctgatcacctttgagaagcatgatgagtggctgtcttgtgccccaaagacaaggtgagaaagtttgagaacatgggggagtggcaggggtcctgggttctgttcacagaactccagggcaacccttcccttcccaggcctcagaatggctccatcatcctctacaatcgcaagaaggtgaaatatcggaaggatggttacctctggaagaagcggaaggatgggaagaccacccgagaggaccacatgaagctgaaggtccagggcatggaggtaagagagtcagacattcagctcatcttcccgagcctgccctcctccacccttagctgggctctagcctgacctgggcttggtggcattgtccacctcagtcccctcccagttactcttcccttctcactcactttgggtcggctgacattgctttggccactctccacttcccatttccctccgtgactcaactatccaggccgtaggccatgcctcccttccagaacactgatgcccaggcccctcactgctcttgtgtttccctcagggatcccagcaatgatgctctcagcacaggtttctcttccccaaatcattgcccctcatctcagatgcattcttgctctgccctctggtttctagatagtcccgtatctcaaatctggtcctcactataaggccccagccccactgctcatctatgactcagggtggctgggattcaaaaggggtggggaataggtgggggcgagggtgggggaagggttgaagaggaactggtggaaagattgggattcctgcaaagggactgaacagaggaagagttggggagcagactagccctccccccaccccagcctgtctcctggcagtgtctctatggctgctacgttcactcttccatcgtccccacattccatcggcgctgctactggctgctccaggtaaggacggaagagcccagggagccaccctcttcctgactctttgagggacacgggtctgaaagaaggaagtgaaaggatggctgagttctgagtgaggaaaggagcctgggaagaagagaaaggggcttggggatggagagagtcagaaattgggggcgaggttaggagggtgcccaggaagaaagtgaggattaggaagccaagcccctggacctcaggaccccatggctctgtgtgtccccttatactctcagaaccctgacatcgtccttgtgcactacctgaacgtcccagccctggaggactgtggaaagggctgcagccccatcttttgttccatcagcagcgaccgtcgagagtggctgaagtggtcccgggaggagttgttgggacagctgaagcccatgtgtaaggcagcagggtggggatagagctccaaggggagagtagaaacagggctcccagaggggccatggttctggacccaaagcctgagggctgatcatctccctccaagctgggagggtgctaggattcccggtgtgttctcaggtattagaatacggagaaaggactaaagcaacatatctgagcagtcttgaggctgctggcctctgttcacctggccagaagtcttgaagcatgtcaggtgcttggaggagccatcaaggtactctggggcctgtttcgtgggg

SEQ ID NO: 84375 - DNA, 716 bp, Homo sapiens
agccttgcaaaaatttcccctcacctacaaagccagtggaagagataagacaggtaggcaggataaggtcagggcagaacatggaagaatttagggctagaagggacaagcaaagagaagcagaggtaagaagggaagtgggtttttggggaggtgtgagggtggagatagggagtggaaggaacggaaatgggcagggcttctgccacagccttatacgggcactggaggccccagggcctaaagccccagccccttggtaccggtttcttccttctctaactgaatcctccccattcctcccatttttctgctctgtccacatcccctataarcaaagtctgtccctctattgtttcccacaattatttcacttaatcatctttgctttccatctcctctcccgtcttcgttgtatttatgcataaaagcagaagaaaagacagcatctcaagctgaaaccttcctactgccatctttatttttattattatttttttgagaaagggactccctctgtcgcccaggctggagcacagtggtgcaatctcagcccccgacaacctccgccttcctggttcaagtgattctcctgtctcagtctcccaattagctgggactacaagtgcacaccaccatgcccagctaattttatttttttatagagatggggtctcaccacattgcccaggctggcctgaactcccggggtcaag

SEQ ID NO: 84376 - DNA, 716 bp, Homo sapiens
agccttgcaaaaatttcccctcacctacaaagccagtggaagagataagacaggtaggcaggataaggtcagggcagaacatggaagaatttagggctagaagggacaagcaaagagaagcagaggtaagaagggaagtgggtttttggggaggtgtgagggtggagatagggagtggaaggaacggaaatgggcagggcttctgccacagccttatacgggcactggaggccccagggcctaaagccccagccccttggtaccggtttcttccttctctaactgaatcctccccattcctcccatttttctgctctgtccacatcccctataagcaaagtctgtccctctattgtttcccacaattatttcacttaatcatctttgctttccatctcctctcccgtcttcgttgtatttatgcataaaarcagaagaaaagacagcatctcaagctgaaaccttcctactgccatctttatttttattattatttttttgagaaagggactccctctgtcgcccaggctggagcacagtggtgcaatctcagcccccgacaacctccgccttcctggttcaagtgattctcctgtctcagtctcccaattagctgggactacaagtgcacaccaccatgcccagctaattttatttttttatagagatggggtctcaccacattgcccaggctggcctgaactcccggggtcaag

SEQ ID NO: 84377 - DNA, 934 bp, Homo sapiens
tgcatgcttgctaacttgggcttcagctgttgttaaaagaaaacctgcagatagagcgaaagggcaaaagggtgacatctggcataacagactttctaagatggttttggcatacagcctgcattaaacagcagaggctaaaaaaaaaaaaaaaaacaaaaaaaactattgaaataaagagaaaaaaaatgaggacaatacaacattgacttgcaatctttagcaaacttatttaaaaccagtgcaaccattttgttgttgttgtgaccgaaaatgggccatcacctctaatattggctctgaaagaggagaatgagattgtgtgatattttctcaagtggaggtggtgaattcttgtcataaattcagagacackgtacacttgacttcaccttttcacctgggtgtgtaatgcacagaaacatccgcattatcatgggttctcctctgcttgacttgttaggatacttgttaaacatagtgcatcaagtgctgcttgaggtaataaagaatatattttatcttcgaaacaacagtggcatggaaattatgattcctgtagcttgagaagaaaataatatactgcttgatacaaacaacggacaaattaggataaagcttctaaatcctgtaattacccaagacactgaaagataagaatcactgtagagaattacctttgcaggaagcaggtttaagactcgcaatttcatgggcttctattttgcttaaactatagtattttgcctgcatctgctcagcttggaggtgagtgggtgagagggaggtaggagtatagctattgattctggatgatcaataacctattgtttgacagctccaagacggtcattctgctggattccgagtgagtgaatcctttggttagttctgatctgagcagtctcaatcagtttgtgcttgttgctttgat

SEQ ID NO: 84378 - DNA, 691 bp, Homo sapiens
agctctgggctggaagtgatctatatctaaattgtgattctgcttttatgtcagtcccttcactttgtaggggcacaattttcttataaaactcatggaattgggttgggttggctcttggttctgtcctacctggaaagtcatgggattctatggtttctgtggatccgtgtaactttttaataccaatacatccccagggacactataaatttctcttactatgctatttgtgtaagatcttttcaagtactcctacacataaatgaatctggcataattttaaaaatattctaccttatcagctcctcattgcttttgggtaaggctagtcccctagaccagatgagatccagaatctgcatgggtagttcaagatgatttgtggaagtgctcaccarttttttttttttttcagaatgcaatagcacgtgctgtccatcacttatttattcctttttttcccctcagagatgtgactgaatacttagcacctagtgcagggcaatgattacatctatggccatttcagaagataaatcaaagtgcttttcttcattctccctgcagggaaaatgctagagtagcaagaatctattaaagaaatagcttggaagaagtccaaccattgtttacaagtttgtagtgacatgaatcccaggtctgtcacaaattacttatggttactctt

SEQ ID NO: 84379 - DNA, 691 bp, Homo sapiens
ggttaataccattgggttggcatttcatctctgggcaggaatgcattagctatcaccactcacttgtcactctgcctcttataatttagcttgtgcttcttgtcccatggatcagcaaggctccagctctccagcacctctcatttcccatgcaatagccagagccttgtgccttcccaatcagagtccaatttaagttgtttgtcactacatccaaaccattaatggagcagatattttggtcttatatggtcccttgtgtctgttggttgttcagaacccaaaagagagatgtcatcaatcaaaccgccaaatccccaaaatggagagccagatttccactttgttttwgcaaaaaactgaacattttctcccttcctaagggctatttctagtgttctaatttcccttggatatgctggcagatgtaaaactagataggttaaacctcttacgtattcattcaggctatgtcaaaccctcaacaagatgttcttactctagtgggtccacagatggggtgcaagggcccatgaatctcttaaatgcaggagcatatatactttttttctagcatatataattatttttctaggggacaaaaccttttcactgattcctaaatacttccataacataaaaaggttccaatgggaccctcgaagaagaaacaattatagtgtaggacaga

SEQ ID NO: 84380 - DNA, 747 bp, Homo sapiens
aatatgtttgtacatatctttcagtggaaaagccacaaatttctcttggttatataattaagagtggatttgttgggttatcaggtcatttgactctataaaatgctgccgaattgttttcccaagtggttgaacaaaattactttctcttcagcaatgtaagaaaattccagtttctccatacccttgccaacactacatattaccagtttttaaaaactgtggctgtctcagtaggtgtgacgtggtatatcagtgtggttctactttgcatttctctgatgactaatcattttgagccattttacatgcttattggctgtgtcttttctgaagtgcctgttcaagtatttgccaatttttaaaattggccctttttttcttattagttttaaaagtttcttcaatagtctgtatacaagatctttgtactataaatcacttcttatctgtggatttcttactcacatatttaataatttttctgaggtcacagaaatggtcttyaattaaagaagctttttaaaaaaatgcaaatggttccatattaatagaatgcaagtgggtgtttgggctggttgctgcttatggccacctcatacagagttcccagcatgacatgaaactaactcacaaagctatcattatattgtcagagaaaccgtgctctataccattttcatttcgaagcaggaataaaaagtttccttgtgcatactgaccaagaaatatctttgattatgatta

SEQ ID NO: 84381 - DNA, 607 bp, Homo sapiens
caaaggaaagggactggatgttgtgaactgtaagtatgggaaggttagtttcttacggtgaaaactttaaccaataggacacagttgacaggagcaatccaggcaaataaatagcaggcctcagaagaaaatctctatggcttctatgaaacatgcatccaaaaagcatgtggggtggtaaatctctatgagaatttaaggtcatatcaccattgtttcctttctgcactaataggatgttcagtgttctgacatttttgtatagcctgtctggagtcatcctgcatgattgagtataaacacctgtgtcttttcttgacctactgagaagcagtggccagcatgttaaactatctccttgtacagttatctccggtatcaccaaggkattggttccaggaccccccaaggataccaaaatccatggatgctcaagtctttcagtcagcctttgaggacccatgaatatgaggggccaacttcttctcctttttcccccctcactcttggtgcccagagattgaatttcccaagtaaagtactattgaatgaaataccatttcctttgagcaaatgcctgcccatgtctttctgtctgaataggaga

SEQ ID NO: 84382 - DNA, 422 bp, Homo sapiens
acttataatcctagcattttgagaggtcaaggtgggaggatttattgagaccaggggattgagaccagcctggcaacayaatgatatcccatctctaccaaaaaaaaaaaaagtagtttctagcacatagtaagtatttaataattgttagcttaattattgttaccattattattaatattagaactcatgtcatgctagggccaaaaaggcttctacttatttcattttacaaaagcagaacctgattgagaagtgctgacattctcaaactaggcagtagatctaggtctaagtaagtccaggtctctagatttccattccttctctgtcttttctgtgtcatgatgtttggatctcatctacttataaggagccagccctgcccattgtaatgtgtaacacagaaataaagcccagca

SEQ ID NO: 84383 - DNA, 769 bp, Homo sapiens
ggatcccagagaawgatctagaaacatatatctaaataatgtagcccatttgaataattacgatatatgataattaactgatctttggaaagaccaatttttagtatttttgactaagaatatcttgagagtaaagaatctataaaaattaaaattaaattcaactgagtttaataagtaacctatgaatagaccaaatagatggaattattttgcatttgtattttagtgtgtgtttttaaattcctgatgctctgcaattgtaagtaatatgtctttgcaatttgtgaatttctgctcagctcttgttttagaagtccaaagtgacattgtatctggaagcaagcttgctgtgcataaacctgtagcaatttttggagaagagaagcaagttacagaaccggaagaaaagcaaatgcaagaagatcctctaacaacggaaaatgcttccagtgaaattctgtaagtaatcagtgtagcctgaaaagctacctggctgctttttgaactcagctcattagcccgataacagcacagagcccatgcagggagctcatgccaagtttgtgaaactaatggcagctgaagagctagtatttaattagttttccggcaaaatgatacaactacagcttcgatgttcaaccatcacagtgatctattttcagtaatattgttacaatgttattatttttaagaggctagaattttaggatagtaggcatttatttgaggaattcatcaaattttgtttccataatcattgact

SEQ ID NO: 84384 - DNA, 732 bp, Homo sapiens
ccaacaatgcaggataaaataggcaatattgtaatatgaagcatgggggttggtgaagtattagaatgagattcaatattaggattcttggctaactatctgagtggccatagacaaattatttaatttctttgggcctgcaatttgaggagagaggattgtatcaataattcaaaacttgtttatgtaacggaacacacagaatgtagtaaaatattaacctattaatttgtaataaccacatatccgattttgtgctagaccagataccaccttaccatcttatactaagttctagaataaacaaatgccagcaagtcccaaagtcatttttaaaatgtctttgtgaaaaaaataaggaagatctatacaattatttctgtgaatgggtccaagtcttccctgtcttcatttttagtagcaggatactgaggttccctaaagcatagtttgaataccaatcaaatagctatccaaggtttgttgttgttttttttttccagcccactatgaccgcttcacactagtgagcaggtgagttgaaatatctgtatacaacccatagatatcaaacatatctacaaaaatatcttttgaataggaaagacayggttgtggacgttgcttcttgtgcggctcagtatccttcaccatcctctggcaacctgaccttagtttctgtgtgagaaccagcaacctcttagtctcagtccatgtgattccagtgaagtt

SEQ ID NO: 84385 - DNA, 282 bp, Homo sapiens
cctggccaacctggcgaaatgccgtctctactaaaaatacaaaaattaggcaggcgtggtggcacacacctgcaatctcagctactggggaggctgaggaatgaaaatcgcttgaacccagaaggcagaggttgcartaagccaagattgggccactgcattccagcatgggtgacagaacaagaccctgtcatattaaaaaaaaaaaaaattatcgagtaatttgcttttttcttccctgctttaaaatgctatgtacaaaattttgtacacttgctcatg

SEQ ID NO: 84386 - DNA, 557 bp, Homo sapiens
tttcacaatgtcattattctatgtaccttagatttttctcttttccttttcctccttgccctcattcactccctagtcagtctttcccatgtccaagagtctctcaatgtcttctatcttcttgtcccccaatctccctaatatgaggtctcagttctgaaaatatctggctgggctgtgcctgtgtagacttcctaccccctgggaggtcaaggaaggagcctctgactcactcacctttctgaaactggaggagaaagaggagaagctgagcaagaggtttcatggtggcaggactgacctggtttgccttgaagatcgcgaggagttaagaggaaggcaaaagagaacattaagtcctgttctgcagcatgaacagctaatagattaaactctctttgttccccatgctgatcacatgatcacatttgctaaccacttctctctctttctttctttctttctttctttctttctttctttctttctttctttctttcttycttcctttcttttcttttcttttcttttcttttcttttcttttcttttcttttc

SEQ ID NO: 84387 - DNA, 557 bp, Homo sapiens
tttcacaatgtcattattctatgtaccttagatttttctcttttccttttcctccttgccctcattcactccctagtcagtctttcccatgtccaagagtctctcaatgtcttctatcttcttgtcccccaatctccctaatatgaggtctcagttctgaaaatatctggctgggctgtgcctgtgtagacttcctaccccctgggaggtcaaggaaggagcctctgactcactcacctttctgaaactggaggagaaagaggagaagctgagcaagaggtttcatggtggcaggactgacctggtttgccttgaagatcgcgaggagttaagaggaaggcaaaagagaacattaagtcctgttctgcagcatgaacagctaatagattaaactctctttgttccccatgctgatcacatgatcacatttgctaaccacttctctctctttctttctttctttctttctttctttctttctttctttctttctttctttctttcttyctttcttttcttttcttttcttttcttttcttttcttttcttttcttttc

SEQ ID NO: 84388 - DNA, 557 bp, Homo sapiens
tttcacaatgtcattattctatgtaccttagatttttctcttttccttttcctccttgccctcattcactccctagtcagtctttcccatgtccaagagtctctcaatgtcttctatcttcttgtcccccaatctccctaatatgaggtctcagttctgaaaatatctggctgggctgtgcctgtgtagacttcctaccccctgggaggtcaaggaaggagcctctgactcactcacctttctgaaactggaggagaaagaggagaagctgagcaagaggtttcatggtggcaggactgacctggtttgccttgaagatcgcgaggagttaagaggaaggcaaaagagaacattaagtcctgttctgcagcatgaacagctaatagattaaactctctttgttccccatgctgatcacatgatcacatttgctaaccacttctctctctttctttctttctttctttctttctttctttctttctttctttctttctttctttcttcctttcttttcttttcttttcttttcttttcttttcttttcttttyttttc

SEQ ID NO: 84389 - DNA, 954 bp, Homo sapiens
ggaaacttcaagtcacctgcaaaatgtcagtaaaactacatacagtgaaagaaagaaccttgaagagtccattttgatgtcagacagcatgggaaatcgtatagcattgagtcttaacaatggcccttgatcaaatttaaccaaaggcaagttgtcttgactcaaaactttccagaaagagaaataaaatcaacttaatccatttgggtagcaaacagactttggtgtgttttttttgtttttgtttttttgttttttcatatcctacagaatattttttaagcaaaaaaaatgtttaaaggaatagggctaatcctaggtcaattttaaataaattctgttttgtccaaaagcagtgccaagttcacatcaagcacaagaaaaccagagtaaacaccagacagttgaaagtgtgattgtctctgcccttgaaggccacatggtactgagtagcagccataaaagctctgtgaaaagtaaattcagtcagaacgcagacacccccctcctctaatggagacagaccaaggagagatggaggatttgcttttgacttgggataggatttttattctaccacacacaaggcagtaagacagtgatcaagactgacacctccttaggattttaaaatatacccaagccccagaggtggcatgggtggggggaaagcaagggaaggaatgaggagatgttggtcgaagggtacaaagtttcagacagacaggagcagtcattttgagatttgtcgccctgcaggatgactatcgtcaagtaaagaacttgctcgcacgcatgaaatttcaagctagacattgggttttttggaacagtttctttccttgccaggtcaatatccttatataagttacttaaacttctctaagcctctataaaaaasagttaataataatcctcctgcatagagttgtgaggattaaatgtcttcatgca

SEQ ID NO: 84390 - DNA, 752 bp, Homo sapiens
ttaaaagttaaaaaaagaataaaggacaaccgaactacttttacatgactcttttggtttcctcatgttctgaaacttttgtctcattcttcagctttttaaaactgtgttgtttgtttaaaaaaatcagttagttctagctcagtggacagaaccaccttggatgtaagtgcctaaacccctttcatcccagtcacatgggatggctcttctgttggttgcttattgtgggatctttgtgctgctggtgtgagcatgggctatgtactttacatgggatagacctgagttctgtgtcctgcaggagattctgcttcttccccagctacaaccgcagrcggataggcagaactatttttggacaagaagctcctatctggctcctagctttaattgcagaacctgattttgagtcatgtgacttgtatcagctttgtttgctagcaattccatcagaccattaaggccctggtctcaacctcccataggtagacccagattcctttgagccattagacttaagtattcattattactgagttcctttctatttctaatccatggagatttttttcttgtcttcaactacacacgtatgtttatacatctatacctatacatactttctacatctatacctatatccattgtctttaatctatcattttaagtgctagctgctggaaaggggaggttttcacatgctctcaatatgccatcttgatctgggtactctcttaatgctggcaaaa

SEQ ID NO: 84391 - DNA, 752 bp, Homo sapiens
ttaaaagttaaaaaaagaataaaggacaaccgaactacttttacatgactcttttggtttcctcatgttctgaaacttttgtctcattcttcagctttttaaaactgtgttgtttgtttaaaaaaatcagttagttctagctcagtggacagaaccaccttggatgtaagtgcctaaacccctttcatcccagtcacatgggatggctcttctgttggttgcttattgtgggatctttgtgctgctggtgtgagcatgggctatgtactttacatgggatagacctgagttctgtgtcctgcaggagattctgcttcttccccagctacaaccgcaggcggataggcagaaytatttttggacaagaagctcctatctggctcctagctttaattgcagaacctgattttgagtcatgtgacttgtatcagctttgtttgctagcaattccatcagaccattaaggccctggtctcaacctcccataggtagacccagattcctttgagccattagacttaagtattcattattactgagttcctttctatttctaatccatggagatttttttcttgtcttcaactacacacgtatgtttatacatctatacctatacatactttctacatctatacctatatccattgtctttaatctatcattttaagtgctagctgctggaaaggggaggttttcacatgctctcaatatgccatcttgatctgggtactctcttaatgctggcaaaa

SEQ ID NO: 84392 - DNA, 752 bp, Homo sapiens
ttaaaagttaaaaaaagaataaaggacaaccgaactacttttacatgactcttttggtttcctcatgttctgaaacttttgtctcattcttcagctttttaaaactgtgttgtttgtttaaaaaaatcagttagttctagctcagtggacagaaccaccttggatgtaagtgcctaaacccctttcatcccagtcacatgggatggctcttctgttggttgcttattgtgggatctttgtgctgctggtgtgagcatgggctatgtactttacatgggatagacctgagttctgtgtcctgcaggagattctgcttcttccccagctacaaccgcaggcggataggcagaactatttttggacaagaagctcctatctggctcctagctttaattgcagaacctgattttgagtcatgtgacttgtatcagctttgtttgctagcaattccatcagaccattaaggccctggtctcaacctcccataggtagacccagattcctttgrgccattagacttaagtattcattattactgagttcctttctatttctaatccatggagatttttttcttgtcttcaactacacacgtatgtttatacatctatacctatacatactttctacatctatacctatatccattgtctttaatctatcattttaagtgctagctgctggaaaggggaggttttcacatgctctcaatatgccatcttgatctgggtactctcttaatgctggcaaaa

SEQ ID NO: 84393 - DNA, 1265 bp, Homo sapiens
tgcatactgttaggccaagagcagatgatgacagtgggaagttgaatacctaagacagagaagaagccaactgtcttcatctgtgtgggctgctaaaacaaaatacaagtggcctatagacagcacaaatttatttctcacagttctggaagctggaaagcccaaaatcaaggctccagtagatttggtstctggtgagggtctactttctgattcatagatggtgccatctcgctatgtcctcatatagtggatgaggcaagggctctctctggggcctcttttacaatggcactaatctcattaatgagggctctaccctcatgacccagtcactttccaaggtcccacctccaaatatgatcacaatggggattcgatttcaacatatgaatttgggggggacataaacattcagaccgtagcaccaacctacatacttccaggtcccttctcagaaactctccaatcaaggaagtcattcttacatcttgagagaggagagtaaggagatgggaccagaatccaggagtattatcttaatggagtgcccatatgccacttggaaacataaaactggcagaggatgacaccaatccccaacctcctcaaaagaagactacgtcctgttcaatgtcatttctcttccacatagcataatgtatggcatgagttgatagctacagtgagtattcattggccatataagcatcatcaatagttttagtgtagacttgcctacatagaagatctgggccagtgacctcttgggatttcttttcattgtcatgatcttaaggttaacttctgagtggctgcatttttcacactgtgttactgtataaagataacaatttggtgccctacagttataatttagtcagcatattttgtctggtctgtccaagattttagaagattttgatttaggacatcagaaaattttcaggaactcatgagtttccattgtatctttaaaagtcaggagatactgtcttaaaataagcttgccttccgaaatgccatgcacagaccatttgagagctaagcagcagttagttgctcctttaaatgcggcatgcccttgcatgtgggcctcagtgacccgccccctgcccttattgtcttataccaaacctcattctttgtggttatatttcctgatggcttctataatggtttgattgtatgactcttgtacaatgtttcagacaaattacaaatgtgggtcttccctggaatattcaaagtaatttttctctaaa

SEQ ID NO: 84394 - DNA, 1291 bp, Homo sapiens
acagctgagagaagcagaggcttccttgccaatacatctgcttttttcacactgttcataagacagctcacactctctaagtgagaccagctttccccagggtgccacaactgaaacattccggataaaatagtacataacattcagaggttgraatcttcctgccccagcttttttctttttcttaacctgtgacttgcaaaaagagaaaaatccatatattctgatttcatggaaataaatgttaggaacaactgtataatatttgactcattataatctataaacatgaatgatacaagattttagaagtgcataatgcctgaggattggattatctgagaggtttcacttaaacaagggcctttcacctcaaaatcatcatttagaatctagacatggatgatgataaaataaactcctgacccctaagattttttccagttctaaatgcttggtagttctatgattctactgctgttttgtggctggaaatatttgcacagcttcagtgaattctgaggaacagaatatatatacaggcataccataaaggaagatattacaattgtccaagaataaagtcatttttttctgcctggggaaatgacaagtctaaatagatgtgactaaatgttgaaagagatgccaaaagggctcataatctatccttatagacaccttggatccccatggtaaatgttcaaagaaataaacttttgaaaacaaaaatagatgaaaaagccttgccctttaaaatataaccttatcagattcaacagattaatgttctagtaaatcatagagtatttgttgtggagggcctgtctattttcttttacagtttacagaaatctagtggtttccagtaaggaggtgcatgtacccagggggctcttaagacagtccattgaggccaggctcagtggctcacatctgtaatcccagcactttgggaggccgaggtgggcggatcacgaggtcaggagatcgaggccatcctggctaacacagtgaaaccccgtctccactaaaaatacaaaaaaataaacgtcttcttttgagaagtgtctgttcatttcctttgcccactttttcatggggttgtttgtttttttttgtaaatttgtttgagttcattgtagattctggatattagccctttgtcagatgagtaggttgcgaaaattttctcccattttgtaggttgcctgttcactctgatggtagtttcttttgctgtgcagaagctctttagtttatttagatcccatttgtcaattttgtcttt

SEQ ID NO: 84395 - DNA, 1291 bp, Homo sapiens
acagctgagagaagcagaggcttccttgccaatacatctgcttttttcacactgttcataagacagctcacactctctaagtgagaccagctttccccagggtgccacaactgaaacattccggataaaatagtacataacattcagaggttgaaatcttcctgccccagcttttttctttttcttaacctgtgacttgcaaaaagagaaaaatccatatattctgatttcatggaaataaatgttaggaacaactgtataatatttgactcattataatctataaacatgaatgatacaagattttagaagtgcataatgcctgaggattggattatctgagaggtttcacttaaacaagggcctttcacctcaaaatcatcatttagaatctagacatggatgatgataaaataaactcctgacccctaagatttkttccagttctaaatgcttggtagttctatgattctactgctgttttgtggctggaaatatttgcacagcttcagtgaattctgaggaacagaatatatatacaggcataccataaaggaagatattacaattgtccaagaataaagtcatttttttctgcctggggaaatgacaagtctaaatagatgtgactaaatgttgaaagagatgccaaaagggctcataatctatccttatagacaccttggatccccatggtaaatgttcaaagaaataaacttttgaaaacaaaaatagatgaaaaagccttgccctttaaaatataaccttatcagattcaacagattaatgttctagtaaatcatagagtatttgttgtggagggcctgtctattttcttttacagtttacagaaatctagtggtttccagtaaggaggtgcatgtacccagggggctcttaagacagtccattgaggccaggctcagtggctcacatctgtaatcccagcactttgggaggccgaggtgggcggatcacgaggtcaggagatcgaggccatcctggctaacacagtgaaaccccgtctccactaaaaatacaaaaaaataaacgtcttcttttgagaagtgtctgttcatttcctttgcccactttttcatggggttgtttgtttttttttgtaaatttgtttgagttcattgtagattctggatattagccctttgtcagatgagtaggttgcgaaaattttctcccattttgtaggttgcctgttcactctgatggtagtttcttttgctgtgcagaagctctttagtttatttagatcccatttgtcaattttgtcttt

SEQ ID NO: 84396 - DNA, 1977 bp, Homo sapiens
tgcatattcatagctcctcctatatcctgttaaatatgcctacttggctaacccgttcaagcttaaattcctaccttactctcccttcctcaaagtgctggctttctgttttaagccaggggctgtgctttctgcctgcaggttgtaatccccttcaaagaaataaagctctcttttctaaatttgtatatactgctaacaatatctactataaaaatatcatcagcataactcaagattatcagcgataacgcaccaatttcagatccagtggtgataactgtaataggatgccctggaaaatcatcagaggcataggttttatgagcttggaaaatctccttcattgttgatatgtttttgaattaacaaattttacctggtagttaaggaagcttctrgaagacaaataaagcaaatgatcaatgtttttacatataaaaacatactggaaggctttgaggtagagggagatgttatgatgcaaaatcaaggaagaaccttagaactgaggagaaaatctagtctgagagaaggagatcggtatgcaaagctaaactcaaattctcagtattgttggaaaataatagttctgcatgtaatgtaggggatcttaatctgactcagtgtaacagacactgaaatatgatgctcaatcccctactttagaacttttccccagctgccagaatattgtctaccaatgactcagctgagtctgcttcctggtaccactcctggcaccaaatgtcttacgttgagtccttctctggaaatttccctcagaagaggagaactgccttagtgaaggatataccctaatcactctgtgattggctgaggcctctgttgcactgcattgtgattcgatttttccctttgcctaatccctctttccttgctcccttataggtgataaaggattaggagatccaattacaagatcccaatagccatcctgccacaaagtgtctggatctgaaacagatgcatcattgctgctaatctggagttgtactggtggtacttttatagcagatatctagccatttacttgggtagctctttgacttgagaaaaaaggaatactcagatacttcatggactgttggccatagggttcctgctgacattgatatctggtgatccaaagtgttatcatgactccctggttagagttggaacacagatgggccaggtagcaaatgaaggagtcctgggccacatttgcaaagagtgcgtccacgggaccatgcacacactggtcccacgtggaatattgaaatggatgcacttaatatttgtcagaaaactcactttgatttcttgatgggttggctaagaattattatggtggataagcccaaatccaagcagttcaacgtcttcctctgtgtagtcctggctctttttgggctgaaagagaaggctctttttcagacagtgatgtgcttgtaaatatttaacaattgaatctccagggggaaaaaagcctctatttgtcaaattttccaaattctaagatgtcatctcccactatggccaatttaaaattaccaacttgctgtcattgagtgcagagttggcaagagatgtgcataactgcaaatcggtacaggttggcttcagcctactacggcagtgtggtttctgactgtgctcctcaggtttatccagtatgaagatacctgctcagagttcatttctggaaaactctatccaaaatatccagccatttctcatgttccatacatctggtatatatggtacatctagaaatccgaaacatctcaaggtccaagtgaccatgttataggatctagttttataaaactccatgcaaaccagaaatattcactcccatacccatttttttagtgcagtgacaagcagaaaccctgaatgaagcagttgtggcattggtgctatgggtgtgtgaagaaacatgctaagcatgacagctgtcttagctaagca

SEQ ID NO: 84397 - DNA, 1977 bp, Homo sapiens
tgcatattcatagctcctcctatatcctgttaaatatgcctacttggctaacccgttcaagcttaaattcctaccttactctcccttcctcaaagtgctggctttctgttttaagccaggggctgtgctttctgcctgcaggttgtaatccccttcaaagaaataaagctctcttttctaaatttgtatatactgctaacaatatctactataaaaatatcatcagcataactcaagattatcagcgataacgcaccaatttcagatccagtggtgataactgtaataggatgccctggaaaatcatcagaggcataggttttatgagcttggaaaatctccttcattgttgatatgtttttgaattaacaaattttacctggtagttaaggaagcttctagaagacaaataaagcaaatgatcaatgtttttacatataaaaacatactggaaggctttgaggtagagggagatgttatgatgcaaaatcaaggaagaaccttagaactgaggagaaaatctagtctgagagaaggagatcggtatgcaaagctaaactcaaattctcagtattgttggaaaataatagttctgcatgtaatgtaggggatcttaatctgactcagtgtaacagacactgaaatatgatgctcaatcccctactttagaacttttccccagctgccagaatattgtctaccaatgactcagctgagtctgcttcctggtaccactcctggcaccaaatgtcttacgttgagtccttctctggaaatttccctcagaagaggagaactgccttagtgaaggatataccctaatcactctgtgattggctgaggcctctgttgcactgcattgtgattcgatttttccctttgcctaatccctctttccttgctcccttataggtgataaaggattaggagatccaattacaagatcccaatagccatcctgccacaaagtgtctggatctgaaacagatgcatcattgctgctaatctggagttgtactggtggtacttttatagcagatatctagccatttacttgggtagctctttgacttgagaaaaaaggaatactcagatacttcatggactgttggccatagggttcctgctgacattgatatctggtgatccaaagtgttatcatgactccctggttagagttggaacacagatgggccaggtagcaaatgaaggagtcctgggccacatttgcaaagagtgcgtccacgggaccatgcacacactggtcccacgtggaatattgaaatggatgcacttaatattygtcagaaaactcactttgatttcttgatgggttggctaagaattattatggtggataagcccaaatccaagcagttcaacgtcttcctctgtgtagtcctggctctttttgggctgaaagagaaggctctttttcagacagtgatgtgcttgtaaatatttaacaattgaatctccagggggaaaaaagcctctatttgtcaaattttccaaattctaagatgtcatctcccactatggccaatttaaaattaccaacttgctgtcattgagtgcagagttggcaagagatgtgcataactgcaaatcggtacaggttggcttcagcctactacggcagtgtggtttctgactgtgctcctcaggtttatccagtatgaagatacctgctcagagttcatttctggaaaactctatccaaaatatccagccatttctcatgttccatacatctggtatatatggtacatctagaaatccgaaacatctcaaggtccaagtgaccatgttataggatctagttttataaaactccatgcaaaccagaaatattcactcccatacccatttttttagtgcagtgacaagcagaaaccctgaatgaagcagttgtggcattggtgctatgggtgtgtgaagaaacatgctaagcatgacagctgtcttagctaagca

SEQ ID NO: 84398 - DNA, 1977 bp, Homo sapiens
tgcatattcatagctcctcctatatcctgttaaatatgcctacttggctaacccgttcaagcttaaattcctaccttactctcccttcctcaaagtgctggctttctgttttaagccaggggctgtgctttctgcctgcaggttgtaatccccttcaaagaaataaagctctcttttctaaatttgtatatactgctaacaatatctactataaaaatatcatcagcataactcaagattatcagcgataacgcaccaatttcagatccagtggtgataactgtaataggatgccctggaaaatcatcagaggcataggttttatgagcttggaaaatctccttcattgttgatatgtttttgaattaacaaattttacctggtagttaaggaagcttctagaagacaaataaagcaaatgatcaatgtttttacatataaaaacatactggaaggctttgaggtagagggagatgttatgatgcaaaatcaaggaagaaccttagaactgaggagaaaatctagtctgagagaaggagatcggtatgcaaagctaaactcaaattctcagtattgttggaaaataatagttctgcatgtaatgtaggggatcttaatctgactcagtgtaacagacactgaaatatgatgctcaatcccctactttagaacttttccccagctgccagaatattgtctaccaatgactcagctgagtctgcttcctggtaccactcctggcaccaaatgtcttacgttgagtccttctctggaaatttccctcagaagaggagaactgccttagtgaaggatataccctaatcactctgtgattggctgaggcctctgttgcactgcattgtgattcgatttttccctttgcctaatccctctttccttgctcccttataggtgataaaggattaggagatccaattacaagatcccaatagccatcctgccacaaagtgtctggatctgaaacagatgcatcattgctgctaatctggagttgtactggtggtacttttatagcagatatctagccatttacttgggtagctctttgacttgagaaaaaaggaatactcagatacttcatggactgttggccatagggttcctgctgacattgatatctggtgatccaaagtgttatcatgactccctggttagagttggaacacagatgggccaggtagcaaatgaaggagtcctgggccacatttgcaaagagtgcgtccacgggaccatgcacacactggtcccacgtggaatattgaaatggatgcacttaatatttgtcagaaaactcactttgatttcttgatgggttggctaagaattattatggtggataagcccaaatccaagcagttcaacktcttcctctgtgtagtcctggctctttttgggctgaaagagaaggctctttttcagacagtgatgtgcttgtaaatatttaacaattgaatctccagggggaaaaaagcctctatttgtcaaattttccaaattctaagatgtcatctcccactatggccaatttaaaattaccaacttgctgtcattgagtgcagagttggcaagagatgtgcataactgcaaatcggtacaggttggcttcagcctactacggcagtgtggtttctgactgtgctcctcaggtttatccagtatgaagatacctgctcagagttcatttctggaaaactctatccaaaatatccagccatttctcatgttccatacatctggtatatatggtacatctagaaatccgaaacatctcaaggtccaagtgaccatgttataggatctagttttataaaactccatgcaaaccagaaatattcactcccatacccatttttttagtgcagtgacaagcagaaaccctgaatgaagcagttgtggcattggtgctatgggtgtgtgaagaaacatgctaagcatgacagctgtcttagctaagca

SEQ ID NO: 84399 - DNA, 1977 bp, Homo sapiens
tgcatattcatagctcctcctatatcctgttaaatatgcctacttggctaacccgttcaagcttaaattcctaccttactctcccttcctcaaagtgctggctttctgttttaagccaggggctgtgctttctgcctgcaggttgtaatccccttcaaagaaataaagctctcttttctaaatttgtatatactgctaacaatatctactataaaaatatcatcagcataactcaagattatcagcgataacgcaccaatttcagatccagtggtgataactgtaataggatgccctggaaaatcatcagaggcataggttttatgagcttggaaaatctccttcattgttgatatgtttttgaattaacaaattttacctggtagttaaggaagcttctagaagacaaataaagcaaatgatcaatgtttttacatataaaaacatactggaaggctttgaggtagagggagatgttatgatgcaaaatcaaggaagaaccttagaactgaggagaaaatctagtctgagagaaggagatcggtatgcaaagctaaactcaaattctcagtattgttggaaaataatagttctgcatgtaatgtaggggatcttaatctgactcagtgtaacagacactgaaatatgatgctcaatcccctactttagaacttttccccagctgccagaatattgtctaccaatgactcagctgagtctgcttcctggtaccactcctggcaccaaatgtcttacgttgagtccttctctggaaatttccctcagaagaggagaactgccttagtgaaggatataccctaatcactctgtgattggctgaggcctctgttgcactgcattgtgattcgatttttccctttgcctaatccctctttccttgctcccttataggtgataaaggattaggagatccaattacaagatcccaatagccatcctgccacaaagtgtctggatctgaaacagatgcatcattgctgctaatctggagttgtactggtggtacttttatagcagatatctagccatttacttgggtagctctttgacttgagaaaaaaggaatactcagatacttcatggactgttggccatagggttcctgctgacattgatatctggtgatccaaagtgttatcatgactccctggttagagttggaacacagatgggccaggtagcaaatgaaggagtcctgggccacatttgcaaagagtgcgtccacgggaccatgcacacactggtcccacgtggaatattgaaatggatgcacttaatatttgtcagaaaactcactttgatttcttgatgggttggctaagaattattatggtggataagcccaaatccaagcagttcaacgtcttcctctgtgtagtcctggctctttttgggctgaaagagaaggctctttttcagacagtgatgtgcttgtaaatatttaacaattgaatctccagggggaaaaaagcctctatttgtcaaattttccaaattctaagatgtcatctcccactatggccaatttaaaattaccaacttgctgtcattgagtgcagagttggcaagagatgtgcataactgcaaatcggtacaggttggcttcagcctactackgcagtgtggtttctgactgtgctcctcaggtttatccagtatgaagatacctgctcagagttcatttctggaaaactctatccaaaatatccagccatttctcatgttccatacatctggtatatatggtacatctagaaatccgaaacatctcaaggtccaagtgaccatgttataggatctagttttataaaactccatgcaaaccagaaatattcactcccatacccatttttttagtgcagtgacaagcagaaaccctgaatgaagcagttgtggcattggtgctatgggtgtgtgaagaaacatgctaagcatgacagctgtcttagctaagca

SEQ ID NO: 84400 - DNA, 1977 bp, Homo sapiens
tgcatattcatagctcctcctatatcctgttaaatatgcctacttggctaacccgttcaagcttaaattcctaccttactctcccttcctcaaagtgctggctttctgttttaagccaggggctgtgctttctgcctgcaggttgtaatccccttcaaagaaataaagctctcttttctaaatttgtatatactgctaacaatatctactataaaaatatcatcagcataactcaagattatcagcgataacgcaccaatttcagatccagtggtgataactgtaataggatgccctggaaaatcatcagaggcataggttttatgagcttggaaaatctccttcattgttgatatgtttttgaattaacaaattttacctggtagttaaggaagcttctagaagacaaataaagcaaatgatcaatgtttttacatataaaaacatactggaaggctttgaggtagagggagatgttatgatgcaaaatcaaggaagaaccttagaactgaggagaaaatctagtctgagagaaggagatcggtatgcaaagctaaactcaaattctcagtattgttggaaaataatagttctgcatgtaatgtaggggatcttaatctgactcagtgtaacagacactgaaatatgatgctcaatcccctactttagaacttttccccagctgccagaatattgtctaccaatgactcagctgagtctgcttcctggtaccactcctggcaccaaatgtcttacgttgagtccttctctggaaatttccctcagaagaggagaactgccttagtgaaggatataccctaatcactctgtgattggctgaggcctctgttgcactgcattgtgattcgatttttccctttgcctaatccctctttccttgctcccttataggtgataaaggattaggagatccaattacaagatcccaatagccatcctgccacaaagtgtctggatctgaaacagatgcatcattgctgctaatctggagttgtactggtggtacttttatagcagatatctagccatttacttgggtagctctttgacttgagaaaaaaggaatactcagatacttcatggactgttggccatagggttcctgctgacattgatatctggtgatccaaagtgttatcatgactccctggttagagttggaacacagatgggccaggtagcaaatgaaggagtcctgggccacatttgcaaagagtgcgtccacgggaccatgcacacactggtcccacgtggaatattgaaatggatgcacttaatatttgtcagaaaactcactttgatttcttgatgggttggctaagaattattatggtggataagcccaaatccaagcagttcaacgtcttcctctgtgtagtcctggctctttttgggctgaaagagaaggctctttttcagacagtgatgtgcttgtaaatatttaacaattgaatctccagggggaaaaaagcctctatttgtcaaattttccaaattctaagatgtcatctcccactatggccaatttaaaattaccaacttgctgtcattgagtgcagagttggcaagagatgtgcataactgcaaatcggtacaggttggcttcagcctactacggcagtgtggtttctgactgtgctcctcaggtttatccagtatgaagatacctgctcagagttcatttctggaaaactctatccaaaatatccagccatttctcatgttccatacatctggtatatatggtacatctagaaatccraaacatctcaaggtccaagtgaccatgttataggatctagttttataaaactccatgcaaaccagaaatattcactcccatacccatttttttagtgcagtgacaagcagaaaccctgaatgaagcagttgtggcattggtgctatgggtgtgtgaagaaacatgctaagcatgacagctgtcttagctaagca

SEQ ID NO: 84401 - DNA, 1977 bp, Homo sapiens
tgcatattcatagctcctcctatatcctgttaaatatgcctacttggctaacccgttcaagcttaaattcctaccttactctcccttcctcaaagtgctggctttctgttttaagccaggggctgtgctttctgcctgcaggttgtaatccccttcaaagaaataaagctctcttttctaaatttgtatatactgctaacaatatctactataaaaatatcatcagcataactcaagattatcagcgataacgcaccaatttcagatccagtggtgataactgtaataggatgccctggaaaatcatcagaggcataggttttatgagcttggaaaatctccttcattgttgatatgtttttgaattaacaaattttacctggtagttaaggaagcttctagaagacaaataaagcaaatgatcaatgtttttacatataaaaacatactggaaggctttgaggtagagggagatgttatgatgcaaaatcaaggaagaaccttagaactgaggagaaaatctagtctgagagaaggagatcggtatgcaaagctaaactcaaattctcagtattgttggaaaataatagttctgcatgtaatgtaggggatcttaatctgactcagtgtaacagacactgaaatatgatgctcaatcccctactttagaacttttccccagctgccagaatattgtctaccaatgactcagctgagtctgcttcctggtaccactcctggcaccaaatgtcttacgttgagtccttctctggaaatttccctcagaagaggagaactgccttagtgaaggatataccctaatcactctgtgattggctgaggcctctgttgcactgcattgtgattcgatttttccctttgcctaatccctctttccttgctcccttataggtgataaaggattaggagatccaattacaagatcccaatagccatcctgccacaaagtgtctggatctgaaacagatgcatcattgctgctaatctggagttgtactggtggtacttttatagcagatatctagccatttacttgggtagctctttgacttgagaaaaaaggaatactcagatacttcatggactgttggccatagggttcctgctgacattgatatctggtgatccaaagtgttatcatgactccctggttagagttggaacacagatgggccaggtagcaaatgaaggagtcctgggccacatttgcaaagagtgcgtccacgggaccatgcacacactggtcccacgtggaatattgaaatggatgcacttaatatttgtcagaaaactcactttgatttcttgatgggttggctaagaattattatggtggataagcccaaatccaagcagttcaacgtcttcctctgtgtagtcctggctctttttgggctgaaagagaaggctctttttcagacagtgatgtgcttgtaaatatttaacaattgaatctccagggggaaaaaagcctctatttgtcaaattttccaaattctaagatgtcatctcccactatggccaatttaaaattaccaacttgctgtcattgagtgcagagttggcaagagatgtgcataactgcaaatcggtacaggttggcttcagcctactacggcagtgtggtttctgactgtgctcctcaggtttatccagtatgaagatacctgctcagagttcatttctggaaaactctatccaaaatatccagccatttctcatgttccatacatctggtatatatggtacatctagaaatccgaaacatctcaaggtccaagtgaccatgttataggatctagttttataaaactccatgcaaaccagaaatattcactcccatacccatttttttmgtgcagtgacaagcagaaaccctgaatgaagcagttgtggcattggtgctatgggtgtgtgaagaaacatgctaagcatgacagctgtcttagctaagca

SEQ ID NO: 84402 - DNA, 1977 bp, Homo sapiens
tgcatattcatagctcctcctatatcctgttaaatatgcctacttggctaacccgttcaagcttaaattcctaccttactctcccttcctcaaagtgctggctttctgttttaagccaggggctgtgctttctgcctgcaggttgtaatccccttcaaagaaataaagctctcttttctaaatttgtatatactgctaacaatatctactataaaaatatcatcagcataactcaagattatcagcgataacgcaccaatttcagatccagtggtgataactgtaataggatgccctggaaaatcatcagaggcataggttttatgagcttggaaaatctccttcattgttgatatgtttttgaattaacaaattttacctggtagttaaggaagcttctagaagacaaataaagcaaatgatcaatgtttttacatataaaaacatactggaaggctttgaggtagagggagatgttatgatgcaaaatcaaggaagaaccttagaactgaggagaaaatctagtctgagagaaggagatcggtatgcaaagctaaactcaaattctcagtattgttggaaaataatagttctgcatgtaatgtaggggatcttaatctgactcagtgtaacagacactgaaatatgatgctcaatcccctactttagaacttttccccagctgccagaatattgtctaccaatgactcagctgagtctgcttcctggtaccactcctggcaccaaatgtcttacgttgagtccttctctggaaatttccctcagaagaggagaactgccttagtgaaggatataccctaatcactctgtgattggctgaggcctctgttgcactgcattgtgattcgatttttccctttgcctaatccctctttccttgctcccttataggtgataaaggattaggagatccaattacaagatcccaatagccatcctgccacaaagtgtctggatctgaaacagatgcatcattgctgctaatctggagttgtactggtggtacttttatagcagatatctagccatttacttgggtagctctttgacttgagaaaaaaggaatactcagatacttcatggactgttggccatagggttcctgctgacattgatatctggtgatccaaagtgttatcatgactccctggttagagttggaacacagatgggccaggtagcaaatgaaggagtcctgggccacatttgcaaagagtgcgtccacgggaccatgcacacactggtcccacgtggaatattgaaatggatgcacttaatatttgtcagaaaactcactttgatttcttgatgggttggctaagaattattatggtggataagcccaaatccaagcagttcaacgtcttcctctgtgtagtcctggctctttttgggctgaaagagaaggctctttttcagacagtgatgtgcttgtaaatatttaacaattgaatctccagggggaaaaaagcctctatttgtcaaattttccaaattctaagatgtcatctcccactatggccaatttaaaattaccaacttgctgtcattgagtgcagagttggcaagagatgtgcataactgcaaatcggtacaggttggcttcagcctactacggcagtgtggtttctgactgtgctcctcaggtttatccagtatgaagatacctgctcagagttcatttctggaaaactctatccaaaatatccagccatttctcatgttccatacatctggtatatatggtacatctagaaatccgaaacatctcaaggtccaagtgaccatgttataggatctagttttataaaactccatgcaaaccagaaatattcactcccatacccatttttttagtgcagtgacaagcagaaaccctgaatgaagcagytgtggcattggtgctatgggtgtgtgaagaaacatgctaagcatgacagctgtcttagctaagca

SEQ ID NO: 84403 - DNA, 897 bp, Homo sapiens
  misc_feature (1)...(897): n = A,T,C or G
aggctggagaatcacttgaacctgggaggcagaggttgcagtgagctgagatcgcaccattgcactccagcctcggcgncgagggcaaaactccctctcaaaaaataaaaaataaaaataaataaataaaaacaaaatttgaggcttaaacaattaagcttcgtgcatctctttaattttttttttttaactctaatttcatgacagattaagcttcatgcatctcaaaaatgtgtagaaccctcattcccagccttccctccctctctcttgtccttctttctgatttcttggaatcggaaggaaaattcggatatccaggaaccatcacacaggaggcacccatgtgatgtgtccaacatcactccacgcaggtgtccttgggtcctgggtgcccaggttcctgtgaattgtgaccccaggcagaagcgtgasgatccgcagaggaacccacctacccaaagccagggaacagccagggctggcatcctcagggtgactgtgctccagggcacctctgacttgtgctgagtaaaatggacaaagccagcaatgcacccataacccagattcttgagacaccgctggactttgggaatcccaggcattaggctcgtggcagtgtcatcatggctaggctgggggcagtgtcatcatggtgcttgctggccaagtcaggacacggcctaagccggaatctgctggtgctggtacaagcggtgagtgggcgtgtgggtgggggttgcggttagggtgtggacatcccagaatccaggacgctgttcacaattcgtccatactccctgctcccctcccttacagcacttccctcccgaggcctcctgagcctctaacccccagataaggaaaggggtggactcagttgaagtccagtgt

SEQ ID NO: 84404 - DNA, 897 bp, Homo sapiens
  misc_feature (1)...(897): n = A,T,C or G
aggctggagaatcacttgaacctgggaggcagaggttgcagtgagctgagatcgcaccattgcactccagcctcggcgncgagggcaaaactccctctcaaaaaataaaaaataaaaataaataaataaaaacaaaatttgaggcttaaacaattaagcttcgtgcatctctttaattttttttttttaactctaatttcatgacagattaagcttcatgcatctcaaaaatgtgtagaaccctcattcccagccttccctccctctctcttgtccttctttctgatttcttggaatcggaaggaaaattcggatatccaggaaccatcacacaggaggcacccatgtgatgtgtccaacatcactccacgcaggtgtccttgggtcctgggtgcccaggttcctgtgaattgtgaccccaggcagaagcgtgacsatccgcagaggaacccacctacccaaagccagggaacagccagggctggcatcctcagggtgactgtgctccagggcacctctgacttgtgctgagtaaaatggacaaagccagcaatgcacccataacccagattcttgagacaccgctggactttgggaatcccaggcattaggctcgtggcagtgtcatcatggctaggctgggggcagtgtcatcatggtgcttgctggccaagtcaggacacggcctaagccggaatctgctggtgctggtacaagcggtgagtgggcgtgtgggtgggggttgcggttagggtgtggacatcccagaatccaggacgctgttcacaattcgtccatactccctgctcccctcccttacagcacttccctcccgaggcctcctgagcctctaacccccagataaggaaaggggtggactcagttgaagtccagtgt

SEQ ID NO: 84405 - DNA, 620 bp, Homo sapiens
tgctctcccctaccccagtcctttgatccttagaacaagggtccccaaaccctggaccggtaccggcccatggtctgtgaggaatggggccacacagcaggaggtgagtgatgggagagtgagtgaagcttcatctgtctttatagctgctccccatcactcacattaccgtctgagctccacctcctgtcagatcaggggtggcattagattctcataggagtgcgaaccctyttgtgaactgcacatgcaggagatctaggttgcacactccttatgggaatctaatgcctgatgatctgaggtggagctaaggcagtgatgctagtgctggggagtggctgcaaatacagattaacattagcaaaagccgggtgcagtggctcacgcctgtaatcccagcactttaggaggccgaggtgggcagatcatgaggtcaggagttcgagaccagcctggccaacatagcaaaaccccgtctctactaaaaatacaaaaattagctgggcatggtagcgtgtatgcctgtagtcccagctactcgggggcctgaggcagaagaatcgcttgaacctgggaggcagaggttgtggtgggccaagatcgtgccactgcattcc

SEQ ID NO: 84406 - DNA, 633 bp, Homo sapiens
tataagagatcccatgtgtctggtatttctaaagtgccaggcactgatctaagccctttttatgtttaaagtcatttaaaatttacaacaaccttatgaggtagacagaaactgagggcagacagtgttaaataacatgctgaagagcagacagcaaggaaacaagctttgaacacatgccctctgcgctgtgagctacccaggacccattgcattataccacatggcattgaaagaagcagcagttctttgtcttctcaaaccaacaatctccaaacccagagacccacctccagccacaaagatcttaaatggagaatatacaactaagagcttgaaagaatattaaagcagtaagcttasaggtcaggctttgactagcacaacaccttccaaaggcaataaaaagtaaaggccttttgtccaaggaaaatccccagtggctcttgggccccactgaaggaactccagcaggcttacatgagacttctgcatgacctttaagggttaggaaagtcacagaaaagaaatcacattccctgggctgttggacacacataatgatactcataggatgtgtctgctgagcacacacaggaggcagttagcagggtgggggtcaagctgagatgg

SEQ ID NO: 84407 - DNA, 691 bp, Homo sapiens
tgcatctgttggttgcatttgctctgaattcacaaactaaggttgtwtttatagcattttgcaaagttctacaggtggctaggtaatatcaactaacattgattaaatggacacaaaatgtttttaagtgatactgataggtaatctccaatttgtagactcgtcaaagtagatattatgatcctaatattattgaagatgatcacagtaactatagtaaactaggatttactgagtgtatactacaggacactccctgtgctcagtgcattatctgcgcagcctcaatcagtcttctgagtttattgttcctgttttttcatgaggaaattgaagcctgagagcttgtgcaacttgcctaagattaaacaagtagaaaaagttagaggtaagactggaatctggatgactccattgcctggacaattacccctgtatcacacttccagagtaccttcataagggctgcactaaagtcaagtgttggccttgagtttggctccaatttgtagttcaagtttgctttgactttgggctttggaaggccaagtagctaaaggctcattgtagtgtcatttgtggcatccttgaactctccatgaacaaatcatcatcacgtagttttcattgtctctaatcaatataatcaacattagtagtgtgaacaaaacttgtcatttgtatttattgt

SEQ ID NO: 84408 - DNA, 691 bp, Homo sapiens
tgcatctgttggttgcatttgctctgaattcacaaactaaggttgtatttatagcattttgcaaagttctacaggtggctaggtaatatcaactaacattgattaaatggacacaaaatgtttttaagtgatactgataggtaatctccaatttgtagactcgtcaaagtagatattatgatcctaatattattgaagatgatcacagtaactatagtaaactaggatttactgagtgtatactacaggacactccctgtgctcagtgcattatctgcgcagcctcaatcagtcttctgagtttattgttcctgttttttcatgaggaaattgaagcctgagagcttgtgcaacttgcctaagattaaacaagtagaaaaagttagaggtaagactggaatctggatgactccattgcctggacaattacccctgtatcacacttccagagtaccttcataagggctgcactaaagtcaagtgttggccttgagtttggctccaatttgtagttcaagtttgctttgactttggrctttggaaggccaagtagctaaaggctcattgtagtgtcatttgtggcatccttgaactctccatgaacaaatcatcatcacgtagttttcattgtctctaatcaatataatcaacattagtagtgtgaacaaaacttgtcatttgtatttattgt

SEQ ID NO: 84409 - DNA, 1069 bp, Homo sapiens
gcatgtattttaattaatcttacttggactaatgacagaaaatactactgagaaaatattttcacaagaaactataaagtacactgcttgaaattagcaagacttctgaaaaggggcgtaaatgaaaagcaaatacctccggaaaacctcttctcaaatttgggactctctaggtttcttagttcagggcccagacggcctccaacctgcaagtgtgcaccagagtgtgcagggtcactgtccctccagcaaccctgaccctttatgcttatattgacgactttgcctctcatgctcactcatatactgaggattcagagatgaataaaataattttttaacagagggcaaaatgtaacaatgcctgtaagagaaagcagctagaattataagggtgggaggaattgattttggtagatcagacgcggctctgaggaggacatggaatttaaatccagctctgatggatgatagcccatggtgaatcaggtttaaccgttaattttatggcaaaaccgcaattacttttgcaccaacctaatataatgccttatttcrtcactgtttccagtgaggtggtattcctaattttgccctagctgttacactctactgtcttctaggtgggagttcttagtcaatctgaatgaaaggtgtcttaattagtagtttaaagaacactcttcttttaaagataatttatgatttaaagaacaattttctattatattttgaagatacctaaatcaaagaaaaacctcctctcatgtggaaatttccctagtcacacactgaggtgaacgtggacttcacatatatatttagatccaaggcaaggagaattgctagacatcttaaacaaggttggtataccacagatttttgtactatttgtgttttacaaaaagctgtagtagccaagaactcctcagctgatgtattgcaatttgggacttggtaggcttggttttgaaacttcttttactcatgtaaagttgtaaatggaatagattcttgttcttatagacttttatttcttcacaaacatagaaccatacactctgatctg

SEQ ID NO: 84410 - DNA, 672 bp, Homo sapiens
agatgtgactggattacataaatacagagatagccacttctgatttacatgtatggcatacatgcatccctatgactttgattaaatttcatgtttcattttaatggatttgaataaatcactttaacgaatgttgtattcatttaccttaatttgattagaccattgcatatgagagaaatctgttctgaaattgctcatgttaatcacaaaattgcatcctaatgtagtgactaaaagcacgttttcttttcaaaagacaatyatgtcacatgccattttaatcaaattaggcagagcaattcctctgtagcaagatagtgctgaaaagcaagtttgtgacccagctttccttcttttgcagcctgctggatgactcacactgtcatatgctctggtttaccaggcactgtctatgagtctttctgggttatagattccaatcaatatcatgcaaaaaaaaattatgtgtgtgtaaaagagggggagagagggtaagtgaggaaacatactgagaatctgacagcaatacagagggctctaacttttaaacctgtggtttgtgatttcaaatattcaacatgtgttaagtgaagtcatgcaatcttcctgaggaaaattgttgactgagagaggtggatggtgtacctctgcaatgcttgtcatcatggt

SEQ ID NO: 84411 - DNA, 672 bp, Homo sapiens
agatgtgactggattacataaatacagagatagccacttctgatttacatgtatggcatacatgcatccctatgactttgattaaatttcatgtttcattttaatggatttgaataaatcactttaacgaatgttgtattcatttaccttaatttgattagaccattgcatatgagagaaatctgttctgaaattgctcatgttaatcacaaaattgcatcctaatgtagtgactaaaagcacgttttcttttcaaaagacaattatgtcacatgcmattttaatcaaattaggcagagcaattcctctgtagcaagatagtgctgaaaagcaagtttgtgacccagctttccttcttttgcagcctgctggatgactcacactgtcatatgctctggtttaccaggcactgtctatgagtctttctgggttatagattccaatcaatatcatgcaaaaaaaaattatgtgtgtgtaaaagagggggagagagggtaagtgaggaaacatactgagaatctgacagcaatacagagggctctaacttttaaacctgtggtttgtgatttcaaatattcaacatgtgttaagtgaagtcatgcaatcttcctgaggaaaattgttgactgagagaggtggatggtgtacctctgcaatgcttgtcatcatggt

SEQ ID NO: 84412 - DNA, 711 bp, Homo sapiens
catctgatctagaaaaacatataataagacattgaagtaacttttaattcttatattctgacactttaaattataattgtcaaagaataatttttccagacattttagtcagcagtatcagacttcctagagatttattcacaaaatttctaggtagatcaatgatctgtagttaatctacagagtaacaggattagattgaacagcacttccaggtctttcccacatagttttgtcctggagactagccatgaaatcaaggaatttcagagtgtatatgtggcgagggaggcagtgggtagtagggagtctgtggatactattatcgtccccattttacagatgcatgccaayaataaagtcaagagaagtttaataacttttcaagaatacacaactaatgtatggttaggctgagaagtgagtgtaagcaattcagatccagacactgctgcggtagatatctctcacactctttgaagtagaggagactagaattaaaaagctcagtagttgtatcttgctgcaaatttaacgtgagttaacaagtggccaacaaaacagtttaaataatagctttgctagtaagaatatatctatttatattaataattactgcaaaccaattactccaaaacttaataaacacactatcaacacacatttattatttctcagttttgtggttcaggattctgggtgcagctttct

SEQ ID NO: 84413 - DNA, 687 bp, Homo sapiens
gtagaataaaactattcacatttgtataatagacatttaaaaagcattttcacatagcacaaacataataccaagcataatttttttaaaaaaagcatttacttaacatcaactaaagtaaaatatttgcttaatctaaaaaagcatttttatatatagctaatgtaatcctcacaaccatccttgttttatagatgaagcaccctaggctctggggtgtaaagtaacttgcccatagcttctcacatgctcatgtcagagcctgaacagtcctcaactccagtgctccttcctcctcacctccacttccccaattaaagagggagtcaggctttttccaactagtactcatctctaattatgagacaaaatgccttcatccccctttcccaaacaagatcttcccctgctctgaatttttggtgaaataataattccatratgatacatcttcttccttcactactctctccccaaccaagtacagtgcctgtctcctattgcaatggacatttgtgaaaggaaggataggagagaggaaagcaaaaagagggtcaggcaggaagggaagactcagaaaattcatcttttctcattaccccagcaactaaccaaccctaagtgttttgaagcacttaataggtgctctgtattccgctaggatataagagaggtgtcagtcaggga

SEQ ID NO: 84414 - DNA, 892 bp, Homo sapiens
actaacgctgtgtcttgagaacaaatggtatgcagtgccaaagccttaggaaggtcactttttttttcattctcatgttttctttctaacctactactcatagagtcacaggaacttctgagagccttctattttagacctatatattagatggttactaattactttraactgattgttttttcctgttgaatattccggatttctgattgagcaatatcttgaaattccaaaagttggcatgctggtagtttccttatgttccacacattttcaagcacattgacagtgactgttccctgtttccagaggatgaggacagtggtaccatgttccttcatcagcttgcacaatcagcccaattgtcctcagatggatcgttcacactgtggcagattgtcttgactgcaagttcttctcttggctctgaaatcttctgcttaaacaagttatttcattgacataaacaggatcttcttatcctggcccaacactaactggaagaaaaacctttttaggatttgtctttctctgccacagagaaagtgtgaccccagaagcttgaaatgggcaccattttgtaaagctaggcctcagcattactccgaaattcatgatatcttgggaaccaggtgtgcagtcaaaaataacagcttttatttctgtaacttttatttctgtagctcttatttctgttcacttagagtgaacaaaactcatttacatacattatttcattgattctaacaataatcctgtgaggtaagcaggacagaaacttattgctatttttcagataaggaaaccaaattcaaataaattgttattattcataaaatgatagtaaccgacaccatatagggtgtttggggcacaaagcgctttcctatgc

SEQ ID NO: 84415 - DNA, 698 bp, Homo sapiens
tggtttcagacagccacagactgcgattgggggatagagatgtccaacagttggggaagggttaaatatattagggtgcacccacactgtgaaatattttgctgccatcaaaacaagtctatttaataattcttgatggcatagaacattgtagatgataattcattatggttcgagagggcctataaataccaccttcctctaccaaagaaggaattcccatggttcaaggaacggagcgctaagcacttccgccagcacatccatgtctgtgcttcccggtggatttctcccaattaaatggatcccctcccctgcaccacccaggtagctggagcacctccactgctacccttgcctcatgtttatagaaatatrtggtggtttaaaataaaaaaattgtaaggaaactctgttagtctgttctcacgctgctaataaagacatacacgaaactgggtaatttataaagaaaaggaggtttaatggactcacagttccacatggctggggaggactcacaatcatggcggaaggcaaaggaggtgcaaaggcacatcttacatggtggcaggcaagagggcatgtgcaggggaactcccatttataaaaccatcagatctcatgggacttattcactatcatgagaacagcatgggaaagacccaaccccatgattcaattagctctcacggggt

SEQ ID NO: 84416 - DNA, 698 bp, Homo sapiens
tggtttcagacagccacagactgcgattgggggatagagatgtccaacagttggggaagggttaaatatattagggtgcacccacactgtgaaatattttgctgccatcaaaacaagtctatttaataattcttgatggcatagaacattgtagatgataattcattatggttcgagagggcctataaataccaccttcctctaccaaagaaggaattcccatggttcaaggaacggagcgctaagcacttccgccagcacatccatgtctgtgcttcccggtggatttctcccaattaaatggatcccctcccctgcaccacccaggtagctggagcacctccactgctacccttgcctcatgtttatagaaatatatggtggtttaaaataaaaaaattgtaaggaaactctgttagtctgttctcacgctgctaataaagacatacmcgaaactgggtaatttataaagaaaaggaggtttaatggactcacagttccacatggctggggaggactcacaatcatggcggaaggcaaaggaggtgcaaaggcacatcttacatggtggcaggcaagagggcatgtgcaggggaactcccatttataaaaccatcagatctcatgggacttattcactatcatgagaacagcatgggaaagacccaaccccatgattcaattagctctcacggggt

SEQ ID NO: 84417 - DNA, 561 bp, Homo sapiens
gggatccactgaagttcaggaaggaactcagttctaagacaaatataaatttcaagttttaagacagtgggtcaatttctatgtctatttaaaaaccagtaaatatgatttatataggacagttgagctggtttcctcaggagagcaggacctgctgcctgactgtgtcaacacctgtgagatttacagcccaaactcaastcaagttttaattcattgtcttaaatattttcactcataaacggggaaaaaaataaataaacctaggattccaaaggagagaaaaacaaaagtccaaaaatgatatagacgtcaatagttaatcaaaacaaatagaaaaataatacatgagaaaatagaaaaattatagaggaaattcagaaacctaaaaactaattccttgaccaatgaaataatagtttctaacaagtcaaataaaaagatgaaaagtatcaaatttttgaaattaggaaataggatataagtgttgtatggctaaatttaaaattatagaattccttgtactattgcaactttttaaatatttggtaaaatatcaaa

SEQ ID NO: 84418 - DNA, 630 bp, Homo sapiens
tgtttgtatgtaatattgtgatgattgaaagcattcttgaaattgaaaagggcatcaaaaattgtagatggtacacaattccaatgctaaggaaaagtgaatcacatgatgrcagaattatttttatttcaattttcttccaactctttgaattaagtcaaggaaaataaaaccttccaattttgagctaaaatgggtcttcaacgcctaatttaacacccctttaaaagaaaaaaattgagacagttctcacttcatcactcaggctggagtgcagtggcacaatcctggctcatcacacttccaacatcctatgctcaagcgatcctccgtcttcaaactgctgagtagctggggctactcaggaggtgcatgccaccacacctggctgatttttatttttattatttattttttttttttagatatcgctctgttgcccaagtggtctccaactcccaggctcaagcgatcctgtctgagcctcccaaagggctgggattttttttgtttgtttgtttgttttttaacaaagaggaaacaggtctcatctcaagagccttaggccactaaaaatatctaactaggattcagtcaaatttaaagctacagttgatcctcattatctat

SEQ ID NO: 84419 - DNA, 630 bp, Homo sapiens
tgtttgtatgtaatattgtgatgattgaaagcattcttgaaattgaaaagggcatcaaaaattgtagatggtacacaattccaatgctaaggaaaagtgaatcacatgatggcagaattatttttatttcaattttcttccaactctttgaattaagtcaaggaaaataaaaccttccaattttgagctaaaatrggtcttcaacgcctaatttaacacccctttaaaagaaaaaaattgagacagttctcacttcatcactcaggctggagtgcagtggcacaatcctggctcatcacacttccaacatcctatgctcaagcgatcctccgtcttcaaactgctgagtagctggggctactcaggaggtgcatgccaccacacctggctgatttttatttttattatttattttttttttttagatatcgctctgttgcccaagtggtctccaactcccaggctcaagcgatcctgtctgagcctcccaaagggctgggattttttttgtttgtttgtttgttttttaacaaagaggaaacaggtctcatctcaagagccttaggccactaaaaatatctaactaggattcagtcaaatttaaagctacagttgatcctcattatctat

SEQ ID NO: 84420 - DNA, 630 bp, Homo sapiens
tgtttgtatgtaatattgtgatgattgaaagcattcttgaaattgaaaagggcatcaaaaattgtagatggtacacaattccaatgctaaggaaaagtgaatcacatgatggcagaattatttttatttcaattttcttccaactctttgaattaagtcaaggaaaataaaaccttccaattttgagctaaaatgggtcttcaacgcctaatttaacacccctttaaaagaaaaaaattgagacagttctcacttcatcactcaggctggagtgcagtggcacaatcctggctcatcacacttccaacatcctatgctcaagcgatcctccgtcttcaaactgctgagtagctggggctactcaggaggtgcatgccaccacacctggctgatttttatttttattatttattttttttttktagatatcgctctgttgcccaagtggtctccaactcccaggctcaagcgatcctgtctgagcctcccaaagggctgggattttttttgtttgtttgtttgttttttaacaaagaggaaacaggtctcatctcaagagccttaggccactaaaaatatctaactaggattcagtcaaatttaaagctacagttgatcctcattatctat

SEQ ID NO: 84421 - DNA, 630 bp, Homo sapiens
tgtttgtatgtaatattgtgatgattgaaagcattcttgaaattgaaaagggcatcaaaaattgtagatggtacacaattccaatgctaaggaaaagtgaatcacatgatggcagaattatttttatttcaattttcttccaactctttgaattaagtcaaggaaaataaaaccttccaattttgagctaaaatgggtcttcaacgcctaatttaacacccctttaaaagaaaaaaattgagacagttctcacttcatcactcaggctggagtgcagtggcacaatcctggctcatcacacttccaacatcctatgctcaagcgatcctccgtcttcaaactgctgagtagctggggctactcaggaggtgcatgccaccacacctggctgatttttatttttattatttattttttttttttagatatcgctctgttgcccaagtggtctccaactcccaggctcaagcgatcctgtctgagcctcccaaagggctgggattttttttgtttgtttgtttgttttttaacaaagargaaacaggtctcatctcaagagccttaggccactaaaaatatctaactaggattcagtcaaatttaaagctacagttgatcctcattatctat

SEQ ID NO: 84422 - DNA, 790 bp, Homo sapiens
gtcagaattgttgtttggctccattgaaggaaagaaaagaatgaacatttcttgggcacctcctctgtgtcaggcactgtgcttggtacctgactgatccagagcagcttcataagcaggcagcctgtgcactcacacaggccctgtgctcagaagggcctatgcttgctttcatactgtctcatactctactgtcaccttctcaaaactctttwataactttcgaatgggccccatgatttcattttgcatttggtcctataagttacatagccataacttacatagtctgttttcacacggacgatcttttttcatcctcaggactccccgagaggtgagtgttaccatttgtctccctttgatacaggagtgaacagacactcagagatgggcatttacccaaagccacacagctggaaaggcctaagtcaaaatttgtactcaggtctgcctgagtctggggtgcagaattgcccatcttgtggcacgctgcagctgttgtaccgaaaggcctacagcatgttctggtctctggaggcctaggcatggggaagtttagcctcatggattgtcggtgtctgagggcatataatgatatgggtgtatactcagggccacattttgtgtgttgtagtagtcctagcagcttgctgttttattagggccacaaattgagtcagggagcaggacgggtatttcttctgaaggacacagcaagaagtacgggggccgtgcacagtggctcacacctataatcccagcactttgagtgggggctgaggcagga

SEQ ID NO: 84423 - DNA, 765 bp, Homo sapiens
ccttgtaaaattaggataatgaaagtgcttatctcacgagtatcatcgctaaawgcattaagacagggaaaacacagagaaaagaaggcgtgctggtatgtgttcagtgccctctaaatcagtggtcagcaaactataatctgcagaccaaatccagcccactgcttgcttttgtaaataaagtttcattggaacacagctgcactcacttgtttacatatcatctatggctacttttgcacaacaatggcaaacttgagtagccgtgacagacgcactggcctgcaccaccttatgtgtttaatctctggccctttaaagaaaaagtttgtcaatcctacctcatctaaacggtagctattgtagtagctctactaatagtgttgcctgcacccagtaatttgtttatgttggggcaatgtaaatactcactcaggtcattacttaccatttgctaggctttacagagataggtttcagttttcattttgccaagatcatcacatgtttcaactgaattaatgagggttctgttttaatgtttaacttaaagaaatcctccaaattattttctcccttttgaacaggaaaaccaatgctgtattatctatagctcactgataattttgaacatctcaacatgcaacaaagtttcccgtttgaagtttgtgtttccagcatttaattacatggaactttcctgaaatgtgctataaatatgcagcaccctgatcttggctaattggctcacatctattaaggatc

SEQ ID NO: 84424 - DNA, 765 bp, Homo sapiens
ccttgtaaaattaggataatgaaagtgcttatctcacgagtatcatcgctaaatgcattaagacagggaaaacacagagaaaagaaggcgtgctggtatgtgttcagtgccctctaaatcagtggtcagcaaactataatctgcagaccaaatcmagcccactgcttgcttttgtaaataaagtttcattggaacacagctgcactcacttgtttacatatcatctatggctacttttgcacaacaatggcaaacttgagtagccgtgacagacgcactggcctgcaccaccttatgtgtttaatctctggccctttaaagaaaaagtttgtcaatcctacctcatctaaacggtagctattgtagtagctctactaatagtgttgcctgcacccagtaatttgtttatgttggggcaatgtaaatactcactcaggtcattacttaccatttgctaggctttacagagataggtttcagttttcattttgccaagatcatcacatgtttcaactgaattaatgagggttctgttttaatgtttaacttaaagaaatcctccaaattattttctcccttttgaacaggaaaaccaatgctgtattatctatagctcactgataattttgaacatctcaacatgcaacaaagtttcccgtttgaagtttgtgtttccagcatttaattacatggaactttcctgaaatgtgctataaatatgcagcaccctgatcttggctaattggctcacatctattaaggatc

SEQ ID NO: 84425 - DNA, 765 bp, Homo sapiens
ccttgtaaaattaggataatgaaagtgcttatctcacgagtatcatcgctaaatgcattaagacagggaaaacacagagaaaagaaggcgtgctggtatgtgttcagtgccctctaaatcagtggtcagcaaactataatctgcagaccaaatccagcccactgcttgcttttgtaaataaagtttcattggaacacagctgcactcacttgtttacawatcatctatggctacttttgcacaacaatggcaaacttgagtagccgtgacagacgcactggcctgcaccaccttatgtgtttaatctctggccctttaaagaaaaagtttgtcaatcctacctcatctaaacggtagctattgtagtagctctactaatagtgttgcctgcacccagtaatttgtttatgttggggcaatgtaaatactcactcaggtcattacttaccatttgctaggctttacagagataggtttcagttttcattttgccaagatcatcacatgtttcaactgaattaatgagggttctgttttaatgtttaacttaaagaaatcctccaaattattttctcccttttgaacaggaaaaccaatgctgtattatctatagctcactgataattttgaacatctcaacatgcaacaaagtttcccgtttgaagtttgtgtttccagcatttaattacatggaactttcctgaaatgtgctataaatatgcagcaccctgatcttggctaattggctcacatctattaaggatc

SEQ ID NO: 84426 - DNA, 821 bp, Homo sapiens
gcattttggtctaagttgatgtcttttgttagagcctgaagatgtttcccacagaggtcttacttgattatagagtgacttttgtttattgtactctaaatattatcttccttcctataaaatggtttaatgcattattgttgatgtagaggaatattatttgtttttgtatgttgatcttgcattgggaaactcttctggattcatttatatttgctgtgaaataggtacaggggttagtgggggcgagaggaagggtacagtcatggtatgaggtactgtcaagccaaagcacaaaggatatacttatgctgagtctccaaagatgaggaggaatttatatcaataaaatcacaaaagaatgatgctgtgtgctgctgtggcgtggttagggcagagggtgtgaaaagaggtatagtgagatatatgcaaaagatcatggagagtagggccagtaaatcatgctgaggagtgaaaatttatggggtaagcatttattaaagaagttaggcaatctattaatgcaagcatttcattaaagtactcaaaaagaaaaaaatcacctcaatcaatatagaacaaacatttcttaaaattcagtgctgatttatgtttatgataaaaacaaataaccaagaacagaggggatctttcttaacctgtggaagggtatrtacctaaaagtacattcaataaacatcatgctttatggtaaaactttagaggaagtctcttaaaagtcaaagagaattttgattctctttattttactcgatcacagaaatctttgtatacagtgtatcagtgaagagttggcatgc

SEQ ID NO: 84427 - DNA, 646 bp, Homo sapiens
ttcccattcactaagccttgtatgactgtggccaccattaagtgcccagtctgccaacaacagaaacccacactgaacccttttacatggcaccattcttcatggtgatcagccagctacctggtgacaggttgattacattaggccccattcatcagtgaatggggaagatttttgttctaagtatttcttatttaatgttgttacacatatttttaaattttattttacaatttattgtttttaatatagagaaaaacatttattgttcatagactatagttggtgactgcttttcaatccagttgmcaatcggttcattttaattggaatgtttcaatcaattgtgtttaatttagttatcaatatatttggatttaaatccaacatcttgtcatttctttctatttttcctatctgttctttgtagcccttttccttttattttgccttctttagattgtgtcttttaaaaaatgattccttttcatagctctaccttggtagtttctttattatttacatgtcacaattattattctatatggattgattttcagcattctcttatgtataatttatcctggttttctgttcttcagattttcctcttttaattgattaaactttttttaccttatttttc

SEQ ID NO: 84428 - DNA, 646 bp, Homo sapiens
ttcccattcactaagccttgtatgactgtggccaccattaagtgcccagtctgccaacaacagaaacccacactgaacccttttacatggcaccattcttcatggtgatcagccagctacctggtgacaggttgattacattaggccccattcatcagtgaatggggaagatttttgttctaagtatttcttatttaatgttgttacacatatttttaaattttattttacaatttattgtttttaatatagagaaaaacatttattgttcatagactatagttggtgactgcttttcaatccagttgccaatcggttcattttaattggaatgtttcaatcaattgtgtttaatttagttatcaatatatttggatttaratccaacatcttgtcatttctttctatttttcctatctgttctttgtagcccttttccttttattttgccttctttagattgtgtcttttaaaaaatgattccttttcatagctctaccttggtagtttctttattatttacatgtcacaattattattctatatggattgattttcagcattctcttatgtataatttatcctggttttctgttcttcagattttcctcttttaattgattaaactttttttaccttatttttc

SEQ ID NO: 84429 - DNA, 718 bp, Homo sapiens
gcagtggcacgatcttggctcactgcaatctccacctcctgggttcgagcgattctcctgcctcagcctcctgagtagctgggattaccatgtgccaccaagcctggctaatttttttgtgttttttagagatggggtttccccatgttggccaggctggtctcaaactcctgtcctcaagtgatctgtccactwtggcctcccaaagtgctgagattataagcgtgagccaccatgcccggcccatcctcacttttggggagttgggggaaggaaaactatttcttgaatctgtaggaatttagaggacgctgagctgcagactgctgtttgtcttgtgggattgagtgttcttgtaggccagtggtttgtggggtgtccagagctgaggtgacaagaactgctggtaggacccatggatgtgatgcgctcatactttgtcttggaggacagactaaagccagagctgtctggacccagtgcagtagcgcctgaatgggatgggccgcaggtggcctgtttgtggtcatgttgtctgtctcccactggactgtaggcagcatgagggcaagcaccatgcttctccagtgtctagctcacacagcacctggccaatccctgccgattgaatgaaagatgaatgaatattgtgggctgctgtacttggggccatagagcaagagcaccctctcttggtagggctggggtttctccggaa

SEQ ID NO: 84430 - DNA, 673 bp, Homo sapiens
tgctgggctagaaaaacatgtgtgacccctagatctctatcctcacacagaaagcaaggacagctttcagaaggggactcacaactggaaattctaacwggtaaatattagtatcattaagaaatcttgcaaaggtgattattagccatctcttgtctgtcgagttctgttgcttttctttcttctctccttttctcagtttttctctctcccctgtgtctttctcctcctttgccacatctgtctgcctctttccttctcgtctgtttttctattctctggtctcttgttctcgctctttgtctctttctgtctcttggagcatttctctgtctctcttgctttgctacctttctctctctgtctttctctttcttgtatctcttgctgaccttggggtcactcccttggttttctccatttaatggagccccaacttgcctttgatggcatttggggagggcaaagttagtcggactctctgaacttgattggcctcccgtgacaaggatctcttttcacagggtctggatttaaagtgtgaaaatataaagagctttttcattctgactcgcacatatccctacttgagctgaagcatttccagacagataatcatcaggtttcctacaggaaattaaagacctcagtaccgtgtagttgtttaaatcac

SEQ ID NO: 84431 - DNA, 964 bp, Homo sapiens
tgcatcaggtgttcaaaattttgggaaagccttgcatggcgttagtccactgcattttacacagtcttctcaagaatagtggagactattgttttaaaagtttattcgaaggctgacaaaaattctatttacttcattttaattccatttatatgactcatataaacactctttctctccatggctagaaggtcctaatataatgtccaaaactgaatttctcatccttgcacactccacctccatatactgtgccctatcactattttttatcttagtaaatgctatcattattcaccgagaggcagccttgctatctttttctttcatcattcttccctatctaatcacaaagtcttacagattctgagtttgaaatatgtttctaatgtacacaccaccctggcatctgcactgtcatagctgtagcccaagttaacattatcttttcatagactactgcagtaatttctaaatttatttccatgattttacctcatgttatttgttaagatcccctttcaccaaagaagatgagttcctcctttatatacttagatggcaacctatgtatttcctatagaacttatcacaattacatttttacatttgtaatttattaactattgttgtaagttttaatatgtccatgtttcccactgaattataaactttctgaaggcagggactgcaactgtgcagtgataggttccttaggtataatgcagaaacttaataaatattggtttaaagaatgtatgaatgggcttagcattatgtactgactttggaagattatataagttttttcagggatttctttctatagcttagaaggttctaaataatctttgcccaatgtttgacctttgggggaatgaaaccagtttaaatttaaacatcaatcctcaaggaagtaaccaatgaaatataataaaawacagtaaaataaaagtgtattcat

SEQ ID NO: 84432 - DNA, 2152 bp, Homo sapiens
caaagccaacatttttaccttcaatctgtccttgggttggttcatattaaggccatagcctctcctatgattctccttattaccttgagaatacagtttgcaggagttactggttttgatgtaaaacagcaaaaggaaaactaatagtacaccaaagaaactaaagaaaatctgtgctttttgggtgaattattttcccctatactgaagtcagtttaggaattaccataccaattatcccaattttttttaagcaaaaccaagtttgcctgccttgaatttcaattaaatttattgagcattcactgtatrtgaggaacaaaggtagcctttctctctgtctgaattgctaatggaccaagattttatgagcaattttaatctgaacgttaaaggtcagagatccctaaactttaagatacttgctttgtccagtcattacatgtataacaaatgtcttccgaaatttaatacagtctaatttgtattaggactttaagtgggtagtctttatgatatcttcttaaagctgtaagtggtgattttgttggagggtatcctttcttagaagtattttgaaaatttggtgggggttgaatttatgtttcacagtatggggaagggtcttctgacatttagcagacaggaagctagggatatacatataaagtaatttttgaacatttaatacatacgaattttcttaggaatgcaaacactatgacaactaaaaatgaattgttctttgttttgttaggaaatttaccaagaatgatttacaattttggaaatgcacatcaccgacaatgatgctatttgtggtattagagctgctaatatatacacctgtgtcagcttgcatttgtagctgtaacagtcaaacatacacaggcagtcttcattttgcatggcatcattttaactgaaacgtgcatattgaagctgtgtccttgctttgcacaattctgatatactcagtttcagttaacacagtaccatacaaagtgagcactacttggaatgaaagagatttgaaaatttgagatttccttaagagattgacttaaaaataagcattactcaataaatagaaaaaaatacaggaatgtcactaaatgtagttaataaagtctgttttaaatgtaattaataaagtctgtttcaaaaattcttttttttctgtcataaacacttcaatgtgtaagtcagttggtaataaatgttgtgaaagttatgtagaaataatttatttatttatgttttggatgcatcttgatttaacctgatctcttatattccttttttttttttccaatctaccattaatttctagttgcctattgaaggatattgcatccagggttgtgataattaattttatgtgtcagcttggaggatgtttttggattaaattaacattaaagttggcaaacattgggcaaaccagattgcccttcataatgaggatgggcctcatacaatcagttgaaggcctaaatagaacaaaggcctgccttcccaagcaagcggaaattctccagaacactgtctttgaacttcatctgcagcattggctctcctgggtctccagtctgctgtcacacactgcagatttggacttgccagcccccataatcatgtgagccaattgcttttaataaatctctcttattatacacacacacacacacacacacacacacacacaccctattgattctttttctctgaagaaccccctgattaatacaactgtcttttttttaaataaacatacagtagagttggtgtcctttgtgtatgtgtgtgtttgtatagcagtatgagttttagcaagtgtatggatacagaacagttccaagatacagaatagttccattgctccaaaaatccttctcaggttgcccctcagggaagtcacacacttaactcctgagtcctggcaatgagtgatctattttctttaaggtcagtataggccttgtcttttttaagaatgccatgtaacttggatcatacagtatataactttttgacattgtcttcttttactcaggattatgcctttgggattcaattaagttgtggcatgtatcaatagtttgtaccttttattactgagtgataatccactgtatgcccaaagtctttt

SEQ ID NO: 84433 - DNA, 2152 bp, Homo sapiens
caaagccaacatttttaccttcaatctgtccttgggttggttcatattaaggccatagcctctcctatgattctccttattaccttgagaatacagtttgcaggagttactggttttgatgtaaaacagcaaaaggaaaactaatagtacaccaaagaaactaaagaaaatctgtgctttttgggtgaattattttcccctatactgaagtcagtttaggaattaccataccaattatcccaattttttttaagcaaaaccaagtttgcctgccttgaatttcaattaaatttattgagcattcactgtatgtgaggaacaaaggtagcctttctctctgtctgaattgctaatggaccaagattttatgagcaattttaatctgaacgtyaaaggtcagagatccctaaactttaagatacttgctttgtccagtcattacatgtataacaaatgtcttccgaaatttaatacagtctaatttgtattaggactttaagtgggtagtctttatgatatcttcttaaagctgtaagtggtgattttgttggagggtatcctttcttagaagtattttgaaaatttggtgggggttgaatttatgtttcacagtatggggaagggtcttctgacatttagcagacaggaagctagggatatacatataaagtaatttttgaacatttaatacatacgaattttcttaggaatgcaaacactatgacaactaaaaatgaattgttctttgttttgttaggaaatttaccaagaatgatttacaattttggaaatgcacatcaccgacaatgatgctatttgtggtattagagctgctaatatatacacctgtgtcagcttgcatttgtagctgtaacagtcaaacatacacaggcagtcttcattttgcatggcatcattttaactgaaacgtgcatattgaagctgtgtccttgctttgcacaattctgatatactcagtttcagttaacacagtaccatacaaagtgagcactacttggaatgaaagagatttgaaaatttgagatttccttaagagattgacttaaaaataagcattactcaataaatagaaaaaaatacaggaatgtcactaaatgtagttaataaagtctgttttaaatgtaattaataaagtctgtttcaaaaattcttttttttctgtcataaacacttcaatgtgtaagtcagttggtaataaatgttgtgaaagttatgtagaaataatttatttatttatgttttggatgcatcttgatttaacctgatctcttatattccttttttttttttccaatctaccattaatttctagttgcctattgaaggatattgcatccagggttgtgataattaattttatgtgtcagcttggaggatgtttttggattaaattaacattaaagttggcaaacattgggcaaaccagattgcccttcataatgaggatgggcctcatacaatcagttgaaggcctaaatagaacaaaggcctgccttcccaagcaagcggaaattctccagaacactgtctttgaacttcatctgcagcattggctctcctgggtctccagtctgctgtcacacactgcagatttggacttgccagcccccataatcatgtgagccaattgcttttaataaatctctcttattatacacacacacacacacacacacacacacacacaccctattgattctttttctctgaagaaccccctgattaatacaactgtcttttttttaaataaacatacagtagagttggtgtcctttgtgtatgtgtgtgtttgtatagcagtatgagttttagcaagtgtatggatacagaacagttccaagatacagaatagttccattgctccaaaaatccttctcaggttgcccctcagggaagtcacacacttaactcctgagtcctggcaatgagtgatctattttctttaaggtcagtataggccttgtcttttttaagaatgccatgtaacttggatcatacagtatataactttttgacattgtcttcttttactcaggattatgcctttgggattcaattaagttgtggcatgtatcaatagtttgtaccttttattactgagtgataatccactgtatgcccaaagtctttt

SEQ ID NO: 84434 - DNA, 2152 bp, Homo sapiens
caaagccaacatttttaccttcaatctgtccttgggttggttcatattaaggccatagcctctcctatgattctccttattaccttgagaatacagtttgcaggagttactggttttgatgtaaaacagcaaaaggaaaactaatagtacaccaaagaaactaaagaaaatctgtgctttttgggtgaattattttcccctatactgaagtcagtttaggaattaccataccaattatcccaattttttttaagcaaaaccaagtttgcctgccttgaatttcaattaaatttattgagcattcactgtatgtgaggaacaaaggtagcctttctctctgtctgaattgctaatggaccaagattttatgagcaattttaatctgaacgttaaaggtcagagatccctaaactttaagatacttgctttgtccagtcattacatgtataacaaatgtcttccgaaatttaatacagtctaatttgtattaggactttaagtgggtagtctttatgatatcttcttaaagctgtaagtggtgattttgttggagggtatcctttcttagaagtattttgaaaatttggtgggggttgaatttatgtttcacagtatggggaagggtcttctgacatttagcagacaggaagctagggatatacatataaagtaatttttgaacatttaatacatacgaattttcttaggaatgcaaacactatgacaactaaaaatgaattgttctttgttttgttaggaaatttaccaagaatgatttacaattttggraatgcacatcaccgacaatgatgctatttgtggtattagagctgctaatatatacacctgtgtcagcttgcatttgtagctgtaacagtcaaacatacacaggcagtcttcattttgcatggcatcattttaactgaaacgtgcatattgaagctgtgtccttgctttgcacaattctgatatactcagtttcagttaacacagtaccatacaaagtgagcactacttggaatgaaagagatttgaaaatttgagatttccttaagagattgacttaaaaataagcattactcaataaatagaaaaaaatacaggaatgtcactaaatgtagttaataaagtctgttttaaatgtaattaataaagtctgtttcaaaaattcttttttttctgtcataaacacttcaatgtgtaagtcagttggtaataaatgttgtgaaagttatgtagaaataatttatttatttatgttttggatgcatcttgatttaacctgatctcttatattccttttttttttttccaatctaccattaatttctagttgcctattgaaggatattgcatccagggttgtgataattaattttatgtgtcagcttggaggatgtttttggattaaattaacattaaagttggcaaacattgggcaaaccagattgcccttcataatgaggatgggcctcatacaatcagttgaaggcctaaatagaacaaaggcctgccttcccaagcaagcggaaattctccagaacactgtctttgaacttcatctgcagcattggctctcctgggtctccagtctgctgtcacacactgcagatttggacttgccagcccccataatcatgtgagccaattgcttttaataaatctctcttattatacacacacacacacacacacacacacacacacaccctattgattctttttctctgaagaaccccctgattaatacaactgtcttttttttaaataaacatacagtagagttggtgtcctttgtgtatgtgtgtgtttgtatagcagtatgagttttagcaagtgtatggatacagaacagttccaagatacagaatagttccattgctccaaaaatccttctcaggttgcccctcagggaagtcacacacttaactcctgagtcctggcaatgagtgatctattttctttaaggtcagtataggccttgtcttttttaagaatgccatgtaacttggatcatacagtatataactttttgacattgtcttcttttactcaggattatgcctttgggattcaattaagttgtggcatgtatcaatagtttgtaccttttattactgagtgataatccactgtatgcccaaagtctttt

SEQ ID NO: 84435 - DNA, 2152 bp, Homo sapiens
caaagccaacatttttaccttcaatctgtccttgggttggttcatattaaggccatagcctctcctatgattctccttattaccttgagaatacagtttgcaggagttactggttttgatgtaaaacagcaaaaggaaaactaatagtacaccaaagaaactaaagaaaatctgtgctttttgggtgaattattttcccctatactgaagtcagtttaggaattaccataccaattatcccaattttttttaagcaaaaccaagtttgcctgccttgaatttcaattaaatttattgagcattcactgtatgtgaggaacaaaggtagcctttctctctgtctgaattgctaatggaccaagattttatgagcaattttaatctgaacgttaaaggtcagagatccctaaactttaagatacttgctttgtccagtcattacatgtataacaaatgtcttccgaaatttaatacagtctaatttgtattaggactttaagtgggtagtctttatgatatcttcttaaagctgtaagtggtgattttgttggagggtatcctttcttagaagtattttgaaaatttggtgggggttgaatttatgtttcacagtatggggaagggtcttctgacatttagcagacaggaagctagggatatacatataaagtaatttttgaacatttaatacatacgaattttcttaggaatgcaaacactatgacaactaaaaatgaattgttctttgttttgttaggaaatttaccaagaatgatttacaattttggaaatgcacatcaccgacaatgatgctatttgtggtattagagctgctaatatatacacctgtgtcagcttgcatttgtagctgtaacagtcaaacrtacacaggcagtcttcattttgcatggcatcattttaactgaaacgtgcatattgaagctgtgtccttgctttgcacaattctgatatactcagtttcagttaacacagtaccatacaaagtgagcactacttggaatgaaagagatttgaaaatttgagatttccttaagagattgacttaaaaataagcattactcaataaatagaaaaaaatacaggaatgtcactaaatgtagttaataaagtctgttttaaatgtaattaataaagtctgtttcaaaaattcttttttttctgtcataaacacttcaatgtgtaagtcagttggtaataaatgttgtgaaagttatgtagaaataatttatttatttatgttttggatgcatcttgatttaacctgatctcttatattccttttttttttttccaatctaccattaatttctagttgcctattgaaggatattgcatccagggttgtgataattaattttatgtgtcagcttggaggatgtttttggattaaattaacattaaagttggcaaacattgggcaaaccagattgcccttcataatgaggatgggcctcatacaatcagttgaaggcctaaatagaacaaaggcctgccttcccaagcaagcggaaattctccagaacactgtctttgaacttcatctgcagcattggctctcctgggtctccagtctgctgtcacacactgcagatttggacttgccagcccccataatcatgtgagccaattgcttttaataaatctctcttattatacacacacacacacacacacacacacacacacaccctattgattctttttctctgaagaaccccctgattaatacaactgtcttttttttaaataaacatacagtagagttggtgtcctttgtgtatgtgtgtgtttgtatagcagtatgagttttagcaagtgtatggatacagaacagttccaagatacagaatagttccattgctccaaaaatccttctcaggttgcccctcagggaagtcacacacttaactcctgagtcctggcaatgagtgatctattttctttaaggtcagtataggccttgtcttttttaagaatgccatgtaacttggatcatacagtatataactttttgacattgtcttcttttactcaggattatgcctttgggattcaattaagttgtggcatgtatcaatagtttgtaccttttattactgagtgataatccactgtatgcccaaagtctttt

SEQ ID NO: 84436 - DNA, 676 bp, Homo sapiens
ttcatttcaacgtatagataactaatttttctagatgtagggtattaggataattttgagaactattgcttaaatcttacacccatagctacttaaatatttcttgtttttccttctctagagacattacaatctactagttcggctagatgatctctcacttaactttgtattcagagaatttagagtatctacttaaaagtatgaatgtgggcttttcattcatggtctgtcagtcagctgaggcagagtaatgctgcaacaattaacagcccctaagtcttcgtggctttcagtaacaaaagtttaygtcatgctcttattacctgaccatcatgggtcagcacaatgccccatcagagtgctcttctgcagggaacccaatcacatggatgaaggccaggaatataataggtgtttagagagtattggctacagtggtcaaaaggaggtagaaatgggagcaaatattttcttgagaaatattgctgtgggaacatgtgaaatcagcttttaagtttaatatttttttcagcgtatctaacaaatgtacttgctgataattttatcatctaacatttaaaaatgttatcatgccttatatttgcatatttctgataacttctctttcctggtatacctactccaccaatctcccacaccttactcaaaatgt

SEQ ID NO: 84437 - DNA, 790 bp, Homo sapiens
tatatataaaaaaatcaatatttaaataacttgtttttctccagtgctgttcttaaaacattgtaagtagctgtaatgtaccaataccaatatgttcttgcacaacaatatgttcagcccaagaaagctgtgtattgttttaaaaattgtaaaaattattgtgatgatttattgagcataaagagaggtggacagaagagttttcctgtgtattgaaacttgtctataattatgttatgtatgcacctagaaaaaaaaagtaaatttcttcagctgaaaaaaaaagtcttgataaatttcagaaaatcaaaattgtatcaagtatcctttcagaccacagtggaatattactgagaattatctctaaaaagaattgtcaaaactatccaaatacatgggatttaaatattctgcttttaattgatctttgggtcaaaaataaatcaagatggaaatttaaaaattctttgaactgaatgatattagtgayacaatttatcaaaacctctgagatatagcaaaagtggtgctaagaggaaagttcatagcattaagcctacatcaaaaagtttgaaagagaacaaatatacaagctaacatcacatctcatggaactagagaaacaagaacaaaccaaacccaacccctgcagaataaaagaaataaataagatcagagcagaactaaatgaaattgaaataaaaaaagaccccacaaaagagaaataaaacaaaaactggttctttgaaaatataaacaaaattgagattagtcaggaaaagaagggaga

SEQ ID NO: 84438 - DNA, 775 bp, Homo sapiens
ggggatcctagagggaggcgggggacccagcgtgaggagagagggtcccagtgcttcctcctgagtgagggtcacccatctgactccggctgcacagagccactccctctaagcgctcctgctctctgccttcctgcattagcttttgcctgtacccggcccagcaaacccctgctcatctttcagacccaagttcaaggcctcctcccactccgggtggctcatcacctggcctccccaggcagagaggctaggctcctgctcactggggcgtctcccttgcccactggcgcgggactacaaggaaaggggttgacccccaccctcccccgccaygcccaggagggtgcagacacaactgggaaggtgctagaggccccggggggaggctgggccagcaccaggcattggggggcaggttcccgtctctataccccagccccaggaggacagcacgtgcccctcccgctgccccacctgtcacccacctgctggccccgggctgtctctgctcctggctcccctcccagctgcgtccccagctgcctctccagggaggagtgacagctggcctgtgccacaccctcgagcccccccccacggactaccccctccctggggcaggacccctgcctgtggcacaaccaaggggcctgctgatgggggctcatgtgagcagtgccccagctgtgggtgtgggtgctgccagctgccaccgcctttgccctggtttcccagatagaccccgacccacactccgaagctgtatcatgaa

SEQ ID NO: 84439 - DNA, 1131 bp, Homo sapiens
actggctcttcccagacatggagtgctcagtaatcgtgagctattagaatacaggtgcccaaccagtgcttgagcaattgtgttctgtgtccaacagaactcaacagaatcccacgtttgtctttatatgtgaattcagttccttttgagttagtaagaaattttgcctgtgttggggtaattgaactttcaggaggagggaattgyctgccacaattattctctgaacttaatgtttccatgtctttttcttcattttggaagttgtggaaaaattataatgaaagagtatataaacgttttcctctgtattatagcgtatctgacagtttcctttattaaaaagtacgatacattagggagagacttaatgaatttaaaattaaagtttgaaaagtgttattgactataagtgatcttcagctgtgcagttttcaacttgaggttgtcagaatgtaatattacacattatattacacacatctacagaatccaaattgtgatgttcctggagtattggaacaatacctatgactttttgtttctattgatttttaactcttctaataaccacttctttaagaaaagtcatacatcatcactttggtgtatcagaaacaaattccttatgcaataaaagcatacttctttctcattcacctactgggatctagaaaccctgttaatgcaagaaaaaatcccaaacctcaataaaataacactctgtttgtctgaagagtggaaacacaacacatttcctctcaactggtggtcccagatccaccatcacagtgtatggatgtgtttggaggtgtgggaataggactgctctgaggctctagaaggccagcaggtggggcagactgaatggagggaggggactggcattcagtaactactggagcgtgggaagagtgaggtagactgtccatctggtgaaggtggctgcttccttgaggtttgttactttctgtaatgttaattccctcaacttttaaaatttgatttttagacaagttatacattcaaatgatttaaaattggaaaataataaaaaggtaaacagtgaagtctctccctttcccctgccttcatgcccccagtttgcatctccagaaacctcagaggttt

SEQ ID NO: 84440 - DNA, 656 bp, Homo sapiens
attccagtatcattttgactaaattatatgtaaaaattgatgtaccgaataggatttgctttcaatctcactaatccagaaatagtcattcattcaacaaatatttattaagtacgatgtgccaggagctgcacattttgcagttggctgcacagaagactgacaataaaattagccttagagagatcaaaattgattgaactatccttgataaaactgcttcaaagcagggacttgcaagaaattgcatattcacatttcatttgcttccattaatagtgctcatatttagatctgatggtaatactatgctctcaactggtgtgggtctggaataaaacactccccttgactgtgcacactgcagagaggaaaaacaaaatgattggagtcagctgggcttttctattgagcacctsgacctacagattttccaatttcaagttcattcacatttcatctctggcttctacattttagttaaaaagcatttctctatttgctattgtccactaaggaaaatgcctatttaaaaatggatttcttttttaaagcatcttgattcacacatttcaaagcccttcagaaaacaggatttctcaaaagccatgtgattctaaaacatgctacagatttcagatggagaaagattcaag

SEQ ID NO: 84441 - DNA, 656 bp, Homo sapiens
attccagtatcattttgactaaattatatgtaaaaattgatgtaccgaataggatttgctttcaatctcactaatccagaaatagtcattcattcaacaaatatttattaagtacgatgtgccaggagctgcacattttgcagttggctgcacagaagactgacaataaaattagccttagagagatcaaaattgattgaactatccttgataaaactgcttcaaagcagggacttgcaagaaattgcatattcacatttcatttgcttccattaatagtgctcatatttagatctgatggtaatactatgctctcaactggtgtgggtctggaataaaacactccccttgactgtgcacactgcagagaggaaaaacaaaatgattggagtcagctgggcttttctattgagcacctggacctacagattttccaatttcaagttcattcacatttcatctctggcttctacattttagttaaaaagcatttctytatttgctattgtccactaaggaaaatgcctatttaaaaatggatttcttttttaaagcatcttgattcacacatttcaaagcccttcagaaaacaggatttctcaaaagccatgtgattctaaaacatgctacagatttcagatggagaaagattcaag

SEQ ID NO: 84442 - DNA, 926 bp, Homo sapiens
  misc_feature (1)...(926): n = A,T,C or G
tttaccattttaaccaattttaggtgtataaatcagtggcataaagtactttcacattgttgtgcattgaatccactttaaaccgaagtctttcttcttctaggctatgagcacactgtgtgacaccagtgattgtaatctngtgctttgtggcactctgggctttcatgagaggtgaccaccagcctcttcatactctgttatttctccaatccttctcttcaacccgagcatcttctctatgattaattaggtttcttacataaatatttacttttaagctgggtacagtggcacgtgcttgtagtcccagctacgagggaggctgaggcagcagaattgtgtgagtccaggggttcgagaccaacgtgggcaacatttattgagactctgtctcaataaaatgaacaaataaatataaacaatttataaacactctctacttttttctccagtccctcttttaaacccaagcatctcctctatgattaatggggtttcttacataaatatttcacttttacgttctactcaaaataaatgtttaaaaacatctgcactatatctgtcctcaaggaccaattgctctattccactagtctttgctcatttctattagaattttcctcatgtttctttagactcctgagataataaaaacaaaaaacaaacaaacaaaaaccccaaaacaaaacaaaacaaaaaatcctctgagctatttgtaagaataaacctaagtaatatcagtttacaaagtccaatccctaaacctcacccctcctgaaagtttagccatgtcttcstctcataactaaacaatccaggtactgagtctatgtttcctgctctggcctggagcatcacttattaatttgtatgatatttgtaaatacataaggaaggaattaaccataaaagaaaaatag

SEQ ID NO: 84443 - DNA, 723 bp, Homo sapiens
ctaaataaaaattaatttcagaatcccattcatcttcaggtagttttcatcatggctgtgataggaggaagagatgaccytgagatttgctttctgaaattaggctgaaatttgctttctcaacttaggtaatcaaatgtatgatattacaaatagtaaaatgacacagaaagtatatgtgtaagaagtgaatcagaaccaatcatggtgactcacgcctataatcccagcactttgggatgccaaggtgggtagatcacttgaggttaggagttcaagatcagcctggccaatatgacgaacccacatctctagagaaataaatcagaactagcttcctcaaaagactgataaatttgattaaaaaaattaactactctgtacaggaaaaaaataccataaatgcaactgaaaaaaatacattatccaaggaaagcttatttatattacacaaggcagatgtattttgcttaatttatgaagagcttatacatccaattggaaggagataaactatcttagtgtgtattgaatatgagatatgaacaggtatttacagaccaaaatgtacaaatcaataataaatacctgaaaagatattctacctttattacaaaaaggaaattaaaaaggaatcattttcaccaatccaattggcaaatttaaaaactctgatgctatccactgcaggcaagagtgcaataaaaagaagctcatatcatc

SEQ ID NO: 84444 - DNA, 661 bp, Homo sapiens
cagtatttgaactgcatgattgttttaggattaatagttgtgtcctaaggcctttgtgacatggccagtcctccacaatccatatccatcatatcatttcctaaaataaattttatcaaaacaatgctatactgtctggggctgaaagtttgaagaacaacctaggatttcaaacaatttgcaaacactgaattagaagatacaggatattggccatcaatatctctacaaatggagataaaaagggtatagctgaaattctctatactccttataatcttaattcctaaaaggggaatgctctccataataagtactttaagtgaaaagaaaagtcatattaataggggagaaaaggccatggatacagaaaagaaaaaaaaaaagaacttctccactctagacttatgttccacactttacttttcccaatccaatgctacttttcctaggcctgatctatcaagaacragtattagttgtctccacagagctttggcaagcattgccaagaatggtggattataagaccttgaattaaaactgaataaggagggctcactcagcttgaacaatattggagtatagaagttctactgatttttgtatagtgattttgtatcctgaaactttactgcagttatttatcagttctatgaac

SEQ ID NO: 84445 - DNA, 835 bp, Homo sapiens
tatatagagagattaagagatttattttaaggaattgtctcatgttattgtggaatctgacaagtctcaagatttccagtcatcaagctggagacccaggagagctaatagtgtagttccagtttgagtgtgaaggcctgagaatcaggagggctgatggtgtagttctagtctgaatgatgagggaaggctcaagacccaggaagagtcaatgtttaagtctaaaggcatttgcatttaaagctttaagtcatggttgttttggcatagtgaaattatgcttaatttttattttaatttgcatcttctargttgcatttacagtgtcttttatcatgctttttgctttttgtttttgtgtcataatgctttcaaatattcctgatttttttcattatgacttcaaaattcctttcttctttaggatgataattttcaccctcactatagagattatgcaaatattcttccagttttcatatttgtatttttaaaatttaaattctgaattcatctggcattaatttttatatatggtataagataaggatctagcctttttcctccagatggaaagtcagctatgcaaacacttctactaaaataagccctccattttccactaagttagaataaaaccattgatgaatataaagtcttcacattcacttgggtccatttctgtactttttattctatttcactaatctgtttatttttgggtcaatactattttgagtatataactttacagatatttggcaaggcaagttcctcctgccactatttttatttttgatgatgtgcttgaccaatctttggctattactcatgc

SEQ ID NO: 84446 - DNA, 1165 bp, Homo sapiens
ttacacaaataattctgaagtggctaggattgagatctattctctatggaagatgcttcagttctggggctagctctggccatgtattctttctaacaggataccaataggccatagtcactccatttctcagagagagagagttgtgccccttctgtgggtgctgtttggattcatgttgatggtgctaataaaaatmttttcaaattgcacagttggtcttgttaaagaaaaaattattctgacacttgttaaaatagtaaggaagaaattattcagggctattgtgatagatggcaagactattacaataggggagagattgggctcaatttcaaatacccattgagcatactaatcaaaaaattcaaaatcagaaatgctttaaaatccaaaactttctgagttccaacataatgccacaagtagaaaattacacaactgacctcatgttatgggttgcagtcaaaacatactcaaaacttttctttatgcataaaattatttaaaatattatataaaattacctcaggctatgtatataaggtatatatgaaacataaattaatttcatgcttagactcggggtcccatccccaagatatttcattatatatattcaaatattccaaagtctgcaaaaagctgaaatttgaaacatttctggttccaagcattttgtttcagggatactcaacctatacagcaaagatatctggggaattatagccaatgagaagaatgaggaagtcaatagatgaaaagttattaacagagacatcaagggtaggggaatccttgctaaactaacttcacaggattcttgctgatggcgggtcaaggatttatatatcaaagtcagaggatgataaacttgagcagatactgaggataatcagatacgcagggtggggagtcactctaaacttatctagtaggattctttctaaaactggtacaggcaggcccaaggacaaggcctagtcaaaaagatggctctaagcagggtaagttaggaattaaaatcgtggaaaggacttttaatgccaaatttgagtaattgaagcttactcatttagcattggagcaagggaatcatgtgatcagatatgtttttcaagaagaaaaagagataaggtagagatggattggaatgaaaaaaaaa

SEQ ID NO: 84447 - DNA, 618 bp, Homo sapiens
gaaacacaatagaatgttcaaaatgctatttctgcatggtgggaatatggatgaattttgtcttcctttctcctttcatttcccacattttctataataagcatgaatatcttttcataatgaaacataacaaataaactaagacacacacccacacactgaaaagatatttttaaaaagaattttaaactacaaacatccttattgctgggcttatgtggagcctgaaattcccatttttggtttaaagtcttgtctttaggaagatctcattttacaacataaaacactacctagtagaagcaatgttaatccatgaacaccttagtataaaaatatataaaaaaagtttctgtttttctagccttgaggactgtagagagtatgaacccgagggtggaatggagaaatgccyaggtcctggaatttttaacctgtgtaggacaccactctccaggtaaatgcctaagaggacagtgacactgaagaggtttttatggtggagaaaaatgatacggggtttggggtggcttaaggagaatgaggcaggaggagtcacaaaagcaagcctgctttacatcttgtctacatgtaatactgcagcaaacatatttgttc

SEQ ID NO: 84448 - DNA, 716 bp, Homo sapiens
gctacttccaagttggccaacaatttatttagctattcaaaacccctctgaatagataagcaactactcacatgaagtggggaaagtgggrgaaaaatatcacaggataaaacacaatacacacaaaggcatggaggtgtgagagagcatatgccattttggttgttttgtgtggtgggggtgtatagtgaaggggaagatgtggcagagaattcagttcaataattcaggaaatattaagtgactgtttagcttgagcagtgttctgacactcttaggatgcagagacgaatgtggcaacgtctttgtccttgagtaattcacaaaggagacatgtgtcggacatatattataatcaggtgagggtgggtaagtacaagaatagagaaagcatcaggttcatttgttcatgctcattcatttacaaaaaaggcagtgcggccctgatgccaggcatcatgctggtggcagaagtacctacaaaagtgagcaacagctctcattgccttctcagagggaccacatagtataatctcagccgcagatcttgatcaagcaattttagcaacatgtatacaccagcaactgtgacaagtgtcagtcagaagtaccaagtcctaaagaacctataatgtgggatttgttctaattagtgaggtcagagaaaattgtatttaccaccggtcctcttacacaataattctccatgcttgaat

SEQ ID NO: 84449 - DNA, 763 bp, Homo sapiens
tgaggctcagtgacttcaccaaactcctatagatgactagtagcaaagcagtgcctattcttgtaaggactatactatctcacctctcaaagaagtatttgataactaaaaaacagtgatacatgctcttatttaaagaaaaaaatatgccacttttycccttctttttcatggatttactaaatcaagctaaattcagtttccaggaaaattcatttaatgaaaacattaacgtattagaataggtgcatcattttatatttattattcactgattaattcattcatttcacaaatatttacttggaactgactctgtgccaggcactgcatgtgtttgatcagatcggtgtgccaaaaatacacaaatctcagggctcttttgtttaatggtgattgcaaatgtggctcctaagacacatgactctgggtatcacgccctagttaattcttttccaacacatttatttgcagttgtgcagacttatccaggacagagtcactggctttggactcctaaaggacaaacatcagatagggtgagtgaagttctcactagattttcaagtgctttgtttgacacccgctcgaaaggtttaccttgcccactcaggccactatgctataaatccctatcctgtagccaattgcatagatcgtagacatttaaatttgctgtccactcctggagaataattacagctatttaattatattcataatttagcgtacacctgaaaaatatgctgtgaaatatcggggg

SEQ ID NO: 84450 - DNA, 307 bp, Homo sapiens
cttactgacatcttcctatatattttgacaacacatttctagcatttccaactcattttctataggccattgtcatgtctgaattttaagaaatggcccctgaagggawttattatcaactataggtatcatttttattatattaaaaacaaaattatgagaaagtgtccctttgtccataaacatatcctccagggctttattctgtctctggtcaacacctctcacttcttttcaacaccctcaatatctactctcatcatgttccctcaattcctgctggtatgtagtattgaagtcctgcaac

SEQ ID NO: 84451 - DNA, 750 bp, Homo sapiens
ctttcattaactagatcaatgtgttttaattgtgaaatattaactcaccctcccataattgcctttaattttacaaagatagtttaacaagtactttcttccataaaatacattacagaaattaatagttattatccctatatagtatataaacagaaataatactctttatctttgcttattaattcacgttagataagtaaaaatagatatttgccaacttttcactttcaatattaaacataatttgaatatttctctcaatagcttgtttccttaaagatcattagaatagattatatggttaacatgtggatttaattactttcaagtctcttatgttttaaaaagatttatatacaactacatttttgtcattcttttacttttaaaaactttaatatattctggaataaaaaaactgatatttgaagaatttaagaatctcaatattttctcaggwattttaattgtaagtatcagaccaaactagtccagtataaaatgcctttcaatgagtcattgtttgatccataactaaaattgttacttgggcctcactcaatattaataatgagataattagttacattttattatttataattattttacctttctgaagaaagtcagggcatttcattgaagtaatatagagatgttcttatattttataatagcaggaaagaacacagaaggtaacaacaaagctctcatgaaggtcagatatctgtcccatgtttcataaat

SEQ ID NO: 84452 - DNA, 923 bp, Homo sapiens
tgctccaccatgcgatcagcccgttgctatgcaattactatgagtttgaaggtgccgggagtcagatcccagttggtgtggaggagaaccttagaaatgtttccaataggaatgctgaagtgaaaactagtgctgaaatctgctacttacacagcaacagaagtgtcactgtgaccgcaagtctactgtaaaaggtttaaaacgccatgattagccctctccaaaattctacacgaccctgttccttagcctaccctgaaggctattgccagctttccaatggagtcattagggatggttcccaacttctgccgaggagctgctgtgagccagacactatataaagcaccttaatgtgccaaatcgcacaaaaccaatttcacagatgagaaaaatggaggttccaaaaagttaaaccacaagtccagcatcacataaccagcatgtggtagaacaagttttactctttccataattccaaattgcatcttggacacatctttaagcctacgggacatcagataacagataatatcattagcctcaggctgcagaatgtggtccatttatcactgcaaatgtgttcacggaatggaattcctgctgacctggcataaggacgcycacgcaggcactgcagagattgctgaacacagcaacactgcacaagagacgtgatggagctcctgcgagagtcaccaaaacactgacatagctctgtggcagcaatggatggccaggaaacagccacacaacccaggggaggggatgaagtggtaaaatagagggttataggaagaggggctgattttaaacaaagaccagttcttaagattaagtcactaattgaagagtatcagaaagtagctgtagacaccaaagaaagtagtaaattcttaatcacagcattcataatatgtggg

SEQ ID NO: 84453 - DNA, 716 bp, Homo sapiens
aacttttactgcagttgattattagatgatagtcgtaggaaaaaaagaaagagacaattgaccatagtgtcccttaatgcctctgtggagaccagtttgcttccttcccttccttctcaactaccctgaagtctcttatttttcttcaaccacctcaaaactccatttgcatgccccatgtgtaccattcaaatcacattactcctttgctgaagcacctgcaagcccttttccttcctggcaatatgagctacatctaaagtgtctacgttcttcactgttgcaatgattatatcccttgcctccctaaggctccagtctctctccttgyggtctttaaaatccaatttaactgggttaaattgcctttatactcctccgcttctccatacctacagttccctctaattctctctctctcgctctgtcctttctctcatttctagtactcactaactgaagtcaatagattagccttaatttattttgggaatagcacagtcatagaagttaacatttatagaatatattcattttagctatcctgttacaacagggaggttaacaaaattgatatctaattaaaactaacaagcatagtcttattaaaaccaaaacaataaagaatgcagtgaaaattgcattacccatcctgtgcaccctcctgtaggaactactagttactaaggctgttgttcaatgctctcacatgagga

SEQ ID NO: 84454 - DNA, 716 bp, Homo sapiens
aacttttactgcagttgattattagatgatagtcgtaggaaaaaaagaaagagacaattgaccatagtgtcccttaatgcctctgtggagaccagtttgcttccttcccttccttctcaactaccctgaagtctcttatttttcttcaaccacctcaaaactccatttgcatgccccatgtgtaccattcaaatcacattactcctttgctgaagcacctgcaagcccttttccttcctggcaatatgagctacatctaaagtgtctacgttcttcactgttgcaatgattatatcccttgcctccctaaggctccagtctctctccttgcggtctttaaaatycaatttaactgggttaaattgcctttatactcctccgcttctccatacctacagttccctctaattctctctctctcgctctgtcctttctctcatttctagtactcactaactgaagtcaatagattagccttaatttattttgggaatagcacagtcatagaagttaacatttatagaatatattcattttagctatcctgttacaacagggaggttaacaaaattgatatctaattaaaactaacaagcatagtcttattaaaaccaaaacaataaagaatgcagtgaaaattgcattacccatcctgtgcaccctcctgtaggaactactagttactaaggctgttgttcaatgctctcacatgagga

SEQ ID NO: 84455 - DNA, 794 bp, Homo sapiens
taaaggggcacatgtgtgttctctgcagaagcagctttgcttgtgtggtagagtgtgtgggaaaatagtatcctctctgttgagaaatattcttgatctccatattagaagaggctgtgcttctctcaggaaaaataaataatcttgtggacaccatgaaaaatattcagattcccatctttgctgtagcttctagaaatcttggagccaaaggtgggccaacacacaggaaatacacaggagtatccagatacgagctccacaggctttgtattccacacctaatttccctcctacccttcccttaggtttcctacccttattttctctgtgtacatcttttttwtcccaataatttaaattttaatttaactcgttgaactatgtgcatgtttattggctgccttaaattgtttcacgaataagtcaggctataaacaagtacataaatgaggcagacaggctagtggataaattataagactaataatggattttgacctcattttacaaggttgccacaatactaccttgtggatctgtctacagtgaaagacagacaaagaattttgacttattaagttctataatcaaggaactgtgcttgctgtttttctcattattctgcttaatccacacagcaacccatgagttggatattcatttccctaagttacaaatgagagcaccaaagcagtatataatctggttaaaaacagcaggctttgaagtcaaagaaacctggattcaaaacccagctctcacactcactagcttgaccagcctaagttcca

SEQ ID NO: 84456 - DNA, 623 bp, Homo sapiens
gcgagtcaagttgaatttgcagtggagtgataggtgagctgaattatcaactcaggagtcaggtcgacacacaggtgttccggtgaaggccagggcaagccgggtcaggcgatccagcctgcagggtagcctttcattggatgctgatgcaaagcaagcggcaacttggccagggccaagtcctgagcaccaggaggacaaggacatgggccagacaatttatgcaagaaaatcatggagagatgtgagtgccaggggcaccaccactacgaagttacaccctgcctcagatcagctgcttctgtgcagtgtaaatttgttcttgatgacttatttgtcattctgttcccagagtctttctggttcaaaacaagattaagttttttggttcttgatttttttaaagaaggatcttgctctgttgctcgggttggagagcagtggtgccatcatagctcaccatagccttgaattcatgtcctcaagcgatcctcccacctcagcctcccgamgtgctgggactacaggcctgagccactgtgccctgaccccctcattttccccaggcatcctttcctcctccagcatctcatccaggagaccacatcatactagctgtcggg

SEQ ID NO: 84457 - DNA, 644 bp, Homo sapiens
caacagcaatatcacttttactaaactttctacataattttctaggaaagggtgaattttaatcagttcatttttctaatatagaatctaatttcattggctatagctaataaatacattttttaaaaaattaagaaaaaataaagtttattcaargttttgaataaaacataaagaatatctgtcatgcctgatgaaagagatcatgccatgatcagtaaaattatgtataaacttatgtgtgataaatgttcattgtcatacaattgtttataaaataagatatctcaaaaaaaaaaagaaaatgtggcacatatacactatggaatactatgcagccataaaaaatgatgaattcatgtcctttgtagggacatggatgaaggtggaaaccatcattctcagcaaactatcgcaaggacaaaaaaccaaacaccgcatgttctcaatcataggtgggaattgaacgagagcgcttggatatgggaaggggaacatcacacaccagggcctgttgtggggtggggggagaggggacggatagcattaggagatatacctaatgtaaatgatgagttaatgggtgcagcacaccaacatggcacatgtatacatatgtaacaaacctgcacgttgtatacatg

SEQ ID NO: 84458 - DNA, 1699 bp, Homo sapiens
gcatgcctatagtcacataaatgtgtacgtgtgtatattaacacctgaatattccacatagttctttactttagatttattctaaaaaaaccaatttcctaaaaaaaagtgtatacatttgagcacatgcctgaaatgatacacaaaacaaaatacttgataataggaccctgtcacgtgtatgcatatgtttgtttttcaaggccagacacagtgctttgcacttgtaggtgactggtgaatgcttttgagaaaaacaaaacaaaacaaacaagaaaccaaaaactgggggagggaatccagttggtcaagggatcagcttgcatggaataggcatttcataaacgtgagcagcttttctataccacaggtttttcagtagagatatttttatgtttcctgtggccttccrtaacacaatgatgtgcaattccttgagagtgacgtatttgtaatatatttctggataaatattcccaaagccatattacagggacctacatgtcttttgtctttgtgttttctctggaaaggggagcatcccctgctctctgacagaagggagaggaataagtctgatttgtgagagcctagaattcactgtacatgtttcttgagcggaagggttatccatttccccaccatgacacttgatcatctttcccttcatttcacaaggggaaggtccacagtgccctcccctagacttcctgcctctgtgtactgaacataattatatggatgggctctgggcatgttttccataggcagaaatggatcctctcatttcctctttgtgccaacagtttggtgactgagctagtccgacagaagtgctctggagtgcagccctgctcttttccatttcatggtgattggtgggaaaagcatagaggtaggagagttaattacctttcctcttgttccaagacacactacctaattcagctttaacaaatttccaacattaggggctgttcacttgctaatattgtggttgttcacttactaatacagtggctaaatattttgagaattttaagtaattgtattttgaatagattctctccttcacttatatcccagaagggaggcagggaaaacctcagtcttgcttcatcatccagacccctggtctttaaaataaaccaatgtaatattctgtagaatattactattgaaagaaagattggcatgtaggctagaagataacatgtggcaggccgggcgcagtggctcatgtctgtaatcccagcactttgggaggccgaggtgggtggatcacgaagtcaagagatcgagaccatcctggccaatgtggtgaaacctgtctctactaagaatacagaaattagctgggtgtggtggtgtgcgcctgtagtcccagctacttgggaggctgaggcaggagaatcgcttaaacccaggaggtggaggttgcagtgagctgagatcacgccactgcactcccgcctggttgacagagcgagactccatctctaaatacataaataaataaataaataaataaataaataaataaataaataaaatatgttgcgtgactgaggcatcttatccggggcaggtactagagctaactctggcccatgagcatgatggtgactggcattttggttgtgcacaccattctaggcagatactgctccttggtgatatgaaaaataatatatatttg

SEQ ID NO: 84459 - DNA, 1154 bp, Homo sapiens
aaaaaagatttaaaattaatgttctaaactttcatttttaagacactaagaagtaaaattaaatctaaagtaagtagaaaaaaggaaataataataaaagtaggtatcagtgagctagaaaacagaaaagcaattaaaaaatcaacaaaggcaaaaaaacacatgttttaaaaatattaacaacttgttaaaccccaaacaacactgatgaagaaaaaaaagatagaagacataatatcaagggaaaaaaagcagagccatttttgcaatttctatagaaattgtaaggataatgcaataaatatatcctacaaaatgctcttagccagaacatgtaaatatgtaaagaattactacaaattaataaaaagaaaaacaaataatccaatttttttcaaaagtaaaaacattaaaaggtaattcacataagagaatacacaaatgtaaattaacaaataaatgtattagtcgtcaagaaaatgcaaagtaatggcaaaaactgcaattacttttgcaccaacctaatactaccacacctacataaggataactaaaattttaaaaactaacaaaattaagtttgggtgaagataaagaacaaccagaatctgcggacactgctagaggaaccacaaattaatacccttttaacactgtttattagtatctattaaagcaaacatatatgtctctataactcgtcagttccaatcctgtgtatacacccctccaaaaggtgtgcttatttcacagcagctctgtcatcatatcccctaactagaaataccaagagcaggatggatgaatctcacrgagagtattagacaaaagaaactagacacaatcagcttcatgctgtatgaatccatgtctatgaaattcaaaatcacaaaactaaaccatagtgctagagatgtccttccaggtggtgtgtgttggtagtaagagtcatgaacaagccttctggggcactggaaatgttctatgtcttgatctgcatgataatcccataagtgtgcatagatgtaagagtttattgaatcctatgcctaagatctgtttacttcactgtttgtgaattaggcctcagttaaaaggtacaaaacaaaagttatgtattatttaaacattccttaaacaaacaaaaacaagtt

SEQ ID NO: 84460 - DNA, 747 bp, Homo sapiens
agctatttaaaccatgcaaaacactaacctttgcaggttgcagttttcccatctgggatgtaggaatagcatttctctacctgtcttgtaaggttgtgaagatcaaaagataaagccttttatgaactttaagcattacgcaaatgtcagatatggctgttagagtacaatagtgttaaagatatataaagttgctttcttcaacatttttcttcatcaccaaagatgtttatttatttktaaaccttcctgaaaatcacccttatattatgattttattacaaaccagtttgtggaataggttgaaaagcattattgttttcattctatggatgagaaaacagagagttaagaaaaggcaaatatgggattttacctaagatactgctgataaacagtagaacaaaggtgagaagcaagttctgcttcttctgcttccctgggctaggcttcttttgttctcttcacttggggtctctctctaaccagctctaacccccatttagaggtgtctaatcatctctgtgccaggggtgaagctgaagcaagcacttgggtgccaggcaggagagtgaggacctgaagactagtggatgggtggagggccaggctgtgcagaccgtgggcccaggggaattgcagggtgggagcaaagttcagggatcaagccagagatcagttatcaaaagaatttaaaaattctgagtgggtaaatatggcaggcaagaacagtataaacagatcagg

SEQ ID NO: 84461 - DNA, 747 bp, Homo sapiens
agctatttaaaccatgcaaaacactaacctttgcaggttgcagttttcccatctgggatgtaggaatagcatttctctacctgtcttgtaaggttgtgaagatcaaaagataaagccttttatgaactttaagcattacgcaaatgtcagatatggctgttagagtacaatagtgttaaagatatataaagttgctttcttcaacatttttcttcatcaccaaagatgtttatttatttttaaaccttcctgaaaatcacccttatattatgattttattacaaaccagtttgtggaataggttgaaaagcattattgttttcattctatggatgagaaaacagagagttaagaaaaggcaaatatgggattttacctaagatactgctgataaacagtagaacaaaggtgagaagcaagttctgcttcttctgcttccctgggctaggcttcttttgttctcttcacttggggtctctctctaaccagctctaacccccatttagaggtgtctaatcatctctgtgccaggggtgaagctgaagcaagcacttgggtgccaggcaggagagtgaggacctgaagactagtggatgggtggagggccaggctgtgcagaccgtgggcccaggggaattgcagggtgggagcaaagttcagggatcaagccagagatcagttatcaaaagaatttaaaaattctgagtgggtaaatayggcaggcaagaacagtataaacagatcagg

SEQ ID NO: 84462 - DNA, 1400 bp, Homo sapiens
agaagtgctttttcatttgcatagtaactctgtataattacattaggtgttcttaaaggtttgtaactacctttacgcccaccagaaactggtgatttcatttcacatttctttaacaggcttataatgtctataacattagtactctagaatttagtaatatttagtatatatcttcaagaaaaatttaagaaatttttaattgctggattttwcttacactggtattaaaatacatcaacttttaatagatatatagtaagatgtggaatttgtctggtagggctgccataacaaaataccatacactagatggcttaagcaacagaaatttattttcctacagttctgggggccataagtccaagatcaagaaatctacaaggttggtttcctctgaggcctcttttgtttgcttgtaaatggccacctgcttgctaaattcatgctgaattctaagatgagtattttgtgttaacaattacttttctgttggcaactcagtcagaggtgttgggaagtgtttttgctttcttctttgctgctgggtaccgaggaaaatgtgtctcagtttgagggattctcctctcttgtatctgatctttcagggttgaccagtgaacagtatgagcatactctttccctcccaaggtatctttcttcagtacaaaaatagaaactatgaggtttggatccctcctacccaaccccttcttcacctatctttgcctgaacttctctcctttgagagcaatttctgccatcctgaaaatcagaaaagctaatgttatgaagtttttagaaaaacaaacaaacaaacaaacaaacaaaacccaaagtcagttatattgcctgaacttcaacagggccaatatagcaattaataaactgatgagatgctttgtcctactgaaaattccataggcagagagtagaggtatttcagggtagaatgatggaagacatggggagagggagagagaaaaaaaggcatcaccattaaaaataagttcttagaacacgacatcctttagtgcttcatttagcaaaatatgtcattttagaagcacttctgagtgaaagtcaaatgtaaattttatacactgactataaagaataaagcgtcctccgggaagaaatgtgctcacacatgaaaggtaagaagccttcatccacaaccccaaatgctagattagttgtagataaatgatggattgaatagtttctgggaagactccttgctcagtcttcagctttgtccctgtagagtcctgcaagatcgtttgtttacagtacatcgtcttttaagccaaggagatttcaccagttgtttccagaattcctgtatttcatttcacccctgctattttacctcatttcaaagttttcattccccatag

SEQ ID NO: 84463 - DNA, 1400 bp, Homo sapiens
agaagtgctttttcatttgcatagtaactctgtataattacattaggtgttcttaaaggtttgtaactacctttacgcccaccagaaactggtgatttcatttcacatttctttaacaggcttataatgtctataacattagtactctagaatttagtaatatttagtatatatcttcaagaaaaatttaagaaatttttaattgctggatttttcttacactggtattaaaatacatcaacttttaatagatatatagtaagatgtggaatttgtctggtagggctgccataacaaaataccatacactagatggcttaagcaacagaaatttattttcctacagttctgggggccataagtccaagatcaagaaatctacaaggttggtttcctctgaggcctcttytgtttgcttgtaaatggccacctgcttgctaaattcatgctgaattctaagatgagtattttgtgttaacaattacttttctgttggcaactcagtcagaggtgttgggaagtgtttttgctttcttctttgctgctgggtaccgaggaaaatgtgtctcagtttgagggattctcctctcttgtatctgatctttcagggttgaccagtgaacagtatgagcatactctttccctcccaaggtatctttcttcagtacaaaaatagaaactatgaggtttggatccctcctacccaaccccttcttcacctatctttgcctgaacttctctcctttgagagcaatttctgccatcctgaaaatcagaaaagctaatgttatgaagtttttagaaaaacaaacaaacaaacaaacaaacaaaacccaaagtcagttatattgcctgaacttcaacagggccaatatagcaattaataaactgatgagatgctttgtcctactgaaaattccataggcagagagtagaggtatttcagggtagaatgatggaagacatggggagagggagagagaaaaaaaggcatcaccattaaaaataagttcttagaacacgacatcctttagtgcttcatttagcaaaatatgtcattttagaagcacttctgagtgaaagtcaaatgtaaattttatacactgactataaagaataaagcgtcctccgggaagaaatgtgctcacacatgaaaggtaagaagccttcatccacaaccccaaatgctagattagttgtagataaatgatggattgaatagtttctgggaagactccttgctcagtcttcagctttgtccctgtagagtcctgcaagatcgtttgtttacagtacatcgtcttttaagccaaggagatttcaccagttgtttccagaattcctgtatttcatttcacccctgctattttacctcatttcaaagttttcattccccatag

SEQ ID NO: 84464 - DNA, 1400 bp, Homo sapiens
agaagtgctttttcatttgcatagtaactctgtataattacattaggtgttcttaaaggtttgtaactacctttacgcccaccagaaactggtgatttcatttcacatttctttaacaggcttataatgtctataacattagtactctagaatttagtaatatttagtatatatcttcaagaaaaatttaagaaatttttaattgctggatttttcttacactggtattaaaatacatcaacttttaatagatatatagtaagatgtggaatttgtctggtagggctgccataacaaaataccatacactagatggcttaagcaacagaaatttattttcctacagttctgggggccataagtccaagatcaagaaatctacaaggttggtttcctctgaggcctcttttgtttgcttgtaaatggccacctgcttgctaaattcatgckgaattctaagatgagtattttgtgttaacaattacttttctgttggcaactcagtcagaggtgttgggaagtgtttttgctttcttctttgctgctgggtaccgaggaaaatgtgtctcagtttgagggattctcctctcttgtatctgatctttcagggttgaccagtgaacagtatgagcatactctttccctcccaaggtatctttcttcagtacaaaaatagaaactatgaggtttggatccctcctacccaaccccttcttcacctatctttgcctgaacttctctcctttgagagcaatttctgccatcctgaaaatcagaaaagctaatgttatgaagtttttagaaaaacaaacaaacaaacaaacaaacaaaacccaaagtcagttatattgcctgaacttcaacagggccaatatagcaattaataaactgatgagatgctttgtcctactgaaaattccataggcagagagtagaggtatttcagggtagaatgatggaagacatggggagagggagagagaaaaaaaggcatcaccattaaaaataagttcttagaacacgacatcctttagtgcttcatttagcaaaatatgtcattttagaagcacttctgagtgaaagtcaaatgtaaattttatacactgactataaagaataaagcgtcctccgggaagaaatgtgctcacacatgaaaggtaagaagccttcatccacaaccccaaatgctagattagttgtagataaatgatggattgaatagtttctgggaagactccttgctcagtcttcagctttgtccctgtagagtcctgcaagatcgtttgtttacagtacatcgtcttttaagccaaggagatttcaccagttgtttccagaattcctgtatttcatttcacccctgctattttacctcatttcaaagttttcattccccatag

SEQ ID NO: 84465 - DNA, 1400 bp, Homo sapiens
agaagtgctttttcatttgcatagtaactctgtataattacattaggtgttcttaaaggtttgtaactacctttacgcccaccagaaactggtgatttcatttcacatttctttaacaggcttataatgtctataacattagtactctagaatttagtaatatttagtatatatcttcaagaaaaatttaagaaatttttaattgctggatttttcttacactggtattaaaatacatcaacttttaatagatatatagtaagatgtggaatttgtctggtagggctgccataacaaaataccatacactagatggcttaagcaacagaaatttattttcctacagttctgggggccataagtccaagatcaagaaatctacaaggttggtttcctctgaggcctcttttgtttgcttgtaaatggccacctgcttgctaaattcatgctgaattctaagatgagtattttgtrttaacaattacttttctgttggcaactcagtcagaggtgttgggaagtgtttttgctttcttctttgctgctgggtaccgaggaaaatgtgtctcagtttgagggattctcctctcttgtatctgatctttcagggttgaccagtgaacagtatgagcatactctttccctcccaaggtatctttcttcagtacaaaaatagaaactatgaggtttggatccctcctacccaaccccttcttcacctatctttgcctgaacttctctcctttgagagcaatttctgccatcctgaaaatcagaaaagctaatgttatgaagtttttagaaaaacaaacaaacaaacaaacaaacaaaacccaaagtcagttatattgcctgaacttcaacagggccaatatagcaattaataaactgatgagatgctttgtcctactgaaaattccataggcagagagtagaggtatttcagggtagaatgatggaagacatggggagagggagagagaaaaaaaggcatcaccattaaaaataagttcttagaacacgacatcctttagtgcttcatttagcaaaatatgtcattttagaagcacttctgagtgaaagtcaaatgtaaattttatacactgactataaagaataaagcgtcctccgggaagaaatgtgctcacacatgaaaggtaagaagccttcatccacaaccccaaatgctagattagttgtagataaatgatggattgaatagtttctgggaagactccttgctcagtcttcagctttgtccctgtagagtcctgcaagatcgtttgtttacagtacatcgtcttttaagccaaggagatttcaccagttgtttccagaattcctgtatttcatttcacccctgctattttacctcatttcaaagttttcattccccatag

SEQ ID NO: 84466 - DNA, 551 bp, Homo sapiens
taagcagagcgaacagcatgagcaagtgtccagagatgaactcagggaaaggccagtcacctagtctggcagggccagggatggggtgtgataaagatgaagctgaggagctgggggaggctctaaagtccaggcagggagggcctgctagggcatgctagggaagccagaggcccttgggagcaatgaggagcccgatgctgaaggacagcagcgtgagtcagcatttcagaaagatcccttcagtgtccgaagcaggaccagaagcttggcccagggcagtgccaggagggagggcaagaagtgagtggatttaagagacactgaggagatacaagactcctcaaagagcatttatttcctggagatgaagacagagtggacacgaagcaagctgacactcagggactgtagctgtgggattttgaacagaggagcrtgctcagaacagggggcttcctaaggacttctccccacagccagccactgcccctcctacaaggagtcctgcaccacaccccattccatccccgtgtggagggcaaaggcct

SEQ ID NO: 84467 - DNA, 3043 bp, Homo sapiens
caaacccacctcccagagcatacaatggcgttaaaagagaagatttaggacaaattaattaccaagtatctgacaagtgatagcctgtggccagctctggctgcctggagcctggaggaagagagaaaatagaacctggggaccaatcacacggcactgcaggctggaagtcccatcactttgggcagtcctgtcctcaaactcttttccatatttctcagtagatctgggttctagctccagctggattttcctttggtagtctatgtcctctctctggacctcaatttgttcatctgttaaatggggacaggcatggtgctcaagctctctgagatgtaaaattccttctggctctaatattccaggattctgtggtctcagaattcagcccagactgtcccaacactcagcttctccttggagtgagtccatgggaaactacagcaattttcttggaccaccagtgggagaaggaggcattcagcaggatttctgcctaacttctgtctgacacccctggtggcctggggggctactgctgctcctgacttacttccctttccccctggagagccagctccttgggatgacctgacccgaaaacacatgcattcactcaccaaatactcagaatccttcctctaggccagaactcttgctgggtgcttggaccccatctttgtccttggaggagctcacagtccaatgaagggggcagaaatgcatggagaccacccaaatgcagtctgcacagtaggtaagacctgtgactgggatagcggggaagccgtgggaatgcaggggagtcttccggggaaaagtggtgtctgagctagactctgaaggatgaggcagagttcagcaaagaagagcagggggtagggtccatgctgcaggcagagggaacagcagaagcaaacgcccaattgttggaggcggagtgagtcacaggtagcttggtggactggaggacaggactgtgtgagcaacaggggaggtgagcagggacaggtatacctttgctaaaaaatatttattgagtgcatgctaattgtgaaagaccttgaatgacattcccaaatcctgaatcatctcccttcctgggccctggcctaagtgtctgtaacatttgtaatgaggatttgtttctaaatttagttaattgctgtttggcttttcccatctcatgggaatagctctactagagggagtgggccaggaaactggcctcaagaccaggaatagcagcagggacatcatagtccaggagaggagagatagcaaggatggcagccaagggcatggcctggccccttatggtgtttccacctggcctttgcactatcttcttggctgcccatgtcttccttggggcatgagatccagcagcctcactctacagcctggggagcatcctgggctggctggtgcatgtggggcaattgagtgcagagactggagtggagtggttgaaggagcaggaggacagagagggcccttggggaaagagttttgtgaagcaaagtcccagaacagggaggaagtggtggtctcagccaggagcagagccctacaaccacagggcccagaccctgggagaactgaacccgggagaagcaagagggagccatcattaattgcacaatagtgtgctatatgctttgcttatattatctcactaaaatgcctcaataactttgcaagaaagggttattactcccatgttgcatttggttttgatagtactagtataaacacagagaggttaagtaacttgcccaaagtgacacagccagaaaatgttgatgctgaggtcagaactcagcctgtctgactcccagtcacttctctttccagtgtgccatggtggcccattgtgtttcttgcctttctcctttcctagatcggtgaaccttccttccttcctgtctttacatgggcttttctttctgtctggagcaccatctcttttatgcatattctttacctgatgatattctcattttccaggtctggtgcagatgtcctttgtgaaaggtcctctgacccttccaggtagattttattttcttcttccctcccttatccatctatcatcacccaccatccatctctttatgccttacccataaggatttctggctgtctaggtagagttctttgctgcctcccctgtgatctcacagcactttgaaaaacaaatgagcaccccagtcaattgcatatatttattttttgtacttgtgtctgttggctccaccagcctgggagctccctgagggatggctgggtctgactctgttttgccccaggcattgcccagcacagagtccacttcctgtttttygcatttggtctgtttctcaaagaagagttttcaatatctgcaatgattttgggctgagactgagagcatttttttgatgccaagagagacatgtacaaatcactactgttagatggggagaattgaactggagaagtcactaataagtggatcctttcgctttccccaggaccatagggtgatcctagaactgtagagaattgtggacatttcagggactccagatttgcctcattagcctgtgttgcataaaccattgctcaagactggaggagacatggaaactcagtgtgtctctgtgggctcaccaaggggatgctggagcacgtgccagttctggatggggatgggttgagtattagtcagtttttttctagattatgctgtggtaatagacacaccatggcatgctccaaatgggggctttacaataacaaaagtttacttcctgcccacatgatattctgcttgcggtggctgtgggttgactgtggctctgctccatgggtcttctttattccaggaagcagctgtccctatttgggacatgacatactcagggcagagagcaaaaggcaaaatgggtgaaccacacaatagctcttaatgtcccttccactcatttcgctggccaaagcaagaggtgtggtggggtcccatgtaaactctgcccacaggagaccctgcaagcta

SEQ ID NO: 84468 - DNA, 971 bp, Homo sapiens
agctgaacctgctggtctcttgatcttggatttcacagcctccagaattataagaaagtaaatttctcttctataaaatacccagtcccagaaattctgttataccagcacaaacagactaaaacagctttcaagtgtgattagagtcaacaaccctgactagggtcagtaattgggatrctctgttatctctattgcaaagttactgcgtaactccaggtgcaccacattttagcatattcccactttggcaacgtggtggtggtggtggtgaaggtgtccagacagagggggcagtaagaggaaaaagccctaaaatggctggtatgtttaacataggtttctttaactccccacaacctgtaactggtacaaataggttcacattagcattaattccctcatttcaatggctcatcttagttctctgcctatgcttttcacttattttcagatgtctctagagatgtcttacacgcacgcaataatggtcttctgttcctctgctccaccttcctagttggtgtctatcacccacaagccacttaaggaaaatgcttttcctctgctgtgactgctgttgtccttcatgaaataaatactgcccagcccaggaagcaagcttcagacactccgaaagtcacaacacccttgagatgccaaatgacaatgtgttctgtaaatcaaacgacgtgacggaggtaagtctcaatcattttacaggtttattttgccaaaattgagcatgtgcctggcaaaaaggaacacaaaatcacaggaacatctgtgatccgtgctttttccaaacagggtttgagaacttttgtatttaaaggggaaagagcaggcagtaagggaaagtggaaagaaaagggggtagggtaaataaaagagaaaagcaattgcattcttttgaagctttgatcagcagtcactgaatccatattttacatgtgaaagaagcgggtaga

SEQ ID NO: 84469 - DNA, 971 bp, Homo sapiens
agctgaacctgctggtctcttgatcttggatttcacagcctccagaattataagaaagtaaatttctcttctataaaatacccagtcccagaaattctgttataccagcacaaacagactaaaacagctttcaagtgtgattagagtcaacaaccctgactagggtcagtaattgggatactctgttatctctattgcaaagttactgcgtaactccaggtgcaccacattttagcatattcccactttggcaacgtggtggtggtggtggtgaaggtgtccagacagagggggcagtaagaggaaaaagccctaaaatggctggtatgtttaacataggtttctttaactccccacaacctgtaactggtacaaataggttcacattagcattaattccctcatttcaatggctcatcttagttctctgcctatgcttttcacttattttcagatgtctctagagatgtcttacacgcacgcaataatggtcttctgttcctctgctccaccttcctagttggtgtctatcacccacaagccacttaaggaaaatgcttttcctctgctgtgactgctgttgtccttcatgaaataaatactgcccagcccaggaagcaagcttcagacactccgaaagtcacaacacccttgagatgccaaatgacaatgtgttctgtaaatcaaacgacgtgacggaggtaagtctcaatcattttacaggtttattttgccaaaattgagcatgtgcctggcaaaaaggaacacaaaatcacaggaacatctgtgatcygtgctttttccaaacagggtttgagaacttttgtatttaaaggggaaagagcaggcagtaagggaaagtggaaagaaaagggggtagggtaaataaaagagaaaagcaattgcattcttttgaagctttgatcagcagtcactgaatccatattttacatgtgaaagaagcgggtaga

SEQ ID NO: 84470 - DNA, 678 bp, Homo sapiens
ttttttttaagcaatattattgctgtagacaaattagactcattttctttttcatttctcatggagaagaatattttgcgtttgcttataaagttccttaaaatttacaaacatgttcacaagcattatttaatttcaacatcataacagttatgtaaggaagggaagagatagtgtgtcacccctttgtagagtaataaaccaagtcttgtatgttaaatgctttggtggttatattgttagtaagagatgaagccagaaaccctaacttctattttatggacatgcttcagtgtaaagacagagaagtcatgtgttggggctttgaakcccggagttctggtataatgtctaatgaagacttggtgaattcgcagagtgttgtctttttacctgtggcttctgcaccttggtccagtcaggaatggccaggttagcaatgtgaagtgatgtgtgccagcctgtgtaactccaggttttcaccaggacagtgacctgctggaccgacggaaacagtgcttcaccgtgcagtctgagtctggggaggacctgtacttctcagtggagctggaaagtgacctcgcccagtgggaaagagccttccagacagcaacctttctagaagtagaacggatacaggtgagagtctgtgggactgcaggatgtgtggctccctca

SEQ ID NO: 84471 - DNA, 759 bp, Homo sapiens
gcgaagataagtaatgtctttcactttcatttttataaattaaattaattcataattgagaagttgctgtctgccagactttcttccatatactgagagtaagggaggagaccacccctcatattgtcttatgcccaatttctgcctccaaagaaagaaaaagtaaaaactaaaaggcagaaatgaaatccacaagcagacagcccggtgccacaccctgggcctggtagttaaagatcaacccctgacctaatcggttatggtatctataaattacagacattgtatagaaaagcactgtgaaaatccctatcctgttttgttccgatctaattactggtgcatgcagcccccagtcatgtacccacttcttgctcaatcgatcacgaccctctcacgggaaccccttagagttgtgagcccttaaaagggacagggattgctcactcggggagctcggctcttgagacaggagtcttgccgatgccccaggccgaatacaccccttccttctttaacttggtgtctgaggagttttgtctgtggctcattctgcttcaagagtacaatgaagaaagggcaacaagatttctgtttccacaggccttatattttcttagctcagcttagctttcccagtggagcacatttttattatttttcttgtttttcgttatttatgtgtgtgtgtgtgtgtgtgtgtgtgtgtgtgtgwgaaatgcttacttgatcttaattggtgtggtcatattaaccttt

SEQ ID NO: 84472 - DNA, 808 bp, Homo sapiens
catacctcagaagtaaagcatcagaaccaagagacctatgatattctgaccttttttttgagacagagtttcgctcttgttgcccaggctgcgtgcaatggtgcgatctcagctcactgcaatctctgcctcctgggttcaagcaattctcttgcctcagcctctcgagtagttgggattataggcatgcaccaccatgcctgactttttttttttttttttttaatttttagtagagacggggtttctctatgttggtcaggctggtctcgaactccccacctcaggtgatccgcccacctcagcttcccaaagtgctgggattacaggcatgagccatgcacccagctattctatgacttttaatggtcatcatcctctatgtttgtacaaagcatcttggatacaatgagtcatgacattcttttaacacccartgttgggcagaaccatggtgtatcattggactaggccagaaatttgtaaattctctcttcgcaaaacactgtgattgaaccaggatgcaggccaggatggagaaggccatctcatctattgtcaaaaggcccaccatttcaggggtcctgctaagcaaatattacttgcccttttattttataaatgagaaaactatcagaatagtgtagtgatttgcacaaggctacttgtagaaagtcaggggcagaactgaaaggtgaactcaatacttttgatggcaacataagcaatgccgagccatttttttaccatgatcatgttttatgccatcctcaggaaccttgaatcctagagtatcacatttttttaa

SEQ ID NO: 84473 - DNA, 800 bp, Homo sapiens
tacaaagaccagttcacatctggcctggggtgaatggcagggtgccccaggatcaagcaagaagcatctggcctcaggaagaagagcatctgaaaagcattaggttgctaaaagcctgctctcccaaagttgccaagaaaactcaaatgttccatgatgtctaaaggattgtcaaaagcacccaggccaaggagtgtagcctggccatttggaaccaggaggaggcccacactcatagtaggtctacctccaagacccaagcaccctgcctgggaagggccatgcaagcatgttcttagccagcgggggcctggtgccgaagaccttctgctcattggccagaggcatttggctacaggaggctggtggtgcatgtgcatgctcagggtgcaactcagtggaacgaagtttgctcagatctttctccttcccctaaaggtactacacagctcctgggtgcaatgatgggtggcccagagtagggtccatgcatcattgcttatagattatgccacctttccccaaccctggatgccctggggcttaatccatgggcatcaatttatagcaagattctgttaggacagagaagaaaaggtttgagggcctatgcccatggtcttaatatctgttaagtccgtgtgggatacaagacttagaatctagttaagctyctgctatctgacttaagagtcatatccttttgggctagtcacttaaactcaggaggtttactcacctagaaaatggtgatggccaaggcaaataaagtgaaaattaaaggatctctggaatctgaa

SEQ ID NO: 84474 - DNA, 824 bp, Homo sapiens
agttgggagattccatgtaaaaatctgcatccctggcctctcttgaaaagtcagatggtctggaaaccctggatttatgtggtaaagattgcctggagttgatgaacaagtgggcacaagctttctgattttgaagtcctggctcctcctagtggtccctgtccccagcctggagaggccaggtgtcatttgcaattcattattgtgctgttgtgcatattgtgctgttgtgccacctttttttttttgaggcggagtctcgctctgtcgcccaggctggagtgcagtggcgcgatctcggctcactgcaagctctgcctcccgggttcacgccattctcctgcctcagcctcctgagtagctgggactacaggcgcccaccaccgcacccagctaattttttgtatttttagtagagacggggtttcaccgtggtcttgatctcctgacctcgtgatcygcccacctcggcctcccaaagtgctgggattacaggcatgagccaccgcgcccgtcctgtgccaccttttttaagttaagaagtaagtgaaattatttgtactccaaagtatcaaaattaggaaaacaaaagaccaagaatgttttttgttcaagaaaaaaatgaaagtctttttttgagaaagtgaaatagttatgtgttgtacctgtttaataattaaacacaaatgtgaccacatatacctaaatgtctgcttgcagctagcttcacttaactttcctcttggctctctccctttgcaaccctggaaggttctgtgttttgtttgtgttaatgcagtatctctggaatgctaggatatgta

SEQ ID NO: 84475 - DNA, 824 bp, Homo sapiens
agttgggagattccatgtaaaaatctgcatccctggcctctcttgaaaagtcagatggtctggaaaccctggatttatgtggtaaagattgcctggagttgatgaacaagtgggcacaagctttctgattttgaagtcctggctcctcctagtggtccctgtccccagcctggagaggccaggtgtcatttgcaattcattattgtgctgttgtgcatattgtgctgttgtgccacctttttttttttgaggcggagtctcgctctgtcgcccaggctggagtgcagtggcgcgatctcggctcactgcaagctctgcctcccgggttcacgccattctcctgcctcagcctcctgagtagctgggactacaggcgcccaccaccgcacccagctaattttttgtatttttagtagagacggggtttcaccgtggtcttgatctcctgacctcgtgatccgcccacctcggcctcccaaagtgctgggattacaggcatgagccaccgcgcccrtcctgtgccaccttttttaagttaagaagtaagtgaaattatttgtactccaaagtatcaaaattaggaaaacaaaagaccaagaatgttttttgttcaagaaaaaaatgaaagtctttttttgagaaagtgaaatagttatgtgttgtacctgtttaataattaaacacaaatgtgaccacatatacctaaatgtctgcttgcagctagcttcacttaactttcctcttggctctctccctttgcaaccctggaaggttctgtgttttgtttgtgttaatgcagtatctctggaatgctaggatatgta

SEQ ID NO: 84476 - DNA, 824 bp, Homo sapiens
agttgggagattccatgtaaaaatctgcatccctggcctctcttgaaaagtcagatggtctggaaaccctggatttatgtggtaaagattgcctggagttgatgaacaagtgggcacaagctttctgattttgaagtcctggctcctcctagtggtccctgtccccagcctggagaggccaggtgtcatttgcaattcattattgtgctgttgtgcatattgtgctgttgtgccacctttttttttttgaggcggagtctcgctctgtcgcccaggctggagtgcagtggcgcgatctcggctcactgcaagctctgcctcccgggttcacgccattctcctgcctcagcctcctgagtagctgggactacaggcgcccaccaccgcacccagctaattttttgtatttttagtagagacggggtttcaccgtggtcttgatctcctgacctcgtgatccgcccacctcggcctcccaaagtgctgggattacaggcatgagccaccgcgcccgtcctgtgccaccttttttaagttaagaagtaagtgaaattatttgtactccaaagtatcaaaattaggaaaacaaaagaccaagaatgttttttgttcaagaaaaaartgaaagtctttttttgagaaagtgaaatagttatgtgttgtacctgtttaataattaaacacaaatgtgaccacatatacctaaatgtctgcttgcagctagcttcacttaactttcctcttggctctctccctttgcaaccctggaaggttctgtgttttgtttgtgttaatgcagtatctctggaatgctaggatatgta

SEQ ID NO: 84477 - DNA, 1254 bp, Homo sapiens
agactccatatctcaagaaaaatgtattaaaaaaagaacattaaacatgttcatagtctttgaccctgaaccttttcttcagagattctatcttaggaaataatcagagatataaacaaagatttatgcatgaagattgttgtaaaagtagaaaaaaatttgtgtcagaataattttacctgcaagtgtctgaaatcctgatacaagatgacttaaataaaaagcaaatttatgtcacataacaagaagtacagaggaggaggtgaacttcaaggctacagttcagtgattcatcagttttgtgaaataactaagtttcattcatctcttctgtgatttttcagaagtaagatggctgaccactcagaattcacaatgtctagaggaagaaaagagacaatattttctaatgactctgtcttagatgtgagaaaactttcccaaatctttctaaccaaacttcccttcatatgttattggctagaagtagtcatatgccatttctgaaccaatcgttggattggtctattattcttagaccagtcaggtccactcctagaactcgtagtgaaatcatctctttaagatgtttggctatttggaggaagactgtattactggaaaaaaaatatttttggaaaacagaaagggcaacccaaagtgtgcattatatatctaaatgaattaaaatagcagtatgttaaattatagtacattcatgttttacgggggatgattatctgatcattataaatgttgggtttggagaatgtttaaaatgaaaaaaattataaatgctgtcttagtcagctcatgttgccataacagaataccatagaatgggtggcttaaacaaaaacttatttatcacagtttggtaggctagaaaatctaagatcaaggtgctgtgtaattcagttcttggtgaaggctctattcctgttctcactgtgtcctcatatggcagrgagagacagagaaaacgcaaactctctggtatctttttttatgagggcactaatctcatcatgaaggcctcacttttttgacctcatttaatcctaatgaccttccaaagacccagactccaaatgccattatattgagggttagggattcaaaatatgattttggggtgggaggaaataacacgaacattcagtcaataacaaatgttatatcaaaaaaagagaatattcttgatgtcttaggcatgagaaaaagaatagaaaatgtatatacattatacctatg

SEQ ID NO: 84478 - DNA, 1254 bp, Homo sapiens
agactccatatctcaagaaaaatgtattaaaaaaagaacattaaacatgttcatagtctttgaccctgaaccttttcttcagagattctatcttaggaaataatcagagatataaacaaagatttatgcatgaagattgttgtaaaagtagaaaaaaatttgtgtcagaataattttacctgcaagtgtctgaaatcctgatacaagatgacttaaataaaaagcaaatttatgtcacataacaagaagtacagaggaggaggtgaacttcaaggctacagttcagtgattcatcagttttgtgaaataactaagtttcattcatctcttctgtgatttttcagaagtaagatggctgaccactcagaattcacaatgtctagaggaagaaaagagacaatattttctaatgactctgtcttagatgtgagaaaactttcccaaatctttctaaccaaacttcccttcatatgttattggctagaagtagtcatatgccatttctgaaccaatcgttggattggtctattattcttagaccagtcaggtccactcctagaactcgtagtgaaatcatctctttaagatgtttggctatttggaggaagactgtattactggaaaaaaaatatttttggaaaacagaaagggcaacccaaagtgtgcattatatatctaaatgaattaaaatagcagtatgttaaattatagtacattcatgttttacgggggatgattatctgatcattataaatgttgggtttggagaatgtttaaaatgaaaaaaattataaatgctgtcttagtcagctcatgttgccataacagaataccatagaatgggtggcttaaacaaaaacttatttatcacagtttggtaggctagaaaatctaagatcaaggtgctgtgtaattcagttcttggtgaaggctctattcctgttctcactgtgtcctcatatggcagagagagacagagaaaacgcaaactctctggtatctttttttatgagggcactaatctcatcatgaaggcctcacttttttgacctcatttaatcctaatgaccttccaaagacccagwctccaaatgccattatattgagggttagggattcaaaatatgattttggggtgggaggaaataacacgaacattcagtcaataacaaatgttatatcaaaaaaagagaatattcttgatgtcttaggcatgagaaaaagaatagaaaatgtatatacattatacctatg

SEQ ID NO: 84479 - DNA, 2333 bp, Homo sapiens
tgctttgggagcttgtggatgaggctgaatcactctctgaaacctgataacctgataacctagtttggctaagtttggcttctgtgaacagggtctgaggatttatcacatcacgtcattttttcatttgtatgccaaatatttattgagtaccttttatgtgaccagggctatgattatcacctgggaaacaaagatatgtatagcatgatccttttcttcaagtagctcaatctagtgggctttagacagtaatacaaagaattagagtaacatgcggtaactggtagatctgccaacatcagccgaggaggagggagggggaggatatctgtggagacagtttgatatagtctcatttaatcctcacaacaattctgtgaagaatatgttattatatttattatacagatgaaaaaattgaggattagagaaattacktaactgtccctaaatctcaccactagtgagtagtgaatttggataaaaactttactatcttatggccaaaagaaatacagctccaacaacattctaattactgaaaataatatttgtaaagcaagattttagtacctttttaattttataggacagtaccctcttggcaattcaaaagatatttgtagaatatagagctctgataattttgatctttggtacagaaaatgctgctgctgtctgagggaagagagtgaaaaatagaagtaggttttactttgttttaagattgctacctgctgattctctttcctattaatggaaattgtaaatgtattctgctgtaatttcctcatcttaaagtatcacagtttatgatggtatttaaatgggtttgtgcttttaaattgaagctttacttatggtgtcgctctgcacagctgctgtcttccaggcctttgaatgattaacaccccatgcactcaggcttattttcctgagctttccctgtatgtattataaaatcctgcacattcacataagtgtatatgttatctacacatttcaaaatccatgccgatcttgtaataatgcatatagttcatcccttagaaaggacaaaaattctttctgattatggatggcaatacaatgggtatgccagaaaatatctgttgggagattttagagatgatttacttataggcttctttccttttaaaaaatgtaataattcgtcttgaaggtgctattgctaactgtttttaaggaggagatgactcgatggcactcaaatacaccttttcctttgagaaaattgctgtgtttagagaacgaaaaagtaactgctttgtaatacataaaacaattgcataagaatagactataaataatctacaacacacaaaggacacaaatattgtgtccagaattctctaaaccacacacacacagaaaaactttactggccatctcttagcttttggtgatacaatatgtgagctgtttttgaggaatagctgcccctacctaaggacggaatgaaagaagtcttccctttaggaactttgttaagggttaaagaaagtgtgtcttattactattaacctaggcctaagagttactcagatgtgtactgacacagggtttaccacttgtatcaggcaactaggtgttagttttgttttgttgagacaagtttattgagatacaatttacacatggtaaaatcatcctttttcaggtatgtagttcaataagttttaacaaagttatgtagctaacatacaaggaaagatatagagtatttctttctttcttttttcttttcttttttttttttttttgagacagactctcaccctgtcacccaggctggagtgcaatggtgtgatctcagctcagtgcaacctctgcctcccaggttcaagtgattcgcctgcctcggcctcccgagtagcttacaggtgtgcgccactatgcccagctaattttcgtgtttttagtagagacggggtttcttcatgttggtcaggctgatctggaactcctaaccttgtgatccggccacctcggcctcccaaagtgcagggattgcaggcgtgaaccaccgcacccggccaagtatttctattacctcaaaaaattttacatagattgagcagtttgataatgctaatatatgattagaataagacattttgttttgctctcctttcctattttacaactaagctttacattttactaatatttcacaattttttcctaatatcctttttctattccatctaggatactatggtacactgtgtcatcctctttaaaaatcatttttatgaggaaatgattaacacatagttagattacatggtgatattgtcaagtgaagt

SEQ ID NO: 84480 - DNA, 705 bp, Homo sapiens
ttttaaatactttaaaaatactaactatcctagcaacagtcctatgaggtaagtactattatccccattttacagaataggaaactaaggtacttagaggttaagtaacttatccaagatcacagaactagaaactactgatattgtggttaaaaacatgggcagtggctccaggatttatgttctcaagcactgtacaatactgcctttccacttatgcccagtttctcaagcacgaagagacattcacagaattttgacaagtttgagtctacaaagatgagagatattttggttgaaaactacaacaggaaaactgtagaatcaaaatttataccataatttacccaggaacacatacatggctcacattttaacgtttctagaatcagattgtggcttacagctttattcagggaaataagacatatttgtaaacataatataccaacttcattaattgttaaatttaatgctcacaaaaacrtatttgaaaataatttctattttagatctttgtacttcatgagaattccccagtgtgtgtgaggattactgagatttgaagtgaaaatataaaatacttatattttagaggaaaaaaaggtaatgtgggatgttggtgtgttttaatttgtttggtagtatgtcagatggggcttccaaaggtaagtttctaggaccttcacgttgttaaatggcctt

SEQ ID NO: 84481 - DNA, 701 bp, Homo sapiens
tgccagggcaactacaagatatccaggtaggcaggctcagactctgaccagacatgcccaacatagaaagatggcccgaaaccaaggacaagccacaggtgagaggcatggatggaggaaccacgctcggaagcagagcacaggtgcagcggcgtgaggcttgtgggcaatgccagagaaacacagggcaggggcggggcttggaggaaggagcccagaagagctgagccctgctgctgacatctgagaaagtggcatgcyggtggctgtggggcaggagctgtagtctagtcatcataaggaagcaagtttggtttggtgaatgtatcacttagggttctttgaaggcaagcaagaaaaaaacaattctcacaaatttaggaaagaagaagcactggcggaagactgggttgttgagagaaggaacagaagcttaaagagcaggctctgcagctggaaaagaaccaggtcaagagaaatacttacctagctcacctgggccctgctgctgggatgaagggccccccaaaataccccactaagactgggatgaaagctggaccagatacaaaacctaacaaacatccactggaggtgccacagcccaatgagccttatgcaaactccaggcacggttctagaagagcttctcaatcagctgcagatgaccaaaggaaggagggaccgtgagaggcctgctg

SEQ ID NO: 84482 - DNA, 701 bp, Homo sapiens
tgccagggcaactacaagatatccaggtaggcaggctcagactctgaccagacatgcccaacatagaaagatggcccgaaaccaaggacaagccacaggtgagaggcatggatggaggaaccacgctcggaagcagagcacaggtgcagcggcgtgaggcttgtgggcaatgccagagaaacacagggcaggggcggggcttggaggaaggagcccagaagagctgagccctgctgctgacatctgagaaagtggcatgctggtggctgtggggcaggagctgtagtctagtcatcataaggaagmaagtttggtttggtgaatgtatcacttagggttctttgaaggcaagcaagaaaaaaacaattctcacaaatttaggaaagaagaagcactggcggaagactgggttgttgagagaaggaacagaagcttaaagagcaggctctgcagctggaaaagaaccaggtcaagagaaatacttacctagctcacctgggccctgctgctgggatgaagggccccccaaaataccccactaagactgggatgaaagctggaccagatacaaaacctaacaaacatccactggaggtgccacagcccaatgagccttatgcaaactccaggcacggttctagaagagcttctcaatcagctgcagatgaccaaaggaaggagggaccgtgagaggcctgctg

SEQ ID NO: 84483 - DNA, 701 bp, Homo sapiens
tgccagggcaactacaagatatccaggtaggcaggctcagactctgaccagacatgcccaacatagaaagatggcccgaaaccaaggacaagccacaggtgagaggcatggatggaggaaccacgctcggaagcagagcacaggtgcagcggcgtgaggcttgtgggcaatgccagagaaacacagggcaggggcggggcttggaggaaggagcccagaagagctgagccctgctgctgacatctgagaaagtggcatgctggtggctgtggggcaggagctgtagtctagtcatcataaggaagcaagtttggtttggtgaatgtatcacttagggttctttgaaggcaarcaagaaaaaaacaattctcacaaatttaggaaagaagaagcactggcggaagactgggttgttgagagaaggaacagaagcttaaagagcaggctctgcagctggaaaagaaccaggtcaagagaaatacttacctagctcacctgggccctgctgctgggatgaagggccccccaaaataccccactaagactgggatgaaagctggaccagatacaaaacctaacaaacatccactggaggtgccacagcccaatgagccttatgcaaactccaggcacggttctagaagagcttctcaatcagctgcagatgaccaaaggaaggagggaccgtgagaggcctgctg

SEQ ID NO: 84484 - DNA, 452 bp, Homo sapiens
agctcaatgcagcctagaacttctgggcttgagggatcctcccaccacagcctcctagtagctgggattgtaggtgcgcaacaccacatacctggctaatttttttrctttttgtggagatgaggtctcactatgttgcccaggctggtctggaactccttgcctcaagcaatcctcctactggggcctcccaaagcattggggttacaggcctgaaccaccatgcctggcctattccttattcttgtatgtattttccattctatattttcttctgatgcaatgtaagatatttctttctgatcgatcttacaaggtgacttcagtggtttcttaacccattatttagttcttacttttagttattgtgtttaacattatgtttcccattttaaacagttttattaaatcataattgagggacaaaaactgcacatatttaaagtatgcac

SEQ ID NO: 84485 - DNA, 1313 bp, Homo sapiens
agtgcacaggcactgggggtgcatgggcatggaggcacctagcagtagggggtgttcatctgccaaagtggcatccaggttccagccccagccacccaggaaaatgggcttgctgggcccagcccagatcttttgctttttcaagagaagcctgacatttggatttttatgtgaattctctctctttctctcttttttttttagaatgttctatctgccgcgtgggggctaaatgccctgcctgctgccaccttgctacctctgggtgggcgctttgctcacatcatcatctttctcctaagatcctcggtcaggcccctttcaggtgcaggacacagaaacccaactcacacgggcgttaaagcgggaagtttgtggatctagggccaggaaggctgttaacagcagctcacatgactgagaaaagctgcagggaccagagcctcagggcctcggggccactgggacagcctcctccctccgcttgtccctgatctccctgtgcgctggcctcacccgcctcagccccacggccgctttccacacatgggggaaatagtcctgggccagtgtcggaacctgcatcattgctgcctccaacccgggaggcatcggggccgcacctccgcctccaggcgggagaagccctggcaaggatcctgactggctcaacccaggccatgtggccagcctggcccaatcatgtgcccaggatctccgggaccattcgccagctgggacaggtgctttctccagggagaggctgggttctcataactgacagtcccaccagggccccatggcgggaggtcgccaaaggagggtggaggtgctgtgccctgagaaagtatttcagcagttaaaacaatgggcggcagagaaactaccaaccccctcgagatggagccatccgtccagaaagcycagttctcaaagggtaagaaacttctcaagaccaaatagggtggagctgagaggagtccaagtcagtatccagccgtcctttcccttttcccaccgagactcaccgaggccacctgcccctgtccagggtctccctgactgtcccatagagcccccctgtggaggctctcatcgtgcccagacactccgagcctctgcttgctgggagggtctccctcagcctccctgtgtctctccctgctgataccgacctaccccgtaggcttcacagaaccaagtaaatccacctttcccggacggctttcagtgccctaaaggaaaccggatggccccagcaccaccaggacctgttggacgtctctcctgggccacggctggctttaagtctg

SEQ ID NO: 84486 - DNA, 611 bp, Homo sapiens
ggtactgacaggccccagggcacagagccagcaggaggcggggcagggttagcacaggtttcttcccttctgcagcgagcctcctttctgcacaggcaccgacggggtcacgacccgcctcagtgctggctgccctcaggcagtgccgacccagacggggtcygtgtgtacacaggcccacctaacactgcctttagaactttctgctatgaagacacaagcatgaccaacagtgtccttggctcagcagatgtttcttcgccacggtcccagctcttcacagtccccgtgcaacaccgaagcagtccgggagcctgtgggctgtccagcagaggtggccgggggaggccagcggaggctcacctggagatggagctgtggggaacactggcatggagatggggctggggccaggcagtgcaggagatgaccaggctgtgtagagggtgagcagccgtggggcttcgagacagcccagaataatggaggaggaatcatctaactcctaggaaggcgtcttagtccattcaggcttctactgcagaatgtcacagactggagagcttaacaacaacagaaattgatttctcagagttctggaggctgggaag

SEQ ID NO: 84487 - DNA, 650 bp, Homo sapiens
tcaaaagccaggacaaggatcactgtktgtctgtgccacaccagaaacaataatttaggggtgcaatcacactgtatctacctgctgctatcctttcaggacagccagatacctctatttgcacttccttggtaaagattcacatgaaagctgatgagatgggacaggactatttcacacaggaaatgtggaagataagcagtctctaacctggttcactgtgtgggcttaattaggtctcttattcttttatgggcacagaaattattagtctcagctttgatttccccacctaatataaataaaactgagctcattaaaccatttgatctgcttccagcctctcaaattggattttctgtacttaactttgtaaatacaacatcgtgaggaaattgggagaaaaataataccaccaagggaaagacagtaggctaggccccgtatagaattcaagtcatatcttacttgctggtaagtgaaactgacaacctaatgccattttacattatagctcttcaaaaatatcatttgtgacagttgttattgacattctagaaataatacaaaaatgaggttagataaaatattttcctttagcaattcaaagttccaacaataagttaactgactttaaataactgctctta

SEQ ID NO: 84488 - DNA, 597 bp, Homo sapiens
agtttatcccataaaaatttcagaggccacagagagatactggacttcttaaaattttcctgaagggcaacaacaaaacaccaatattttagaaagataactgacattaacataggagatggattggaagaagaaaatataatcagtcaaaagactatttggaatagtttaagcaagcgatgttgacaccatacagtgtggcagtgaaacgaggtaaagaaggaaaggccctggaagacatttatgaacctatgtgtggcacagatacgggactgtccaccaaagtctatcctccaatactgatagagttagggcgagggggtggctacccacttaggkgctgtttttcttagaccccttgcaaccagtagagtgtgaatagaagtgattgaacaacttaggccctgcttatgagtcagtttttgaccccggacttgcactgtcctctctcccacaggctggaaggatgacctcggaagtcacatgctgaagatggaagacatgttgtagtgctgcattgacctggggctcagacatctcagactcttgtagaaaaaaaaaaaaaaaaaaaaacaagacacaactttattgggtttg

SEQ ID NO: 84489 - DNA, 1072 bp, Homo sapiens
  misc_feature (1)...(1072): n = A,T,C or G
tnnnnnnnnnnnnnnnnnnnnnnnnnnnnnnnnnnnnnnnnnnnnnnnnnnnnnnnnnnnnnnnnnnnnnnnnnnnnnnnnnnnnnnnnnnnnnnnnnnnnccctttctcacattttcttcccctaatgtttcctaactaaaaaagatagaagggaaaaattaaatgaaaacaaaagtaactgagaaaagaatattggaaaaataaatcaatgaatatatttttgaagtataaactagcacacctctccaggagaacttgctctttgaatcacagtgacaagtatctgattcaatcataagtgaacattttgaacttcaaaacttgtccaaaaataagtgctcaagttggaggggacattaaatgaataaaatgactcatcaattattccccaagtgatccaaaattaacccagaactgtcagaagggccacagggaagtactgaagttcactttaggtgcatttggtaggtacatttggaaaagaggattctctgagttgcttaacttaaatcaaggttttaattttcgatggtgaatttaattactcattatataatggttaacaatctggcatctttaaaaacagggactgtttgttaggtgtgttgcttgatttcacatgaacctataaaacaaaatttaaagctcatagccatttagctgaaacacgtatgactgagaggactatttgtgttgtttccttaagtaaaatttgggaattttggttgttctcatcagggactgttttatcctaaaatttattaaatacacacatacttcacttttacaaaaggaagcctctgttatatttgmaagtaacttaattttgcaattcatatatttgaactattataggcacatataaaaatagaaaatatattttaagtcaatgaaagttatcccatagaccctatcaataaataaatatttttgaaaattctccagctctcaacttgcaattgtaattcctagatactgcatgtgatcatttatatttcctagaggcagacttatgatggattaattcccataattcatcatttttctcttctccccatctgtgtcatgca

SEQ ID NO: 84490 - DNA, 1072 bp, Homo sapiens
  misc_feature (1)...(1072): n = A,T,C or G
tnnnnnnnnnnnnnnnnnnnnnnnnnnnnnnnnnnnnnnnnnnnnnnnnnnnnnnnnnnnnnnnnnnnnnnnnnnnnnnnnnnnnnnnnnnnnnnnnnnnnccctttctcacattttcttcccctaatgtttcctaactaaaaaagatagaagggaaaaattaaatgaaaacaaaagtaactgagaaaagaatattggaaaaataaatcaatgaatatatttttgaagtataaactagcacacctctccaggagaacttgctctttgaatcacagtgacaagtatctgattcaatcataagtgaacattttgaacttcaaaacttgtccaaaaataagtgctcaagttggaggggacattaaatgaataaaatgactcatcaattattccccaagtgatccaaaattaacccagaactgtcagaagggccacagggaagtactgaagttcactttaggtgcatttggtaggtacatttggaaaagaggattctctgagttgcttaacttaaatcaaggttttaattttcgatggtgaatttaattactcattatataatggttaacaatctggcatctttaaaaacagggactgtttgttaggtgtgttgcttgatttcacatgaacctataaaacaaaatttaaagctcatagccatttagctgaaacacgtatgactgagaggactatttgtgttgtttccttaagtaaaatttgggaattttggttgttctcatcagggactgttttatcctaaaatttattaaatacacacatacttcacttttacaaaaggaagcctctgttatatttgaaagtaacttaattttgcaattcatatatttgaactattataggcacatataaaaatagaaaatatattttaagtcaatgaaagttatcccatagaccctatcaataaataaatatttttgaaaattctccagctctcaacttgcaattgtaattcctagatactgcatgtgatcatttatatttcctagaggcagacttatgatggattaattccyataattcatcatttttctcttctccccatctgtgtcatgca

SEQ ID NO: 84491 - DNA, 840 bp, Homo sapiens
  misc_feature (1)...(840): n = A,T,C or G
aatttttaaaacagcaacaaaaataatagcaatatggttaaatgtgtcaatcatgtattggcctataaaagtatgctatwtcattagtctatagactaattgggctacagactaaccattaaatgctttccttcatgtggcactatactaagtgttaggaattcaattgtgaataagacaacagacatggtcccagatctccgggagtttatgtcttatgaggagatgaagactgaacaaggatacacgcattcttatgcagggtattgtcaatgagaaatacagagtgttaagaatctgtgtgacaggctgacccaagttgaggaggggtggtcaaggaagacttactgtaggaatcatctttaaattagaatcttaagaatcagaagaaatactaggtgaaaggagagtgggaaacattgcagttaggacaatgtatacaaatcattgacattgaaaaaaagtatggtgggtataagaaataaaatccagaatgagtaatggtggacagggtacaggttttgtaggactttgtaaattatgttaaggatnnnnnnnnnnnnnnnnnnnnnnnnnnnnnnnnnnnnnnnnnnnnnnnnnnnnnnnnnnnnnnnnnnnnnnnnnnnnnnnnnnnnnnnnnnnnnnnnnnnngtctaaaaactttgaaccaatagaaaggaatgtctgggtcttcaagattaggggctgtggagaccaaggttttatcatgcagacaaagtctccaggtagcaggcctctgagataatagattgtaaatatttcttaccagacttaaagaatctgttctatgagtaattccaaaagggtacaggatataat

SEQ ID NO: 84492 - DNA, 1048 bp, Homo sapiens
tgaagataacatggcttgattctccttgatggagcaagctaatgcctcctgaaattgattatattggtgttacgactttaagtgagggttgagcttaggmtatcgatctcagtttgcaaagtgtttctttaatcacttgattggttattctttgaggtatttaaactggcttcctgcccctaggctgaatatccagatcccaggttcatttctaagatgattagggccagaggtagctaaattagtagtccaagggttacagacccagtcctcaaaagcagatcaagatgctctgtagacattgtgaggggaaactgaaagaggatgagaaagagaacagacattgttgggcaaatagcccttcatccacaacagatgagatacctctttccaaaacactcaggaggcatcctgccaacagagtgttcaatagtaaacagccactccatcaacaaggaattagagcagctttaggaggaggcagatccacagacaagggtatatccagaaagcccaggcttacagcggggaggcccctaggccaggtctgagaatctgatatgggactggtccctgcagatgggtcaggagagcagcaccagaaaaaccacatcttttgggctcacagacctcttcataagtcattcccaacctcctgaggagcagcacgctggccagctctgatggagttcacaagttcactccactaacaaagcctgaacctctgagtccagcccacagtcatgtttcactcaggctttcaaggagctggtgttcattgaacatttccacagctgagaaaggtcccaagtcctcagagctgttgttgtttgtgtgttaacctctcagggactccaagaagagtaatgttacaaagaactccagctccagaggcaggagaaacctgagttctaatcccaactttgccacttattagctgtttgaccttgaacaagtcgcctcaccttttaaaatatcaattcctcatctgcaaaacagcgcctaccttgcggccattgtaaacttttgagcagtagatttgataatg

SEQ ID NO: 84493 - DNA, 1048 bp, Homo sapiens
tgaagataacatggcttgattctccttgatggagcaagctaatgcctcctgaaattgattatattggtgttacgactttaagtgagggttgagcttaggatatcgatctcagtttgcaaagtgtttctttaatcacttgattggttattctttgaggtatttaaactggcttcctgcccctaggctgaatatccagatcccasgttcatttctaagatgattagggccagaggtagctaaattagtagtccaagggttacagacccagtcctcaaaagcagatcaagatgctctgtagacattgtgaggggaaactgaaagaggatgagaaagagaacagacattgttgggcaaatagcccttcatccacaacagatgagatacctctttccaaaacactcaggaggcatcctgccaacagagtgttcaatagtaaacagccactccatcaacaaggaattagagcagctttaggaggaggcagatccacagacaagggtatatccagaaagcccaggcttacagcggggaggcccctaggccaggtctgagaatctgatatgggactggtccctgcagatgggtcaggagagcagcaccagaaaaaccacatcttttgggctcacagacctcttcataagtcattcccaacctcctgaggagcagcacgctggccagctctgatggagttcacaagttcactccactaacaaagcctgaacctctgagtccagcccacagtcatgtttcactcaggctttcaaggagctggtgttcattgaacatttccacagctgagaaaggtcccaagtcctcagagctgttgttgtttgtgtgttaacctctcagggactccaagaagagtaatgttacaaagaactccagctccagaggcaggagaaacctgagttctaatcccaactttgccacttattagctgtttgaccttgaacaagtcgcctcaccttttaaaatatcaattcctcatctgcaaaacagcgcctaccttgcggccattgtaaacttttgagcagtagatttgataatg

SEQ ID NO: 84494 - DNA, 1048 bp, Homo sapiens
tgaagataacatggcttgattctccttgatggagcaagctaatgcctcctgaaattgattatattggtgttacgactttaagtgagggttgagcttaggatatcgatctcagtttgcaaagtgtttctttaatcacttgattggttattctttgaggtatttaaactggcttcctgcccctaggctgaatatccagatcccaggttcatttctaagatgattagggccagaggtagctaaattagtagtccaagggttacagacccartcctcaaaagcagatcaagatgctctgtagacattgtgaggggaaactgaaagaggatgagaaagagaacagacattgttgggcaaatagcccttcatccacaacagatgagatacctctttccaaaacactcaggaggcatcctgccaacagagtgttcaatagtaaacagccactccatcaacaaggaattagagcagctttaggaggaggcagatccacagacaagggtatatccagaaagcccaggcttacagcggggaggcccctaggccaggtctgagaatctgatatgggactggtccctgcagatgggtcaggagagcagcaccagaaaaaccacatcttttgggctcacagacctcttcataagtcattcccaacctcctgaggagcagcacgctggccagctctgatggagttcacaagttcactccactaacaaagcctgaacctctgagtccagcccacagtcatgtttcactcaggctttcaaggagctggtgttcattgaacatttccacagctgagaaaggtcccaagtcctcagagctgttgttgtttgtgtgttaacctctcagggactccaagaagagtaatgttacaaagaactccagctccagaggcaggagaaacctgagttctaatcccaactttgccacttattagctgtttgaccttgaacaagtcgcctcaccttttaaaatatcaattcctcatctgcaaaacagcgcctaccttgcggccattgtaaacttttgagcagtagatttgataatg

SEQ ID NO: 84495 - DNA, 1048 bp, Homo sapiens
tgaagataacatggcttgattctccttgatggagcaagctaatgcctcctgaaattgattatattggtgttacgactttaagtgagggttgagcttaggatatcgatctcagtttgcaaagtgtttctttaatcacttgattggttattctttgaggtatttaaactggcttcctgcccctaggctgaatatccagatcccaggttcatttctaagatgattagggccagaggtagctaaattagtagtccaagggttacagacccagtcctcaaaagcagatcaagatgctctgtagacattgtgaggggaaactgaaagaggatgagaaagagaacagacattgttgggcaaatagcccttcatccacaacagatgagatacctctttcyaaaacactcaggaggcatcctgccaacagagtgttcaatagtaaacagccactccatcaacaaggaattagagcagctttaggaggaggcagatccacagacaagggtatatccagaaagcccaggcttacagcggggaggcccctaggccaggtctgagaatctgatatgggactggtccctgcagatgggtcaggagagcagcaccagaaaaaccacatcttttgggctcacagacctcttcataagtcattcccaacctcctgaggagcagcacgctggccagctctgatggagttcacaagttcactccactaacaaagcctgaacctctgagtccagcccacagtcatgtttcactcaggctttcaaggagctggtgttcattgaacatttccacagctgagaaaggtcccaagtcctcagagctgttgttgtttgtgtgttaacctctcagggactccaagaagagtaatgttacaaagaactccagctccagaggcaggagaaacctgagttctaatcccaactttgccacttattagctgtttgaccttgaacaagtcgcctcaccttttaaaatatcaattcctcatctgcaaaacagcgcctaccttgcggccattgtaaacttttgagcagtagatttgataatg

SEQ ID NO: 84496 - DNA, 580 bp, Homo sapiens
gttcaaagcctgtaaaatttagatgttgtttacccaagcagcttgctaggatggcaggccaggcatgaaaaatgtcggcactcattcctgtaactgtacactgctctcactcccaacctggaacyggctattgatattcaatagtgccccagggccccaggaaagttcttaaataaccctgcttgttgtaagcactcagagctaccttttggagaccattgcctgtagctgtgcagcctcaagaataataactaggtcgttcacgaaacacaaatgctctcaaataatctgagcattcccaaaagtcatcctgctgtcctgaacttttacttttttgggtcagaaagtcaggctatgcctgcacatgtctgccctctaaaaagcaccatgcttatactacatttcttacatctacatgccaaaccaagtcattgcctgattttttatttctgcatcttctaaatgtctctgagcaatattcacccaaactaaacatcctgcagaggcaaatatctaagtaaatattattgtgggataatgtattcatgaagagcaaggggagtgttttattgttgagaat

SEQ ID NO: 84497 - DNA, 608 bp, Homo sapiens
acatgaagaaagaccgtggactattgttcacttaaccgggtggtgaccctaattgcaactgttatctaaaacctactttttattattcatataaaaatattattattattcaaaatgtaatatatttgcttgaacaaaccaattcagactctggcacttgatacacagctattgacctttctattttttcctcagatgttgcatgtgatgcctggaggtatgccagctattttgaaatcctgaagataaaagcaacaataaggaaagcagaacaggaaggttaacagagcctgggtttttgatcatgtcatttatccaccatactagccctgattggctcaacccctcaacttctcattgagaaataaacctattacttatatatagttgttttctgttacttgatggtgaatgcaattataactgacacaaaacttcaagaacagaaggcaaaaagagatttctcaaactaaaaggaagatggcttggcaatttgcaggttctatcagtataagagacacacacttagctccytcctacagctccagaaagatagaaagatctccagaagaatacttcccctattaatcccaaacgtgacaggattc

SEQ ID NO: 84498 - DNA, 626 bp, Homo sapiens
agcttagctaaggcagaagttcggtttcttttctcgtcagatcatttttcaagtgtagtattaacttatgcttgtttgtttgtttgctgttaataagttgatttctttttcctgttgtctatttatgatgtttactttttttagttttttttactagctgtggcgtraaagggagtctgtaatcttgcctcactctgacatgtccaccgattcttttcaaatggtgttcacaggtgaaaattactgaagaaagcactctgtctttcacacatcctatgtgtaaatatcggtcctgttaatggcacagacctctgggaggcaggacgggaaaaactaggtgcaaatgaaaatggacgagtgataatttgagatggtcttcaacttttaagtttgagaatacattaggaggggatctgttcatatattataaagtgtatttttgctacattttaataaatatttccctctcatcctcttccccaccctccatttgtttaagggtgggtgaacataaatattgttttttatgggaaaatgtggcctacaccctggatactattctctgtttcttgcttctgtttttttttttttttttgagacacagtctcactctggcaccaggctgg

SEQ ID NO: 84499 - DNA, 647 bp, Homo sapiens
atgtaattttaaaactttatccccctaggactctggggaggcaatgtgaaatgaacaattacatgtttactatctagaaggctgttcttcagttccacttcaattgattctctcacacctatgaggcaagtgctgactgcagagctaaaaacagggctagaaactgcatgtgtgtgatggtaaggagagggagaagagcgtgtgcagtgcggggtgggaaagaggaaaactggggcaacagcgtctgcaggtgaacgtgacaaagctgttcaatatgaagtttgtgttttatagtcagtctggcagtcagacatgggtagcagatagtttgagtctcctgcctttatacgtctctttgctagatgcatttgatgaactcaggataagttgtaggacttcagactttcaaaatgttaaggaactgggtcacatagttggscaaccctttgccagaacaatctgaggtacataataaaatgcctgcatccccctatttgagaatatatatcaaaaaattacttaaaagatcatttcagctggactaggtttctggggacactattctggtgggtgagtaggtgttactcttcctccaaagataatcatttgcatttgggactggaatgtcgaaggatagatttgggtga

SEQ ID NO: 84500 - DNA, 647 bp, Homo sapiens
atgtaattttaaaactttatccccctaggactctggggaggcaatgtgaaatgaacaattacatgtttactatctagaaggctgttcttcagttccacttcaattgattctctcacacctatgaggcaagtgctgactgcagagctaaaaacagggctagaaactgcatgtgtgtgatggtaaggagagggagaagagcgtgtgcagtgcggggtgggaaagaggaaaactggggcaacagcgtctgcaggtgaacgtgacaaagctgttcaatatgaagtttgtgttttatagtcagtctggcagtcagacatgggtagcagatagtttgagtctcctgcctttatacgtctctttgctagatgcatttgatgaactcaggataagttgtaggacttcagactttcaaaatgttaaggaactgggtcacatagttgggcaaccctttgccagaacaatctgaggtacataataaaatgcctgcatccccctatttgagaawatatatcaaaaaattacttaaaagatcatttcagctggactaggtttctggggacactattctggtgggtgagtaggtgttactcttcctccaaagataatcatttgcatttgggactggaatgtcgaaggatagatttgggtga

SEQ ID NO: 84501 - DNA, 538 bp, Homo sapiens
ttcttgggaaataaaatatttatgggcccatgaagcctgccggttggttggtttgtttttggtatatgtgtatgtgcatgtgtatctgtgtatcgtactgatctgtgaaatctaaatgtctgaaaactactgattatgtagaaggatcatgggctttggattcagcaaacctggtttaaattctttctctgctttgttcttatcttcgtcatctttaaaatggggatgtgaatgcttatctcctagggtggttgtgagaattgactaagataatggatatatamtggtttagtgccggctgtataatagaagctgaataaatgtatttcttccttttcttataagttgttggggatagagagaatttcaggtgaagttacaagtgcagttgacccttgaacaataccgggtctaggggtaccagcccctgtgcagtgacaaatcagcatatgacttttgactccccgagacctttattactagttgcctactgttacccagaagccttaccaataacagtcaacacatattttatata

SEQ ID NO: 84502 - DNA, 538 bp, Homo sapiens
ttcttgggaaataaaatatttatgggcccatgaagcctgccggttggttggtttgtttttggtatatgtgtatgtgcatgtgtatctgtgtatcgtactgatctgtgaaatctaaatgtctgaaaactactgattatgtagaaggatcatgggctttggattcagcaaacctggtttaaattctttctctgctttgttcttatcttcgtcatctttaaaatggggatgtgaatgcttatctcctagggtggttgtgagaattgactaagataatggatatataawggtttagtgccggctgtataatagaagctgaataaatgtatttcttccttttcttataagttgttggggatagagagaatttcaggtgaagttacaagtgcagttgacccttgaacaataccgggtctaggggtaccagcccctgtgcagtgacaaatcagcatatgacttttgactccccgagacctttattactagttgcctactgttacccagaagccttaccaataacagtcaacacatattttatata

SEQ ID NO: 84503 - DNA, 683 bp, Homo sapiens
tctagtcttcagagagatggtgtctcttcttataaaggcactcatcctaacagatcagtgctgtaccctggtgacctaatttaaccttaaatacttccttagaggccccatctccaaatgcaactacactgctgtttagggctataacatgaattttggggtatacaagaattcagttaataatacttgattaccctttatctgcccctgagagggtggttcatcttacccttttttagtcaaatcacatttggtaacatgaattgaggtgggtcarctatggtggcagactcactaagagtgtcatcctcaactatcctgtattgcttgtggcatacctagacattctatggccgaaagagcttgcatgtttaaatatttctatagttttagtccttggcacatggacttgagtccatttctctgtcaaatggcgatagttgttcctcagagttgttactggtcataatttaagggaaaatatattttgaaccataagatgcaaagattgttttttataaaaatgtacaatgttcctttttctattatttgtagagcttaaggacttgaatccagatcttctaattacaagtataagactctaagtagccagacatacccatttttttcaggataattggaattctccatagacaagcactctaggggaagttctggcaagt

SEQ ID NO: 84504 - DNA, 683 bp, Homo sapiens
tctagtcttcagagagatggtgtctcttcttataaaggcactcatcctaacagatcagtgctgtaccctggtgacctaatttaaccttaaatacttccttagaggccccatctccaaatgcaactacactgctgtttagggctataacatgaattttggggtatacaagaattcagttaataatacttgattaccctttatctgcccctgagagggtggttcatcttacccttttttagtcaaatcacatttggtaacatgaattgaggtgggtcagctatggtggcagactcactaagagtgtcatcctcaactatcctgtattgcttgtggcatacctagacattctatggccgaaagagcttgcaygtttaaatatttctatagttttagtccttggcacatggacttgagtccatttctctgtcaaatggcgatagttgttcctcagagttgttactggtcataatttaagggaaaatatattttgaaccataagatgcaaagattgttttttataaaaatgtacaatgttcctttttctattatttgtagagcttaaggacttgaatccagatcttctaattacaagtataagactctaagtagccagacatacccatttttttcaggataattggaattctccatagacaagcactctaggggaagttctggcaagt

SEQ ID NO: 84505 - DNA, 556 bp, Homo sapiens
cttagggatttcagacgctctgtgttaaaggaatacaaaataagcttgttttaaaatgtaatacatcatgcttctgtccccatgtttacctatgtaattttatgattccataggtaaaatagctgaaagagaaccattatgttatcaaacactgtgtcatgcttgctgagtttgcaaraatgtaaaacgtacaatgtgtaacttttatcttcaggaagtttataacctaataaataagattcaatacacataaaacctttaatgtacgattaagtgataaagtattaagactataagtgttgtgggagttaaataattttaaaacagattttaggaataatctaatatctcattttattgacgaggaaacaaaagtctggactagctgtttaactcaaaaatctgcccagagttacactactggataatgtcagaaccagactaagaacgcaggtttcctgactttggcctggtactctttccattcgtaaatacccacgagcctgtgtggaatgggcttgattcaaagcatgtagaagaaatgagacattgaagg

SEQ ID NO: 84506 - DNA, 556 bp, Homo sapiens
cttagggatttcagacgctctgtgttaaaggaatacaaaataagcttgttttaaaatgtaatacatcatgcttctgtccccatgtttacctatgtaattttatgattccataggtaaaatagctgaaagagaaccattatgttatcaaacactgtgtcatgcttgctgagtttgcaaaaatrtaaaacgtacaatgtgtaacttttatcttcaggaagtttataacctaataaataagattcaatacacataaaacctttaatgtacgattaagtgataaagtattaagactataagtgttgtgggagttaaataattttaaaacagattttaggaataatctaatatctcattttattgacgaggaaacaaaagtctggactagctgtttaactcaaaaatctgcccagagttacactactggataatgtcagaaccagactaagaacgcaggtttcctgactttggcctggtactctttccattcgtaaatacccacgagcctgtgtggaatgggcttgattcaaagcatgtagaagaaatgagacattgaagg

SEQ ID NO: 84507 - DNA, 556 bp, Homo sapiens
cttagggatttcagacgctctgtgttaaaggaatacaaaataagcttgttttaaaatgtaatacatcatgcttctgtccccatgtttacctatgtaattttatgattccataggtaaaatagctgaaagagaaccattatgttatcaaacactgtgtcatgcttgctgagtttgcaaaaatgtaaaacgtacaatgtgtaacttttatcttcaggaagtttataacctaataaataagattcaatacacataaaacctttaatgtacgattaagtgataaagtattaagactataagtgttstgggagttaaataattttaaaacagattttaggaataatctaatatctcattttattgacgaggaaacaaaagtctggactagctgtttaactcaaaaatctgcccagagttacactactggataatgtcagaaccagactaagaacgcaggtttcctgactttggcctggtactctttccattcgtaaatacccacgagcctgtgtggaatgggcttgattcaaagcatgtagaagaaatgagacattgaagg

SEQ ID NO: 84508 - DNA, 556 bp, Homo sapiens
cttagggatttcagacgctctgtgttaaaggaatacaaaataagcttgttttaaaatgtaatacatcatgcttctgtccccatgtttacctatgtaattttatgattccataggtaaaatagctgaaagagaaccattatgttatcaaacactgtgtcatgcttgctgagtttgcaaaaatgtaaaacgtacaatgtgtaacttttatcttcaggaagtttataacctaataaataagattcaatacacataaaacctttaatgtacgattaagtgataaagtattaagactataagtgttgtgggagttaaataattttaaaacagattttaggaataatctaatatctcattttattgaygaggaaacaaaagtctggactagctgtttaactcaaaaatctgcccagagttacactactggataatgtcagaaccagactaagaacgcaggtttcctgactttggcctggtactctttccattcgtaaatacccacgagcctgtgtggaatgggcttgattcaaagcatgtagaagaaatgagacattgaagg

SEQ ID NO: 84509 - DNA, 846 bp, Homo sapiens
atcttggatccattgcaggtatagacgttgggatgctaactcacagaaaaatcatttaacctctatttttataaaagtgaacaatgccattttgtatagtctgtggatgtcgtagatggtagttatgtaatgaatgctttggacatttttaaacatttacacatgcaaggcttcaatgtttggccatgcagggacatttattacttaagtccagaaggtgacttttacatggacagctgtacaatgccaattatgccccctagagttgtacagcaaaatggtcctgcagaaaggtgccatttgatgtgcggatttcttgtttgtccagcatttattgacatttactatgtgttagacattgtgtgctttaggttggttcatattattgtataaaatactttttaaaaatccctatgtgtcctctctcttctatctattttttcttttttccttcattctctgtgatgtctgtaacagcagaagatagtttgaggttacttaggacgatagtccatatatatgatttaacatacacagtttttgtactactttttccttttcagaacctatattttaatcctggacttygaatattctttttaacattcacagattcctaaaattctgtatttttcgtcactctgtggaagggaaatgactctcattactattcatgtctaataaacaatgtattacttaagacgcatatgcaatttgaaaaatgtttcttttgtgtttataatctgtagttttaacagtttattttttcctcactattgtatggttgtttgtatattctttttaagttggccaaagcttaggtcagatacaataaattcagcgaga

SEQ ID NO: 84510 - DNA, 646 bp, Homo sapiens
gactccttgattagatggtagtttcttgagggtaggtcttacttgctttgtaatctgtcaccttgcacagatcctgttatataaaagtgtggtacaaattgtcagataaacactatgaggaatgctcatcgtcaggtaatccagactcacacaatgagcttctccacattttggcccagacttgtcaaaaaaaaaaagtcaagggaaagttctctgtcatctaaacacagaagtcagatgcaatcttccctctgtgctgtctcgggaagtgatcaatgttcctccagatgagctacacccaggaacgcttggcttttgtaccttgctcagaaagtacattcctgaaaaattatttataaatattaaattttgtaaatatattttagctatgtttcagctaatagctaaaggaatcccattttccccttgaaaagcaaaaaaaaaaaaaaaaaagaacttartcattttctaacttatcagcattcttaaaatttgcatatgtagaggaaactcatctttacacggaactctactagtttaagttactgcccttctttttggcttgtttttacttttatggaggagagaaaaatgacgagttgatgagtactcatgaaattgatttttaaaacttcccaggtaatgc

SEQ ID NO: 84511 - DNA, 839 bp, Homo sapiens
gcgcaagatctttctccagaggacagaggaaatccatattagcttcttaatcttttacttttaaatataaatgagcaatataagtccattaaaaccragggaggaaggcaacagaaacaataatcaaaagatgtttgagaaatgtgcggttcagtcgtgaaacattctatgactttaagcaattgttgcaaagtaaggcaagagaaaccttttgaccttgatgctacaacaattctatcttgagtaacccagaggacatttcattaggctattacagaagaaaacacaatcctaacatacaacttggctctgcagtgaacaatattcacgtaggtatgataatgtaaatgctgatttttggttttcaatccatagcaaaaactcatgagagttaattatggtttcagaacaaatgtaaatgttaaccatcttgacaatgtaaaagttagacaaggctgagatgaggtgggaatttgcaggggaggcgtggcatagagatattcagtaaagaggaaaaaatagagatataaatatggtgcctaatattgcaatgttatccaataaaatcactcaaaaataacaatgtaaaggtcaaatactgcaaagatggaaaggtggggtgtaatataaatgagttaagtcctcatctttcatgaccgagagtcaacatatattgtcaaaatttttttaaaaatcaagaaatggaagtcattatttagaagtttggacgtaatcattagaaggcttgaacataaaagaggttgcttctggagaatgggactgcaatggagaaagaaggattgaaagattgtttcttttcattataaattcttctgttc

SEQ ID NO: 84512 - DNA, 567 bp, Homo sapiens
tttaaagttctgtcttgtatagtacgaaaccttttgtctcttagctgcttgacttttatataatttagtagtgatgtttacattgttcactagactttgattgaattgaatttaataaatggcagtaatcaggtgttttttggtggaggggttagcttgctgtcttcaggtttcctatgcttgagaatttgcctcaacacaattttaggtggctgtaacactattttgttggccagtataattttagattcctcactttggttgttggttgttaaaagacatagggagctttgtttgactctaaatctaccattgtctktctctttccttttctttggtgttcttttttaggggacgaaagtaagaattgagaagatctggcttagataatgctagtaatggagattttaaaaaattacctattattttattattataaagcactagagcaagtatagaattatgtatagtaagtaggatatacaagaaagaaaagattggcattcattggctctggggagtgggctaaggttaaaacaagatttagagtcaaaattaattagtgtg

SEQ ID NO: 84513 - DNA, 1573 bp, Homo sapiens
cggcactccagcctgggtgacagagcaagactccgtctcaaaaaaaaagatctgtagagttgagacccactggcctagagtaacagcttttcacttttggaccaatagacccctttcaggatagaatgaaaattagtaacaatcccatctacacgtaagcagaaacctttgcataaacagtctgtgctttattatatgcaagtgagcccactcttggggatagttggaagatggggtaatgaaggaaggcatgtaaatagtttgataacagaaaactatttcactctttctcagtttgtacatttaaatcctttctctacaatggttcttgtctgtcccaggacaaaatcttaagcatgttttgtagtttttttactgtcaattttagacaagaaaaaggccagtccagttgaatagtccacattccaaactgtcaccaattcaagttctccttccgtcaagctcaaatatatttcatgttttattgtttggaagggaggaagcagaaataaagaacagaaaggtcttatacagttataatctggtattggtgtcctctagattgaacggatgttaaatgctggttttttcccatagagagtttctctagatactctcccactttgagaatttctttgtagagataaagtctcactatgttacccaggctggagtgtagtggctattcatagatgggatcctggtgctctacagcctcgaattcctgagctcaagggatattcctgcctcaacctcccaagtagctgtggtgtcccgggtgtaggacaccacacccaaccactttgagaatttctaatgttaaaaacctttttttaggccggcgcagtggcttacctgtaatcccagcactttgggagcccaaggtgggcrgatcacgaggtcaagagattgagactatcctggccaacatggtgaagccccatgtctactaaaaatacaaaaattagctgggcatgctagcgcatgcctgtagtcccacctactcaggaggctgaggcaggagaatagcttgaacgtgggagacaggggttgcggtgagtcgagatcacgccattgcactccagcctgggcaacaagagcaaaactccgtctcaaaaacaaacaaaaaaacaaaaaaactgttttttatgtaaagcaatgattcctccagctggccatgtgtggtcttcccttggcccctggtttccaggagtttccagtgacccacctctctgctggagtcaccacatccttacaagtggtcttcttggtgcaaatccagctcccttaccccagtccatatttggctttggcttatgaataactcacgcatcctctgccccaccaaccactgggtgcagaccgttcccaacacagtcccctctcttagctcttttgtcagaaaagcaggtcaatacagccttgctgagtcaggtgctgtgtggcttccaagcttcaggggaaaatgtgaacctagctcacttgttcttctaaagccctttaaacaggaggcttggcggggcacggtggctcacgcctgtaatcccagcactttgggaggccgaggcgggag

SEQ ID NO: 84514 - DNA, 520 bp, Homo sapiens
gtggcaggcgcctgtaatcctacctacttgggaggctgaggcacgagaatcacttgaaccagggagtccgaggttgcagtgagttgagaccgcaccattgcgctccagcctggacaagagcaaaactccatctcaaaaaaaaaaaaaaaaaaagaataacagattgtggaatcaaagtcatcccctgctatccatgtgatcttgggctaagttaacttaaactttttaagcctcactcttctcatctataaaatgataaattatctgaattaatgrcatctactaggatggttatctgtaatctcaacactttgggaggccgaggcaggtggaccacctggaagtccagagtttgagatgagcctggccaacatggtgaaacctcatctctactaaaaatacacaaattagtcatgcgtggttgcaggcgcctgtaatcccagctactctggaggcggaggcaggagaattgcttgaaccagggaggctgaggttgcagtgagtcgagatcgcgccattg

SEQ ID NO: 84515 - DNA, 748 bp, Homo sapiens
ttgaagtcaaggccaggttccaggcctcctcacatttcccaccatgctcagcaagctgggaggcgagcgggcacccacctgcmagccaggttcagttctgcctctggccaagcaccgactgcccatctccccaagtccctctgtagtcatgagacgggggctaaaaggaggatataattaaagggtcaggaagtaaggagagagtgtggtgtaaactgaggaagcaaacaggtcaggacagtaggtctgaggggaaaagtcacctgggccattatactataacaaaatgaaaatctagatgctttattgttctcagtagtttaaaaaaatatgttttgggaacaactatttttatagagatgagaggggaaacatacactagaaaaatctttctcataggaatgagtttgtttgtcctttttaaacaaacaagccaacatgagttagtaatataatcttgcagttaaaaaccaacaaatctccaccaaaaaaaaaaaaaacagcaatatgatatatttctgtccatcgttttagccctcttgggtgacagaggaaccagctacccagagaagaagacttgggggagtgggtaagggtctcccctcatcccaaggacagcatcacaaggggttcagggtgaagggaaacaggaagtggaggcattttctgtcttttcaaactgggcacttctcatctggtccagctctttggcaaagagaaggacaccaaccgggacctcgcagtccct

SEQ ID NO: 84516 - DNA, 649 bp, Homo sapiens
ctttactctttttattgctctattggaatctgtccagcctgtatccttctggtaccaaagtgcccctggttgaagcccatactgctggacttagtctctgggagttgragggagaagaattgcagtgtccctcagcccactgtgctacagaccttttgaaacttcctctcagtcagctggtcagtgaatcacatttaaaacccaagctcactgtccacttcttttcaatgggtctctctctcagagtgtcatttttctatgttcaccctgtttttctcagtgaggactttggtgcctggaagccatgagtttgaattcctacatcctctattattttgcttatagaccttgccaagtttgtcgatccatctgagactcagtttccccatcttggcaaggagataattcccatttctgggtgttgagtgaggatttggggctgggtaagacagccaagagcattcaggtgctcttcattcggcctctctcaacccgcatgatccaatgacttatttttccccaggggcaatccccttacccctcaccaccaaaagtgattttgtgacaattttccactcattttttgtcacaggaggtctctctatattttttcctccatcttcgccaggattataattctgctgatagc

SEQ ID NO: 84517 - DNA, 649 bp, Homo sapiens
ctttactctttttattgctctattggaatctgtccagcctgtatccttctggtaccaaagtgcccctggttgaagcccatactgctggacttagtctctgggagttgaagggagaagaattgcagtgtccctcagcccactgtgctacagaccttttgaaacttcctctcagtcagctggtcagtgaatcacatttaaaacccaagctcactgtccacttcttttcaatgggtctctctctcagagtgtcatttttctatgttcaccctgtttttctcagtgaggactttggtgcctggaagccatgagtttgaattcctacatcctctattattttgcttatagaccttgccaagtttgtcratccatctgagactcagtttccccatcttggcaaggagataattcccatttctgggtgttgagtgaggatttggggctgggtaagacagccaagagcattcaggtgctcttcattcggcctctctcaacccgcatgatccaatgacttatttttccccaggggcaatccccttacccctcaccaccaaaagtgattttgtgacaattttccactcattttttgtcacaggaggtctctctatattttttcctccatcttcgccaggattataattctgctgatagc

SEQ ID NO: 84518 - DNA, 647 bp, Homo sapiens
agccattatatccacattctgggcagcacaaaagttagaaagaaggaggcaggcacactcttttaaagacattttctagaagctgttcatgttgttttcacttgttcccaatggtcaaaattgaatcatttggtcacatccaggtacatgggagctgggatatgcaattttcattttagggagtcatatgtttaggtaaaaacttgagcctatttttatagaaaatgtggggagtggccataaggagacaactatcagtttctaccacattagtaacaaacaatctataacaatgtttctatatattatttatggttagtttgtgttttctaagaccggttttcaatttacaaagaaaaatctgacatttgccattgagaaactattatgttcatattgattaatgtataatatatagagctgctaaaatatcagcaatrtatgtgttttaggcatttttgttgttgtcatagtatattatttttggtggctgcctttatgatgattatagtgtataaatgtgctactaaaaacaaagcattttttgacaaggctaaagtaaattctgaagaaaataaatgataggaaattccaaaatttattttccaccaatagtatctgacatttaagaaactgtatactgtgaa

SEQ ID NO: 84519 - DNA, 777 bp, Homo sapiens
actttgtaacagattaactcactcttccctttcaccttacatatcctgcagacttccaaggaatgaaggaaaagattgcagttaccagtgtgggattgatatggtttggctctgtgtccccacccaaatctcatctcgaattgtaatccccacatgtcagaggaggggcctggtgggagatgattggatcacgggggcagatttctcctctgctgttcttgtgatagtgagtgagttctcatgacagctgatggttttaaagtgaggcacttccccgcctccctctagcacgctcgctaatgccgccatgtaacgtgtgcctttgcttccccttcaccttccaccatgattataagtttcctgaggcctccccagccatgtggaactgtgaatcaattaaattrttttctttataaattacccactctcaggttgtatctatagcaatgtgaaaacagactaacagtgatgtatcccttgtcccagctttggggcagatctgtgtcagaggcagtggttagtctcagggacaaaacccctttctggtaggggttttgatttttgtaaaccttggctttgattctgtcatcctctcctgagaaggtaggtaggtggcttctgtgctctgtgttgttcagggaaacggatgctttgattctcatgtggtgatatagtttggatatttgtccctgcccaaatctcattttgaaatttaatccccagtgttggaggcagaggtggggcctggtgggaggtgtttgggtcatgggggtggat

SEQ ID NO: 84520 - DNA, 639 bp, Homo sapiens
atgccccactgggatctgctagacttccctagctgcagaagttattaacatattttaatcacccacataaacacatatgcaaggttaatgatctttatgatctccttcgacttaaaactcaccttcttaaaacttctcaggggctcctgatttcgttcctgagaatatccaaaatcctgaaatcttcaaagttttacatcagcagttctcaaacattctaatctcagaacttgtttagactcatcaaagatatttaagayctcaaagggtttttgtgtatgtgagttatatctatcaacatctaccatattagaaatttaaactgagaacgttttctttctaattatgaattcatttttaaataacaataataaaacaattttttttgacagggtctcactctgtcacccaggctggagtgcaccatggttccctgcaacctcgacctcctgggctcaagcgatcctcctgcctcaaccacctgaagtgctgtgattacagtcatgagccaccacgcccggacatcaaacaatttttgggtgattttttgagacaggatcttgctctgtcacccaggctagagtgcagtggcacaatcatggctcactgtagcctcgacctccaaaattcaagcccaag

SEQ ID NO: 84521 - DNA, 1547 bp, Homo sapiens
caactatcagtgcctggctgagaactgctgagggagggggcagagtggtctgaatttcctagcatttcctaaccacatgcattaggtcagagcaggccctaatagtcaaagaaagtcctaaggcggagaaatgtgagtgctggcagtgtgccctgaagtgggaaggcccaggagaccaggcagcatctgccaagtgtgcttttacatcttcctacacaagcaggcctctggctgcttttccagccttaactctggaagagggtgtatatgacggggaagtgtgctggggagatgatatttcccataggataggttaggtaacattatgcagagaagctggtagtggtaagccggaaggccaggacagcaccagaccacgctgttaaggacaggtgcagctcgttccgcaggtacagcttgttaggcagtagatctctagggcaataccaatggctgccatttacgagtgcttagtgtgcagcgtgcactgtgctgaaggctctcaagcacttctcagtgaatcttcacaatagcaccctgaagcagaatatgcattattctctttctgcaggtaaggaaataaggcttagagaaattatgaacctgaggccacatgcctgtttttttgttttgcttttttgttgttgttgttgttgtttgggggaggggattgttatattgaaaatgtcaaatatttccatctcaagcaatcctcccacctttttcatgccactaacttgttatctaatggaatatcctgtggatttggcatctgatttggtttggctctgtgtacccacccaaatctcacctcggattgtgtaataatctccacgtgtcaagggagagacctggtggaaggcrattgaatcatgggggcagtttcccccacgctgttctcgcgatagtgaatgagttctcatgagatctggtggttttataagtgtttggctgttcctccttcactctctttctcacctgccactatgtaagatgtgactgcttccccttccgccatggtggtaaatttgctgaggcctccccagccatccagaactgtgagtcaattgaacctcttttctttgtaaattacccagtctcgggcagttctttagagcattgtgaaaatggactaatatagggtctgattagttctcctcctgtcattttttttaccttgtgtctccagtccctagattttcttaaactgggaggtagtctaactctaaaaggcttcttagatgtggtcatttagcaatactacaacccagctggtgctgtatgcgtgatactgcatggtgtggggaggctggatgctaagattgctcagtgggttcaggaggtaacagctgatcctttcattgtaagacttcacttttttcccctttacgatcagtgagtaatccatggggtgatactgtcaaagcctgtgctcttaaccataatatgctagaagtatctcaacaccaatgtttcaaagtaggtgtgggtcatacaatcagggtgcccagcccaagctgaaagggtcccagacagccttggccttt

SEQ ID NO: 84522 - DNA, 1489 bp, Homo sapiens
atctaccacccagaagtcattatggggagctgtctagtttgaaatcccatacccaccactccctgttgccccatcagagagagatctagagctcatctgccatttccctctactgtgacagctgggcccttcattaaaaacagttgcctgagggagaatggtcacatgcacacacatctccttttaagtctttttacttccaattctttttcaacttgttcttagttattaaaaattctgtcatttgttcatcctttttgtctgtttcttattctttgggaaataacaactttactcatgaaacctcaccatgtatcagcttaaagaaatatttgtcattgttgataacgaaagattgatgctaatgggttacctgtactgaagaagtctgttctaggatttaagggaaattaaacagaataaatatccagggcaccagcactgagagtttttggaaatacacagaaatttccctgaagatcccctccagtaattaccaacaactttttcttcctccttaaatgaaatctgcttttcctcaatcactaactctcaaaataaatatgaaaccatttttattcaatattttcttgttttacttaatgactgattttattttatgtgtttccccactgcaaatgtacagtattttagcaataatgggatgttagcaccaatctgcagccaaaccacagtttataacttgtttatgtggggaaatgcatttagatctggaaaaactccagtttataagtcagaaactgcctatggtatatgccctgagtttaagtaaaattcagtcagtaaatattttttgagagccttctaggtgamaaggcaccagtccaggggttataatgttctgcaaataaaatacataataacacaaacatacattacatcatctactccttacaacaactttactaggtagatgttactttcctccttgccaataaagaaactgaggcttggagaggaaagataacttgctcaagagcacaatcctagtgggagacagagctgtctttctcttccaggtcacctgactcccaagtctgggctctttcagctgtgctgtggtgcaataattatgctctaatgagactatgcaggaagtcaagctgtattttcaaaagtctttggaagctatgtatcagaagcttctgggaaaaatagaaatttgtgctgaatctcaggtagaaaaatgtttgctcggactattgctgccttagaaatacctcttagagaatgctatcccaagttactaagaaactgaaaagcctatcgttggaacaactgggactccaggaggatagggtgactgacgtttttgactgagtgacccattgttgggggaggacaggggacataggagcacagaccgccatctcctcaggggagtgtatgacaggctctccttttgccatcagtaagacttctcctttatcaataacaaatttcagatatttcactttgatctaaaccc

SEQ ID NO: 84523 - DNA, 1076 bp, Homo sapiens
taatatttaagcctagccttactaaaaatgcaaaccaatttagctcatttcctgattagttttaggctaacagtcccattctgtcttcctaaaaaataaaaaaaaggaataaattctccgtggaagaaaagaaatcatagacagcctctacaatttttttatgtagattgtattgcttttagttactgaaaagggaaaagaaaaaattgaaaaatagaaacagacccatagatgacacagctcttagatgaatcagaaaagaactatgaaattgctatgaataatatattcaggaaataaaagaacataagaaaaaataagcgaaaatatgtttattttcaccagaaatrtggaggttttattttatcacagtcaataggaaatctagaactgaaatataaaagctgaaagtaagaattcaatagatgaatttaacagcagattagacaaagtagaagatgggattagtgaactagaagaaaggttaatagataatattcaggctgaagcaaagagaaaaaaagtgtgaaaaaaagagcacaatagaaacattacactgtaaaaatataacagttttatgaagaaagaggagagaagagaaaaggagcagaaatagtaaagatatgctgagaaatgtcaaagactaataaagacatcgagttagaattttgaaagttctgtggacaccaaacaaggtgactaactgaaacggatgcttcatcaatgaacataatcataaaactgaccaccaaaattacacgtgtgtgtgtgtgacagtgtgtgggtgtctgtatgagaaaaagacgtatcacatcaaagaacctaatttgagactgaggatttaccttgcaatagaagatttgaaagccaggaaacaaacaagtgcactttaaatgctggaaaaaaattcattcctaattcagaattttttaccaaatgcaaatataattcaaaaacaactctaaaataacattcttttcagataaaacaaaactaataaaatttttcgccagccaacttgctttaaaagaaatactaaataaaattatttaggcaaaatggaaaagatcctattc

SEQ ID NO: 84524 - DNA, 1076 bp, Homo sapiens
taatatttaagcctagccttactaaaaatgcaaaccaatttagctcatttcctgattagttttaggctaacagtcccattctgtcttcctaaaaaataaaaaaaaggaataaattctccgtggaagaaaagaaatcatagacagcctctacaatttttttatgtagattgtattgcttttagttactgaaaagggaaaagaaaaaattgaaaaatagaaacagacccatagatgacacagctcttagatgaatcagaaaagaactatgaaattgctatgaataatatattcaggaaataaaagaacataagaaaaaataagcgaaaatatgtttattttcaccagaaatatggaggttttattttatcacagtcaayaggaaatctagaactgaaatataaaagctgaaagtaagaattcaatagatgaatttaacagcagattagacaaagtagaagatgggattagtgaactagaagaaaggttaatagataatattcaggctgaagcaaagagaaaaaaagtgtgaaaaaaagagcacaatagaaacattacactgtaaaaatataacagttttatgaagaaagaggagagaagagaaaaggagcagaaatagtaaagatatgctgagaaatgtcaaagactaataaagacatcgagttagaattttgaaagttctgtggacaccaaacaaggtgactaactgaaacggatgcttcatcaatgaacataatcataaaactgaccaccaaaattacacgtgtgtgtgtgtgacagtgtgtgggtgtctgtatgagaaaaagacgtatcacatcaaagaacctaatttgagactgaggatttaccttgcaatagaagatttgaaagccaggaaacaaacaagtgcactttaaatgctggaaaaaaattcattcctaattcagaattttttaccaaatgcaaatataattcaaaaacaactctaaaataacattcttttcagataaaacaaaactaataaaatttttcgccagccaacttgctttaaaagaaatactaaataaaattatttaggcaaaatggaaaagatcctattc

SEQ ID NO: 84525 - DNA, 1076 bp, Homo sapiens
taatatttaagcctagccttactaaaaatgcaaaccaatttagctcatttcctgattagttttaggctaacagtcccattctgtcttcctaaaaaataaaaaaaaggaataaattctccgtggaagaaaagaaatcatagacagcctctacaatttttttatgtagattgtattgcttttagttactgaaaagggaaaagaaaaaattgaaaaatagaaacagacccatagatgacacagctcttagatgaatcagaaaagaactatgaaattgctatgaataatatattcaggaaataaaagaacataagaaaaaataagcgaaaatatgtttattttcaccagaaatatggaggttttattttatcacagtcaataggaaatctagaactgaaatataaaagctgaaagtaagaattcaatagatgaatttaacagcagattagacaaagtagaagatgggattagtgaactagaagaaaggttaatagataatattcaggctgaagcaaagagaaaaaaagtgtgaaaaaaagagcacaatagaaacattacactgtaaaaatataacagttttatgaagaaagaggagagaagagaaaaggagcagaaatagtaaagatatgctgagaaatgtcaaagactaataaagacatcgagttagaattttgaaagttctgtggacaccaaacaaggtgactaactgaaacggatgcttcatcaatgaacataatcataaaactgaccaccaaaattacacgtgtgtgtgtgtgacagtgtgtgggtgtctgtatgagaaaaagacgtatcacatcaaagaacctaawttgagactgaggatttaccttgcaatagaagatttgaaagccaggaaacaaacaagtgcactttaaatgctggaaaaaaattcattcctaattcagaattttttaccaaatgcaaatataattcaaaaacaactctaaaataacattcttttcagataaaacaaaactaataaaatttttcgccagccaacttgctttaaaagaaatactaaataaaattatttaggcaaaatggaaaagatcctattc

SEQ ID NO: 84526 - DNA, 1335 bp, Homo sapiens
aggaccctgcctcatgaaatttgaagccaggtgcagagattaatggaaatagagcatctgccaaatttaaggggcagaactagtctgttgttaatttgagtttcctcccagtcatagtataaattgcttaatcttacttgatttattatcctgaaggaaaaaatgtcaatctagcacaattagatggtataatgaatgtcttagtttagcttctgagtattcttaaaagcagaagtttttgtctctctgaggacaaatacgaattttattcaaactattgatatataaaaaattcttcagatcctgggacatgctacaagcattaggtaatcaggggttttccaattattggctccttctcactcaagaaatttccttggtcatatcaatccagatacctcatccccagtaagctgtttacgtaccactcagcacacaggataggcacataacaatttaaccagtaattaaggaaatgattttggtggaacattaatatcataggactcacttctttaagaacctgttttgctttaaacatcattcctttattcattcattcagtgtgttatgatctattgtgtgtcaggcactgttctaggagtacagggaagaacaaaacagatcagtcccttatgtcttggggcttatgaagtaggtgggtgggcaactgacaatgacatgcaaataaattattcaaaataagatcatcttaaagaaggataagtgctgtaaaaaaataaaactggttaagttgtagatgacagttgcggtggttgcagctagcttattggagtcactttgtttatctgataaatatgtatatagtgtttgctgtgtgccagaactatactaagttcttcacaaatattaaatcatttggtcttccaaacgttcctgtgaaggaaatatttttatcattgccatttataaatagggaarctaaggcacagaaaggtcaaatcacatgtgctgggtcactgggaactaggctcagatttgaacccagaatcaataattcagagtctatgctacagccccctctgccatctggattgctggtaacgctgactggcatgaccatgaagtcactggaacccagcctactcaatggctattccctcccataaaaatatctccatataccaggtgaagggcatttatttccaaatgcacatctccattaaagtattcttgacagcccacattgctgtatctaatatcagctgcactcaaatttcataagataaacgttatacgtttttattgaggtataattcatagacagtgaaatcacatacagaccttaaataatttgctgagtttgacagatgc

SEQ ID NO: 84527 - DNA, 1725 bp, Homo sapiens
acaggggaatgacaactcaaatgaccatgtacttctcaccagatactatggaggccaaataacatttgtaatgtactgaaagaaaaaataaactgtcaacccagaattctacttccaatgaaaatagccttcaagaattggggcaaaataaaggaattttcagataaaagaaatctaaaagaattcattgccagctgggtgcagtggctcactcctgtaatcccagcactttgggaggctgagatgggcagatcacctgagatcaggagtttgagaccagcctggtcaacctggtgaaaccctgtctctactaaaaatacaaatattagccaggcccggtggtggatgcctgtaatctcagctactcaggaggcgaggcaggagaatcacttgaacccaggaggtgccggttgtagtgatccaagatcatgccattgtactccagcctctgtggcagagtaagactccatctcaaaaacaaacaaacaaataaacaaaacaaaacaaaaaacaccaccaccaacaaaaagaattcattgccaaaagacctacactacaaaataaaaagtgctttaggctgaagggaaattaaaatgtatggaaagaccttcagtaaaaactctggacactaaagctcaggtgagctacctggcaggtgatcatacatcaatgtgctaggaaggtgatgcatccccaagcataaattaaaatggaattcaaaaaaatattcaaagaatccaaaagaaggcaagaaargaggaacacgggaacaaaacacaagaggcatacaggaaaaatgacaataatgttgcagacctaaattcaaccatatcgacaattatattaaatgttaatatactaagcactccaattaaaatacagaattggaccctgttcacaagatggcgccaaaagcgaagaaggaagctcctgcccctcctaaagcagaagccaaagcaaaggctttaaaggcagtgttgaaaggtgtccacagccacataaaaaagaagatccacaagaaaagaagatccacccaccttctggccgcccaagacactgtgactcctgaggcagcccagatatcttcagaagagcgcccctgggagaaacaagcttgatcactatgctatcatcaagtttctgctgacccctgagtctgccatgaagaagacagaaggcagcaacacactcatgttcattgtggatgttaaagccaaaaagcaccagatcaaataggccgtgaagaagctctgtgacattgatgtggccgcagtcaacaccctgatcagcctgatggagagaagaaggcatatgttcaactggctcctgattacgatgctttggacgttaccaacgaaattgggatcatctaaactgagtccagctggctaattctaaatatatgtatatcttttcaccataaaaaaaatatggaattggaagtagctccccaacttactgcttgctgaagaaaaggcatagatcatccattcccattgcttccatactcatatgaaatatttggtatatatctacccaaaagtaatatgctgttccactcccctgtactctgccttctgcctcaaatgtccttcctatctcataccaccctcacctccagcattcaacacacacacacacacacacacacacacacacatttagactccctcatgtcttacctttccatgaaggtgatatgatctgaccactccacttactcca

SEQ ID NO: 84528 - DNA, 1725 bp, Homo sapiens
acaggggaatgacaactcaaatgaccatgtacttctcaccagatactatggaggccaaataacatttgtaatgtactgaaagaaaaaataaactgtcaacccagaattctacttccaatgaaaatagccttcaagaattggggcaaaataaaggaattttcagataaaagaaatctaaaagaattcattgccagctgggtgcagtggctcactcctgtaatcccagcactttgggaggctgagatgggcagatcacctgagatcaggagtttgagaccagcctggtcaacctggtgaaaccctgtctctactaaaaatacaaatattagccaggcccggtggtggatgcctgtaatctcagctactcaggaggcgaggcaggagaatcacttgaacccaggaggtgccggttgtagtgatccaagatcatgccattgtactccagcctctgtggcagagtaagactccatctcaaaaacaaacaaacaaataaacaaaacaaaacaaaaaacaccaccaccaacaaaaagaattcattgccaaaagacctacactacaaaataaaaagtgctttaggctgaagggaaattaaaatgtatggaaagaccttcagtaaaaactctggacactaaagctcaggtgagctacctggcaggtgatcatacatcaatgtgctaggaaggtgatgcatccccaagcataaattaaaatggaattcaaaaaaatattcaaagaatccaaaagaaggcaagaaaagaggaacacgggaacaaaacacaagaggcatacaggaaaaatgacaataatgttgcagacctaaattcaaccatatcgacaattatattaaatgttaatatactargcactccaattaaaatacagaattggaccctgttcacaagatggcgccaaaagcgaagaaggaagctcctgcccctcctaaagcagaagccaaagcaaaggctttaaaggcagtgttgaaaggtgtccacagccacataaaaaagaagatccacaagaaaagaagatccacccaccttctggccgcccaagacactgtgactcctgaggcagcccagatatcttcagaagagcgcccctgggagaaacaagcttgatcactatgctatcatcaagtttctgctgacccctgagtctgccatgaagaagacagaaggcagcaacacactcatgttcattgtggatgttaaagccaaaaagcaccagatcaaataggccgtgaagaagctctgtgacattgatgtggccgcagtcaacaccctgatcagcctgatggagagaagaaggcatatgttcaactggctcctgattacgatgctttggacgttaccaacgaaattgggatcatctaaactgagtccagctggctaattctaaatatatgtatatcttttcaccataaaaaaaatatggaattggaagtagctccccaacttactgcttgctgaagaaaaggcatagatcatccattcccattgcttccatactcatatgaaatatttggtatatatctacccaaaagtaatatgctgttccactcccctgtactctgccttctgcctcaaatgtccttcctatctcataccaccctcacctccagcattcaacacacacacacacacacacacacacacacacatttagactccctcatgtcttacctttccatgaaggtgatatgatctgaccactccacttactcca

SEQ ID NO: 84529 - DNA, 756 bp, Homo sapiens
ttccttttcagactaaaatcacctgaccatgttcagaatttgagtgtttaattgattagtcactcaagacggagagtggacctacaagtgtttcttaagaaaaatcctaatttcacctgtgggcatttcttgtccatcatccaggtgagaggcttggtgcaattcctcagtgtccatctgtgaacttctatcttactcttttatagtttgtctgcagtgtgtgtatctgcccgcagtcatcagcacaaaactgcttcatacagacctttggcaaaaatacaaccttaaattgccaaactcttatcaaagtcaagtggagagtggtaatgttatttgttttatattcattaggtctcaggtgcacatgttggactatgagccttgtttcatgacatagactggtagcttttaagactatctttaaaattttttttattatactttaagttctgggatacatgtgcagaacatgcaggttttttacctaggtatacacgtgccatgatggtttgctgcacccacctatccgtcatctacattaggtatttctcctaatgctatccctctcctaccctcaaaccccctgacaggccccggtgtgtgatgttcccctccctgtgtccatgtgttctcattgttcaactcccacttatgagtgagaacatgcagtgtttggttttctgttcktgtgttagtttgctgagaatgatggtttccagcttcatctatgtccctgcaaaggacatgaactcaata

SEQ ID NO: 84530 - DNA, 994 bp, Homo sapiens
tgctttattttttgtatagacaggttctcaccaatttcccaggctcgtcttgaactcttggacttgagtgatcctccctccttggcctcccaaagtgctgggatcacaggcatgagccaccgtgcctggcttaattttgttgttgttgttaatagataaattgtccttgtggtttctatattagtcactttcgagctttgttaaatggatcaacaaccttatatcccatcaactcttaatagttgactcacttgagtttaagttatatatcctggagcartcatcttgacttttgctatttaatgatgtttcttgacagttagcaagttatatagcttgttctgggtgaaacccttctgccttgcatctttacccatttgtattccatttttacagtgatttatttcaaggcaatgaggacaaggaggatgcaaaatcaaaaaaggcattggatttaatggttaaaggtggtgtataagggacaggaatgcagtttgagtaaaatggtgaatacttctagataggcacaaaaattttatttcccctagttcactttttaaaaattaataaactttattttttagagcagttttagctttatggcaaaattgaggggaaagtagagttcccatattccaccccctctttttcccactgttgacatccagcacactggcacatttgtttccagtggtgaacttacattagcatattattgtcacccagtgttcatagtttacattagggtttattcttggcattgtacattctataggttttcacaaatgtttaatgacatgtatcccacattgtggtgtcatacaaaatagtttcattgcctaaaaatcctgtttattttgtctgttcattcttccttcccccttagcccctgtcagtcactaatctttttactgtctccatagttttaccttctccaggatgttgtatagatggaattgtacagtatgtagccttttcacattggcttctttca

SEQ ID NO: 84531 - DNA, 729 bp, Homo sapiens
atttaaaatgtcagatcgtgttactcctctgttttaatacttgaaaatgttctccatttctttcagaataaaagccaaagtccttagaatggcatacaagacccaacagtggcagtccattaattttctgaactcgtctcttcctactatcctcctgccactctttttcactcatactwgcttctgtattattatttgtaaataagccagactctttccttccttaggatctttgctgtagctgttcactgtgtccaaaattgttttctcttggatatccactagcctcactcttacatctttcaagtttttgctcaaaatttagcaaattagcaaatgacactttacctagacaccttaattaacactgcaacttgctcaaccctgcggagcacttaccttctaacatgtagtacaatttatttatttatgtttatttttaatctttccctggttagaatacaagttccatgaggataggggtctttgatttgttcactgatgtatctcaagaactacaacagtgcctgagactcaacatttattgaattaatatattaaatggcgttttcctacattaagtgacaaagctaggatctgcaagttaagtctgtcttcaggagcttacacatgtaacttctagggaagagcttggttcaatggctgttagactctaaccaatcagattactgaatttcccttgggaggaatgtaaaaaatctaagaact

SEQ ID NO: 84532 - DNA, 703 bp, Homo sapiens
ctaaattaggaaaaaagattactccatgtagtaaaagaatgctaactatacttcaacactgggatccagggctgaagtcctagctgattctattatgctacctttccatactttatatttttagatacttccaggggaagacagatagttgagctttgacaggcttcactacatttggtactatcaaaatctcatcatgacttccaaaaagttcttgktctttaccaattaaatttctgcatactttctactaagagattttaacactgataaatattatggaagctttcagcaaccactcagaatatttgatccactactgagaaacactatagaccatcactcatctttctctttctcgggtggcaagtaatcagcaacttattagcagtcacaaacttccagtgtacacttttgctgtctcctctgtcctggcatcaagagcgaaacacataaagtcagcaggtttttgtgcattgaactaatcagtaatcttgagggccttttacaactttgtagtagtaaatcaaccagcacccataaagacagcagcagggactttgctgatgaattgttctgaagactcaggctcatgcactataggtggctcatgtagtcaatggcagaaaaatttatctttggttcaatttaaaatagagaataaaacagtcttttcatctacatgcagttgtaagtcttctaa

SEQ ID NO: 84533 - DNA, 739 bp, Homo sapiens
aatccaggaggtggaggttgcagtgagccgagatcgtgccactgcactccagcctgggagaaagtgtgagattctgtctccccctacaaaaaaagaaaaagaaaattgagaagggacctccaggaagatggaatagatgtacttttttctatttgtccagctaagtacaataaaaaccctgggcattagttataaaaaaagagaaaaagaacactgagtggtagagaaaaggtagactggtgctgagttcccttgrttttctttgtgcctcctttgtgccagacttaaagccaaagaagctagcagtcccaatacaccaatgggcacagacagaaaagtcccagcaaaagcctgctgtctttagccaaaagacaaggaagagggcagcctagcaagaaggaaaacttttagacaattactgccatgctctagtcaaaacaccacaggaaaaaccttcagcactatccccagcatgccagcaaagacccatgcttccactcttgcctggagagttaggactttcctccccacccctcaacccagtgctaacagtagaagccacatggagtgcagtaataaggcactcctttccctccaaattagaaaggtatcagtggaggtctagtgggaaaccggaactcccacccctgccactagtaatgaggagcccccctgtgggtatcaatggaggctgagtgggaaatctggatttctgtcaccacctaataataatgaggca

SEQ ID NO: 84534 - DNA, 739 bp, Homo sapiens
aatccaggaggtggaggttgcagtgagccgagatcgtgccactgcactccagcctgggagaaagtgtgagattctgtctccccctacaaaaaaagaaaaagaaaattgagaagggacctccaggaagatggaatagatgtacttttttctatttgtccagctaagtacaataaaaaccctgggcattagttataaaaaaagagaaaaagaacactgagtggtagagaaaaggtagactggtgctgagttcccttggttttctttgtgcctcctttgtgccagacttaaagccaaagaagctagcagtcccaatacaccaatgggcacagacaraaaagtcccagcaaaagcctgctgtctttagccaaaagacaaggaagagggcagcctagcaagaaggaaaacttttagacaattactgccatgctctagtcaaaacaccacaggaaaaaccttcagcactatccccagcatgccagcaaagacccatgcttccactcttgcctggagagttaggactttcctccccacccctcaacccagtgctaacagtagaagccacatggagtgcagtaataaggcactcctttccctccaaattagaaaggtatcagtggaggtctagtgggaaaccggaactcccacccctgccactagtaatgaggagcccccctgtgggtatcaatggaggctgagtgggaaatctggatttctgtcaccacctaataataatgaggca

SEQ ID NO: 84535 - DNA, 352 bp, Homo sapiens
aaaagtttgttttgtttttaaatagaattctccgaaagatcaagatattggaaaacagctttttcgatagaggaaatagcctcaaatgttagcctttttcagttattctgacacattaaaaagaggactgtctgcagagccaggtggcatgccacggctgtggctcactgtcagtggcatgtttaaggagtccagcacagtgtcaagmaagcacttttcgcaggtagaacgcagggtggtgagcacagagctagcaagcttgcacagacgctagctaggtggcaagcctctgttcctcagggctgatgaagctggggacagtgcctggggcacagaaagaatccatacagga

SEQ ID NO: 84536 - DNA, 352 bp, Homo sapiens
aaaagtttgttttgtttttaaatagaattctccgaaagatcaagatattggaaaacagctttttcgatagaggaaatagcctcaaatgttagcctttttcagttattctgacacattaaaaagaggactgtctgcagagccaggtggcatgccacggctgtggctcactgtcagtggcatgtttaaggagtccagcacagtgtcaagaaagcacttttcgcaggtagaacgcagggtggtgagcacagagctagcaagcttgcacagacgctagstaggtggcaagcctctgttcctcagggctgatgaagctggggacagtgcctggggcacagaaagaatccatacagga

SEQ ID NO: 84537 - DNA, 1240 bp, Homo sapiens
ggacctcaggtgatccacctgccttggcctcacaaagagctgagattacagccgtgagccaccccgcctggccgagataaaygtctctttaaaaaaatcaactttattgtagcatatgtaactaaaatttactattttttttttgagatggagtcttgctctgtcacccaggctggagtgcagtggcacgatcttggctcactgcaagctccgcctcccgggttcacaccattgtcctgcctcagcctcccaagtagctgggactacaggcgcccgccaccatgcccggctaattttttgtatttttagtagagacagggtttccccgtgttagccaggatggtctcgatctcctgacctcgtgattcgcctgccttggcctcccaaagtgttgggattataggcgtgagccaccgcgcccggccaaaatttactaatttttagtgtgcagcttaaggaactagaatgtatagttgtgttaccaccacgcaagtcaagatgtggaagagttctgttttaccaagaaggttcctgttccccttctcagtcagtccccttccatcacctagcctgtcatgtacaaggggggccaacgaatctagggcagaagcagaaggaggggtgagttgatcaatatgtattgaggatccacagcacgtagggctttgtaggtcagatgtccagggctttgggtttactctaaaagaaatggggaggcacgggagggttttgagcgaaggactgatccgatttaggttttgaaaagactatggagaaactactttacatatacacaaggggtgaacaaataaaaaactatactacaggtaatgagagccaggcttctcactgctggagaaagaagttacaaatgagaaataagggaaggaaggctagaacgatccttgtggatgggagttggaggcatcagtatgaacttgtgtgtggacagccagctagatacatagagaaataaatatagacatgcctgtagacacggattacatgtgtgtgcatgtgtgtatgtgtgtgtatgtatgtgtgttgctatcttaacaatagtaaatcttctaatccatgaacacaggctgtctttccatcagtttaggtctctttaaaaatgtatcttaagaatgtttggtcattttcagggtgcaagtcttgaatttcttttgttaaatttattcctaagtaatttttttatattatgaatgaaacttctttttttgtttgttttttg

SEQ ID NO: 84538 - DNA, 2371 bp, Homo sapiens
aaggcaaaggcccaggagaggtgatccagatgccttctggttgtgttgggcaactgtctgactttagcagcccagccattcacgaatcacattcaaatcccacttaaaacccaagcccttgtggcaagaacgagcatcttttatacctgatacttggatagatgtgtcaataaatctgccgcctctgagggtgtgttcatgttactgatcagcttcctccatgactcaattttccacctgaagagattaactctctctagagtaagctaacgctgacagccctgctgtgcctctgcccctgggactgactgccagccgaagatgcagggctcccctgacttacagaacacatttgttccaccaaaacaagatgccaaatgagtctcatctcccaccaaattcctggtccatccccaaaacccaatggaagggccctgagggctagacacactccccacaggtagctatccctggcctgacactaggaaatacctggctggtggccaccaaccacctctcagccccgggcgggccctgctgccctcctagttcctggcagcatcactcagccctgcaccttggagctctgtcacctcccacactctcaggagacctcagctggcccaggatccttccaaggtccacctcagaagcacttctgacatgctggctgggtttggcttttcttttttttaacaatatattttcccacatctttgagttttcaaaagtagacccatgtaggactcccttttcagatgcctccttcttaccaaaacactctcctttgtgtgtacatgtctggtgtaagtgcacatgtgtctgtgtgtgcgcatgcttcagctctattcccagagctgggcaagcagggctgaggccatgacaactctggttcacccctgaggttcccttgttatgaagacagcttccgtagagagtcctctgagggcccactgtgcctggggacttcctggacatactcatgaaacagcgcacaagaaagctttcaaattctaccaagtccccattgggtttaagaatgaggccgggcgcgatggctcacgcctgtaattccagcactttgggaggccgaggcgggtggatcatgaggtcaggagatcaagaccatcatggctaacacggtgaaaccccatctctacaaaaaacacaaaaaaaaattagccgggcgcagtggcgggcgcctgtagtcccagctactcaggaggctgaggcaggagaacggcgtgaacccaggaagcggagcttgcagtgagccaagatagtgccactgcagtccagcctgggcgaaagagcgagactccgtctcaaaaaaaaaaaaaaaaaaaaaaaaaatgaatggctgataaccggggatagccttgccattccactccctgaaaaatcctgtttccccttaaattcttgccaggccactcgagagtggaggcatggcccgaaggcctggcggacagcagcagcagctgttggggtgatgccgcaggacaatgatcacggccactgctccatgaagtcctgggcaggctgcttgacactctggccttcccagctgcacagtatcaaaccaaatttggatccatctctagccactgtatacaatcctggcttttctttctcacctctgttttccttttgccccaatttcttctggtatctattgaatcctgtggcattgcatgtgttttataagccaactcaaatcctttctagtaatcacttggcaaacccttgccgggtggggtgtgagaggagcagcctcagcacaaggggctctcagcccagaggaccagtagcccaaaggaatccctgtcatttctctgggagcagacttgaagcatactacagccagggccagcggcgtcagcaagacaggaggggccatgaggagagccaagaagacccggctgcaggcagcagcccccacctggtacaaagcccaccactgcttactttggtttcagaacccaagttggttctgattcacttgagtgaatcagaaagcaatgaagatttctattctgcctgccttcctttttctttttcttttttttytttttttttttttttgagaacgggaatgctgggcagttaaactcccaccaagaactgcaaggtaccaggcaactcgggacttgctcagggagcatcaagacagctgtagctctggctccgcagactcagcaagggggctgagaacaccaagctgagcattccttccttcccttacccaccctcaacagaggccagccaaggcagaagatctggcccctggccttagagtgtccttggtgagaggacagcagcaatctttctttccattccttgactcaggaatgcttttctcatccccatc

SEQ ID NO: 84539 - DNA, 1104 bp, Homo sapiens
gcatttcattcctaatttgttcttcattttatataaatagtaggatgttttaaaagctaagagtttttttctgattataaatcaagacctatatacagagataaatattcaaatgatccgaaaaagttatattctttttatagaatataatataaatagaatagaatatawatgtagagagtgatgtcagaaagaaggttgactacggttacctggcactcgtccctccccaacaaaaaggaaccaaaacaacaaataaacaactatattgtaagtaaagtgactgaagtagagtgctaggcagcaccaggggaatggtaaaatttatgtggagtacagacaccaaggataccatagagagagagaggaagacaccctacttctaccactctctcttccttaccagaattagctcagagtcagggggacttcttcctatggagaaaacataagttaaagatcctcagtggtccccattgcaaccacaaacaccagcaatccttgctacaggacagcccctaatccccacaggcctcaaatccagtctggagagtagctgaggtccgtgcaactccattgcctcattgtaagagaccaccttgagcacctcccaccactgtgacctaggctgctatggctctatactattttgaacctggacccatgtatacagtgtgtcttgccctggggatcagtatcaattgactttccattcctgaggccctgccatcatactaccatagtgcctacagtaccatgacctcagctgcccagaacataggccagatcgaaggactgagaccctggcatccaaacccatgtggcatttgtcacaaccttccaataaacaggtgaacctgcacagcaggaaagtggctgaacagcctgctagccatcacatccatgtgcacctacactgcacagtctgccaaccctgtgagtgcttatacctagcctgacagccagtcctatgttgaatccacccccagaaacaactgcttcaacctgcctagcccccatccccaacacctgcatatgttcatgtacagcctgaaagcgggtcctgcagcagcagtatccccaggacagcttgctacagcctgc

SEQ ID NO: 84540 - DNA, 1104 bp, Homo sapiens
gcatttcattcctaatttgttcttcattttatataaatagtaggatgttttaaaagctaagagtttttttctgattataaatcaagacctatatacagagataaatattcaaatgatccgaaaaagttatattctttttatagaatataatataaatagaatagaatatatatgtagagagtgatgtcagaaagaaggttgactacggttacctggcactcgtccctccccaacaaaaaggaaccaaaacaacaaataaacaactatattgtaagtaaagtgactgaagtagagtgctaggcagcaccaggggaatggtaaaatttatgtggagtacagacaccaaggataccatagagagagagaggaagacaccctacttctaccactctctcttccttaccagaattagctcagagtcagggggacttcttcctatggagaaaacataagttaaagatcctcagtggtccccattgcaaccacaaacaccagcaatccttgctacaggacagcccctaatccccacaggcctcaaatccagtctggagagtagctgaggtccrtgcaactccattgcctcattgtaagagaccaccttgagcacctcccaccactgtgacctaggctgctatggctctatactattttgaacctggacccatgtatacagtgtgtcttgccctggggatcagtatcaattgactttccattcctgaggccctgccatcatactaccatagtgcctacagtaccatgacctcagctgcccagaacataggccagatcgaaggactgagaccctggcatccaaacccatgtggcatttgtcacaaccttccaataaacaggtgaacctgcacagcaggaaagtggctgaacagcctgctagccatcacatccatgtgcacctacactgcacagtctgccaaccctgtgagtgcttatacctagcctgacagccagtcctatgttgaatccacccccagaaacaactgcttcaacctgcctagcccccatccccaacacctgcatatgttcatgtacagcctgaaagcgggtcctgcagcagcagtatccccaggacagcttgctacagcctgc

SEQ ID NO: 84541 - DNA, 988 bp, Homo sapiens
tgtttaggaaatgtgacagctgtgctctttgcctggctgcttccatttatgaaaacatgggggtaaatggcagtcacccccataggccatttactgtgaatcttcttttctaggcacagccaagactaaatgcccccaacagaatcgaataacagtcattcagggcctacctcaaataggtttaatttgctttttacaaaaaaaggcctcaggaaattaaaaaatttgcctaattggaattctaaaaaacatagttttttttttcttaaaacaatacccattttatgtgattttaacatatccacttctgatggtagcttctctagggaagcaagacaaaaatatccaattacaccaagtaaaatttgccacctaaagtttatcttctgggtatggctggggagggattatagggcttggagcccacacatgcccctttggcaaatctgatctcattctatcttgtaagcattgtcagtggtgtcatctctgaaaagaaaacctagtggcagatgagttgagacagttccttcagtgtgggttattaatttatctttgtctgtagaatactggtttcctttatcaccatgctcttcctgtccctgcatctttcaaagtgctcctgggattttgcttatgctgtgtgatgcttatcagagtggtctctgccctatcttgtgcagtcagcgcagaaagggagccagggagattmtggggcaagccctgacacatttcccatgttcccatctttgcccatgttcccatctttgcccatgttcctatagtctgaaagccatgctttgaaaactcccccttcccctgcctttttagtttctattacagtgtcactattgtgaatccctgggccaccacaaaaatactagtgtaatggggcttaagcaagtgaaggcttctatcagatgactggagatcaatatggaaatttcatgcactgctcctaataggtctcattactctatgagcagac

SEQ ID NO: 84542 - DNA, 988 bp, Homo sapiens
tgtttaggaaatgtgacagctgtgctctttgcctggctgcttccatttatgaaaacatgggggtaaatggcagtcacccccataggccatttactgtgaatcttcttttctaggcacagccaagactaaatgcccccaacagaatcgaataacagtcattcagggcctacctcaaataggtttaatttgctttttacaaaaaaaggcctcaggaaattaaaaaatttgcctaattggaattctaaaaaacatagttttttttttcttaaaacaatacccattttatgtgattttaacatatccacttctgatggtagcttctctagggaagcaagacaaaaatatccaattacaccaagtaaaatttgccacctaaagtttatcttctgggtatggctggggagggattatagggcttggagcccacacatgcccctttggcaaatctgatctcattctatcttgtaagcattgtcagtggtgtcatctctgaaaagaaaacctagtggcagatgagttgagacagttccttcagtgtgggttattaatttatctttgtctgtagaatactggtttcctttatcaccatgctcttcctgtccctgcatctttcaaagtgctcctgggattttgcttatgctgtgtgatgcttatcagagtggtctctgccctatcttgtgcagtcagcgcagaaagggagccagggagattatggggcaagccctgacacatttcccatgttcccatctttgcccatgttcccatctttgcccatgttcctatagtctgaaagccatgctttgaaaactcccccttcccctgcctttttagtttctattacagtstcactattgtgaatccctgggccaccacaaaaatactagtgtaatggggcttaagcaagtgaaggcttctatcagatgactggagatcaatatggaaatttcatgcactgctcctaataggtctcattactctatgagcagac

SEQ ID NO: 84543 - DNA, 667 bp, Homo sapiens
acattagagatcatttactcaacggattttcaaacgtatcttagctcaagaaccttttccacaaaagaaagcatcacagaaagcccccatgtgaaasaggtaaattctgagccaccctgattgaaacaggaagggagatcctgagctgctccacttctctgcttcccccaggccagcccagggcagtggtccctaaatcatggagctgatttagggaagtgaagcttagttggatgctgtattatgcaggatctgaatcctgtataaggttttgctgagcatttcgacaccagactaggagcatttgttcatgtttccctcagatggcccctctatgaataggctttgaacacgcacttccttttttaaaaaataacttgtattataagtttacatccatagtcatttacatcagtaagaataatgtcattagagaataaagaccataggatttggcatgcagggttatgggtgtcatagtagccccagcaccatttttatatcttgttttgattgtaagacatccaaaaactactggttgctgcaaaaggtaatttttcaaactattttattgaggaaaaatttatagaccatgaaaacacacatattaattgtgcaattcaataattttttttttttacagacagaatctctctctgtctcccaa

SEQ ID NO: 84544 - DNA, 1642 bp, Homo sapiens
tacaaaccctggtggttaagctgcgatgggttctgccagctttgagcttgggtcacagacctgttcaagggcaagtgttcttccagcactccgagaaagagatggctgttgatgcagatggcatcatacgaaaagctcacctccattcataagaagagaatgcaaatgaaagcatactgagattttcaagttgtgggaaatcacaactgaaaacacactcactggggatgtggggcaactgacattcttgtactttattggtgggagtataaactggaaaaatacctataaggggacaaattggcagtatctagtaaaattaccaatgcatgtacgctttgctgcaggaattcctctttcatcaattcatgcaacttatacttgctcccaattcaaatcacattggtctaaagttatttattactaaatcgtttaatagtagatgacttcaaaacttaacatacttaccagaaggggactgctaaataaactatggaacagccaaatactatgtaatttttaaaatttttattttaaataaaattttaatttaaatttaaatttttaaatgaagaaactatctttataattatatttagctatctccaaaacatagtaagtggacagaaaaaaaaaggcaaggtaaaacaactgtgtatatagtatactataaataatgtttaaagaaaatgaaaaaagaatacttatgcttgcatgtgcataaaatatatctggaagggctgcgcatagtggcttatgccwgtaatcccaacgctttgggaggttgaagcaggaggatcacttaagtccaggagttcaaaaccagcctggacaacatggtaggatcctgtctctacaaaaaaataacataaaatatagaacaaaaattagctgggcatggtggcgtgtgcctatagtcccagctactagtgaagctaaaattaggaggatcacttgagcctggggaggtcaaggctgcagtgagccgtgatcataccactgcactctagcctgggtgacagagcgctgccttgtttgtaaaaagaaaattaaaaataaaatatttctggaaggatgcccaagacactaaacattggttgcactcaggtagctcggaggagggagaattttccctgtaaacctttttatgtctttttactttggagctctgtaaatccctgaccttttcaaaaaataaaaacaatttcctaacaacagaaaacaaaaaactgtcggttgactttcaaaccaagcttgaaaagaaaacatcatattttaattaggggctagtctgggactgggagttggaaattgtacccactggaacgtgggccactaaatggcaaaaagaaaaaaaacacagttaaatttccctgtaggggcaaaatatttcacatccaattaaagccaacttactatagctggtcaaattaaggccagtttcatcttacactcaggcttcactgtcctgatgagctggtctctgaaatcctgaggagcagactctggaggctgggcatgtcagggcccctgagcctaatggccccagtgtcagcccaagatgggctctcggatgtgactctcagggggaaatccagctccccacagcaactgtgtgaccctgaagcagcgtgttagtgat

SEQ ID NO: 84545 - DNA, 1642 bp, Homo sapiens
tacaaaccctggtggttaagctgcgatgggttctgccagctttgagcttgggtcacagacctgttcaagggcaagtgttcttccagcactccgagaaagagatggctgttgatgcagatggcatcatacgaaaagctcacctccattcataagaagagaatgcaaatgaaagcatactgagattttcaagttgtgggaaatcacaactgaaaacacactcactggggatgtggggcaactgacattcttgtactttattggtgggagtataaactggaaaaatacctataaggggacaaattggcagtatctagtaaaattaccaatgcatgtacgctttgctgcaggaattcctctttcatcaattcatgcaacttatacttgctcccaattcaaatcacattggtctaaagttatttattactaaatcgtttaatagtagatgacttcaaaacttaacatacttaccagaaggggactgctaaataaactatggaacagccaaatactatgtaatttttaaaatttttattttaaataaaattttaatttaaatttaaatttttaaatgaagaaactatctttataattatatttagctatctccaaaacatagtaagtggacagaaaaaaaaaggcaaggtaaaacaactgtgtatatagtatactataaataatgtttaaagaaaatgaaaaaagaatacttatgcttgcatgtgcataaaatatatctggaagggctgcgcatagtggcttatgcctgtaatcccaacgctttgggaggttgaagcaggaggatcacttaagtccaggagttcaaaaccagcctggacaacatggtaggatcctgtctctacaaaaaaataacataaaatatagaacaaaaattagctgggcatggtggcgtgtgcctatagtcccagctactagtgaagctaaaattaggaggatcacttgagcctggggaggtcaaggctgcagtgagccgtgatcataccactgcactctagcctgggtgacagagcgctgccttgtttgtaaaaagaaaattaaaaataaaatatttctggaaggatgcccaagacactaaacattggttgcactcaggtagctcggaggagggagaattttccctgtaaacctttttatgtctttttactttggagctctgtaaatccctgaccttttcaaaaaataaaaacaatttcctaacaacagaaaacaaaaaactgtcggttgactttcaaaccaagcttgaaaagaaaacatcatattttaattaggggctagtctgggactgggagttggaaattgtacccactggaacgtgggccactaaatggcaaaaagaaaaaaaacacagttaaatttccctgtaggggcaaaatatttcacatccaattaaagccaacttactatagctggtcaaattaaggccagtttcatcttacactcaggcttcactgtcctgatgagctggtctctgaaatcctgaggagcagactctggaggctgggcatgtcagggcccctgagcctaatggccccagtgtcagcccaagatgggctctcggatgtgactctcagggggaaatccagctccccacagcaactgygtgaccctgaagcagcgtgttagtgat

SEQ ID NO: 84546 - DNA, 1642 bp, Homo sapiens
tacaaaccctggtggttaagctgcgatgggttctgccagctttgagcttgggtcacagacctgttcaagggcaagtgttcttccagcactccgagaaagagatggctgttgatgcagatggcatcatacgaaaagctcacctccattcataagaagagaatgcaaatgaaagcatactgagattttcaagttgtgggaaatcacaactgaaaacacactcactggggatgtggggcaactgacattcttgtactttattggtgggagtataaactggaaaaatacctataaggggacaaattggcagtatctagtaaaattaccaatgcatgtacgctttgctgcaggaattcctctttcatcaattcatgcaacttatacttgctcccaattcaaatcacattggtctaaagttatttattactaaatcgtttaatagtagatgacttcaaaacttaacatacttaccagaaggggactgctaaataaactatggaacagccaaatactatgtaatttttaaaatttttattttaaataaaattttaatttaaatttaaatttttaaatgaagaaactatctttataattatatttagctatctccaaaacatagtaagtggacagaaaaaaaaaggcaaggtaaaacaactgtgtatatagtatactataaataatgtttaaagaaaatgaaaaaagaatacttatgcttgcatgtgcataaaatatatctggaagggctgcgcatagtggcttatgcctgtaatcccaacgctttgggaggttgaagcaggaggatcacttaagtccaggagttcaaaaccagcctggacaacatggtaggatcctgtctctacaaaaaaataacataaaatatagaacaaaaattagctgggcatggtggcgtgtgcctatagtcccagctactagtgaagctaaaattaggaggatcacttgagcctggggaggtcaaggctgcagtgagccgtgatcataccactgcactctagcctgggtgacagagcgctgccttgtttgtaaaaagaaaattaaaaataaaatatttctggaaggatgcccaagacactaaacattggttgcactcaggtagctcggaggagggagaattttccctgtaaacctttttatgtctttttactttggagctctgtaaatccctgaccttttcaaaaaataaaaacaatttcctaacaacagaaaacaaaaaactgtcggttgactttcaaaccaagcttgaaaagaaaacatcatattttaattaggggctagtctgggactgggagttggaaattgtacccactggaacgtgggccactaaatggcaaaaagaaaaaaaacacagttaaatttccctgtaggggcaaaatatttcacatccaattaaagccaacttactatagctggtcaaattaaggccagtttcatcttacactcaggcttcactgtcctgatgagctggtctctgaaatcctgaggagcagactctggaggctgggcatgtcagggcccctgagcctaatggccccagtgtcagcccaagatgggctctcggatgtgactctcagggggaaatccagctccccacagcaactgtgtgaccctgaagcagcgkgttagtgat

SEQ ID NO: 84547 - DNA, 749 bp, Homo sapiens
actctttcaacataagttgggagactactaaatgtaagtttgggctgaactagaacaaatattaaaagtaagtttgggcagaactagaaaaaatttcaattataattaattcaattatatatttatattcaattacaataaaaatgactaaaactaaaagcaattggaagggacatgtttatttgcctaatgtgtagtacaaaccactttttaacaatgttatattttagtgattctcagcactgagcaaattttatcaccatggcaggagagaatgggtcttaaaaatattgaagcttaatatccacatgtccatractaaattgatctaattgatctgaggcagggtccatatttcgctactttttaaagctttcctagtgattataatgtgcatctagtattaaaaatcattgctacatctgaagttctaattcaaactactttaatatccaattattctgccccatagaatatttgtaacatccttctcttgttatttctctggactcggtcaaagtgtctttcttattctatgtcctattgaattgaagggaaatttaatttttttaaagtactgatttggaaacacatgatcattaattggtttggtgccttaaatggtgagaagtggatggaaaatctcctatcttatgcctcgcacccgttgctttgttatttgatgaactaaattgaaatgcaaaaccatttttccttgtagctctaattttaaattgattaaaaatgtt

SEQ ID NO: 84548 - DNA, 591 bp, Homo sapiens
ataattggattgtttgtaacccaaagaaaggataaatgcttgaggtgatggataccctatttaccatgatgtgattattatgcgctgtgtatgcctgtatcaaattatctcatgcaccccataaacatatacgcctactaagtacccacaagaactaaaaatataaaaatatttttaaaatgagctacgtaatgaatcaggcatatatacttgaaaaaagagaattaaaataataagtgaagtgaaaatagagaaacaattagattggcaagttggttgtttctctggtaatggaggacaaatttgttttggaccatttccctcactgaaaacaaatagaaaagatgaacaggagcaaatggtgaataactagctgtaaatattggagtgctacccaaayaacaaacatttgggaggacaaaaccataaagggacagaaatacatgagaagtgagccaagcttatgatactgatttttccccactaagcatttgccttttccaatcagtggctgacttttgacagaatcacacgaccaacattaggattatttggaaaacattggaatttaattcccagcaaggagaaggg

SEQ ID NO: 84549 - DNA, 629 bp, Homo sapiens
tccattgaagggaaatttcaacctctcatatttatttatttgaaaactgctctctttctaaagggtttgaggctgacagtttaaagtcctgattttattttaaaaagagtcacttaattaaamtttatcagaagctaagctaatacatttttaaatgttgagcataattgttttcccataattctaaaaatataaaaacaattttttaaaattaagagctttttctactttaaaagctaattagattatatatttggcttaatatcttattattgaaaaatttaattataaaaacctgttaattgctttatagttgtatgaaatataaaaatatgctaatttacattggctgtatttgctctcaataataaggacttagggaaggctaaaattatatttaagtattttagccaggcatggtggctcatgccggtaatccagaacttttggaggtcaaggcagacacatcatttgaggtcagaagttggagaccagcctgggcagcataacaagactttgtctatacaaaaaataaaataaaattttcactgggtgtgatagcatgcacttgtaacctcaggtacttgggaagctgaggagagggaatcacttgagcacaggagtccgag

SEQ ID NO: 84550 - DNA, 764 bp, Homo sapiens
tttttcactttaaaacactattaataactttgtatagtggttctgcttctttcaaaacacaaatttgtcagtgtttcagaaattttatttaaatctgggaaagcatttttcacaagtactttgaatactttgccacctggtttactgtagcgtatgctctcaaactttgaactggtgggaatgcacttgaaaattattaataccatgatggataacttactttgtttagtacatattcgtttcagtatgtaaactttcctttacaattcttcagagatcagagtggagtggtaaaattttatggaagttttgcatttaatagaaaacgaaatgtcttggaactggaaataaaacaggactatacatctcctggaactcagaaatacgtggtaagtctttttccaaaatcgcctttgtactgctatctcctcagtttcaatagaagagggacttagggatgggttactacttagaaattaatgagattttgtttgaagtggataaattgagaaaacattgactttgtcaaagaagggaagaggaagtacagagatttctggrgactcagaatcttccagttgccctctttggcaccaattgcctatctaggtctccagatactcattttgtgtaatattttatatcttgatttatatttctctgtacacataagcatacatattggtattttttaaatcacatctctgaacagtacgttttttttttaaaagggaccacttaaagtgacagtgcaggagttagat

SEQ ID NO: 84551 - DNA, 1202 bp, Homo sapiens
gggtgttcatgaggattaggtgttgggacaatcaatttgttctaagactgaaggttggctccacctacttatatcgtttattsctgaaaatgattgtgaggaaatgaggctcctactcaataggcaacgagctaaaggcacctagcacagaaggtagtagagcttaggagttgaataatggtccatctaatgctaaaatctgtaccttttccactgtatcacacagaagtaattctaaaatctgtgccttttccactgtatcacatagaagtgaatttatataatttacatcacatatatttcctccagcaaatgaaggccaaggcacatagcctacagagtgatgtgcagtcatggaactcttcccttagtttcctgcccagctcttctcttatgttagaatgctttgagatatgttgtcagtgggaggggttggggtgtggaggtgttaggctccatccagatatctatgtcagcccaagagtaacccttttctatttatagttcaatgaattgtagtaacaaaaagttaggttctgtgcttttaaaagttcttttttttcttttgtagactatgccagttgcaatggctttattaagagatgttcataatctttgtcctaaagaagtcttaacatttattttagacttaatcaagtacaatgacaacaggaaaaataaggtgaggtacttttatttttaaatcttctacaacagttgtcttagataattttcttaatgaatattacagaactacccaatggtattttgtttctaaataaatatttagtctataaaaatcatcgtacttgatgactgtccacagtccttgacatttctagagatagaggcatgtaaacacgatttattagaataaccagtggataaaaaacaatattagtttttaaatgttcttcaaacctcttgtagtgtggagagagtagtacatcagatttggggtagccagttaaaacttgataaaacctgacagcacaattttatttacattgatttattttttgttcacctaatgatacctagaaaagagttctcgattgggattaacttgttccttgattcatttgaccttttttcttttctttaccattgtgtctttattcatttatttagcaaatagcaattggatgtcctgcttcaaaaattattttatcttacttgttatcattccaacaatcagcaaa

SEQ ID NO: 84552 - DNA, 1202 bp, Homo sapiens
gggtgttcatgaggattaggtgttgggacaatcaatttgttctaagactgaaggttggctccacctacttatatcgtttattgctgaaaatgattgtgaggaaatgaggctcctactcaataggcaacgagctaaaggcacctagcacagaaggtagtagagcttaggagttgaataatggtccatctaatgctaaaatctgtaccttttccactgtatcacacagaagtaattctaaaatctgtgccttttccactgtatcacatagaagtgaatttatataatttacatcacatatatttcctccagcaaatgaaggccamggcacatagcctacagagtgatgtgcagtcatggaactcttcccttagtttcctgcccagctcttctcttatgttagaatgctttgagatatgttgtcagtgggaggggttggggtgtggaggtgttaggctccatccagatatctatgtcagcccaagagtaacccttttctatttatagttcaatgaattgtagtaacaaaaagttaggttctgtgcttttaaaagttcttttttttcttttgtagactatgccagttgcaatggctttattaagagatgttcataatctttgtcctaaagaagtcttaacatttattttagacttaatcaagtacaatgacaacaggaaaaataaggtgaggtacttttatttttaaatcttctacaacagttgtcttagataattttcttaatgaatattacagaactacccaatggtattttgtttctaaataaatatttagtctataaaaatcatcgtacttgatgactgtccacagtccttgacatttctagagatagaggcatgtaaacacgatttattagaataaccagtggataaaaaacaatattagtttttaaatgttcttcaaacctcttgtagtgtggagagagtagtacatcagatttggggtagccagttaaaacttgataaaacctgacagcacaattttatttacattgatttattttttgttcacctaatgatacctagaaaagagttctcgattgggattaacttgttccttgattcatttgaccttttttcttttctttaccattgtgtctttattcatttatttagcaaatagcaattggatgtcctgcttcaaaaattattttatcttacttgttatcattccaacaatcagcaaa

SEQ ID NO: 84553 - DNA, 747 bp, Homo sapiens
ggtgcaggccggctgaggcctaaaacggtgtcagcaccaaatgaggatggggcagaggttttatagtcttttgtaagcagaagtgtctcagtctgatgtaactgctacatggtacccagatggcctctctcttgatcttcagggggtacacgtcttccatccagctctcttcctgcttctgctatcttgctgacacacgctgctggtgcaagtggccttgtgccttgggactgggcctgagaaggtaggagttattcattcccttaasctttcaggccccagggagaatctttcatcatgaagatgagaaatgtctgagtactaaattttgccttctcattctccctcttctttcatttgaaacacccttacttcatctattactccatatatcctaaaacctctttcccatgtccttaccattctgtatgaccacagatgatttcctgccctctgtcttccaattaagatattcactctttaactatatcaaatttcatcataaatcaaagaggaattattatttttatttcaatcattttgtgttttgtcttttagaaatgtgtttggctgtttttcaacagtgtctctacctataccatactgtattgtttttagaacatttattattttttatcatctaaacatttttaaatccacttattttaaattcacttttgaattaattatatccagttatcttctatttggtatgcttgctttctctctctctctctgtctctctct

SEQ ID NO: 84554 - DNA, 747 bp, Homo sapiens
ggtgcaggccggctgaggcctaaaacggtgtcagcaccaaatgaggatggggcagaggttttatagtcttttgtaagcagaagtgtctcagtctgatgtaactgctacatggtacccagatggcctctctcttgatcttcagggggtacacgtcttccatccagctctcttcctgcttctgctatcttgctgacacacgctgctggtgcaagtggccttgtgccttgggactgggcctgagaaggtaggagttattcattcccttaacctttcaggccccagggagaatctttcatcatgaagatgagaaatgtctgagtactaaattttgccttctcattctccctcttctttcatttgaaacacccttacttcatctattactccatatatcctaaaacctctttcccatgtccttaccattctgtatgaccacagatgatttcctgccctctgtcttccaattaagatattcactctttaactatatcaaatttcatcataaatcaaagaggaattattatttttatttcaatcattttgtgttttgtcttttaraaatgtgtttggctgtttttcaacagtgtctctacctataccatactgtattgtttttagaacatttattattttttatcatctaaacatttttaaatccacttattttaaattcacttttgaattaattatatccagttatcttctatttggtatgcttgctttctctctctctctctgtctctctct

SEQ ID NO: 84555 - DNA, 734 bp, Homo sapiens
tggaggaacagtgatttatcttcccctcacccatgtgtcgtgatggttaagctctgatcctgaatgaggccactgtaagacaacttagggtgaggtacattacatagtgtctctttttcagaagctaagtctaaggctagtactctgtgttactgatcaattcctttaattcctttgggttcactttttattatctgaaaaacaaataataacctgttcaactctaatgctcgttctactcatgtcacaaaggtgttgagatgacaraaattatcatcactgcagacaaactttgaaacctaattgaaatctgtagaaaagtggatagctatttgagagatgagacaagggaacagccatctgagagaccttgtttctacttaatgctcagttagaataagctggacttctagctggatatcacgtttggttggccacacacactgacctttctgtatgttgacttttttttttccactgccctgagacaagcataagtctccctgggggagtgagaaagggaaatggagcatgaagacagagttagtctttttagcacagatcaccaggatttcatatttgcaaagaggtcgaagtcatttatgttaatttcctctccatgcctgtgatgggtgtgcactgctaccctcatttatagatcagaaaaccaaagatagtaaaatcaagtaacttacacttggtttcacagcaaatgaatcgcaaagctggggaaa

SEQ ID NO: 84556 - DNA, 1592 bp, Homo sapiens
gtcattatatgaaaaagacacttgcacacacatttatagtagcacaattcacaattgcattgtgaaaacatggaatcagcctaaatgtccatcaaccaacgagtggataaagaaaatgtgctatatataccatggactactactcagccataaaaaggaacaaaaataatggcattcacagcaacctggaaggcgtgggagaccattattttaagtgaagtaactcaggaatggaaaaccaaatattgtatgttctcacttataagtgggagctaagctatgaggttgtaaaggcctaagaataatataatggactttggggattcagggagaagggtgggagggggtgcaggataaaagactacacattgggtacagtgtacactgtttgggtgatgggtgcaccaaaatctcagaaattaccactaaagaaatcatccatgtaaccaaatgccaactgttccccccaaactattgagatttaacataaaaataaaaaagaaagaattaaggaggagagatttattcatcatacacaacatcaagcagccccaaccactggcggcagcaagtgaatgaaaggaagatgagtctcaggcatattagaattgatgctttacccagaggttgctggycaatcatgtgtgattttaactaaacgtttgtagtttgttgtaatatttagtgtttcaatagttcttatcaaataagcttgtcgacaatatgctttacctggtgacaactttgttgaatcatttttactgcatctctataagagaataaagactctggaggagtctgcaatgggcatgacttgccataactccaacaagattttaattcttttagaatgaaactgtcaaagaaactaattggaaaaatagtttacatctacctcctatcaaatcattagtcatcaagataattgaggttaaaaaggccggcatgatgtgtaatctagggagatatatatgggttgctgtggctcccaagctcactctgcattttgctatgcatatcacacttttatagtggccataagcaaggactgaataactaattaagtggcaagtgaaaaatcagaaattattccatctgcacctgctaaattgcaatcattaacttggcgtgcattaaaaaatacaagaaacttaaagaataaacaaaagaaaagtatgatttcaacaatagaaaacagcatctaaatgttaatttattagaattgtttatcaagagagttattaaataatatttatcaaaaatatacataaatttagctagaaatcctaagaaaatgttgagcctccccaaataaaagctgagagtaaaaatgatattaaatgttgggaaccacattttaagctacatattcactttatccatagattcattcattcagtaaatagttactgggtgactatcatatagtaattactgttttaggtattggacatacagcaatgaacaaaaacagtcttctcatggagcttatattctaggagacaaaaataataagaaacaaataaaaatgtggcatttaatgtcatgtcaaggaatggtaatttccttaaggaaaaattaagcagagtagg

SEQ ID NO: 84557 - DNA, 1096 bp, Homo sapiens
tgcatgacaactcccaactcctcctcacacactgatgtacaacacaacacacagatacccagacctacacattcccattgtccccaagacatccagaactgtgcccagtcccacacagrtgcatctgcacacaaaaatgcacaccctgggtgcaaacatagtctccacatatatttatgcaagtgttttataaacagcaaaaccttgctaattcacaagcctctttggctggtggattactggagtgtgcagattagaattaaaacaaatgattacaaagtcaaggatagcccattgccaaacacattctgttcttttgcttagtgttgtagttttgccttaatttatggtaatcctacccacgctgcaagttaatgtatggctggttcataaatggagtgcaatctactactccattttggctgggaaggaagagaagaccgccaggtttttaaacaagtcttaaaaaaaacaaaaattacagttctgccacatattaatgtgagaatagatgagattcctcactgttcatatatatggtgtatgtggacaaatatatatactcataatgaagtcccagttctgtgaaaactcttagaacagatgttgagtttaatttctgtcataatatatgatagtttggtttaataaaaaagaatttacagacttcagtagcttcatgtccaagggctatatctctgcaccaactgtcatttactccatcatgtctctccccttcatttcatgtgggatttcagacccatattcagtccttcatccttctaccctgtcttgtggtttcttcttccatgacaggaactgatgaaactctttaattgtgtctatctctctatatattacacacagaattcaatacaaactcaaagtagattttcaccagaacctcacgccaaccaagctttccttcagtttccagccagccttgcttatacttcaatctaagaacataccataaatattctactttcttcaatttcctgattcatccccattgagttcaaatatacatgaatttttcttagcctgaattttttcctcgactagaaacaggtcataatttatctttcccatgcat

SEQ ID NO: 84558 - DNA, 799 bp, Homo sapiens
tgattgtgcccaggaagcaaatgcatgtcttcctgaaaaggtaaaccaaggactctcttgtcccctcaatgtggtgggcagcctggcacacaccccacctcatcagtcttgtaacctcctgtttctacttctcttagctgctcccgtaaagatagcttgaaaggctgggctgcccttggttcacccaaggctcgacgtgatcccacatacaaggtgaccagaggagtttggggagtgcagagaaaaagagggagtctgttctcaaagccccggagcaaaggggttgcccggggtcttgactgtctctgccctttcatgccctatgcttccatctcctgcagctgccctctttccagtgccttcaatgccagcttctgctgcccaaccagactgaagatgggctgcccggtgcacacttcctggtgcagcaygaggcggagggaagaatcaggaaagcaggtcatgaggtgcctgctctgagcctctcactggccccttgtggactctgactggtccaaaggaaggtgccctaagtggaccctgggggtcgggggcacccaagcctgggcagcatcaaattctaggtatactaggtgagcacctacccttctgccctgttttgatttctttctgtgccttagttttcccatatatgaaatggaactaatcaccctcaaaacacccctgcaaggtactaattactgtctttgaaaggctttgagatccttgcgtggaaaataacagtactaataatggataataacactctccttctccagggcctttcatccacggatct

SEQ ID NO: 84559 - DNA, 799 bp, Homo sapiens
tgattgtgcccaggaagcaaatgcatgtcttcctgaaaaggtaaaccaaggactctcttgtcccctcaatgtggtgggcagcctggcacacaccccacctcatcagtcttgtaacctcctgtttctacttctcttagctgctcccgtaaagatagcttgaaaggctgggctgcccttggttcacccaaggctcgacgtgatcccacatacaaggtgaccagaggagtttggggagtgcagagaaaaagagggagtctgttctcaaagccccggagcaaaggggttgcccggggtcttgactgtctctgccctttcatgccctatgcttccatctcctgcagctgccctctttccagtgccttcaatgccagcttctgctgcccaaccagactgaagatgggctgcccggtgcacacttcctggtgcagcacgaggcggagggaagaatcaggraagcaggtcatgaggtgcctgctctgagcctctcactggccccttgtggactctgactggtccaaaggaaggtgccctaagtggaccctgggggtcgggggcacccaagcctgggcagcatcaaattctaggtatactaggtgagcacctacccttctgccctgttttgatttctttctgtgccttagttttcccatatatgaaatggaactaatcaccctcaaaacacccctgcaaggtactaattactgtctttgaaaggctttgagatccttgcgtggaaaataacagtactaataatggataataacactctccttctccagggcctttcatccacggatct

SEQ ID NO: 84560 - DNA, 576 bp, Homo sapiens
cggagacggacctctccagtcttgacgagtgagtaacatactaatccaaagggaagaccaaatccccaaagtccaaatttcaccacctcctgactatcgatcacattccttctctctagaaatctgaaaatcatctaccaacctacttattaaaacaagtctaactgccttaacttcaggattatagatttgctgatgaaattgttataaatgctctcaaagttctattaccatctaattacaatttatgcacagctatataataatgtgtgttttggaagctgaaataatatgtgttttggaagccaaaaaaattaagcttcaattacttttgtacctaccatgacaacaggcagaaacaggacaattttgtataaagaatgtttttttacatttttgtccttttttttttggtgttttctcacagttcctgtcaaggtgagaggaaccaggcaaaatgcaggcttaacatatayggtcatccccaggttttttttaactatataaaggagaaattaataaaagaaaaaaagaaataccacacagcattttctttccccaccataatttttcaat

SEQ ID NO: 84561 - DNA, 576 bp, Homo sapiens
  misc_feature (1)...(576): n = A,T,C or G
ttgctcctcaagcaccattttatgatgacggactgacttctnccgccggtcgtcccattgttcagcttcaccagggcctctttgagaagctctgctgtctccagtactgctttgatcaccttcccaggaatgtattccataaacaaatcagggtcaaggccatatgctttcatttgattccgagggctgcttctctcaaccagtttcctgcctgcgaggggctatttccctaacactagaaataccctttgaaggagaaaagctaaacaaatgtagttagataaagcgcactggattagatcatatacactgcttcattgatgtcttccagagctatgatcrtttgaatgacttacagtgcttaagctcatttcatgacactgagggtgtgccaactttccgtgagtgcctcgtgacccagcagctgtcaccacaggtcatgttctttctgtttgtttgacagctggcttaaaggctggggccattggttgtggaggttttgctgctttctctgctgcgattgattattacctccggtgagagtaattgcctgcagggaaggatgatgccagcccc

SEQ ID NO: 84562 - DNA, 598 bp, Homo sapiens
agaggagcggaccttgaggccaggtgggctgtgcgctctgcggccctgaggccatccaaaggaagctccgccatcctgcgccagtgccagatctgcagctgcaaaccgcgcgtgtggcactggcagcagtgagggcgggtgggggaaggagcagyccctgactctgcctccatccctctccagctacctgacactagccacacagacttcagggccagagcctcagcgttcagccaatccgcgaagccactcaggtggccgcggagtgcccttgccagcaccgtatctcccttccgaggaggagcggggcgggctgcaaggccagacaggccctccttctcaggccgggctggctgcgcgcctgcgatcctggggccgcccgggcgatcccaggagaaccggcgagcccatcggcgcacgcccagagctgcagccccacctgctggcgcgcgccgctagggagcgtcttccgggagcccggcagcaaccgcggtgcaggcgcgcgccgccagggagcgtcttctgggagcccggcagcaactgccgtgcaggcgcgcgcccaacggctttgcgaggctcactcggtctgagaggtcgg

SEQ ID NO: 84563 - DNA, 598 bp, Homo sapiens
agaggagcggaccttgaggccaggtgggctgtgcgctctgcggccctgaggccatccaaaggaagctccgccatcctgcgccagtgccagatctgcagctgcaaaccgcgcgtgtggcactggcagcagtgagggcgggtgggggaaggagcagcccctgactctgcctccatccctctccagctacctgacactagccacacagacttcagggccagagcctcagcgttcagccaatccgcgaagccactcaggtggccgcggagtgcccttgccagcaccstatctcccttccgaggaggagcggggcgggctgcaaggccagacaggccctccttctcaggccgggctggctgcgcgcctgcgatcctggggccgcccgggcgatcccaggagaaccggcgagcccatcggcgcacgcccagagctgcagccccacctgctggcgcgcgccgctagggagcgtcttccgggagcccggcagcaaccgcggtgcaggcgcgcgccgccagggagcgtcttctgggagcccggcagcaactgccgtgcaggcgcgcgcccaacggctttgcgaggctcactcggtctgagaggtcgg

SEQ ID NO: 84564 - DNA, 890 bp, Homo sapiens
taaacttttactagaagttttgtactcactgcagcaatcacagataagaaaaaggaaaaaaactttacttaaaatacaaatgctcagaaattacaaattttatattttgtacatatttttgctaaaacaagaccatagtatgtttgtgtatgtataatttaactaattttttctccttgctagctataacaaaatacatctttgcacatcaacgtacttctgtatctactgccaccttcagtggtcacatattattccatcctatggatgcaactgaaatttatttataggatccattctatgggttctctttaaagtaagtactgtgaaaaataaagtgcatgtatctttatttcctaagggtattttagtataatggaattggtgggtaaagggcatacacattttttaaatgtagtacttaccattttcaaatgagtactttgaaaagtaatcagcaactttaagcagcagtataaaacatcctcacaaatattgtggatagaaaactgtttcattcctcttttagtttaaattcttagaccagaaatgcgaaggattttttcctatgtagataagtaacttgtagatctggaaaaaggtactttgcccacttttagagtgtttgatgatttgatttgaaagaatttcctgtaaaatgaagaggtacttttcatctaatgtgtatatataactgatatatataacatattatatgtgttatatatgtatacatatcagtaatatatatatatcttatgatatataataaacaacataggccaggcgcggtggctcacacctrtaatcccagcgctttgggaggcggaggcgggcagatgacttgaggtcaggagttcgagaccagcctggccaacgtggtgaaacta

SEQ ID NO: 84565 - DNA, 1777 bp, Homo sapiens
ttttggaatgtaaaatggtacagcccactgtggaaaatggtttagcagctccttaaaaatattaagcacagaattatatgatccaccaacaccctttaagtgtatatacccaaaataactgagagcagggactcaaacaggtatttgtacacccgtttaacagcagcattattcacagtggccaaaaggtagaaccaaccctaatgcccatcagtaggtgaatggataaagaaaatgtaatatatacatacacagagtattattcagccataaaaagaaaaatatctggccagattcaggggcttacacctgtaatcccagtattttgggaggccaaggtgggcaggtctcttgagccccaaattttgagaccaggctggacaacatggcacatttggtcagaagtgtttgaccataactactattcaagaaaaagatctactcattagaactataaatcataaaattataaattctacaaaaacaaatcaaccttatctaccacccagtactacccaattacagaatgttagaacrgaaggtctcaccatggactcaagagctgatatgagcaatgtcaccaccatcctgttctctgcggactcatcttcaacagactcatcttcaacggactcctcatctgccatggactcctcatcttcaatgggcagggtggaaactgcagcttgtgccatgatccctgtgcaagaaaagtagtaagaaattgaatggtagaaatccagtatcctaaactcacatccagagctgtgagagtttttcactggctggcaaattgtttttttgcatcagagaaaaaaacaaaacttggtaacttggtattcgatttgcccaaaactctcatcagatagaaagttaggggatgaattctctatctagtattatttccatgaagttagatgaatatcactcccaaaataaatccacgtggcaaccagaatcagtgcatttctcccaagaggaggtggccaagctcccacatctgtaatcccagcatgttgggaggccgaggtgggtggatcaggaggtcaaaagattgagaccatcctggccaacatggtgaaaccctggtctctaccaaaaatacaaaaaatagctggatgtggtggtctgtgcctataatcccagctacttaggaggctgaggcaggagaatcacttgaaccagggagtcagaggttgcagtgagccgagatcgtgccactgcactctagcctggtgacagagcaagacttcatctaaaaaaaaaaaaagaaaaaaacagtaaaatacaaaatgtctttttctcctaaccttcttagccttctgctggtacttcaatttctgctggtactgtttggtcattgccctctaaagaatgatggcttcctaaaaagaaaacaaacaacatataaaccaataaaaactcacattgaaagataaaaaataatctaggtgacgatgcaagcacttttaagacataataggccaggtgcagtggctcacacctgtaaacccagcagtttgggaggctgaggagggcggatcacctgagttcaggagttcgagaccagcctgggccaacatggtgaaacctcatatctactaaaatacaagaaatcagccaggcgtggtggcgggggcctgtaatcccacctactcgggaggctgaggcaggagaatcacttgaacccaggagacggaggttgcagtgagctgagatcgcgccgctgcactccagcctgggtgacgagagtgaaactccatctcaggaaaaaaaa

SEQ ID NO: 84566 - DNA, 1801 bp, Homo sapiens
ttaaggcaaagagccaagcatgtaccaaacaccaatgcccttgcataccaaagctaaagattctacaatttgycaaagataagaatgtacctttcacaacagcaaggacctcatatattgtcttattatatatccctaaaatctagcacagtgttgaataagaggaagtagaaataattttgagaaggaattaaacatgtatttgtagaagtcaagtcttacccattgaaaaagtatctcccccatatttgtaattcattaaattgtttggaagggaaaagaaactaaagggaatactccatagggaaagttgtttcagaaattatgcaaatttattctaataactaagaaatagtgaaaatgtattagaaatgttaggtagaggcacatttcagatttagactaaggtgcaaatggctttctacttaatgatagagaaaagcataaataaaagtacattgtatacatgaaatggttttgtttgaattgggtatagaatatcaaatgagaaatatatagtaaggaattgaatatatggaaatacagatatagacggccagagcacctacttgtagctcttgatagcagaattatcagtcaactgaaaagatattttaagacctccaagaataagtagataatttctattctgtattttgttaatgaaagaaaaccagggtaataactgcttgaattttcatcactagcatgtttcctacatacataaacatagtgagtagtgagtatattcacatataaagtaacaaagaattatagtaaaccccaacatccaatcgggaaaaatgttgtaactctatatattcattaaattgctcacaaactgacatcttttagcatataatatggtttcctttagcttgttaaagagcatggactcatgactaaaacataagaacacccaatgaagctcaactaaatcaattcaactatgaaaaataaactgactagtgatcatctctttactattattgaaagaataacttacaagtaaaaacattcaatttttgaaaacagctttatatttattgaatttatgcatataacgttagttgcatttcaaaataaaatggctgccttaagtgatgcaaaattacatatttatacattctctgaattaagcaggattaattgaaaagtggatatgaaggcatgactgcaagctacaaattgatcctatttttagtaacttgctctagctgagatgttatatgttcagatttgttgacacgaagctttattgagaagcattacttattcccaataactcaaggaggagcctgttttgggaggaaaaaccacatcaagtatgttttgttgaatcaagaggattttatttttagaaaactactaatgattttttctgaaaatgtgactattttgaaatctaagaaaaatcaaatatttgatacttaacgtaatttgcaacttgacataaaactactcagtttagttggtcataatatactcattcctaacttattccactttacaaaaaaagtaaaagaaaagcataaataaataaataaggaaagagaaacaaacaaacaaaaaacattggaaactgacgaggtaacaatttatagaatcaaggattaatttccaccaattatggcatgaataaaactaatcaactaaaatatattttaaaaatcaagaagatagtaggaaaacagctccctgaggacccctggaacagtaattaggcaggcactctttgcctgttggacattaccattttctttaatgtttgtatgaaacgatgccaatttatctttaagca

SEQ ID NO: 84567 - DNA, 1801 bp, Homo sapiens
ttaaggcaaagagccaagcatgtaccaaacaccaatgcccttgcataccaaagctaaagattctacaatttgccaaagataagaatgtacctttcacaacagcaaggacctcatatattgtcttattatatatccctaaaatctagcacagtgttgaataagaggaagtagaaataattttgagaaggaattaaacatgtatttgtagaagtcaagtcttacccattgaaaaagtatctcccccatatttgtaattcattaaattgtttggaagggaaaagaaactaaagggaatactccatagggaaagttgtttcagaaattatgcaaatttattctaataactaagaaatagtgaaaatgtattagaaatgttaggtagaggcacatttcagatttagactaaggtgcaaatggctttctacttaatgatagagaaaagcataaataaaagtacattgtatacatgaaatggttttgtttgaattgggtatagaatatcaaatgagaaatatatagtaaggaattgaatatatggaaatacagatatagacggccagagcacctacttgtagctcttgatagcagaattatcagtcaactgaaaagatattttaagacctccaagaataagtagataatttctattctgtattttgttaatgaaagaaaaccagggtaataactgcttgaattttcatcactagcatgtttcctacatacataaacatagtgagtagtgagtatattcacatataaagtaacaaagaattatagtaaaccccaacatccaatcgggaaaaatgttgtaactctatatattcattaaattgctcacaaactgacatcttttagcatataatatggtttcctttagcttgttaaagagcatggactcatgactaaaacataagaacacccaatgaagytcaactaaatcaattcaactatgaaaaataaactgactagtgatcatctctttactattattgaaagaataacttacaagtaaaaacattcaatttttgaaaacagctttatatttattgaatttatgcatataacgttagttgcatttcaaaataaaatggctgccttaagtgatgcaaaattacatatttatacattctctgaattaagcaggattaattgaaaagtggatatgaaggcatgactgcaagctacaaattgatcctatttttagtaacttgctctagctgagatgttatatgttcagatttgttgacacgaagctttattgagaagcattacttattcccaataactcaaggaggagcctgttttgggaggaaaaaccacatcaagtatgttttgttgaatcaagaggattttatttttagaaaactactaatgattttttctgaaaatgtgactattttgaaatctaagaaaaatcaaatatttgatacttaacgtaatttgcaacttgacataaaactactcagtttagttggtcataatatactcattcctaacttattccactttacaaaaaaagtaaaagaaaagcataaataaataaataaggaaagagaaacaaacaaacaaaaaacattggaaactgacgaggtaacaatttatagaatcaaggattaatttccaccaattatggcatgaataaaactaatcaactaaaatatattttaaaaatcaagaagatagtaggaaaacagctccctgaggacccctggaacagtaattaggcaggcactctttgcctgttggacattaccattttctttaatgtttgtatgaaacgatgccaatttatctttaagca

SEQ ID NO: 84568 - DNA, 1801 bp, Homo sapiens
ttaaggcaaagagccaagcatgtaccaaacaccaatgcccttgcataccaaagctaaagattctacaatttgccaaagataagaatgtacctttcacaacagcaaggacctcatatattgtcttattatatatccctaaaatctagcacagtgttgaataagaggaagtagaaataattttgagaaggaattaaacatgtatttgtagaagtcaagtcttacccattgaaaaagtatctcccccatatttgtaattcattaaattgtttggaagggaaaagaaactaaagggaatactccatagggaaagttgtttcagaaattatgcaaatttattctaataactaagaaatagtgaaaatgtattagaaatgttaggtagaggcacatttcagatttagactaaggtgcaaatggctttctacttaatgatagagaaaagcataaataaaagtacattgtatacatgaaatggttttgtttgaattgggtatagaatatcaaatgagaaatatatagtaaggaattgaatatatggaaatacagatatagacggccagagcacctacttgtagctcttgatagcagaattatcagtcaactgaaaagatattttaagacctccaagaataagtagataatttctattctgtattttgttaatgaaagaaaaccagggtaataactgcttgaattttcatcactagcatgtttcctacatacataaacatagtgagtagtgagtatattcacatataaagtaacaaagaattatagtaaaccccaacatccaatcgggaaaaatgttgtaactctatatattcattaaattgctcacaaactgacatcttttagcatataatatggtttcctttagcttgttaaagagcatggactcatgactaaaacataagaacacccaatgaagctcaactaaatcaattcaactatgaaaaataaactgactagtgatcatctctttactattattgaaagaataacttacaagtaaaaacattcaatttttgaaaacagctttatatttattgaatttatgcatataacgttagttgcatttcaaaataaaatggctgccttaagtgatgcaaaattacatatttatacattctctgaattaagcaggattaattgaaaagtggatatgaaggcatgactgcaagctacaaattgakcctatttttagtaacttgctctagctgagatgttatatgttcagatttgttgacacgaagctttattgagaagcattacttattcccaataactcaaggaggagcctgttttgggaggaaaaaccacatcaagtatgttttgttgaatcaagaggattttatttttagaaaactactaatgattttttctgaaaatgtgactattttgaaatctaagaaaaatcaaatatttgatacttaacgtaatttgcaacttgacataaaactactcagtttagttggtcataatatactcattcctaacttattccactttacaaaaaaagtaaaagaaaagcataaataaataaataaggaaagagaaacaaacaaacaaaaaacattggaaactgacgaggtaacaatttatagaatcaaggattaatttccaccaattatggcatgaataaaactaatcaactaaaatatattttaaaaatcaagaagatagtaggaaaacagctccctgaggacccctggaacagtaattaggcaggcactctttgcctgttggacattaccattttctttaatgtttgtatgaaacgatgccaatttatctttaagca

SEQ ID NO: 84569 - DNA, 1801 bp, Homo sapiens
ttaaggcaaagagccaagcatgtaccaaacaccaatgcccttgcataccaaagctaaagattctacaatttgccaaagataagaatgtacctttcacaacagcaaggacctcatatattgtcttattatatatccctaaaatctagcacagtgttgaataagaggaagtagaaataattttgagaaggaattaaacatgtatttgtagaagtcaagtcttacccattgaaaaagtatctcccccatatttgtaattcattaaattgtttggaagggaaaagaaactaaagggaatactccatagggaaagttgtttcagaaattatgcaaatttattctaataactaagaaatagtgaaaatgtattagaaatgttaggtagaggcacatttcagatttagactaaggtgcaaatggctttctacttaatgatagagaaaagcataaataaaagtacattgtatacatgaaatggttttgtttgaattgggtatagaatatcaaatgagaaatatatagtaaggaattgaatatatggaaatacagatatagacggccagagcacctacttgtagctcttgatagcagaattatcagtcaactgaaaagatattttaagacctccaagaataagtagataatttctattctgtattttgttaatgaaagaaaaccagggtaataactgcttgaattttcatcactagcatgtttcctacatacataaacatagtgagtagtgagtatattcacatataaagtaacaaagaattatagtaaaccccaacatccaatcgggaaaaatgttgtaactctatatattcattaaattgctcacaaactgacatcttttagcatataatatggtttcctttagcttgttaaagagcatggactcatgactaaaacataagaacacccaatgaagctcaactaaatcaattcaactatgaaaaataaactgactagtgatcatctctttactattattgaaagaataacttacaagtaaaaacattcaatttttgaaaacagctttatatttattgaatttatgcatataacgttagttgcatttcaaaataaaatggctgccttaagtgatgcaaaattacatatttatacattctctgaattaagcaggattaattgaaaagtggatatgaaggcatgactgcaagctacaaattgatcctatttttagtaacttgctctagctgagatgttatatgttcagatttgttgacacgaagctttattgagaagcattacttattcccaataactcaaggaggagcctgttttgggaggaaaaaccacatcaagtatgttttgttgaatcaagaggattttatttttagaaaactactaatgattttttctgaaaatgtgactattttgaaatctaagaaaaatcaaatatttgatacttaacgtaatttgcaacttgacataaaactactcagtttagttggtcataatatactcattcctaacttattccactttacaaaaaaagtaaaagaaaagcataaataaataaataaggaaagagaaacaaacaaacaaaraacattggaaactgacgaggtaacaatttatagaatcaaggattaatttccaccaattatggcatgaataaaactaatcaactaaaatatattttaaaaatcaagaagatagtaggaaaacagctccctgaggacccctggaacagtaattaggcaggcactctttgcctgttggacattaccattttctttaatgtttgtatgaaacgatgccaatttatctttaagca

SEQ ID NO: 84570 - DNA, 899 bp, Homo sapiens
agcggaacattgarttatttggctttacttactaaaaatgtacatgagtagatgggcttctgtctcagtgggatcaggggtcaactaatatcaaccaaggctcattctgtcccttcatttcctatgtcagctctgcttttcaggcaagctgttttgagagagcagcaaaaatggctccataaagttcacatcacttacttccttacaaatagatatgccaataaaaagaaagcacctcattcccagcagtttcatcaaaagttcagggatgacttccatgagcccagcttggatcacatgaccactcctgaatcaattaccctgctgatctgattgcccagggtgggtcagccttcccaaatcacatggactagtattgaaagacaggtcctcccatgaaaaaaaaaaaaaaaaaaaaaaaggaagggtagtggcagaggaatatgagtggggggggcctcatctctatataaaaagtatgagcgtatttgtgctcttttgtacattcatttgtatagtcactgggaaaaaaatgagaaaaacccaaacacggctttctatatgcctctgtgctttgttttcaacactgagctgtgagaaatctagttactaaaatgaaactttgaaaaaatataacaatttgggacaatggggacacttagctgatgcagcacaggtgaacagttcttcttttgtgcccaagaggacacaattcccaggaggctgcatgtggtctcctaggacaagcctgtgggcacccactggctgcagttccacctttccttccctggactctcaggaagacatgagttctggattcagctgaactgagctcaagttcaggttctgtgactcactggctctgtaattctgggtaagtctcttgctctccttgagtc

SEQ ID NO: 84571 - DNA, 899 bp, Homo sapiens
agcggaacattgaattatttggctttacttactaaaaatgtacatgagtagatgggcttctgtctcagtgggatcaggggtcaactaatatcaaccaaggctcattctgtcccttcatttcctatgtcagctctgcttttcaggcargctgttttgagagagcagcaaaaatggctccataaagttcacatcacttacttccttacaaatagatatgccaataaaaagaaagcacctcattcccagcagtttcatcaaaagttcagggatgacttccatgagcccagcttggatcacatgaccactcctgaatcaattaccctgctgatctgattgcccagggtgggtcagccttcccaaatcacatggactagtattgaaagacaggtcctcccatgaaaaaaaaaaaaaaaaaaaaaaaggaagggtagtggcagaggaatatgagtggggggggcctcatctctatataaaaagtatgagcgtatttgtgctcttttgtacattcatttgtatagtcactgggaaaaaaatgagaaaaacccaaacacggctttctatatgcctctgtgctttgttttcaacactgagctgtgagaaatctagttactaaaatgaaactttgaaaaaatataacaatttgggacaatggggacacttagctgatgcagcacaggtgaacagttcttcttttgtgcccaagaggacacaattcccaggaggctgcatgtggtctcctaggacaagcctgtgggcacccactggctgcagttccacctttccttccctggactctcaggaagacatgagttctggattcagctgaactgagctcaagttcaggttctgtgactcactggctctgtaattctgggtaagtctcttgctctccttgagtc

SEQ ID NO: 84572 - DNA, 899 bp, Homo sapiens
agcggaacattgaattatttggctttacttactaaaaatgtacatgagtagatgggcttctgtctcagtgggatcaggggtcaactaatatcaaccaaggctcattctgtcccttcatttcctatgtcagctctgcttttcaggcaagctgttttgagagagcagcaaaaatggcyccataaagttcacatcacttacttccttacaaatagatatgccaataaaaagaaagcacctcattcccagcagtttcatcaaaagttcagggatgacttccatgagcccagcttggatcacatgaccactcctgaatcaattaccctgctgatctgattgcccagggtgggtcagccttcccaaatcacatggactagtattgaaagacaggtcctcccatgaaaaaaaaaaaaaaaaaaaaaaaggaagggtagtggcagaggaatatgagtggggggggcctcatctctatataaaaagtatgagcgtatttgtgctcttttgtacattcatttgtatagtcactgggaaaaaaatgagaaaaacccaaacacggctttctatatgcctctgtgctttgttttcaacactgagctgtgagaaatctagttactaaaatgaaactttgaaaaaatataacaatttgggacaatggggacacttagctgatgcagcacaggtgaacagttcttcttttgtgcccaagaggacacaattcccaggaggctgcatgtggtctcctaggacaagcctgtgggcacccactggctgcagttccacctttccttccctggactctcaggaagacatgagttctggattcagctgaactgagctcaagttcaggttctgtgactcactggctctgtaattctgggtaagtctcttgctctccttgagtc

SEQ ID NO: 84573 - DNA, 2413 bp, Homo sapiens
ctcccttgccatctccagacctgccccacaaactccctccctggtctcctggctcttgttcactccttccaggcagccttccacagtcatctctaaaacatatatgactgtccctcctttatccagcaccttccatggctccccagagccctccaggtcaagttyaagttctttgatcagacactagatctcaagctgcattctacctcctgaattaagatcccggagaagcccaccttgctcagcacaaacgcatcactgaagtcgaaaatcttgaacgtggccttggcattgaggaagtcatcaacaccctggctagtgagggtgcagtgccgctccaggatgatggtgtctaaagttgtgcaccaggtcgcaggccctgcagaagcatctcccctcaggagtgaggtagtacaggaagtctgtgcacaggcagatctgctggtgctgttacactatgagggcactgagctccaagatggtggcaatatattcactgggattcctgcacggtgaggttggagagaggaagcatctccataacacatatgaaaccctggaagcacttcccagccagaaattcaggaccacgttatatgcagatatgggtgccctctgagcacacttgtctctctgtctcccactctgagctgcctcctggccccacatgccccagcctggcccagggcttagcccagtgggtgttcagtccatggtgttgactgctccctgggccaggagagcccttggtggctctgtgactcctcctgtggaacccctacctctgccttgggacctcccaattcccatggaagcccccacagctctggattgccccacctgccctgtgatcctccagccccataggccttactcgatgccttagccctcccagaacatgacacgtttctctgaatgtggctgatgtccagggccatctgtagatgtttgctggggacctcttgctgttttcctttatggtctgtaggccagggccaagaggagaaaccagcccaatctcagaatggacaaaaggctcactgccctaacagcaaccaccaaacagtcagcagtgcttctggatggaaaagaggtttcattctgcagaaagctccttgtttggcttctttctgaagccaggaaggggtaccaaacccagcttacctgcggtgcctacgttagcatctgtgcctaggatgcatgatgggctcccactgcagggttgacattccctccagctggagacctgggctcctgacaccacctggcgtgtttgtcctgctctggatgacggtggaaaggctgtatctggtattttcctaggtccttggttttcaccttctagacatccagcaggagtgaccatacccagccccacacctgaaatgggactcccttgtagagcacctgagacctctacagacagaagagtgctctggtgagacaggccacagaggtccccgggggggggtgggatcaggggctggaggattctggaggtttccagccttgggctctgtggttcctcaaagagtttaggtttacctaggactaggcctcccctcccatgcttcaaagagtgggtgagtgctatgcatcacgaactctgatctggacctattttttcatttaggtcaccaagagacaacccctaacccccaagctagggatggtccaagctctggcatgagattctcttccagcaatgtgatgcttgcagggacagggagaaaagccggtgaccaggcctgctgtcccccaggtaaggacagtgtgctacccaccctctgagaggcaggtggtgccagctcactgcactgggtgcctgtacccctggctctgcagacaccggtcatggaggtcctcccctctccacattaccttcttgctgctcccagatttcttctggtcattaagcactttgagccatttttctgtgcagccgatctgatatttttgctatcagatgaaacatgacaaagtaagccgagccaccaggattcctggagggaaccttggatgctgcgtcttgggatccagagccctgatgggactgaaccagaaggagccagggaaggacaaacactggggctcaggccctatgacccaacggccattggtggcctgtcctcatggccccaagacaccctgtcctcaggccacagacaccatgggctttggtcaggtcccagcctcccagtagtgccctggcactggtgggtgctgacctccaaaccacaatagcagttctgggttatgggtttggtaaaaccacctcagggagaattctggggttgggtttggcaggaaccacggggcctcccaggaatgatgtgtcactcctacttgccacaaaatgtgcacagaggctatcccactgaccagcccatcctgctggacaggatggaggaaa

SEQ ID NO: 84574 - DNA, 2413 bp, Homo sapiens
ctcccttgccatctccagacctgccccacaaactccctccctggtctcctggctcttgttcactccttccaggcagccttccacagtcatctctaaaacatatatgactgtccctcctttatccagcaccttccatggctccccagagccctccaggtcaagtttaagttctttgaycagacactagatctcaagctgcattctacctcctgaattaagatcccggagaagcccaccttgctcagcacaaacgcatcactgaagtcgaaaatcttgaacgtggccttggcattgaggaagtcatcaacaccctggctagtgagggtgcagtgccgctccaggatgatggtgtctaaagttgtgcaccaggtcgcaggccctgcagaagcatctcccctcaggagtgaggtagtacaggaagtctgtgcacaggcagatctgctggtgctgttacactatgagggcactgagctccaagatggtggcaatatattcactgggattcctgcacggtgaggttggagagaggaagcatctccataacacatatgaaaccctggaagcacttcccagccagaaattcaggaccacgttatatgcagatatgggtgccctctgagcacacttgtctctctgtctcccactctgagctgcctcctggccccacatgccccagcctggcccagggcttagcccagtgggtgttcagtccatggtgttgactgctccctgggccaggagagcccttggtggctctgtgactcctcctgtggaacccctacctctgccttgggacctcccaattcccatggaagcccccacagctctggattgccccacctgccctgtgatcctccagccccataggccttactcgatgccttagccctcccagaacatgacacgtttctctgaatgtggctgatgtccagggccatctgtagatgtttgctggggacctcttgctgttttcctttatggtctgtaggccagggccaagaggagaaaccagcccaatctcagaatggacaaaaggctcactgccctaacagcaaccaccaaacagtcagcagtgcttctggatggaaaagaggtttcattctgcagaaagctccttgtttggcttctttctgaagccaggaaggggtaccaaacccagcttacctgcggtgcctacgttagcatctgtgcctaggatgcatgatgggctcccactgcagggttgacattccctccagctggagacctgggctcctgacaccacctggcgtgtttgtcctgctctggatgacggtggaaaggctgtatctggtattttcctaggtccttggttttcaccttctagacatccagcaggagtgaccatacccagccccacacctgaaatgggactcccttgtagagcacctgagacctctacagacagaagagtgctctggtgagacaggccacagaggtccccgggggggggtgggatcaggggctggaggattctggaggtttccagccttgggctctgtggttcctcaaagagtttaggtttacctaggactaggcctcccctcccatgcttcaaagagtgggtgagtgctatgcatcacgaactctgatctggacctattttttcatttaggtcaccaagagacaacccctaacccccaagctagggatggtccaagctctggcatgagattctcttccagcaatgtgatgcttgcagggacagggagaaaagccggtgaccaggcctgctgtcccccaggtaaggacagtgtgctacccaccctctgagaggcaggtggtgccagctcactgcactgggtgcctgtacccctggctctgcagacaccggtcatggaggtcctcccctctccacattaccttcttgctgctcccagatttcttctggtcattaagcactttgagccatttttctgtgcagccgatctgatatttttgctatcagatgaaacatgacaaagtaagccgagccaccaggattcctggagggaaccttggatgctgcgtcttgggatccagagccctgatgggactgaaccagaaggagccagggaaggacaaacactggggctcaggccctatgacccaacggccattggtggcctgtcctcatggccccaagacaccctgtcctcaggccacagacaccatgggctttggtcaggtcccagcctcccagtagtgccctggcactggtgggtgctgacctccaaaccacaatagcagttctgggttatgggtttggtaaaaccacctcagggagaattctggggttgggtttggcaggaaccacggggcctcccaggaatgatgtgtcactcctacttgccacaaaatgtgcacagaggctatcccactgaccagcccatcctgctggacaggatggaggaaa

SEQ ID NO: 84575 - DNA, 2413 bp, Homo sapiens
ctcccttgccatctccagacctgccccacaaactccctccctggtctcctggctcttgttcactccttccaggcagccttccacagtcatctctaaaacatatatgactgtccctcctttatccagcaccttccatggctccccagagccctccaggtcaagtttaagttctttgatcagacactagatctcaagctgcattctacctcctgaattaagatcccggagaagcccaccttgctcagcacaaacgcatmactgaagtcgaaaatcttgaacgtggccttggcattgaggaagtcatcaacaccctggctagtgagggtgcagtgccgctccaggatgatggtgtctaaagttgtgcaccaggtcgcaggccctgcagaagcatctcccctcaggagtgaggtagtacaggaagtctgtgcacaggcagatctgctggtgctgttacactatgagggcactgagctccaagatggtggcaatatattcactgggattcctgcacggtgaggttggagagaggaagcatctccataacacatatgaaaccctggaagcacttcccagccagaaattcaggaccacgttatatgcagatatgggtgccctctgagcacacttgtctctctgtctcccactctgagctgcctcctggccccacatgccccagcctggcccagggcttagcccagtgggtgttcagtccatggtgttgactgctccctgggccaggagagcccttggtggctctgtgactcctcctgtggaacccctacctctgccttgggacctcccaattcccatggaagcccccacagctctggattgccccacctgccctgtgatcctccagccccataggccttactcgatgccttagccctcccagaacatgacacgtttctctgaatgtggctgatgtccagggccatctgtagatgtttgctggggacctcttgctgttttcctttatggtctgtaggccagggccaagaggagaaaccagcccaatctcagaatggacaaaaggctcactgccctaacagcaaccaccaaacagtcagcagtgcttctggatggaaaagaggtttcattctgcagaaagctccttgtttggcttctttctgaagccaggaaggggtaccaaacccagcttacctgcggtgcctacgttagcatctgtgcctaggatgcatgatgggctcccactgcagggttgacattccctccagctggagacctgggctcctgacaccacctggcgtgtttgtcctgctctggatgacggtggaaaggctgtatctggtattttcctaggtccttggttttcaccttctagacatccagcaggagtgaccatacccagccccacacctgaaatgggactcccttgtagagcacctgagacctctacagacagaagagtgctctggtgagacaggccacagaggtccccgggggggggtgggatcaggggctggaggattctggaggtttccagccttgggctctgtggttcctcaaagagtttaggtttacctaggactaggcctcccctcccatgcttcaaagagtgggtgagtgctatgcatcacgaactctgatctggacctattttttcatttaggtcaccaagagacaacccctaacccccaagctagggatggtccaagctctggcatgagattctcttccagcaatgtgatgcttgcagggacagggagaaaagccggtgaccaggcctgctgtcccccaggtaaggacagtgtgctacccaccctctgagaggcaggtggtgccagctcactgcactgggtgcctgtacccctggctctgcagacaccggtcatggaggtcctcccctctccacattaccttcttgctgctcccagatttcttctggtcattaagcactttgagccatttttctgtgcagccgatctgatatttttgctatcagatgaaacatgacaaagtaagccgagccaccaggattcctggagggaaccttggatgctgcgtcttgggatccagagccctgatgggactgaaccagaaggagccagggaaggacaaacactggggctcaggccctatgacccaacggccattggtggcctgtcctcatggccccaagacaccctgtcctcaggccacagacaccatgggctttggtcaggtcccagcctcccagtagtgccctggcactggtgggtgctgacctccaaaccacaatagcagttctgggttatgggtttggtaaaaccacctcagggagaattctggggttgggtttggcaggaaccacggggcctcccaggaatgatgtgtcactcctacttgccacaaaatgtgcacagaggctatcccactgaccagcccatcctgctggacaggatggaggaaa

SEQ ID NO: 84576 - DNA, 1916 bp, Homo sapiens
tatgttatgttcatcccagggcctccctgctgagaaaggtctgatgctttcaggttactcatgatatcaggtgccaacaggaggatatctactgacatgcacagaacccagaccctggaacaggcagccgtgagactggtcatattccacccacgcattcagtttgccaggaaatggcacagtgaaagtcttaaattcatacttctgtgggactaattgaactctggggtttttatttatttgaggaaatttctgtgaagccytgtggacagattagaaatatttactcacaaaattgtacttcagtctgtctcattctgaccattgtcatcatcatgacagagagaattgtagaaaagtttggtatttggcagtgttttctattttcattactgtcttacttggaaagcttaatactattttattattcaggtgctgtggttgtatagttttcatggatgtgttagtgtttcgctgattctattcttaagttagttttgatttataattatcatgggcttctacggcatttttcacagatacatctgcctggtcattctggtgctgggtcatttgcaatagattcctaattacagattcacttcttgcttgtatagaatctgtacagcatttttaaccctgtccataagtttatttacagagtaaatttgcataagtgttgcaaggacttgttactacttggactaacataatatttctgtttgctctttagagttcgtgggctggaaaagaaagcacattaaaaagatcagagaaggtaaaatatgagtctccacactgaactccatatttgcagtacctggtgtttgcttgcctattctaatcatgtctcttttttagcaaaagtagccatagtcataatccctcttaaccagggaaactgtttcattatggctgcaaaaacacattccaagagggttacgcatgatcgttagctaatgtgagaaggaatacttgttcaagacagccatttcagattactgagttttatttaaataaaggggaagtttctaagccaaagtctctcagttgtgtatcaaatttcttttatttttaaaaaacttctctagctctcaaagcctgtatcaccaagagaagggaaaaaaaaatggcctgagctgtaccatatattgaaaacaatgcattgctcctgcttaccttgctataaaatcatggtaattaccaatccgaacttgctttaatcggtgagtcgtggtttgactgctctcatccaggatttggcaaatgggaagggctatagatggaaaatcttcttggcttttcaggtcttgtggtctctgtcacactactcagctctggtgttgtaacacaaaagcagccacagacaatatgtaaatgaccaaatgtgactgttttcctataaaactttatttatgaaaagaggtgagagtccacatttggcccacagtccatactttaccagtcctgatctaaagtattcattatctacaaggaaaatgaagtaacaaatgagctgaaaaccctaaaaattaggaaacaatttatacattgtatccttatttcagcctccatttgatcagtaccatctacatacatgtgactttgccaaaactgccaggcttagtgctattctagtacagcagccttgggcctgtagacattgcccttatgtggacatgtgtggtgggatgggtgatatctctgtgtagactctgctgcctgtggacagctctgccctcaacttgctgtgctctctgagattcccaccatggcctgtgggcatcggggcttgacatgggtacagctgatgctgcaccattcttatctgtgaagggtctgacatcctcatcaccaaaggacccctcgacctccatcccaggcattgctggaaataagccaacaactctggatcc

SEQ ID NO: 84577 - DNA, 1109 bp, Homo sapiens
atgtatatatatacatgtatatatatatatatggacataaaattagagtgggtatctcgggtagagggagaaaatgggataagaataaaaatggaaaaaatcatactgcttatagttaaaagtttatagtacagaagttctcattttgagttcccaaaacttccactaccaactccttttttagggggatactctttttttcttacaatttggagggaagttttcaaccatttctgcatatcattttatatatttgtaagacagccaggtctgacttttattgcaatctttatgccaaatcctcctaagtctatatctccaaacaagtcctcatagactatttagtcctaattcctactgagcattttccccatcagctaaacttaacactgtaagcatcattttcacctccatcctagatgctgctctctttctaagctgtcttacttctaccactatcattccttcagtctttaaggagagcatttatagtaatttttgactctttccttttccttaacctttaggcagttatcaaggcttactgtttttactttgaacatcattgctatcctattccactgccacagtatatacctggaaaactcactatctacctttagatttccattccttcagtccatttgcaaattgccagatctccatatagcactattttcaacacattgcctccttgctcaaaacctctaacagtgccaatagtgaacttttgttgtctattggctgctcagtatttatttctccttcacacctcaactttcttttggggattatctcttttattggattaaaaaaacccaactattaatctctttttcagctaagggaaggacatataacaaactagggctttggaatgctcattcctctaatttgaatccttagcaatgtaataaaragattaaacatggttgcatattcattcacgctcgcatggagccttggcctgcttcaagcctacttttctagttcctactttttagccttagagtccactttgctttctaatgtttccaggcctggttctctagtctttgcatttgttctgggagctcctcatatttttccaataaattcctctcttgaat

SEQ ID NO: 84578 - DNA, 1082 bp, Homo sapiens
tttttatgtaattttaagatgagattataccctgtgtactgtgctgcaatttagtttttttcacctaacaatgtatcattaacatcgttttgtatgggttgtatagcactatctcttttttttttttttttgagacagagtctcgctcttttgcccaggctggagtgcaatggcatcatctcagctcactgcaacctctgcctcccaggttcaagcgagtctcctacctcagcttcccaagtagctgggattataggcacctgccaccatgcctggctaatttttgtatttttagtagagatggggtttcaccatgctggccaggctggtcttgaactcctgacctcaggcgatccacccaccttggcctcccaagtgctgggattacagacktgagccaccgcgcctggccactgtctcattttttaaatgggcacatggtattcttttgtaagcactgcaaaaatacattattgtacatatacctgtcttccttcatctctttttctacgagggcacatactttcccttgagaatgaaggggaaactgcaggtgcataggggactacctagagaaaataaggagaagaatgattctgctctatcctggaggctcttaagtccatagtcatattgttatcttgacatggcaatttatggcttatgattgctttcatatttcatttgatctttattcaaacctatgaagtggctagacccgacagtaaaatcattgctattttacagtctcagaggtattgagtgaccagcctcatgcctcacagctagttagggacagtatgcagttagaatccatgtcttctatctttcagtccactgctattgcacaatggacagctgctccctgcaaccacatgtgggaggagaattgggaggactgaaaaaaaactgtgtagtgattcacagggaacttgggataatggtcgtcaagaatgtgctatgtcagccagttggtgtcgtgctgagcagtgttggtttgggttttttttttatatggtgagaaagagaatgaatgtctctccatgtgtttctaggtatatcagtgatttctgctttcacag

SEQ ID NO: 84579 - DNA, 1371 bp, Homo sapiens
aggggccaatataccaatgaatatagcggtgggcctcagagattcccaatatgatgctggaggaggggatgtttggggtgcttgagcccatggttttgtggttagatatataaacagaaacaagagaaggagactgttctatggaatagtccatcatatggtggccaccttgcctgcacgacacctgttcttccacctacttaatacagaaatttttgcgtcagttcatggacttggatttgggcttctaggaggcagctattgtggatgttggggctcagaaaacaataccccaaaatgaaggcctcagaatcagccttaagagcaaaagtttttctttgatcttttcctgctgtcctgtctttcagtcccattctcccctgaggctagccatagaaggtattacaagtaatggcaaaaaccacaattacttttgcatcaatctaatagactccttcttccccaagatgggttaaattagtagtaatcagaaccccttttccccaaagctagccataaaccctaaaaatattactctaacttgctttctgcctcatgtcagtgattttcagcaaagcttcaggggttctccttggatcccaaacttggagaccagagtcctagtcaactttcaagctgggcacactgtgactcaagatctgggagaatgtccgctatttagtggcctaatttgctgccatgtgattggctagaacccttctgaaagaaattccttgttttaaattcagggaggcagacaaaacactatggtatataaaatgaggttatgattctagagcatttgacagctagctggttcccagactttcttaacctctctagtttgagttagcagctcaacctccaagagctgtcacaataccttgtgtttcctgctgttatagcatttatcatgccatacaatctttgttcatttgtttgtgtrctattaaagtgaagcttcctgaaagcctggagatgttctgtatctggacataaaattgattagatgcatgaccagcctttgggaatttcatcataaatatcttccaagagtccaacgtaggcagtgatggttgtggtcattttttcaaataactattgaagcactcaccattccacttctcctgaatggcggtctttaggggaattgatgaattctcatctctatcctcactgactctcaggatctagcagccagtagagaacagctgcttaatgaatttcaaggctgatttcaggtaccttcgccactgagctctgagtcctggggggatgacatgtattattagttcctggccaggcacctccaagagcctcataaaatttgcatgtgtctggagcccaaattatatgtttgttcaagcaata

SEQ ID NO: 84580 - DNA, 2383 bp, Homo sapiens
atagaaaagaaaaagtgaaaaattcttagaacatactgttaggtgaaaatgagacacaaaacaagagccatagtgtactatcatttatataaattaaaaacacatccacacacaacattgtgagagtactaaacgtcactgaaatgtgtattttaaaacagctaattttatgtgaatttgaactcaatttttaaaaaaaaawtttttttaaatacatgcccatggacttcaggccagtcatgattaaatagcttatatcaggactcagtctctcaccaaaatcaacaaaagacagaagtacataaagtaactgctaaaagacactgggaaacaactgaaataggcagaacctgatggggctactattcaagagaaaaaaagctgaataaagtgagttccacatttacccttgctttttcttgtgaagatatgtacctaaattcacagcacaggggaatagaaagcagaagtccaggggggataaggagccataggttggaatgtgagaaggccaaagctgtaaggacctgaggtcaatacagcccaaagaggaggatgtcgcatggaagtgagccctaaaatcctcgtgcaatttgccctgggggaatttaccaatccctaaactctgcatacataagaaggatgagaatccaaaagcctagcagacagcaatagctgagaggccaaagagctgagcagatactttagcagccagctgcctggtactgggaagataagttggaattcaaggtcagacaaggtgaaactgcccagggatgtacttcaggcttaaagtaagaccccaaaagggttacactgtagaagggcaaactgaagtacaatacagcactaagtctaaaactaacaatatgattaaaatattctgcttgtgcattaactgtcttccagaagatgttgaatgtaatccctgccctcaaggagcttacagactagccagagacaggcaagtaaatcagtaattaccaaacagtaaagaagagaaagggcagtaatagagatttcccaggaacatttaaataatagatatagatctggaagtcatttatcatacaagcgaaaggtaaatgcataaatgagtgtacacacctggagagaatgtaaaacgaggagtccaaatataacattaacctccaagtttatgccattattggataagatctaaggacttttttatattaaattattccttagaataaatagttacaatgagatacactagcataattaccttggtcatagcttgacttaaggaactgcaaataaaagataatagaattccaatcaaaaacaatggtctactgtcaggaaaacagcaacgtcttttttacaaaatccaaaagagaagagtgtcagggtttaaaatattttctgagaacatgaactataataagtatttttcaaactcaagtgttttaatagaatctccactcccaaaagactcatcactcagttgagaagtattgctggcatcagaaattacagctgagatagacacatgaagttcaaggacaaaattttgtgaattcagcctcttatcagaccttgatttaacaaggtgacaaatgtacttgtgacaaatagaataaatccttattcttttacaaataaaatataaaactgtctccttatttagcaaactattaaaagaaaaagtatattacctaaattaaatagtatttggcttcatagtctcttacttaaaaaggagatgaaacaaaagaaaatagaagccctaaaaatattttggcatttttaacatatcccaaaatataaattaattcaggtaaagaaatttgtttaaagctctgccacattctttatatctcaagttacaccatttcaaaatgtccagtaaaatgtgacacacaatatggcacttatacctactttgatattctctatagtgcctagcactgagaatacactgaatgaataaatataacatctacttcatagcaataattcaaagcatactgaaatatatctataaaagaaaaatttgcacaattaatctctctcttcatccagaacatacttcttcctgtctccacctgcccaaattcaaataatccttttcagtgtaactcgtgtctattccaataggcccttatcagtatcttccaatgaaagtcacctggccctaaaatgaatccctaacggcacatggcatattcaagtaggttttctgatcactctatgctttctccatagattatgttattccctcagacttcgctaattattaacatgaatgattcaaataaattaaaatcatagggtttacatttttacaaatgtaaaaaaaaacctaggtgaatgaactgttcatttctggtatatatctttaagtgtggaataatat

SEQ ID NO: 84581 - DNA, 598 bp, Homo sapiens
tgggatgtaattctcccttatctcctccacatagtggtcttgaattaatggtgcttggtgctaaggtgggggtgaaagtggaatgagtctcctcactagagggaactgagtagagaaaacatgatctgctctggagcacagagaagagggcaggcwccaacagtaagtgaggagaggccaagcccaactaaccaagaaactcccagaaaatatggaagactctgaatgctgtgaagcacaggggataaaggaatcaagattttttttttttttgagatgaagtctcactctgttgcccaagatgagtgcagtgatgtgatcttggctcactgcaacctctgcctcctgggttcaagctattctccttccttagcctcctgagtagcttggattacaggcacctgccaccatgtctggctaatttttttgtgtctgcgataatattttgtcttcagcaaaattctattattgaccttaatacatagaaccttatttgtctgcatgtctggtttgtgagcagagattattttgagtcctcaaaacctagagcagtgcagttgtaaaaggctttgactgaagtcttaacaaatatttgcta

SEQ ID NO: 84582 - DNA, 598 bp, Homo sapiens
tgggatgtaattctcccttatctcctccacatagtggtcttgaattaatggtgcttggtgctaaggtgggggtgaaagtggaatgagtctcctcactagagggaactgagtagagaaaacatgatctgctctggagcacagagaagagggcaggctccaacagtaagtgaggagaggccaagcccaactaaccaagaaactcccagaaaatatggaagactctgaatgctgtgaagcacaggggataaaggaatcaagattttttttttttttgagatgaagtctcactctgttgcccaagatgagtgcagtgatgtgatcttggctcactgcaacctctgcctcctgggttcaagctattctccttccttascctcctgagtagcttggattacaggcacctgccaccatgtctggctaatttttttgtgtctgcgataatattttgtcttcagcaaaattctattattgaccttaatacatagaaccttatttgtctgcatgtctggtttgtgagcagagattattttgagtcctcaaaacctagagcagtgcagttgtaaaaggctttgactgaagtcttaacaaatatttgcta

SEQ ID NO: 84583 - DNA, 598 bp, Homo sapiens
tgggatgtaattctcccttatctcctccacatagtggtcttgaattaatggtgcttggtgctaaggtgggggtgaaagtggaatgagtctcctcactagagggaactgagtagagaaaacatgatctgctctggagcacagagaagagggcaggctccaacagtaagtgaggagaggccaagcccaactaaccaagaaactcccagaaaatatggaagactctgaatgctgtgaagcacaggggataaaggaatcaagattttttttttttttgagatgaagtctcactctgttgcccaagatgagtgcagtgatgtgatcttggctcactgcaacctctgcctcctgggttcaagctattctccttccttagcctcctgagtagcttggattacaggcacytgccaccatgtctggctaatttttttgtgtctgcgataatattttgtcttcagcaaaattctattattgaccttaatacatagaaccttatttgtctgcatgtctggtttgtgagcagagattattttgagtcctcaaaacctagagcagtgcagttgtaaaaggctttgactgaagtcttaacaaatatttgcta

SEQ ID NO: 84584 - DNA, 598 bp, Homo sapiens
tgggatgtaattctcccttatctcctccacatagtggtcttgaattaatggtgcttggtgctaaggtgggggtgaaagtggaatgagtctcctcactagagggaactgagtagagaaaacatgatctgctctggagcacagagaagagggcaggctccaacagtaagtgaggagaggccaagcccaactaaccaagaaactcccagaaaatatggaagactctgaatgctgtgaagcacaggggataaaggaatcaagattttttttttttttgagatgaagtctcactctgttgcccaagatgagtgcagtgatgtgatcttggctcactgcaacctctgcctcctgggttcaagctattctccttccttagcctcctgagtagcttggattacaggcacctgccaccatgyctggctaatttttttgtgtctgcgataatattttgtcttcagcaaaattctattattgaccttaatacatagaaccttatttgtctgcatgtctggtttgtgagcagagattattttgagtcctcaaaacctagagcagtgcagttgtaaaaggctttgactgaagtcttaacaaatatttgcta

SEQ ID NO: 84585 - DNA, 709 bp, Homo sapiens
gcccaccttggcctcccaaattgctgggattacaggcatgagccaaggcgcccggccagtgtgtatttttatcaccctctttaatctaaactggaattgggattttcttttttcaatagaacgtggtggaaatgacattaagtgagtttcagatcttaatatctgagaggccctgcttcctttctcactctttggaagtcttgagataaccatgaagcaaagacgttctgccaagcctastggtggatgagaagtcacatggaggaaaacagagacaccccagcagagagcaaacaccacggcttctgacatgaaagtggggacatcttgaaccttctaccactgcccatgtaccagctgagtgaaacaatctgcataaatgagctccagtgggacaagcagaagcaatgagtaaattgataacattttgagaactaacattgctgttttaaaccagtaagtctgggatagttttctatgcagtgatagataattagaatatatttgaacgtgataaattgagaataagtattgtaatctaaaggcagccattaaaggatactaagaatatgtaactaccaaccagggtagacaatctcagtgcagcaaacaaacatgtagcacacccaagagttttttagaatgaatatttatataaacttaatttaaggttcctggtattattggcttgttataacaaaagatcttt

SEQ ID NO: 84586 - DNA, 1791 bp, Homo sapiens
aaaagcagatttatattctctattcataaaattttaaatcataaatctttggaagggtttacaaagtactttaatgtacattatctcctttgaattatcttgagaattgtgattatgtataaaatttcataatcttgtcatttgcccttataaatgagtgagtgcctaccgtgtctcatactgttctaagcactgtggaacagctgtgaaaaagacagtgttcctgttctaatgaggccgaagtggtggtgacagatataaataataaacacatgcaaactacaaagaaacccaaaaaacaaaataatgtcaagatacagaataactttatgtctgcttcagattgagtgttcaccaaatgatactctggggagacattcaatcataaatcttaaaattgaaacagaaatttgagatcttgaagaacaaatttaaacagagaagaaataaaaataaaataaaaatgaagatattttataaataaattgttagcattaggccaaaaaatactaaaatgttagagctgaaaatgtccttagaaatcatccagcccatattctttaaagggtagtaactgagaaaagggaaaagtgtgcccagatcccaggtttgagcttgctaaaccagaagccttcagaacatttctagcctgcacacaaatgcccaggtgatgcatatcttcttcaggcaacctaggctttatttcatttctgtctaccttttcaataacatgttagaatataaagttaagataagttcccttttatggatatccacgcttgtatatcaaatatacaaaaccacaaaaacccatgctaataataaagcatatttcataaatgatgattaatcatttaggaaacatgctttatctaatattagaaacaaattattggtaaatgttatggcatatcatatttcaagtgatataaaagcagaattttttttctttttgctatgttttgttcacagctgtttctccagcacctagaacggtgtctggcactgagtaatgctctgtaaatatttagatgaaattatatatgaaatgtggtgtagcatcacattgcaacaaggttgaggaccatggctccaaactaagccagaaactaggttagagacacttattttgtaaatgtgtgaagaagatttcttggcaaaataattataaaatacattggtgattgcctccttgtttgccaaattatttttgaaatgattgaggtgttttccacggggacattactttcaggaaaagaatttgttatgtttctgaatacttagccttttctgaatagtttactgggacagaatcaaagcataagccttggaagctactgaatagatagcgagagaccatctggagaaatgtacctatccagaggtatttgtttacatttcaatcagggaagaaacccaagatctacagacatatttcagggtttataaactctgagaagctcctcttatattccctctggagacatttacttatattccaaaggataatatactagtatttgtttcccttctcttccaaagaagaatttgtttatattaggaagcaaaggtttctgtccctttctcaggagtrgaagaggaatgggcagctctaacctcataaactctccatttagaatttcaaggttcctctcctatggtgtgacctgcccatatacaaggcagtccatctggctgtaatcacatcaccccagaaattgaacatgtagggcaaggagaatggatgtagttcttgtctaagtaataattaatctttttctgtcccagaag

SEQ ID NO: 84587 - DNA, 885 bp, Homo sapiens
aaaagagattataaattaacacatctgattctcttattcaaaaatgagaaaactttttcttagggactttaaacgccttgcttaatattgtgtcaatcagacaaatgataccaaaactctctctcctgggctggcaccttatctactctgtattcctatttagcttagctttttaacactggaaaaagtgtacttggaaaaaatgataatttttaacagatacatcttatgtattaaaatataatgccttacaataatgtaaattgtcaaggttgtgtggcttttatgcttcatgatgatttatttatttttacagtgctctctaaaatattacataactagtgcttaatttcctgcatttgattatatatttttaaagtttctgatatttttctatgatatatagtagaaaatgcttatattactgcttatattatttttttcctagaacataatctctgacttcgatctggtgtcagatgarcatctttttgatattattacatcaagtgataatagcaataatgacaaagatctggaaatggaaataacaatctcctaataaatctgattgtaggataaagctgaattattgcatttcaagaaaatttatttggagttagctattccatgtcaagtacagttagttgtgaggatgctaagttttagagatgctaggtattggatcacaaaactaacctgaacattttatttctttattcataatctacatcatatctccccgggacttccaatgagataacaaaattaagctacatgtttatcccctatagtgtctcatcataaattataaaatgctcaaagtaaaatgaaagcccacattaaaaatgacagggctgaatatgcccttttaatatgcaattt

SEQ ID NO: 84588 - DNA, 600 bp, Homo sapiens
ccaagagcacaaatcaaaatagtaagatttgagtatagcaagaattactccttctgcataatgaatagttccataaacagaatgaaaagacaatcattaaacttaaagagaaaatatttttcaatatgtacaacagatagaagaccagtctctagagtatattaaaacagattttaaagatcagaagggaatagactacccaaataaaaataggagaaagacaagaacaagcaattcacagaagaaaaaactcaaataaccaatagacacataaaaagatattcaacttcattagacatcagataaatacaaatgaaagcaaaaattagatttcactatttacccattaaagtcagctaagtgttttgaaatgtattatatcaagagttggcaaaacacggaagttttcattacatgctactgggagcttaaattattacaactattttgaagaacgtcattaagggtttagtaaaatgaaaaaggcatataacttgtgttccagtaacctgcacctacttayataaatcttatatgtgtataaaagaaaacatatataaggatatcaattgcagaattgcttatagtaatacaaatata

SEQ ID NO: 84589 - DNA, 1060 bp, Homo sapiens
ttgggggcacgtgtctgtctgttaggaaccagcggaaaatcagcccagctcggatcagaacaggaaaccaggacccaggctggtgggtgctagggcagggccttgtggcttcacaacccgcctcccagggacaggctatctggtcaaaagaactcgccctcctcactgctgggtcccttagcgggctttcacgtgcctggcctggtccctccttctttaaatgaagagtggcctagatgattgtcacactcctgtgtgacactggacaacacacatcacctctctgggcttccattgcctctgaacagtcttccaccttcgactggaatcagagccccaaaagcgagattctaacaagaggttacattgtgtgagatactgacctcctcagcatctagggtgatggggtccccgggtgggtcacctctagctgggagatgcttcctctttcacagctccatctgtgccttaaaaattaaaagctgggaacctataattccagcactttgagaggctgaggcaggaggatcacttgagctcaagagttcaagatcaacctgggtaacacagtgagacctcatctcttaaaaaaaaaaaaaaaaatgtaaaggctggaaaagatgggactaggtgatctccactgtcctttccatctcacaccagccaccccacgcccaacaccctcagaatagatgacaacgggcagattacccttaacagatatttctctaacccagtgacagggacctctgcatcagaatcacttagaatgctcattaaaaatatgactccaggctgggcgcggtagctcatgcctgtaatcccagcactttgggaggccaaggcaggcagatcacttgaggtcaggagcttgagactcacctggccaacatggtaaaatmctgtctctattaaaaatacaaaaattagccgggcatggtggtccacacctgtgattccagctactcaggaggctgaggtatgagaatcgcttgaacccaggaagcggaggttgcagtgagccgagatcacgccgctgtactccagcttgggtgacaaa

SEQ ID NO: 84590 - DNA, 606 bp, Homo sapiens
tacctcttgtccctcccatcatcctgaggatgcctggggactggttcttcaggtaaatgcgaggccaggtgtgtcctggggttgtgcagactctatagatttccactggggaggtcttccagacagcttctttatgcagaccttccctagctgtgtgccactggacaggagcaacctgactctgagccccagggaagcctgggagtttagagggtgatggccaaaggtcgtttgggaatatctcacccaggtaagtggagaggagctcaactacatggtttgggaccaccttatccaggatgtggggctgcccagggagcactgggcactttgcctttagccttcgtagaatctgtctcaaagatgacagaaagcaatgacmtgtgactcctgctgggtgataccaggagggtcccaagaaaacaggtggcgaaaggtaaaatagagaattgggccagcacctgctggcaaggaagacctcacccaaagtggaaggcaggccccggagagttcctggcacaaagtggtagcccagttgccaaatctttcatcagcagggacctgggagaacatcgtggtggaggggagtttcaggtccagtgcttc

SEQ ID NO: 84591 - DNA, 641 bp, Homo sapiens
gccctctaaaatttgatatattgttctcatttaaaaaaawtttttttaatttatttatttagagacaggggtttgctctgttgctggggctggagtgcagtggtgtgattatggctcactgcagccttgaaatcttgggctcaaacgatcctcttgcctcagcctcccaagtagctgggagtataggcatgtgccaccatgtgtggctaattttttaaaatttttgtagagatggagtcttgctatgttgcccaggctgatcttgaacgtctgggctcaagcagtctcactggctcaacctcccaaagtgctgtgattacaggtgtgagccaccacacccagcccaattgctgagttctggggctataccttacattctgtgcctgcggtgagtgccttggtttccttgccccagtcttggcctaggaggtgggacctgtgtcagaggagctgggggagtggtaagggctgctgcctctataagatgcctttgctttttgacaagagcacaggctggatttcagtttctttcaccatctcagcagccccctctgtacagagtacagtctgcacaactttacggggtggccatgtctggagaacagactacagattagtccacccacaggtagtccactgca

SEQ ID NO: 84592 - DNA, 641 bp, Homo sapiens
gccctctaaaatttgatatattgttctcatttaaaaaaattttttttaatttatttatttagagacaggggtttgctctgttgctggggctggagtgcagtggtgtgattatggctcactgcagccttgaaatcttgggctcaaacgatcctcttgcctcagcctcccaagtagctgggagtataggcaygtgccaccatgtgtggctaattttttaaaatttttgtagagatggagtcttgctatgttgcccaggctgatcttgaacgtctgggctcaagcagtctcactggctcaacctcccaaagtgctgtgattacaggtgtgagccaccacacccagcccaattgctgagttctggggctataccttacattctgtgcctgcggtgagtgccttggtttccttgccccagtcttggcctaggaggtgggacctgtgtcagaggagctgggggagtggtaagggctgctgcctctataagatgcctttgctttttgacaagagcacaggctggatttcagtttctttcaccatctcagcagccccctctgtacagagtacagtctgcacaactttacggggtggccatgtctggagaacagactacagattagtccacccacaggtagtccactgca

SEQ ID NO: 84593 - DNA, 641 bp, Homo sapiens
gccctctaaaatttgatatattgttctcatttaaaaaaattttttttaatttatttatttagagacaggggtttgctctgttgctggggctggagtgcagtggtgtgattatggctcactgcagccttgaaatcttgggctcaaacgatcctcttgcctcagcctcccaagtagctgggagtataggcatgtgccaccatgtgtggctaattttttaaaatttttgtagagatggagtcttgctatgttgcccaggctgrtcttgaacgtctgggctcaagcagtctcactggctcaacctcccaaagtgctgtgattacaggtgtgagccaccacacccagcccaattgctgagttctggggctataccttacattctgtgcctgcggtgagtgccttggtttccttgccccagtcttggcctaggaggtgggacctgtgtcagaggagctgggggagtggtaagggctgctgcctctataagatgcctttgctttttgacaagagcacaggctggatttcagtttctttcaccatctcagcagccccctctgtacagagtacagtctgcacaactttacggggtggccatgtctggagaacagactacagattagtccacccacaggtagtccactgca

SEQ ID NO: 84594 - DNA, 1481 bp, Homo sapiens
cttttatgtgagttgaggtccagtgttaggaaagcaaggaagacacagtacctaaaatgagaaacagtctattgaaaaccacgaagattaatttagtgataccactaaatgtgactatttaattagacatttttattttgctgtgatatcctcacactgcttaccaggtgattacctttgaaattgcctagccatgccaattcaattaaactggataggataataggagtgaaaatgttttgcaaatgacaaaatctttgcaatcatttgctaatattactaattctcatattccatgaatttagagttgaatacttctatcctaacacatgtacttctaaatgtgtttgaagtttgagtcttactaacttatgtagaattcacatattttttggccgggcacggtgactcacgcctgtaatcccagcactttgggaggccgaggcagacagatcacaaggtcargagtttgagaccagcctgaccaacatggtgaaacccccgtctctactaaaaataaaaaattagccgggcatggtggcacgcgcctgtaatcccagctactcaggaggctgaagaaggagaatcgcttgaacccgggagacggaggttgcagtgagccgagatatttttcacacaaaaaccttaaatattacagtgcagtggttagcaactctgaaagtttgtttgtttctaacaaccaccacctgttaaaggcatgatttaatctctttaagactcagagtagataattacagtaccaagctcatgcctgtccaggatcttatcatgccttatcatctctacctatatcattcacatccactgtctctcatgtttactactatcataatcccctgtactcagtcttgttcttctacagtctattgttcacatggaagtcagaattatcttttaaaaacatcttaatcaattgatatgactctcctatgcagaatccaccaatgactgcctgtaatagtcaaaaataaagcccacactcctacaatggccaacaagatgctacatatactggcatcttctacctacatcatctcgacatgatctcctctcatggagggcagagactatgatgttcagagctgtattaccagcccctagaactaccacctatcctggtggatggaccctcacttgctgaagggatgactagggatgcaagggttaccatggaacaatgtaggtagatgctctgcacacagagtacctttaatgcagaacagtgatagtcgttgcccttttaaggattcctttggtttgtttcaacagaggccatcacatctgcaatgctaaagcactttcatgtttttgactcatgattttatagcattatgagaaactttacttagctgatttataattgcaagccataatgtataataccaaaagaaagaaaaatgcacatagacaaatcaggaactaattagctggatgagaaagccagttgaagagcagaaaat

SEQ ID NO: 84595 - DNA, 577 bp, Homo sapiens
actgtaagccattgcagagcaaagtaaccactgttaatacatttaaagcattcacagaatcttgctctcaaatgaactacaactggatcttcactacttgatttawtaataaccactcagttgtattggaactgcaccttctcatgtaggcttactacatgtgtgccaagatttaattctgaaagtacagagaatgatttagagtatgatttagaaatattatcatgtacaaattctctttccctggtaaaaatacatgcccatgaaactatgagatgaaagaatgtaatctggtttcccaaaggctggaccaggcaaaaatgtgttatcatctaggctgttttactttttgttttttctcttatttaaaaaaaaaatctgtttggttatcattcacctcatggcttgtatttctttgtatatacttttctattttttgagcatacttcttcccccatctgcttcccttgcccttccactccataaagtggtgtatttccacgtggggtcatgttagctaatgactaggatttctatgtcctagttaatggtacattgtttgaatatctatgtggga

SEQ ID NO: 84596 - DNA, 911 bp, Homo sapiens
cattttatattttttgcagaattaaaaaatatcagtattatcttgaacttagtaaaataaatgagcctattcacagatagcagtgtttaatgcagtataattatatggataattagaataacaatatggtacacaggacagacctaggaattcttgttgaatagtcagaaccayagaagtgagctgtagttgacacaggatgtaatgtatatatggtgtaaaaaggaaaaataagaaaaatttctataatagctaatattagtttctgaatattatgaaatgacaacatacaacatatatccaactgaacaatgcctagagatgaattttagtaataaagttcctgttaaatgacattaccataaaggaaaaataatctatagtgttcataaagctcataattcatttaatgtttcctttatgaagtgtagcctgctagaggctttcagtccagtaaaaaatgacacctattattatatttgttattttgcatttgataaaatgttcatttacagctatatttctgcctactataaatgagtgatgagttcatactataaagtttaaaaaaccaagacttatttccataccatgacagtgaaatcaaagttttcccctctaaataacagattatgatatatgaaatatactaaagcccagtaagtcaggattcaaattcatgactgtttttttttcagctgtaagttagtttaccttcacattccatctagcaaattgaggtttatagctgtgtgccctagaacagaatattatgtattttattatttattgagacagagtctgtcacccgggctggagtgcagtggcacaatcacggctcactgcagcctcaacttcctgggctccagcaatcctcccacctcagcctcccaagtagctgagaccacaga

SEQ ID NO: 84597 - DNA, 911 bp, Homo sapiens
cattttatattttttgcagaattaaaaaatatcagtattatcttgaacttagtaaaataaatgagcctattcacagatagcagtgtttaatgcagtataattatatggataattagaataacaatatggtacacaggacagacctaggaattcttgttgaatagtcagaaccacagaagtgagctgtagttgacacaggatgtaatgtatatatggtgtaaaaaggaaaaataagaaaaatttctataatagctaatrttagtttctgaatattatgaaatgacaacatacaacatatatccaactgaacaatgcctagagatgaattttagtaataaagttcctgttaaatgacattaccataaaggaaaaataatctatagtgttcataaagctcataattcatttaatgtttcctttatgaagtgtagcctgctagaggctttcagtccagtaaaaaatgacacctattattatatttgttattttgcatttgataaaatgttcatttacagctatatttctgcctactataaatgagtgatgagttcatactataaagtttaaaaaaccaagacttatttccataccatgacagtgaaatcaaagttttcccctctaaataacagattatgatatatgaaatatactaaagcccagtaagtcaggattcaaattcatgactgtttttttttcagctgtaagttagtttaccttcacattccatctagcaaattgaggtttatagctgtgtgccctagaacagaatattatgtattttattatttattgagacagagtctgtcacccgggctggagtgcagtggcacaatcacggctcactgcagcctcaacttcctgggctccagcaatcctcccacctcagcctcccaagtagctgagaccacaga

SEQ ID NO: 84598 - DNA, 911 bp, Homo sapiens
cattttatattttttgcagaattaaaaaatatcagtattatcttgaacttagtaaaataaatgagcctattcacagatagcagtgtttaatgcagtataattatatggataattagaataacaatatggtacacaggacagacctaggaattcttgttgaatagtcagaaccacagaagtgagctgtagttgacacaggatgtaatgtatatatggtgtaaaaaggaaaaataagaaaaatttctataatagctaatattagtttctgaatattatgaaatgacaacatacaacatatatccaactgaacaatgcctagagatgaattttagtaataaagttcctgttaaatgacattaccataaaggaaaaataatctatagtgttcataaagctcataattcatttaatgtttcctttatgaagtgtagcctgctagaggctttcagtccagtaaaaaatgacacctattattatatttgttattttgcatttgataaaatgttcatttacagctatatttctgcctactataartgagtgatgagttcatactataaagtttaaaaaaccaagacttatttccataccatgacagtgaaatcaaagttttcccctctaaataacagattatgatatatgaaatatactaaagcccagtaagtcaggattcaaattcatgactgtttttttttcagctgtaagttagtttaccttcacattccatctagcaaattgaggtttatagctgtgtgccctagaacagaatattatgtattttattatttattgagacagagtctgtcacccgggctggagtgcagtggcacaatcacggctcactgcagcctcaacttcctgggctccagcaatcctcccacctcagcctcccaagtagctgagaccacaga

SEQ ID NO: 84599 - DNA, 742 bp, Homo sapiens
tttggattttggcaatttttctgatatgaagtgttcttgattatcctagtataaaagatagggaamtctggcagaatcctttgctttgctaaagtagtgattttcactgaatctgaatcagtaaaaatcttgcccgtcagtaagaatatgcagactagagatatggcttgtttttgggtagcctccttgacagattttctttctttttgagacggagtcttacgctttttgcccaggccggagtgcagtggcgcagtcttggctcactgcaacctctgcctcctgggttcaaatgattctccttcctcagactcctgagtagctgggattacaggcatgcactacaacgcctggctaatttttgtatttttaatagagacggggttccaccatgttgaccagtttggtcctgaattcctgacctcaagtgatctgctcacttcagcctcccaaagtgctgggattacaagcatgaaccactgttctggctgacagattttcttgctgaactttgggtcatcccagatgtgagttcgctgtaggcgtgtcatagagcaacagtagtaggaatacaagttaaattgatgtatatgtcatgataatcagtccaattcagtggtccccaacctttctggcaccagggaccggttttgtggaagacagtttttccatggacctggggtgagagggtggggatgatatccggatgaaactgttccacctcagatcatcaggcattaga

SEQ ID NO: 84600 - DNA, 742 bp, Homo sapiens
tttggattttggcaatttttctgatatgaagtgttcttgattatcctagtataaaagatagggaactctggcagaatcctttgctttgctaaagtagtgattttcactgaatctgaatcagtaaaaatcttgccygtcagtaagaatatgcagactagagatatggcttgtttttgggtagcctccttgacagattttctttctttttgagacggagtcttacgctttttgcccaggccggagtgcagtggcgcagtcttggctcactgcaacctctgcctcctgggttcaaatgattctccttcctcagactcctgagtagctgggattacaggcatgcactacaacgcctggctaatttttgtatttttaatagagacggggttccaccatgttgaccagtttggtcctgaattcctgacctcaagtgatctgctcacttcagcctcccaaagtgctgggattacaagcatgaaccactgttctggctgacagattttcttgctgaactttgggtcatcccagatgtgagttcgctgtaggcgtgtcatagagcaacagtagtaggaatacaagttaaattgatgtatatgtcatgataatcagtccaattcagtggtccccaacctttctggcaccagggaccggttttgtggaagacagtttttccatggacctggggtgagagggtggggatgatatccggatgaaactgttccacctcagatcatcaggcattaga

SEQ ID NO: 84601 - DNA, 742 bp, Homo sapiens
tttggattttggcaatttttctgatatgaagtgttcttgattatcctagtataaaagatagggaactctggcagaatcctttgctttgctaaagtagtgattttcactgaatctgaatcagtaaaaatcttgcccgtcagtaagaatatgcagactagagatatggcttgtttttgggtagcctccttgacagattttctttctttttgagacggagtcttacgctttttgcccaggccggagtgcagtggcgcagtcttggctcactgcaacctctgcctcctgggttcaaatgattctccttcctcagactcctgmgtagctgggattacaggcatgcactacaacgcctggctaatttttgtatttttaatagagacggggttccaccatgttgaccagtttggtcctgaattcctgacctcaagtgatctgctcacttcagcctcccaaagtgctgggattacaagcatgaaccactgttctggctgacagattttcttgctgaactttgggtcatcccagatgtgagttcgctgtaggcgtgtcatagagcaacagtagtaggaatacaagttaaattgatgtatatgtcatgataatcagtccaattcagtggtccccaacctttctggcaccagggaccggttttgtggaagacagtttttccatggacctggggtgagagggtggggatgatatccggatgaaactgttccacctcagatcatcaggcattaga

SEQ ID NO: 84602 - DNA, 1002 bp, Homo sapiens
tcaaaagatagtcttaatgggagattagtgaaaacagaacagaggattcttaaaatggaagactggttactagaaagcatccaaatgaatacacaaagtgacaaaaaaaaaaagaaaaaaagaatggaaacagaatagagtgcaaaagacatatgtaatccagtggaaaggcctaaaaaaaaagtatagagtccccttatgagaatggaaggccaagatggatggatcacctgaggtcaggagttcaagaccagcctggccaacagctgaaactctgtctctattaaaaaatacgaaaattagccaggcatggtggcgtgcgcctgtaatcccagctattcaggaggcagaggcagggtgaattgcttgaacctgggaggtggaggctgcagtgagccaagttcgcgccactgcactccagcctgggcaacagagcgagactctgcctcaaaaaaaaaaaaaaaatactatctgagaatgtcccaaaactattgaaagaaatcaaagagatcaagaatggactcaaaactctgaaatgttgaaggcaataaaattacttctaactaaagataactgtctgtgaccaccatttacatttaagatttattccaaaagtcatctatgcaaaataacttctgcaatcagtgactaatattaaaacaggtacaaacagggcatttctgagtcctaaatatgaattatcctagaaacagaaactgtaaatgttatggtactacttgtttgcatacacacctgtaaatgctcactcattaaaaatgtcaacaatacatctaaatgttttagattctgttttgcctttccttttctttagttgacctgamaaatccgacgtgaacttctttcaaaataaattactaagattaagaaacctatatacttgagaaagagtcagttttctttgacgaagaagtagtaatgagtacaaccacctgagagaaaataagtttggacaggaacaaacacataaaaagagattctttc

SEQ ID NO: 84603 - DNA, 1002 bp, Homo sapiens
tcaaaagatagtcttaatgggagattagtgaaaacagaacagaggattcttaaaatggaagactggttactagaaagcatccaaatgaatacacaaagtgacaaaaaaaaaaagaaaaaaagaatggaaacagaatagagtgcaaaagacatatgtaatccagtggaaaggcctaaaaaaaaagtatagagtccccttatgagaatggaaggccaagatggatggatcacctgaggtcaggagttcaagaccagcctggccaacagctgaaactctgtctctattaaaaaatacgaaaattagccaggcatggtggcgtgcgcctgtaatcccagctattcaggaggcagaggcagggtgaattgcttgaacctgggaggtggaggctgcagtgagccaagttcgcgccactgcactccagcctgggcaacagagcgagactctgcctcaaaaaaaaaaaaaaaatactatctgagaatgtcccaaaactattgaaagaaatcaaagagatcaagaatggactcaaaactctgaaatgttgaaggcaataaaattacttctaactaaagataactgtctgtgaccaccatttacatttaagatttattccaaaagtcatctatgcaaaataacttctgcaatcagtgactaatattaaaacaggtacaaacagggcatttctgagtcctaaatatgaattatcctagaaacagaaactgtaaatgttatggtactacttgtttgcatacacacctgtaaatgctcactcattaaaaatgtcaacaatacatctaaatgttttagattctgttttgcctttccttttctttagttgacctgacaaatccgacgtgaacttctttcaaaataaattactaagattaagaaacctatatacttgagaaagagtcagttttctttgacraagaagtagtaatgagtacaaccacctgagagaaaataagtttggacaggaacaaacacataaaaagagattctttc

SEQ ID NO: 84604 - DNA, 2125 bp, Homo sapiens
tccccctttaagagaagatgcttggggcctaaccattctcactgttcacacttatctcctctactcttgagatcatccagtctccttgacactaagaaaagagtgttctcaaagcagacagcagcaggaggaaccaatgtgtgaggacaaacaacaggagcaaagtgycaagctgaagcttaggagcaggtggatagtcagataaaagagtggagtggagtgtgagagccagatggaagggtcatggccatagccatgtagggtaggagtgccacagaacagacctccaatatttgagatcagtttcaagtcacctctggtccttctccaggacatgcctctctatctttcacactgtggcatgaaactgccacttcagatgttgctagcagagccataccctccagtcactccattaatgcagtcagccagagctgctctagctttgccctgttgattcattttgagctgtcacctaaaacaccccaattcttttccatagctaaaacaaattcatttttctcccattttttacctagttgcatggagttttgtttttgttttgtctgttttttaaaaaaaaatttgagttcacgaacacacatttatcacttcaccttgttagatgcagcctgccattctaggcagcaagaggttttggcccaattctgtcttcattagcttttactatctttcttggtttcatgtcatctgtcaattttatgagtacttcactgtgtatacatctaaatcactgataaaaatattgagccagatcaaggcacacctcttgaagtttcctttgaagctgatattgatgcattactcaataccctttgggtgtgattgctcaaccagttattattccacctagttgtacttgtacccaggacaaatctgcatggttgtcatgtatctttttctcaatagctttttggtaagtacacattttactgacctaccagcatagaaaccatctcaaaagagtgaaaccaaggcaagtttaacaaaacttgttcttggtgcatccattttagaacctagcgattccctggatccttgattattacagagctgccgtaacaaccagcggtgcctaaccagtgtttatgtgttagagaaataaacttctattttgcttaagcgcctgtatttaggtgtcctttttacagctgcctaactaatatagtatattagcgcacaaccaagacagaaaggaaggaagggaagggcatgctctttcctccaatatgaataacccaggaatttcacacatcattttttgctcttatttcattggccagaacatataactgaaagtgaggcagggaaatgatcatctccatttaactcatcttagtttgcccagctcttttcaggttttagcaccagagttctgcatcttgggaacccccttagtcctgggtaaatagggggatggttggtcaccctacatccagctaaaatttgtaggttttaaagagagaaaggagaaatggatattgatggaccactagatcccttcctcagtctccatccagtttgtcttgtgaggctgctatttttttctgcttgagggactgcttttcttcatctcaccctgaaggtacttctcctgaaaatagaggactaaagcaaaaaagatgatgaagaggctgggcgcagtggcttacgtttgtaatcccagcactttgggaggccgaagcgggtgccatcacctgaggtcaggagtttgagatcagcctggccaacacagtgaaaccccatctctactaaaaatataaaaatcagctgggcatggtggtgggcgcctgtaatcccagctactcgggaggctgaggcaagagaatcgcttgaacccaggagacagaggtagcattgagccgagattgcgccactgcactccagcctgggtgatagagctagactccgtctcaaaaaaaaaaagatgataaagaatcttccttgtacttataatttgccaacttcccatctattatccgtgcttctcttggctgtgaacatttatttaaggcccttttgatgatcttggaattaaaaaaaaaagacaattcacaaaataatacataaaaatggctaataagaacataattagatgcttaac

SEQ ID NO: 84605 - DNA, 1175 bp, Homo sapiens
ggatccccacctgttaggaaccaggcaacacagcaggaggtgagcagccagccagtgagcaaagcttcatctgtagaaacagccacttcccatccctcacattactgcatgagccctgccacctgtcagatgagtggtgccattagattctcataggagcatgaaccctactgtgaactgcgcatgccagggatctagattgcgtgctcctwatgagaacctaatgcctgatgatctctgactgtctcccatcacccccaagtgggaccacgtaattacaggaaaacaagctcagggctcccactgattctatgttatggtgagttgtgtaattatttcattatatattacagtgaaataatcatagaaataaagcacacaataaatgtaatgggctcgaatgatctctgcaccatcccttccccttctcccaggtccgtggaagagttgtcttcaagaaaactgctctctggtgccaaaaagtttggggaccgctggtgtaaatgtttctaagaatagttaagcaacttaagcttcacgtgctacgaagaatacagctttaaatgctaataaaaataggtgcaaatgaaaacactctttctgtggtccagggaatcttaaccattctatcagaaagacttgcagcttggagctgcagctgccctcccacatcctgtccactgtaaagccctgcaacacacacatacacgcgcacacacacacacacgcacacatgcacatacatacacatgcatatgcttgcatacacacatgcacacagatgcacatacataaatacattcacatgtatatacctgcacacacacacatgcacacacacatgcatattcctgcaaacacacacagacacacacacacacacacacacgctgtgcttcatgccctcactagggtggcctgggaggaaatgcgtgtttttaggagaaatgaagacaactcaggcccctcattctcctggtgtttgcacaagtgccttctctgcagaccatgcttcagcctctttcttggttctccctcttactgaaagagagaagcagaggcccggcacatactcggctgcttagggctcaagccaagttcgcaagcttcctggggagcctagtgagatgaaggcactgcagagcctccccaaaagagtcgtcggcttttcatgg

SEQ ID NO: 84606 - DNA, 1144 bp, Homo sapiens
tagatgcattttgctgagggacagaagccagacccaataagctaccacmgtaggattcccattcctaggccattctggaaaaggccaaaccacagggactgagaagcagtctgggtggccaggggctgacggatcggggagaggctggttgcataggggccaccctggagacttggaggatgaaggagtcgccccaggaggggctggagcggtggccgggagactctgcacatcggtttggaaccgtggaggaactgtacacccacagactgaactggcgtgtgtgcaaactgaaaaaaaaaatcattcagagtgaaaaggatcaggcaagtcactgtacaactgggctatttgcatgtcacagatgtggattttactgaaacatttcttcaagagtctcaggccctgaagagctcactgcttatctggtgaaacatctgaacctgaaatgggatttgctgttaggctttgtagacaaagtgaaattaacaacatctgcacaaaacaaaccaaagccccctttctctgtttcctaggcagcgggaactactccacatcctcctggcatatgaggagtataacccggtgagtattcccggcagtgaggttcccgggccatatttccatattgacaggagtgggtgtctggtgggggtgtcgttgcttcttttaaagttagtatttgtgacccaccaggatataggaggtaggatgtcagctcaccgctggcataaacctccaaggaagggggtggtctcaaggggtcaagctgagacacaaaggagtcagggcctggactcctggtgtcacctgggcctgaccaccacttctcagaacaagaaatgacgccctcctcctggggctgccccaaagcccaggagcttggcagcatcgcacacaggatggtgctatcagcagacattttggacaaggtgctgaagtgcctgatggacttggctcttgtcatgaaatgaatgtgcatcctgaggaagcctctttttcagaggaagcctctccttcagaggaagcctctccagtcacctctgccctctccaatgacatgagtcctcccaggtgacctcagccctcccaggtgatgtccttccatggtgactctggctcttgcaggaggtgggctactgca

SEQ ID NO: 84607 - DNA, 691 bp, Homo sapiens
tttgatgtccgaggcaaacagcacattcagatccccaagctctacacctccagtgtgaccaggcacctgcaccacttcaggctcatgcaggactcacagcctttggacckcagctaaaggacttgcttctcttcagcacacggggcttgtttgtgttggggtctgagccctgagcccatggtcaaggagacccccaggtctttctgaacagagacagctggcctgggggcctccctctcactgcgtgcaagaggctgttagggtgcaagactcaaggcgctgagggaggctgtttcaggagggagccccaggagggtggtggagacagaagggggcagcatctgccgaggccctcctgtgtgcctggcaccgtgtggggtttctggcccatatgggctaagtgaccctgcacactcctcttaggagagaggctcagatggagaaattgcagttcaggaaggtgaagcaagctgctagcctgtggccatgttgggatctgggcctcagccttccagccacgaaggcagccaagtgtcatgaagaaggcatcacagaggcaattccaggctgtagtggtgaactttccactctgcatccccgggtgctgtgccctgtgccctgtctaaggtagccctgtgggtttctatatgtttaaattgtccccagcatcaatgatgctctcctgtggatc

SEQ ID NO: 84608 - DNA, 608 bp, Homo sapiens
ttttgtggccaccccaggtgtccagatatacacaggagactgtggctggggacccagatgaaagtcgagagtgtggtgagyacttccctgtccggatcatgtgagggatgggctcggtgtcacagtgtcctgcccagcccacctggccggacctccctctgggccagaacagcggatcatgaggacagtgtgaggaagctgccctcgggccagtcggggtctgaccccagggctccccaggccccgctgggcacacgtagacttactctgctgaaccttaaaggcgattcttgttatcggcatcaacgcctgttcgccttctaccagatacacgtcccacaggcgcagggtgagcccgagagagatctgtggggacagcaggtgtgaaagaacctggtccttccaggctggggctggtggctcgagctgcgcacactggggcttcagtctccagagtcagtgaccttccccatgagggtcgcctgagccctccaggacgctgggtcagacaaggtcttgaagctcctcatggggggcactcatttgagtggggatgtggctcctggagagaggggcttgcccagggcttgaggcttccctgagccctc

SEQ ID NO: 84609 - DNA, 1649 bp, Homo sapiens
gaggcgtctgatttgggctttgggggtcagccgtggactcctgtgggaccctcagcagagacatcctaaagtctcccaacaagctggcgacacaaggagggtgccttggctgaaagctgtgatcacccggccagggtggccatccccaggtctggctgcaggaggtccccggggcagctgttcacttaccctgcagggagtgcctctcactggccagcagctgcaccagtgcccagaatgcatcctcctcaggaagatagaggaggaacaaggcggcgatgtggctcaggtccctgcagtagcccacctcctgcaagagccagagtcaccatggaaggacatcacctgggagggctgaggtcacctgggaggactcatgtcattggagagggcagaggtgactggagaggcttcctctgaaggagaggcttcctctgaaaaagaggcttcctcaggatgcacattcatttcatgacaagagccaagtccatcaggcacttcagcaccttgtccaaaatgtctgctgatagcaccatcctgtgtgcgatgctgccaagctcctgggctttggggcagccccaggaggagggcgtcatttcttgttctgagaagtggtggtcaggcccaggtgacaccaggagtccgggccctgactcctttgtgtctcagcttgaccccttgagaccacccccttccttggaggtttatgccagcggtgagctgacatcctacctcctatatcctggtgggtcacaaatactaactttaaaagaagcaacgacacccccaccagacacccactcctgtcaatatggaaatatggcccgggaacctcactgccgggaatactcaccgggttatactcctcatatgccaggaggatgtggagtagttcccgctgcctaggaaacagagaaagggggctttggtttgttttgtgcagatgttgttaatttcactttgtctacaaagcctaacagcaaatcccatttcaggttcagatgtttcaccagataagcagtgagctcttcagggcctgagactcttgaagaaatgtttcagtaaaatccacatctgtgacatgcaaatagcccagttgtacagtgacttgcctgatccttttcactctgaatgatttttttttttttttcagtttgcacacacgccagttcagtctgtgtgtgtacagttcctccacggttccaaaccaatgtgcagagtctcccggccaccgctccagcccctcctggggcgactccttcatcctccaagtctccagggtggcccctatgcacccagcctctccccgatccgtcagcccctggccacccagactgcttctcagtccctgtggtttggccttttccagaatggcctaggaatgggaatcctackgtggtagcttattgggtctggcttctgtccctcagcaaaatgcatctaggatccacccacgttcgtgcgggcatcaccggctcgttcccttttctcactgggtcttccgtttgaagggaggaccagccttgctctccccattcccgtgttgaaggccgtccccgaaggctccgtgtgtgagtgacgaggagtcaagcagtgaacctggcatgctggtttcatgtggatgtcagtttccaaatcagtgggttcaa

SEQ ID NO: 84610 - DNA, 1386 bp, Homo sapiens
gttgccctcacccgccaccgctcaggccagctgcttcctctgcctcactgaccacccgcccagtccctacgtccctggaccagcccctccacgcatcaggctcttaccttcgcctcccgcgcagtcagaggaggcagctccgtctcactgtaaggcaacccaggcagagctgaggaactgcacggggcctggagcggccccagcctgggtgccgacccccagaaaggactggctctgtccctttccagctcagggctcagcccaggagaaggcacagggaagggaggacaagggccttcctgtggggctgactcccaggaggggcaggacctgggagaagaaggagtgtagggacagcctggccggggttactggggcccctggcgtggggggcggtcaggctgcccaatggggctgcccgtcctggactcgaggtggtgctttctgctggagctgagaaaggttagccctgagatgggatgggggccgcccagggtgggcgaccgggccctgacaggagtccctcagggagtgaccacatccccccgccagggtcaagggagcctgccctgagacctgcccggtgtactctggctgcaccaggggcccaccccacttgacagccccaaggcccttgcaggttctgacctcccagcatcyacctgcctctccctgcacccgagccacacaccctgcgtttcagaagtggcaccgctcgtcagctccctcccgccctacctccccagggatcctctgtctctccatcctgtgatccctgagggatgggcttctggctgggctcctcttacccggccccagatcccttcccagcaccagacccaggtctttagccgcgagccctgctgcctccctggcctcaccgtgagatgcccagaacggggccctgcccatcttctcccccgttctcctagggctacagcccccattgtcaccatgccttttcccctcacgggacagtgagggctgtagctctaggggaatgggggagaacaggggcaggtgggccctcagagacctgctggacaacagccctgaggctgggccaggcgtcccctcaccctgtggccataacccttgcatctcaccggggttgtctccaagtagacagggccagaccctcaggctgccccgctcctcttgtgctcacttgccgacagaactgctgagtgcccaggggcctgacctagcccagtctccattcccaccggctccctagatgggccccacacctctggcctaacaacctcgggctggacctgcaggggagtcagggaggagttctgtccctggaaaggaggttgacccgacctggtgagacatgtcctgcgtcagaaaggcctttctaaaagcaaacccatccctgag

SEQ ID NO: 84611 - DNA, 1386 bp, Homo sapiens
gttgccctcacccgccaccgctcaggccagctgcttcctctgcctcactgaccacccgcccagtccctacgtccctggaccagcccctccacgcatcaggctcttaccttcgcctcccgcgcagtcagaggaggcagctccgtctcactgtaaggcaacccaggcagagctgaggaactgcacggggcctggagcggccccagcctgggtgccgacccccagaaaggactggctctgtccctttccagctcagggctcagcccaggagaaggcacagggaagggaggacaagggccttcctgtggggctgactcccaggaggggcaggacctgggagaagaaggagtgtagggacagcctggccggggttactggggcccctggcgtggggggcggtcaggctgcccaatggggctgcccgtcctggactcgaggtggtgctttctgctggagctgagaaaggttagccctgagatgggatgggggccgcccagggtgggcgaccgggccctgacaggagtccctcagggagtgaccacatccccccgccagggtcaagggagcctgccctgagacctgcccggtgtactctggctgcaccaggggcccaccccacttgacagccccaaggcccttgcaggttctgacctcccagcatctacctgcctctccctgcacccgagccacacaccctgcgtttcagaagtggcaccgctcgtcagctccctcccgccctacctccccagggatcctctgtctctccatcctgtgatccctgagggatgggcttctggctgggctcctcttacccggccccagatcccttcccagcaccagacccaggtctttagccgcgagccctgctgcctccctggcctcaccgtgagatgcccagaacggggccctgcccatcttctcccccgttctcctagggctacagcccccattgtcaccatgccttttcccctcacgggacagtgagggctgtagctctaggggaatgggggagaacaggggcaggtgggccctcagagacctgctggacaacagccctgaggctgggccaggcgtcccctcaccctgtggccataacccttgcatctcaccggggttgtctccaagtagacagggccagaccctcaggctgccccgctcctcttgtgctcacttgccgacagaactgctgagygcccaggggcctgacctagcccagtctccattcccaccggctccctagatgggccccacacctctggcctaacaacctcgggctggacctgcaggggagtcagggaggagttctgtccctggaaaggaggttgacccgacctggtgagacatgtcctgcgtcagaaaggcctttctaaaagcaaacccatccctgag

SEQ ID NO: 84612 - DNA, 1336 bp, Homo sapiens
atggaccgtccctcctgggaatactcgaggcaaaaggagggcgaggcctcaagaggaccacgcagagcaagaaatacctggggagaaccctagtgcccggacccctttgaacacaagggaagatagtctcccctcagccagccctccagggctccttcattttccacagctgcccaagggcagcaggctcccccggacaagggaccatgtgtgttcagtggggcccacagcgaccatcaggacccagcttagggcacagaggtgttctgaggaccgtcagtggatctgtaccagtggctctataccagtggctctgccaggaccaggctctgccccatcgggatgggaaacctgggcagatttgggatctagggcagggaggtcacagggttcaggcctgaattccagcacagcacacggcagggctgagagcaaaactcagggtcatgtccggattcccaggccggttactgcctctctgaccccagacgtctcatctgtcgaatggggacatttgggaacagcacccactctacgaagccaccatggagacgaaagagccaatcgtctacacgggcagtgtagaacgggcgcctggtgagtgctcagggatgaccctcctcggtagctgccccacagaggccaacaccgcccgcaccgtagccactgcccccaagtccgcctggagggaagagagcaggtcacgctcacctgattctgatgaatcagctggcctgggtcatgcctctcagggagaaaacctttgagtccacagagctgctcacagataccactgcctgtgtgtaactgctgtagaccactgaggcagaccagagagcagataggtgctaagcaccagtgacattctgaggtcatggcacgaatcacagtggggccttgcccgggtcagcagcrcccagagtcagggtcctccgctgcctgaggtgtcaacatgcctgcctgcaatgtgtttgtgcacgtgcgtgcacatgtgtatgtgggtaaacacatctgtgcacgtgtgtgctgcttctctggccaggcccggctgccccactcatgtgtgcacccagttcctcatcactgtcacccccgaggcccagggccagcatcagagcatccatggctgctccctaacctcagccctccctgcccagggtggtcctgggatacacatagcggtggagggaagtgactgctgctgttggatctcagaatacaaaagctagtactattacctaatggtctttttagtgtctctaatggtatcgctttttcatttctgatattttaactgggtatttctctccatgacccttggatattctagctagag

SEQ ID NO: 84613 - DNA, 1336 bp, Homo sapiens
atggaccgtccctcctgggaatactcgaggcaaaaggagggcgaggcctcaagaggaccacgcagagcaagaaatacctggggagaaccctagtgcccggacccctttgaacacaagggaagatagtctcccctcagccagccctccagggctccttcattttccacagctgcccaagggcagcaggctcccccggacaagggaccatgtgtgttcagtggggcccacagcgaccatcaggacccagcttagggcacagaggtgttctgaggaccgtcagtggatctgtaccagtggctctataccagtggctctgccaggaccaggctctgccccatcgggatgggaaacctgggcagatttgggatctagggcagggaggtcacagggttcaggcctgaattccagcacagcacacggcagggctgagagcaaaactcagggtcatgtccggattcccaggccggttactgcctctctgaccccagacgtctcatctgtcgaatggggacatttgggaacagcacccactctacgaagccaccatggagacgaaagagccaatcgtctacacgggcagtgtagaacgggcgcctggtgagtgctcagggatgaccctcctcggtagctgccccacagaggccaacaccgcccgcaccgtagccactgcccccaagtccgcctggagggaagagagcaggtcacgctcacctgattctgatgaatcagctggcctgggtcatgcctctcagggagaaaacctttgagtccacagagctgctcacagataccactgcctgtgtgtaactgctgtagaccactgaggcagaccagagagcagataggtgctaagcaccagtgacattctgaggtcatggcacgaatcacagtggggccttgcccgggtcagcagcacccagagtcagggtcctccgctgcctgaggygtcaacatgcctgcctgcaatgtgtttgtgcacgtgcgtgcacatgtgtatgtgggtaaacacatctgtgcacgtgtgtgctgcttctctggccaggcccggctgccccactcatgtgtgcacccagttcctcatcactgtcacccccgaggcccagggccagcatcagagcatccatggctgctccctaacctcagccctccctgcccagggtggtcctgggatacacatagcggtggagggaagtgactgctgctgttggatctcagaatacaaaagctagtactattacctaatggtctttttagtgtctctaatggtatcgctttttcatttctgatattttaactgggtatttctctccatgacccttggatattctagctagag

SEQ ID NO: 84614 - DNA, 1306 bp, Homo sapiens
gggattgtacagtgagtcctctgcactcccctcacccctaaagcacctgtctcagctcagggatgggtttgcttttagaaaggcctttctgacgcaggacatgtctcaccaggtcgggtcaacctcctttccagggacagaactcctccctgactcccctgcaggtccagcccgaggttgttaggccagaggtgtggggcccatctagggagccggtgggaatggagactgggctaggtcaggcccctgggcgctcagcagttctgtcggcaagtgagcacaagaggagcggggcagcctgagggtctggccctgtctacctggagacaaccccggtgagatgcaagggttatggccacagggtgaggggacgcctggcccagcctcagggctgttgtccagcaggtctctgagggcccacctgcccctgttctcccccattcccctagagctacagccctcactgtcccgtgaggggaaaaggcatggtgacaatgggggctgtagccctaggagaacgggggagaagatgggcagggccccgttctgggcatctcacggtgaggccagggaggcagcagggctcgcggctaaagacctgggtctggtgctgggaagggatctggggccgggtaagaggagcccagccaggagcccatccctcagggatcacaggatggagagacagaggatccctggggaggtagggcgggagggagctgacgagcggtgccacttctgaaacgcagggtgtgtggctcgggtgcagggagaggcaggtggatgctgggaggtcagaacctgcaagggccttggggctgtcaagtggggtgggcccctggtgcagccagagtacaccgggcaggtctcagggcaggctcccttgaccctggcggggggatgtggtcactccctgagggactcctgtcagggcccggtcgcccaccctgggcggcccccatcccatctcagggctaacctttctcagctccagcagaaagcaccacctcgagtccaggacgggcagccccaytgggcagcctgaccgccccccacgccaggggccccagtaaccccggccaggctgtccctacactccttcttctcccaggtcctgcccctcctgggagtcagccccacaggaaggcccttgtcctcccttccctgtgccttctcctgggctgagccctgagctggaaagggacagagccagtcctttctgggggtcggcacccaggctggggccgctccaggccccgtgcagttcctcagctctgcctgggttgccttacagtgagacggagct

SEQ ID NO: 84615 - DNA, 1204 bp, Homo sapiens
ttatgaatgtcaatattgacatgatcttgtatccttatgcccacactgggagaggtctgattgtccccatgttcctggtgtggaaccacatggaagaggcctatgttatcccaacagtgcagaagcacagcctgagtctcttctttggctgagccaagggcgtgctggagaggcctgacagaagaaggagcggcccttgtgaccagtgcccttttggttcacaaggaacttctcctcttgttgaagtgacttggctgagcttgctacttctgctttgagagtcaaatatcaggatcaagactttaattatccccaatttacagatgatgaaaccatattgggcaggaaagaaagtcaccccaggagagcaagttggacctgagcactggctgaggacaaaggggaatgataatttgggatgtaacttgttaaggggtctcacaagtgttcttgtgatccaggtgtcgagaggatacagcagaaaggttgccagggagatgagggtagggtacaccgcaagagtgggagaaattaaagagaacacgcaacaaagccttgggacactgggagggggatggaccacccagttttgtgctatgggagaagagagcaagaaaaggaatctgtgttaaatcccgacagcctgcatgagaagsaaatgcccttcattttcttcatcagcggcgagactggcatccctgcagctttgggagaccatgctagtgtagatgccagctcacgccagcgggcctgactgggagaccttgggctggggttctggtctggggctcctaggcctgatgggaggagagttcagccccaggtttcctgtacttcagctcatatccacacaatggtaattattgaaatgagagactcaaaagaagatggaacgtgaacttttttgttgtcccatgtggacacctgtgttcggtttccagttctacctttgctgtctgtgtgttcttaagtaactcacttaaacctttctgagtctcattttcttcatttataaaataaaagacgtaacatttatgtcagatattgtcctgaggattaaatgggagaatgaacaagcctcttctgcattcccctggcatccagtgggtggaggccagagaagctgctaaacatcctgccaggtgcaggacagcccccatcacaaagaattgaccggatcctgatgtcagtaaggcagaattga

SEQ ID NO: 84616 - DNA, 643 bp, Homo sapiens
ctgctgggatttttgagctggtggaagtggttggaaatggcacctatggacaagtctataaggtcggtgtgggcgccttctttgtttcccgtggcatgtggaaacttcttattgggggrcgaggagagggtgataaacatgctgctgactggaggccacgccgcttggccaaagttgggagaggggtttctttcgccttgcagtccctctgtttttgcacaccgagtttatattcagactggccttaaaagacctcatttcctggctttgagataaggaaataagctacactcttaggcatgcactttacttcgataaaatggaaaagcattttttaaaaataagacaacctgaattttttctttttttccccaaatccggccttctgagtttgtgtgtaaattgaaatacagtggaggcgggccttgcctctgacgatcctaaaccactgctttggccatcgtgaaaattgtcatcatgtttcagcctccactcagtgcttgccagttgctcaaggtggggagtttggcgttacctgggaatactttataactgtggttgtcatcctttctattgatggatacgtattttggggaagcagggaggagtgtgtgtttgggcaacagcagcaggaagaattaca

SEQ ID NO: 84617 - DNA, 1206 bp, Homo sapiens
agggcatgaaagtttcaagaaaaacagtaatgtttactgagcctaatcatggcttttatcttttactgcatattcagaagcaaattaggggcaatgtcacaaagatacatggcagccctgaagataagtaacagtttccgtctacagatgccaaattaaggtcagacaaaaaataaaggggaagcaaccaaatatgaacataatctctgttcactccaaaaacataaaagtattctcagaccactaaacctccccaaggataaaactggttaggagtgattttccaactggaagagaaggaaaaatgcatttgctgctgtctgttagagcaaatttctttcttcccatgtaacaaagtccagtgttaagagctaaaaattaaactgtagtgaatacgagaggaagaaacagtggcaaccctggaaatgaccttgtagtactcagcattaaaggaaatcctgtggaaaacgaggtcctgatgatctctgagagccccagggagaggggtgttgggctaacatggggtgccagcacattgcaaagctcagtgactcacagatgtggaagtgggagcagtaactacatccgctggaaggaagaaaacaaatcagggctttcaggatccacagacctcttttttttttttttttttttagacggagtcttgctctgtcacccaggctggagtgcagtggcgtgatctcagctcactgaaacctcagcgtcccaggttcaagcaattctactacctyagctgagtaggagagattataggcatgtaccaccatgctcggctagtttttgtgtttttagtagagatggggtttcaccatgttggtcaggctggtcttgaattcctgacctcaggtggtccacctgcctcggcctcccaaagtgctgggattacaggcatgagtcaccgtgcccggtcacagacctcttaacaaacatatcaagctctgatataggaaaacaaccatgatccactgccaccctacagggcaagttctcaagaacagggatggtactactcctagggatactggacacgaagccttccaaatcatacttgaagacacggacagtcacagaagcctgagctcggcttgttcgtttcttactctctacaattactaagatcctgaaatcaaaaccctaacacttcctttcctaattatctttctacactaacacatgagaagatca

SEQ ID NO: 84618 - DNA, 675 bp, Homo sapiens
ggctgcaccgagcgccagccttraaataagtaaaaccgatgcccttccgcccctaacctcaaaagctgcttttgcgtctcgatgttattgagagccggctctgcggtcagctctgagctaggcgctgtgagaacgctcagtaagacagtgtctcgtctggaaatgtacaggcgagattcaaaccgagaaactgccaaaggttgtgtgcagggcagatcttaggataccggagacccagcccgttggcttgacctcaaaactcgggggcttttcggcccatgctgtcccttaattcctcctcctttgctgacgctgtgggtgcgcatcaaagcctaaacttcactagctcccttgcacacaagaacactaaccctaacttgaccagttatttatttttcacttcaagattcttccattgatacttacgtttccctgataccgtccaagtgctgagggcggggatggactgtgtgatttgcatctgccaaatgcagaaaatttggaaggtcagttggtacacttttccgacctagatttcctgatggatgatgctgaagagtggcaagttgctgccaaaaacaaacaaaaaaacctaccatgatttattaatattatttttctaacccctgaatatgggttattgttcatctctgcccgctttccccactccctagt

SEQ ID NO: 84619 - DNA, 591 bp, Homo sapiens
catggcctgtggtttcgggagcagaccctgacttactgtgaacattacctgagagtcattaggtttttcttgccctggacagayatctaatgcagcatgcatgtttctttctgtagacaatgggagcagccgcacattgcactccagaacagagacgaccccgtcgcccagcaacgatactgggaatggacacccagaatatattgcatacgcgcttgtccctgtgttctttatcatgggtctctttggcgtcctcatttgccacctgcttaagaagaaaggctatcgttgtacaacagaagcagagcaagatatcgaagaggaaaaggttgaaaagataggtaaataaccagggctctttttattgggggtgaggagacagtttttaaatatgaaaccagtgatatatgctttccatctctctgaggcagaatgatccattttagtggcaggtggtgcagtgtagtgtaagtgcagattgtgcagtaatcacacctagtttgaaaacttgctttcattactgaatacctgccagatagggcaccctttcttgccctgtggccttagacaagttattgtgtgctctgaatc

SEQ ID NO: 84620 - DNA, 976 bp, Homo sapiens
catgtgtgtacatgtgggtatgtacctgtacatgcatgcatgtgggtgtgtgtgtgtgtgtcccacatgccacagggtgagtcctagagactcactcagcaaaccaaggggatgtttactaattattcctgagagataaagatgagttacaggaattcatgaataaccgagaaacacacatctacaaaaagcaagctttaataatgattttaatatatcttatcttcctggaattattttgtaatttgacctttcattttataggtggtcatcattttacaggtgattgatttttctcaggcagtgatttaaacgtttgattttaaaaagctcactcctgtatgtgctgatagtgctgtccctgttttaatacctattggtgttgttttccctcttttttatgtttatagttttgaagtatggtaaatgttggcagagtaagtttgggtggcaaattactttatataatcagccatccatatccatcagatctgcacctatggatttaaccaatcaaggataaaataaaattagaaaaaaaaaatggatggttgcatcyttctggacatgtgcagacttttttcttgtcattatttcccatataaaacagcataacaactatttacataggatttccattgtattaggtattataagtaacctaaagatgacttaaagtgtatgggggagggggagatgtgtttcatatcaggaacctgagcatctgtggattttggtgtctgcacggatctggggaacatccccgcatggatactgaggactactgtattttgtatacaataaaatacaaaattgtatatgggattgtatatccaaacctagtatctgaaacgacattatttttctgaatcctcatttattagccaaaagggaaattaactgacattactggattatacttaaatgtgttttacagagggaactgtcttctttattgtgcaggagaaattactat

SEQ ID NO: 84621 - DNA, 683 bp, Homo sapiens
gttaatttgcttaggataatggcctaatctctattgtgacaaaggacatgattttgttcctttttatggctgcatagttttttagtccaagtgtcttccagcagtcataaggttggaatttggaccaagtcactgacgttcttcccatctctgttagtctgcaattctgtgattccattatcagaaggtaatggaaaacatttttttttctttaatgataaaaatatcaaggtgtttgctctagatatgagtgtcttacttgtgggaactttaccactttttattattttgttccttttctctgctggaaacgcgtttgctgtcaatattatgccatatatcgctgtgccaacttaagttgccgaagggaaaggctttgttctcaccgctgctsatttgtctctggttaaatagtttgccctctagcatttgtatatgattgctagatggccggatttaggaagtgcgtttatagcttctagtgaatgactttctgagtgaacaaatacagagagaccctaagtgtcatctttaattattaattaggaagtgattaatattgacttaaaaagtgaatcctctgagccaattgtgaaggaaggaaggtgtgtttagctctctctgccaccgttaccccagagcaccaaccattccaagtgaggctggcggataaacagctgctc

SEQ ID NO: 84622 - DNA, 1475 bp, Homo sapiens
  misc_feature (1)...(1475): n = A,T,C or G
cctgcacttctgctccccacctcctcacctctgcaggtgcttcaacttcaggaaccaactcacttcttccagaatagcttcctaggcccccttccctgctctatgtcctcatcgtccctgttacttctccatcacagcagasaggcttctgtgcgccgaattcctagggtctgccttaccttagactttaagcttcatagggacaggagccacgttgctcaccagcagctgactgaatacctgccacgaggtcgggacgtgttgtttactcaatgcatgggagaactcagatggcctctccctgcttagcacacaaattccaaatgccgctagcacccaaggccttcccagccttgcctcagtctgctttccagtctcctcttccaactctcttcttcttcctcccctgtctacccgcactttagtaactgaactaatcctgtgtgccttcagtgctgcagaatatttgcccccagggatttctttccagaaatgcctttctcctctcactttctatctcccaatcagatagtggcccagcttgggacttgaccttcaaggccaactcagcatccctcctgtctctctccatccctgatcatcaggtataattgactgctttctcctccacttctcccgctagcaatactcacagtgaatgtcatggtaaggtgtttatttgccactgatgggcgggtagtagaggaacaatggaattttacattttaggaggcttgttccttataattatcttagctcttttataaagcactgataggtaacaaaattacaggtttgaactcagaaagcttgcaaagtttttgtttttgttttgtttttaggataactttagggagatttctaagtattgtataggttcagttaaccaacataacatgttttttaggagtataaacattatagagatgtctgccgactaattagtatgtcgattgtagttttaatcgtgaaaattggggtgggaacaggtaaaggcagagctaactggtttttnnnnnnnnnnnnnnnnnnnnnnnnnnnnnnnnnnnnnnnnnnnnnnnnnnnnnnnnnnnnnnnnnnnnnnnnnnnnnnnnnnnnnnnnnnnnnnnnnnnngggtttctttgaaacttgctgaaaggtatcatgtacagcttctatacatttaggtgttttttgtttttttttgagatagggtctcactccatcaccgaagctggagggtaatggtgagactatggctcactgcagccttgacctcctgggctcaagcgatccccacctgagtagctgggactacaggcatgtcccatcacacctggctaattttttgtattttttggtgagatggagttttgccatgttgctcaggctggtcttgaactcttgagctcaagcaatccattcacctcgaccttccaaatgctgggattacaggtgtgagccaccaagcgttggcctacacatttagttttta

SEQ ID NO: 84623 - DNA, 1475 bp, Homo sapiens
  misc_feature (1)...(1475): n = A,T,C or G
cctgcacttctgctccccacctcctcacctctgcaggtgcttcaacttcaggaaccaactcacttcttccagaatagcttcctaggcccccttccctgctctatgtcctcatcgtccctgttacttctccatcacagcagagaggcttctgtgcgccgaattcctagggtctgccttaccytagactttaagcttcatagggacaggagccacgttgctcaccagcagctgactgaatacctgccacgaggtcgggacgtgttgtttactcaatgcatgggagaactcagatggcctctccctgcttagcacacaaattccaaatgccgctagcacccaaggccttcccagccttgcctcagtctgctttccagtctcctcttccaactctcttcttcttcctcccctgtctacccgcactttagtaactgaactaatcctgtgtgccttcagtgctgcagaatatttgcccccagggatttctttccagaaatgcctttctcctctcactttctatctcccaatcagatagtggcccagcttgggacttgaccttcaaggccaactcagcatccctcctgtctctctccatccctgatcatcaggtataattgactgctttctcctccacttctcccgctagcaatactcacagtgaatgtcatggtaaggtgtttatttgccactgatgggcgggtagtagaggaacaatggaattttacattttaggaggcttgttccttataattatcttagctcttttataaagcactgataggtaacaaaattacaggtttgaactcagaaagcttgcaaagtttttgtttttgttttgtttttaggataactttagggagatttctaagtattgtataggttcagttaaccaacataacatgttttttaggagtataaacattatagagatgtctgccgactaattagtatgtcgattgtagttttaatcgtgaaaattggggtgggaacaggtaaaggcagagctaactggtttttnnnnnnnnnnnnnnnnnnnnnnnnnnnnnnnnnnnnnnnnnnnnnnnnnnnnnnnnnnnnnnnnnnnnnnnnnnnnnnnnnnnnnnnnnnnnnnnnnnnngggtttctttgaaacttgctgaaaggtatcatgtacagcttctatacatttaggtgttttttgtttttttttgagatagggtctcactccatcaccgaagctggagggtaatggtgagactatggctcactgcagccttgacctcctgggctcaagcgatccccacctgagtagctgggactacaggcatgtcccatcacacctggctaattttttgtattttttggtgagatggagttttgccatgttgctcaggctggtcttgaactcttgagctcaagcaatccattcacctcgaccttccaaatgctgggattacaggtgtgagccaccaagcgttggcctacacatttagttttta

SEQ ID NO: 84624 - DNA, 746 bp, Homo sapiens
atccaataaggtaggtcctgttattccccttgtataaatgaagacactgaggtcaagaaacttgtccatggtctcacaagtgtgcggtagagtccagattaaaacccagccagcccagcatcctgctcataaaaccctcatgctgagaactgctgaactgcatttttttttttttttttttgagacagagtctcactctctcactcaggctgaagtgcagtggtgcgatctcagctcactgcaacctctgcctcccaggttcaagcgattctcctgcctcagcctcctgagtagctgggactacaggtgcatgccaccatgcccagctaatgagaactgctttttcttgcactcaggcagaagtgcctcagcctagcaagcttccctaggtgcccacccaccccagctgccaatgggaaccgcagtccaatatttcacatttcggttagatgtctcaaaatttgtttagcactttccagagcagtccacaaaatgccacttgccttgacaggcctgtgttctatatgcaatggcaccacagaatttagttaccatccactttgcctccatccmgtttgggatcttcctcactccgtgagacacaaggctcctttctcctgcctccagccggcccaccctcagaacagggtacccctggagccaaattgttgaggcaggagctccagatgggtagaaatgggatagaggagaaggagaggctgagacagggactttgagatgcactg

SEQ ID NO: 84625 - DNA, 1024 bp, Homo sapiens
tcttacatgagtcactgagagatgacttctttgtcctggcagagccctgattccaccagccttggcagccctttctcagcattctcagatgggattgaataaacactctggttttatttagaagtcactctcatttagtaaccaacgagctgctgggggaaatcacgaaatgtaacagaaatggccatttctttttatgttttattttttattatttttttgagacagggtctcactctggcacccaggccagagtgcagtggtgaccattgctcactgcagccattgtgcccagaaatagccatttctaaaagagggtaacaatgattttcaacttttgtagttcataatttcctctgtttcttttttycccccttttcttggcagcagtcttatgtacatttgcatgatgtgggtaggaaagccagggaggttgccaagagagctagctcagttttactgaaaatttatttcctggaatttttttttttacaagataagataagtgataaaagatatgtttaaatggaggtgatactgcttgtattcagttctttgctaagcccagtggtcgtttaagctaaagcatttaatgccaatggaaagactcatgctgcactaggtgctattgtaacccatgcttggcagtcaagattaactcagttgaaagttcttcacagtcattatccagaccagatccagaattttaaatctgataagacacctcttatgtgaatctgtcctagcaataagtgacattagaattttcaaatatctgccccacatccttcgaaatggcttttaaaacaacaaatacagatgatatattctattttctctggcacaatgagttttccaacattccttctaagttacaaggctttccacttcctttactacttaatgacttctttttttctgactaacattttaaaataagaaattagattgcaaaagaaatattaaacatcaagtaactaaatgtgtctcaatgattttggcaatcacacagacttaacatgca

SEQ ID NO: 84626 - DNA, 1023 bp, Homo sapiens
catatgtgtttccctcctctagtgtgagggcagtgacaaggtgtcaccttgcagtgatctctgatttggggctttcagcactgcctgaggactgtcctgatctctagctggggcaaggtccggagaccaggctggcaggagggatggaaacttgccatttggggcagagtgagccagggacatgggggaggagggatcaggtgtgtgtgtgtgggagccagtgtgtgaccagcagggccacctagggacctgggaacatcagcccacctcatccccactctccctctcctgattgtcccctcccctccaggtaagagttggggatcagaaggtacaatgctgtccagaggctggggcttagaataacctcattagaataaggttggagtctgtctttgactgtgtgactttgggcacattacttcttgttgcttctgtttccttctccataaaatggaaatataaatatttactgcacaaattktttaaggataaaacaaactaatctaagaaaagatatcagcacagaacttgtgtagtagtctgtttggtttgccatgactaagtaccacagaccgggtggtttaaaccacatttattttctcaccgttctggtggctagaagtccaagatcaaggtgctgtggaattcggtttcaggagagagctcttttcctggattgtagatggctgtcttctgcctgtgtactccccgggcctttcctctgctcttgaggagagagggagctctctggtgtctcttcctcttcttataaggacactggctctattggatcagggcgtcaccctcgtgacctcatttaaccttaatcaccttcttaaaggccctgtctccaaatacagtcacattgagggttggggctttaacatatgaatttgtgtgtgtgtgtttgggggcggggacatgagtcagtccataatagcctggaaaaagcatacactcaacaactggtaattattattatcacaagatttgaaatcagaagacctggatctaagtcct

SEQ ID NO: 84627 - DNA, 778 bp, Homo sapiens
gtgaaatgtctaatcctttaaaacacaaatcttcaccattgatcttaatatcctgctgcagtgagttccccaggtcaattgtgtgtagtgggggaaaaaagtaccttcttttatccatttaaacatgcttcctttttatctcatcttgtcctcttgttcttccccaagtaaagcgatttccattctgtgggtacctacacacagagacctaagttgagacaataattttcctttgagctggtcacccagaaggcctcgtgcgcacygggacatggagcagtggattttagttggtgacttaaaggtggtggaacactccattctaattagtcacagatttagttccaagctttaaaaaaaaaatagtctctgcaagagactaattctgcaagaggcaggccaggcatggtggctcatgcctgtaatctcagcattttgggaggccaaggcggatggatcacctgaggtcgggagttcgagaccagggaacttcttttgagacagggtctcactctgtcacccaggctggagtgcagtggcgcattctctgctcactgacacctccacttctcaggtttaagcaattctcctgcctcagcctcctaagtagctaggattacaggtgcctgccaccacacccagctaatttctggtactatgttcactctctgcatgatgggataattcatacaccaaacctcagtgacacacaatttacccatgtaacaaacctgcacacataccccacgaacctaaaagtttttttaaaaaccccaaa

SEQ ID NO: 84628 - DNA, 543 bp, Homo sapiens
tgaacatagttatatacatgtaacatatatatttttatatatagctatattaatatgtgcatacatatatgtattgcatgcacacatatgtgtatatgtatatatacacatatacacacacatactgcagaaagccagaaaggtgcccttagagagactggaagtgatccacatcttgatctaggtggtaattacccagatagatacatatgcaaaaacttatcaggctgtatacttaagatttgtatattctgctgcatctaagttatatctcaatttaaaagtaccaatggtcaggsttactttcagagactctggatttaaatggtctgggacggacctcaggcatcatgatttctaaagatccccagttagttttattaatagcacatagccagggttgagaaacagtgggagcctcacaatatatcttgtagtggctggctagtgaccggtctatgcctggcctctgaaaacaagactggcttgcttctgtggactgaataaactctggggattatagggcaatttgtggagtggggg

SEQ ID NO: 84629 - DNA, 629 bp, Homo sapiens
tcacatactcttgggggttttggcaatcagctggaacatgttcttccagccacttagttgctgcttggagcactctcctcctttcatctgtgttaaagaggtacataagcaaccggtggcaatcagcccaggtggggttgtgggtctggataatagtttggagcaaatcaattatagcttgaggcttttcggtataggatggggtattgtttttccaattgaggagattggtagagrtgaagggctggtacacaaaggcatgcctttccaccatatgcccgtcctcatctaccctagtataccattgctctctcagaggcatttgtatcccagttctaggcctcaaacgggctgccaagggaggggtttctcccgaggtctcgcatcctttcttttctactctgggtggcctaggggtatataggccttgtggaggccttccttcttgatgaaagggtgggggggcactagcattgtttctcttatgttgggtcggacagaactttaggagcctactcccttcagtgggtggagcggaattcttccttggctgtctgtccctttgccactagtacttctacgtctgtcctcttaaccacggtgcaggggtctaaaaccagctgtaacca

SEQ ID NO: 84630 - DNA, 629 bp, Homo sapiens
tcacatactcttgggggttttggcaatcagctggaacatgttcttccagccacttagttgctgcttggagcactctcctcctttcatctgtgttaaagaggtacataagcaaccggtggcaatcagcccaggtggggttgtgggtctggataatagtttggagcaaatcaattatagcttgaggcttttcggtataggatggggtattgtttttccaattgaggagattggtagaggtgaagggctggtacacaaaggcatgcctttccaccatatgcccgtcctcatctaccctagtataccattgctctctcagaggcatttgtatcccagttctaggcctcaaacgggctgccaagggaggggtttctcccgaggtctcgcatcctttcttttctactctgggtggcctaggggtatataggccttgtggaggccttccttcttgatgaaagggtgggggggyactagcattgtttctcttatgttgggtcggacagaactttaggagcctactcccttcagtgggtggagcggaattcttccttggctgtctgtccctttgccactagtacttctacgtctgtcctcttaaccacggtgcaggggtctaaaaccagctgtaacca

SEQ ID NO: 84631 - DNA, 629 bp, Homo sapiens
tcacatactcttgggggttttggcaatcagctggaacatgttcttccagccacttagttgctgcttggagcactctcctcctttcatctgtgttaaagaggtacataagcaaccggtggcaatcagcccaggtggggttgtgggtctggataatagtttggagcaaatcaattatagcttgaggcttttcggtataggatggggtattgtttttccaattgaggagattggtagaggtgaagggctggtacacaaaggcatgcctttccaccatatgcccgtcctcatctaccctagtataccattgctctctcagaggcatttgtatcccagttctaggcctcaaacgggctgccaagggaggggtttctcccgaggtctcgcatcctttcttttctactctgggtggcctaggggtatataggccttgtggaggccttccttcttgatgaaagggtgggggggcactagcattgtttctcttatgttgggtcggacagaactttaggagcctactcccttcagtgggtggagcggaattcttcsttggctgtctgtccctttgccactagtacttctacgtctgtcctcttaaccacggtgcaggggtctaaaaccagctgtaacca

SEQ ID NO: 84632 - DNA, 618 bp, Homo sapiens
agactataatagattttttgtttttacattaaattatgcatgatctagaaattcaaacagaaattaatagttcctatattgtaatggcttcacagtaccccaaaacagaaatgtcactgctttttactcttggcagacttcttgycatcaagaacttagaatttcttttgtttggtttaaatcatcagggtatgatccatgcgggttcttcaagacatgctcagctactaaaacctatcagtctgcagactgtttccaagaagatattttacaggtaaatgtaaaacctcatcgctttgtcaatcttatgaactcttgcagaattctgttttacacagccctctcacctgactgacttttctacttaatccttgctggaacagagttgagccatcactcagtcagagataacactgcacttctagcagcctcccagaccctaatctaattttctgtcaccctttgaatctctaataggactattttattaggcatctctctttcaaacttttgactcagtctggacagactctcttcaggagctgctcttgattttcaaatttttgctgacattgtaatggttataaaaaagaagcctcttactatgtactacagtgc

SEQ ID NO: 84633 - DNA, 618 bp, Homo sapiens
agactataatagattttttgtttttacattaaattatgcatgatctagaaattcaaacagaaattaatagttcctatattgtaatggcttcacagtaccccaaaacagaaatgtcactgctttttactcttggcagacttcttgtcatcaagaacttagaatttcttttgtttggtttaaatcatcagrgtatgatccatgcgggttcttcaagacatgctcagctactaaaacctatcagtctgcagactgtttccaagaagatattttacaggtaaatgtaaaacctcatcgctttgtcaatcttatgaactcttgcagaattctgttttacacagccctctcacctgactgacttttctacttaatccttgctggaacagagttgagccatcactcagtcagagataacactgcacttctagcagcctcccagaccctaatctaattttctgtcaccctttgaatctctaataggactattttattaggcatctctctttcaaacttttgactcagtctggacagactctcttcaggagctgctcttgattttcaaatttttgctgacattgtaatggttataaaaaagaagcctcttactatgtactacagtgc

SEQ ID NO: 84634 - DNA, 733 bp, Homo sapiens
tgaatgaaactttcactcatgagtatgcaggaagtcactttcaattttgcttgtttccccagccctagcatgtgctcaatatagtaagtgtccaatatatatctttgaacacatagctattgtttcaggtgtttgggaaataggttatgctagaaaacttactaacttattcagttaatatttgctgcatgacatccacattccaagtactgtccttgttctgagcatacaatgaggagttaagcagacttaatatctgtccttacaaagaccaacaataaagaaataattatgaaaattaacaccttaattacaattgtgatgaattttcaaaagaaaaatagaaggcactagaagtacaaacagkgcagaagaaacattataaccgcttgcctttggggatttaggattttgtggataaggctctctagaatggtggtaactatctcattttgaatgcaacttatatttttggagtatttactacgtatggccctgggctagtcactgtggggtgcagaaatgactaagatgcagcccctgaatttaataacttcaaaatcccatataaatatgtgttttaactataatccaaagacaaaattatagctatatagaagagatatcgtaagtccactcatagagttcagaggatgaaaagtctcttatagttgaactgatccaagagctttattgaagacagagggatttgtaatgggcataaaagaatgca

SEQ ID NO: 84635 - DNA, 733 bp, Homo sapiens
tgaatgaaactttcactcatgagtatgcaggaagtcactttcaattttgcttgtttccccagccctagcatgtgctcaatatagtaagtgtccaatatatatctttgaacacatagctattgtttcaggtgtttgggaaataggttatgctagaaaacttactaacttattcagttaatatttgctgcatgacatccacattccaagtactgtccttgttctgagcatacaatgaggagttaagcagacttaatatctgtccttacaaagaccaacaataaagaaataattatgaaaattaacaccttaattacaattgtgatgaattttcaaaagaaaaatagaaggcactagaagtacaaacagtgcagaagaaacattataaccrcttgcctttggggatttaggattttgtggataaggctctctagaatggtggtaactatctcattttgaatgcaacttatatttttggagtatttactacgtatggccctgggctagtcactgtggggtgcagaaatgactaagatgcagcccctgaatttaataacttcaaaatcccatataaatatgtgttttaactataatccaaagacaaaattatagctatatagaagagatatcgtaagtccactcatagagttcagaggatgaaaagtctcttatagttgaactgatccaagagctttattgaagacagagggatttgtaatgggcataaaagaatgca

SEQ ID NO: 84636 - DNA, 3752 bp, Homo sapiens
ctgggatagtggcaacgggaaacttcatgtttcaaggagggcctattgtgactaaggcatactaccacttttctgtggagaagacacgaacccggtctgctttttcccttggaagaggtagtagaaactaaaatatacctccctctgctgccctgttccactgtgactgcagaaaaagaaactactcagcttttctcccttctctgcccttgagaaacttggccttagccaaccttccctaatgggtgatctgttttaagccaggaacatgattctcaaaacgtatctctatgtcttcggtttcttactaggctatcccttttccagagccaatattttcatacagatggcaaaatgactagttaggattccattttattgtatctattaacattattttaaaagtatagtaacagatttagagtcaggagctccaggtggagcccatatttccctactgtgacatgaaaagctgttacagaagttttatctggcagtagattaaaatttttttttatttttattttttgtgctacatagaaagctggtctgcagctaaccagtgaagttgatttagtttgctttcacctgcacacagctggtttctttccccactgctcctaagcggcttaatattccatctgtcttccccctccagcccatgaaaacccactcgcagaaaagcatttgataatctcatttacacagttgtgttaatggttgacaaatggtaaaagatagttagtgggatgcagctggaagtaaacttgagtaggaaccgaaggcctggctcatttggatcctacaagagacagcccccaactatgctggtgcagcttatgatggtttgacctatggttttgaactttaccatgatgcaaaagtgatatgcattcatgaggctcttcaacttataatggggccacatttgtataaactcatcgtaagttgaaaatatcataagttgataacgcactttatcaggttctctcttattcctaagaacacatcttttcaaggattaagttaggccctttgcaaggtgctactccccctcttccatccagcctctaccatggtcactttaatgctatcataagtatttttttaagattatctgatcatctttcactaaattggagtcctccaagaaagagaactatgtatttcatcattggtttatttgttcattcatttatttgtgtatcactataagattgatagtcaacattgaattcttcctatatggcaggaaaggtactaagattttcccatattatctaatttaattatcccaacacctctgtaatgtagctactatttctatctcatttttcacatgaggagactaaggcacatatatttactgtccagtcacatggccaggaaatgggagagtcgtgtttctatggtttgcccacatatgtgctaagtaatcactgagtggtataaaaaatatacaaatgatacttttacaccttcaggaacttaacacttagctggacacataasacataaagcaattaaggagactgatggggcagcctgaggttaaatattaaggtaaatataattgggcaaaggaaacaagtgtaggctgcaccagtaaaagaactaggtaccaaagaacaaaacgggtttgcaaaggtacagtattcagacctctgagtggtggggatggggagggagctagacctgtcacatgtgaactcagcagatagagaagggagaccatgcctgcacagccagaacatagtggcaggacataaggcctagtcagatttgggcaggccttgagtatttgggagaaaaggttagactcttctatcaaacagtccaggggaaactgaacatttttaagtgagtgtgacttaatctaaactgtgccttaagagaattaagaagtgtgaaggaaagaaggtaggcatttagaaaagtagtcaggacattccttgagcagtctaggaatgaaataagattctgaactaagcaaatgacagtataaagttctttctaagctaggaagaaatgaggatgagatattccaaaggaagagctgatagaactttgggattgactaggttataagtgatgaggaagaagatgggatttaaagatgactcctaggatctgaactgatgagacaaggaaaatggtggcaaaaaacctgaaaagttaggggaggaagatgcatatagtgttagacattttaaacttaacgattgaagatatctggttgaaatgtccaaatggagcaggaaatttgtgatgatagctaggaagagggatttggattggaaaagcaaagttgcctgtcacctgtggaataaacatgccagtgccagaacatgggtgaacagagactgctgcttagcattgagacggctccccatagataacttacgtctctgcacatctcatgagtgaggtactgactgtccttcattcaagactaccttttcaaggatgtttgtgatacaaatagcctcggaagatggagataatacccccatctagagaaaaagccagccatgcgtactgtctaatataataaagagagtatctccttccagagcaaagagcaggcatgtttactgccccttataaaagatttagcttccctaagctcagagctcctctactgtaacacaacccgtagcttctgcaggcatttgagctcactggcattgtccgcatgggactagggagcaagggcaactgatgcaaataagctaacgttcatgctacttgctgtgccgagggtcgctgacccaggaatctcatgtcttttgccagcatcaaggaaaccatgtcagaataattttttagcttgtatggtaaaaccttagaccccactacagttcttaatggctaggtgaggagctgggataaaaggtacaactagacagggtttgggttctcagatgactcttgtcaagggtggacaataatgagaatagaaaaatgtagacacataagagattggagcattgtaccaaagagctcaatcatgaggcctacccagtcccctccaaagagaaactaccccatctacagttctcctgctgagggaagacgtctgaaagtgatgttctccactatataatctgtcaatctgattggcccatataatccttttggtcaacacttttcccactgggctgccccataggtaaggtctagcccatgaattggctgcctttggaataagtacctccttcttatctaaacaccatggccagagaggtcacaaagcatcttggacccttagccttagaagcaggctgggaggaagtgggaaccaagcaaggacagaccaggggagtctggcccagctgtaggaggatacccaagaaggatatgcagcaccaggggcatgataaactcaagcttgattctgtgtgaataacaggggccaatcaatcctgtgaatggaggccttaaagcaggaattgcaggagatatgcaaagtgaggcaggctggggcactgctgtcctaagaagacaagaacagttagactctgaccaggttggtattgtgttgtattattataaacagacaggagtgaattcagttcaagtcagttcatccaacacttattaagtccctactatatgctagggactgtgagttactgggggaaatgacaatatgaggcatggatcctaatctcaagaatctaaagggggtggaaaaacaaacacataagcaaagaaatatgataaagcataatacatgtaataataaaggc

SEQ ID NO: 84637 - DNA, 641 bp, Homo sapiens
ctaataaggacagagcgctccctcaggaacagcgatgccaagcccagttttggatacatagggagtgggtggtggaatgccggcttccattcgaaggagacccctctccagcaccatgggagtcgcacccttagcagatattctgtcctccagagagctgaggtttcaggagtgccaagcaaggtataaatgtcattagcgtgagtacttaaaacataccacaatgtccaggtgcggtgactcacacctgtaatcacatttgggaagccgaggcgsgcagatcacttgaggtcaggaattcgagaccagcctgtgcaacatggtgaaacctcatctctactaaaaatacaaaaattagctgggtgtggtggcatgcacctgtaatcccagctacttgggaggctgaggcaagagaatcgcttgaacctgggaggcggaggctgcagtgaactgagatcacgccactccagcgtaagcaacaaagcgagaccctctctcaaacacacacacacacacacacacatacacacaaacacacacacccacaagagggtttagacctggtgcctgctggtttcagccactctaaaaccaatgggaggattttattattttatttctttgcaaaataattggttctg

SEQ ID NO: 84638 - DNA, 523 bp, Homo sapiens
cagctatgcaaagcaggtgcagagaggaggaggaggaaggcaaaaagagggccgcttttgaggtgcatgaaccaagaagagtcgctgcctgctctgtgccatcatgcagctgttaatgccacaaggctgctctcccaccctccccaaagttgataatgaaaaatcaaagcacaaacaaaagcaatgcacagaacaggatagcaaaacccgatcatcctgcaccaaccacatctcttcagtgcatctgctttgacctctkcttttacaagcactaccactgaaaataagctagaacaaaagctgattcgttatgcacaaccataaagaactccggggcacgctacatacataattcatcatgccaagcacgcgacaatcagcatcatttatctttgcggtattttaaagcggtgacaggttactagatatttataaagtctcttatttctatgagacccttccaaatttaagaaataaagaaccttattcctctgcaaatggcactgcttacaaacctaagact

SEQ ID NO: 84639 - DNA, 602 bp, Homo sapiens
ttccagctggaatcctcctctcaacaccagcttttctttatctactcccctacccaagtgtcatccgcagaataaaatccagccgggacttgaggccatttgaaacccacagcatctatgatgacgggaaaagcactaaattgcacaactaatttaaacccagcactgccaagcctcttcaacctctgaaaaattataattgcaaaccagaataaaaatttttttttttttgagatagggtcttgcgctgtcacccaggctggagtacagtggcgcaatcatagctcactgcagtctcagcatcccaagtaamtgggaccacaggcacacaccatcatacctcatttttttatttttattttttgtagagatgaggtctcgccatgttgcccagcctggtctcagactcatggtctcaagtgatcctcccacttcagcctcctaaagtgctgggattaccggcgtgagccgccatgcctggccaaggccagggttattttcctttgggtaactaacgtccacctgacgcatactagctgatgctgaatctcctttgcagggacgtaaactccacaagactgggattttccttactcactgtg

SEQ ID NO: 84640 - DNA, 1189 bp, Homo sapiens
gccaccagctggtcctttctgcttgcagactccttcctctatggaaaaagctgtttctctgtctcttgtcttctacctattaaacctctgctcctaaactcctcttgtgtgtctgtgtcctaaattttcctcatgcacaacagcaaacctcagggtttatatcccagacaatgtagccacatcaatagtttctaatatctcaaggccatattcctagaaatgtcctggtcctcttaaatttcttgtctaagaaaactcaaggctgccaaaagaatgtattgttggttctagtcaacacctgatcatagatccctagccactctttcttacagcatttactaaaaagggcttacaactatgaattcctcccttgcccctttgagatgtatctgtatcttcccaaactcaggaggtcttcctcagaggacctgaaagccatcccttggaagtgcagccatcggtaaggagcaggctttgtctccagttgctgtaggatgatagaatcctaactatgtatcttcatatgatcatattcatattagaatagggtccacttttattatcaataactttgataattgtctgttagcagatacagcaggcctaatcgcatttacactgattaacccactacaattttttactttcctgattctgctgagccttccccacccagcctcctccacagacttcctcattcttctttaaaacactcagcaacctctgtccaaattgaagttgaattcagttcatgctggactttttcccctattgtgatcattataactgattaaaatttatctttaccactttaaccagtgtctggcctttgtatttatttatttatttttttggtctttgacaacartttggcaaatacttgatcctcattagacctagctattgggaaactaaatctggattcgttagttaatgtgaggtgaaacatcaactttaacgtgaagtaacaaattgctgaaagtaagagtgatttgcatcatactgataatgaagataacataaagaatattggcaacactcttcactttgaattgtaggagtggatgcagtctcagtatatctttatgtacaatcatttacaaatatataataagaaaattttttccttcttcactaaatataaaattggtcaacttttgatataatattcttttgttaataatgcata

SEQ ID NO: 84641 - DNA, 658 bp, Homo sapiens
tggaagactataaacctgtagtccttggatgtttctaattttttaatatgctctatgcactgacttttcaatggtagaaaaacttgatcattatttggagccgataatttaaaacatttattttctttgaataagcctcagttcacaggaaactttggacatattagactaggaacacaaacagtggatgcagacaggtttggatttgactcctgactcgtccacgtcaaacaattgtctttgggcctcagacagrctcattcaagagcccctgaatacattaatttatatgaattgaaattcaaacaaattgaaatgaatagacttaaatttatttcaaagaaaaatggttcaagtactattttaatttttgagtgaatgaatgggtcaatataacttatctttctgttttacattacatttaaagtgttgcaaagattaaataaacttaaatatgaatatacacagagaccctgaatgacagtagtggtttcataaatagtaataataattgtccttatggtggtggttgtttttgttactatgaagctaacattggccctttggctgtaggccgtggaatagttatctgtgtaggtctgaacgtctgaagttactgaaagtttcattcaagtgaattgaaaatctgcacctataa

SEQ ID NO: 84642 - DNA, 670 bp, Homo sapiens
ggtgtcctgccttcttcctgcctccctcctcccacaatctctcaggacaggaggggccaggctccactctctccgctcccctgcatcctgttctcctcctgcctgggcatcagctcaggacccagccaccagcgctggaaggggcatcttctttgtggccgagggagaactcggtgatctgaatcctctaggatgtggattcagaaaaccctccctctyaacagagcgctttcaagtctgtggccacgctgctgatgctaacagaaatcagtcttgccgttcagagcagagaattccctttgttgttttggtgcgtacgtgccctctgcctgaagtactgaaatcattgcttcaaagggcagggagctccccaaaccactagacttataagacagggagtctgaagagatcagagagagaatcgggtgttcagtgcctttgtgttcagcaggtgcttacgtcttagggacaggtcgactgtaaactcaggtgtcttaggataggtgcttctgctgttctagctcccacacagcccctcccctttacctttattcccatctgccctccccaccctaactctcccctgggaagatgcctgccgttgcctgttcccagagagccccttacttgcagtttcagagcctgctgcctcactcctcctccctcactg

SEQ ID NO: 84643 - DNA, 1056 bp, Homo sapiens
cactgcacacgcagcactgccccaggcacaatgacacaaaggcagagtgggctctgccctcgagaagtcgctgtctagctggagagacagacttgtaaacacataaatccgtgtccgatgtgataagactattccggaggtatcaacagagtgctgtgggacatggaggaggagtgattaattttgcttcrggcggtgggggagtctttgccgaggaggtgacatttgagctggactttgaaagacgagctctccacagaactaaatctggacccagtgccaagagagtcagcctggaaaatcaatccagccaccgggaggaggggcagtcggcccagactgccttcccaatgactccctgccctggaggacacgcagctcctccaaaatgggggcccacactgtccctggagcccaggccaggcctctgtttctaacttggcctcattttccctccatctggccccctccactcacgtctcgtttaactgctctctgcccccaggaaaactcctctggtctctgccccttgaaagcaacttgcattttctttctccaagaacaaaaatcatcataattgcttttaaattacatcctacctttatagaatgctttacagatttcaagaaaaattaaacatagaataacagtcaaggtcagagcttaatcctaactctgccaccaactacctggtgacctgggactggttatttaatttctcatgcctcaatttcctcatctgtaaaatggaatcacagggttgctatggggatacaatgatgaacaggcacgcagtgtttagagcaggatctggtgaagagtgggtcctcagtgagtgccttcatgtgtgtcctctcccaccctgggtctctctgctctgcccatgggacctgagtgactctgtgattcatgcagaaggggtgctgcagaaggccagacctgaatctgaacccggctcagctctgggcttactagttacttactagtgaagtgaccttacaagagcaacgtaacctcaaggaaaatggggcagtcagggctgtctcacagactatg

SEQ ID NO: 84644 - DNA, 695 bp, Homo sapiens
ggagagctttcccatcctgccagccccatgtctggctttaagacagttctattagtgaattaactgttctcaaaaccccaaattaatttgaaccgaatgttactaaaaatgaaatagaataaagtgacctactcttgcctcatccggagttattacgaaggagctccgcagcctgactgagctctggagagcagggctctgtgcacacgcctcctggtccagaggcctccgtgaccatccatgatgccactctgtcccctcagcaagctgcctttttcttcctagcacctgccccagcggtggtatgttttccagtcagttaccacctgtctcatcagaatggaagctccatgagagcagggcctttgtcttgtccccttgtatctycagtgcataggacagtgctgacacagtgcagagtctaaataaacgctgttgaacgaatgtgtgggtcacttgcgtcgcatcctttctgaatgtttttcctttaacttgccatttataaataccttttccaatgataaagcagtgaaagtttggaaagaagcataaagcttttgttgtgattgaagtaactggaagcctagttcagggtgctgtgagaagctggagcatatcaggactttggaattatgaattacagacttactatatgtgatggtatcggtgcctcctgaagaagtagaagacagaga

SEQ ID NO: 84645 - DNA, 566 bp, Homo sapiens
aaagcaggcagagctgcctttaagcggcccgcttgttaacaactatgcttgcctgagttacacatctgctgatgaggctgtctgcatgttccctgaatcccaggaggagaactaaagtcaaacacctggctaaacaaagcatagtaaaaagctggacatttaatgcaacgaacagcaaaggcacgtcccacaggacattattgctgacagtagacgttccctgaagcaaaaaagatattgagaaaggggacacastgaattgaagctacataggtgctccttcctatcctttaaatttgcctctgggatttggccacctttagacccaatagactttaattataaaaattatctatgtgactaataagtggtgtgttagtgtgtgaacttgtgaggtgaggaaacatttaagattttctagactgctattttaggtcttttgtattttgcagtcatctctatgaagtcttgaattacaaaagatagtatttgcttttatttgcctttccttttgatacaggaaaaccagtgaagaaatgtcttggaagttgaccctagattttcta

SEQ ID NO: 84646 - DNA, 1316 bp, Homo sapiens
cctcatcaaattcccaaatgcaggctcttagaaacttctctttattttagttcacagtatgctttctgataattacatccaagtctttttatggcattttgatcatgcagtgtaattatctttccacttttctttcaacttttcacgagtagtatgtttggttacttcctgctggattcattgtttgattactggtatctaactcaatgacgtgtttactgatacaatgaagtattttttagaacttaacactacaagtttgatttggtaagcaatgtatggagcagagtgattatctcctcatttctctagagactaaaattaaattcactttaatacaggttatatatttatatatgttctattcaaccaaaaactgacgcattttcttgttagtgattataaaccagtccctaccccgtcctttacctaatttctttctgataattatatggctgtttaagcaacctaaaaggaggatgtgagtgcactgttgtattttactttgtcacattgtatcttctaatctttctgcatttatgtaaactgaaatataaaacttcaaagttcaaaatgcacttacatcatgctgctagctatagtcatttttaagctttaagtagaataaactaaaggtcacttgaaaacaattctggcttagatataaatcagaagaaatggcaagtgatttagaggccctctttaaaaaaattagcaataatgcttctgggaacttcactaagttgtaaagatcatctactgtgttaataatagtccaaaatacagtgtgtgggtggttaatgttagatcactcaaataccctttagaaagcttcaaatataagaaaagcttgaaagaaatggatgaaagggaaaactatgtaattgttgttagactaatgggagatgctggtttgaatcttttactcttggaaactaaattactatcatagaagcaattacgatttgtgccttcatctttgtgcatgtgttccttcctgaaataattgcatccatcatacagctgggactgggatggtaacccaatttcacacatagcctctcctctctttctgccttaggcacactcagaaacagtcaaaaacacccgaaaggtgtttaactcacaaaactgaaagttcaygctctctaattagttaatgagactatgagtaagtaaacttgtttctatctgtatgtggtttgaaatgtctaataggtatctagtatctcacaaaaagttagaaaaattgcaaaatgttagagctgggaggagcattattctatttttacgtcctatggttgtgcattggcata

SEQ ID NO: 84647 - DNA, 678 bp, Homo sapiens
ctgagggaatgcataaagtttattgttctgcctttcccactgagatttgcctggaatctgtgttggtacgtggtggcagagtgaggtcaaggttcgtttttgtccatctggatctccatccgatgaccctgcaaggctgtcctgtccccatggctctccagcgccccctctgccatagatgaagtgcccatgtatgtgagggtctgagtttcctttctgctttctatcccttggagcctacttgtccagcttgcaccagtgccacactctcttaattactgtaccattctgtcttaatatccagtaggacaagtcctcctgcctttgggaatataatggctattctagggtcaattttacagtcagctggtcaggttctagacacacatatataaatatattggggatttgaggaggattgcatccgatctgtagatcggtttgtgaagatttgactacaatgttgaattttccaatccatgaataggaaatatgcttccatttctgtaggtcttatttttgtattttaaaatatttaattgacaaataaagattgcacatattcaaggtgtgaatgcatatgcatcagaacatgatgatttgatatgcatatgcattatgtactgattattrcaatcaaactaattaacacatccatggccacccatgctgtacatt

SEQ ID NO: 84648 - DNA, 546 bp, Homo sapiens
caatctgagaaaaggcaaaagaatggctacttttttctatgctggagtattttctaataatcctgcttgacccttatctgacctctttggaaactataacatagctgtcacagtatagtcacaatccacaaatgatgcaggtgcaaatggtttatagccctgtgaagttcttaaagtttagaggctaacttacagaaatgaataagttgttttgttttatagcccggtagaggagttaaccccaaaggtgatatggttttatttcctgttatgtttaacttrataatcttattttggcattcttttcccattgactatatacatctctatttctcaaatgttcatggaactagctcttttattttcctgctggtttcttcagtaatgagttaaataaaacattgacacatacaaacaaatgcctttgagaattgtgtttttacactggaaataaaaatgtgaacactgatttttaaaacaaataggggcactgaatagcaagatggacactctagaaaaccaaattagtgagttagaaaaccagat

SEQ ID NO: 84649 - DNA, 623 bp, Homo sapiens
agtggagaatgctggggctacctcgtgcacgatggagtcactgaggaaaggagcctggggccctgaatgactgggtggagtcctcttttgcccctcgccatcagctctgttggactggataaaagttagaaatggaaactgtgttggatttagccactgagatttgggaaattattttttatagtagagtgcctatgctaatgaatrtagaaacaattctaactactctccaaatattttcatcatgatacatagtcctcccaataggccaaaatgattgattgcctcccactgttgccattgctgtccgttagtcatctttttaaaaagtttgccaccattgtcaaacaatgaatctcaattatttaatgtggacctagttaagaatcatattgtgcgccatttcatgtgtttatcagcttttcttctgtgaattgtccccctcccctcccctcccctcccctctcctcttcttctcttctccttttttgtgagacagagtctcactctgctgcccaggctggagtgcagtggggtgatctcggctcactgcagcctctgcctcccgggtgcaagcagttctcctgcctcagcctcctgagtagctagggactataggtgtg

SEQ ID NO: 84650 - DNA, 957 bp, Homo sapiens
tgcatgccagtgcttctcagcagaaaccgaaacagtgagtactagttagcatcagggcaagcytttcaaaaccctgcctcctgatgagataagatccaaaattacaactacaaaaacacaaacaaactgagacctggaaagccagtttccactgtccatgaactgaggcagaagaacagacccctgtgcttcccatgagctgaccattacctgttccagccaggctgacttctttcccctagggccacctggagaagtcagtgtagtggtcagctcatagggaagcacatttcctctgagcctttagaggcctctatgccctgacctctcaattcattctaccctgacccacacctcatagggttatttattactagactagaaattgtagctaaaccaatagctcaattagaactttgcaatcaatttctgtgtgcctaggagtttaattccataggctagtcatacgaaggaaaaaagacagtcatccaaaactctttcattcatccatttaaaacatttattaagtacatgctgtgtgccaagctccaggctaaaccctaaatataaaggtgcataagagagtctttgttgttaaggtgctcaccatcttgggggaggaaggcacttaatagataatgataacatggtataatgacaaagttatacacaaaatgttaaaatgtttttagttttaggaatttggtctggaaagtaaaatattcagaacttaaagaaaaaaataccattcatcaataataactattttatcttctttattagctaattaatacatcagttgtaatagaaccataaaatgaagataagcaaaaagaaaaatattacctatattcttacctatattatttatttacattctaaatagctactgttaacacttagctgcatggccttctgcaactttaaatatatatctttttctaaacaagatataag

SEQ ID NO: 84651 - DNA, 649 bp, Homo sapiens
cccttttttgggcttcagatttaaagccagatttagatctgggtccccaccaaatctcatgtcaaattgtaatccccagtgttggaggcggggcctggtgggaagtggttgaatcatgggggtggatttctcatgaatggtttagcaccattcgcccttggtactgtccttgcaaaagtgagtgagttctcaccagatctagttgtttaaaagtgaatggcacctcccgcctcactctctcttgctccttctctggccatgtaacatttctgctccccctttgccttccaccatgattgggaatgctctgaggcctctccagaaaccaagtagatgctgccatgtttcctggacagcctgcagaactgtgagccaattacacctcttctttataaattatccagtctcagttgtttctttgtagccatgagagaataaaataatacagaaaatcattctmtaatttattttgtcttgattataaaaccaatatttgatttttgtctgcacagtaggatttcctaaactgtagttccttctcttcagttcagacaacttattgaataaagcctaggaaaaaatacccattgtatttgaatgaatatttttaaggaacatcttggttattagttataatgtgtactgatac

SEQ ID NO: 84652 - DNA, 1460 bp, Homo sapiens
cataacaaaagtatactatgactgatgcaactcacaaaagctttacctctctcactaattatatgtgtgtcctcagattttctcagctttgtctcctgatacgtgcctggttagcccacctcagctacttgtctgaatggcacatgtctggcactattactctgatggaggtcaatcttcaggggggcacgcccagtgcctcccctgctattaccttcttttgcaaagtgacatttgcccactagttgccaagaggccagttgagacaacctgaaaattgagtaaatatttatatggcaaattttgactaatgggaagtaggaaaccaggatcagacttactgacatataaattatctctctattcttccacaatgcaccttccagcttgtcttgaagccatggctacagcgacaataagtcaccttcttttgcttctcatttttctccctctcactgtatattttcctcattcttactgccctgaaaaattgttgcacccaataaacattaacacctgatttttttctaaaaatcattttaagctctatttcctaggaaaggtaggctagggtacattttaaagtaagttataagggttgacgatattcatataattccaaatcacaaccctacctgacatttgcttatgctttcttttttctttgactatcagctcaggttctctgcagacataaatgatctaccattctaactagctacttaattattaagggacatgaatattttaatacactactttttatttgatatattcattcaaacaagcaaataataattaacctatcattcaaaaatcgtttttcctggactggagatataacctaattataaagaaacaaaggttaactcctgatttatcaagtgcacatggatgtgttatgcattgtcaatagaagacattgactcttgattcagaatgcaataatagttactacaggggagaaaaaagaaaagcattattaatatttttttttctggctcccagtgaggcttgagagagagtttgtgttttttgactatagatgtttcacytctgcatttgatatgtgaaattggtgacattatttaaattttagcagttagtctttcttgtcatcttgggaggtaacctcagtaaaataataaaaagaggcagaatagcaaacaaagatttagatttaattgtcactttaagaccctcggggccttggacattgtaaaggtttcatcttatatttctcttctaaatatatttttgctggaaaagataaaattatttttacaacttggcctttaaaaatattttgtcaggtctttataagcaaagacattattgataaacaaagaaaaatatgatgtatttgtaaatactgtattaataattaatgaagttagatactataattattgaaacttaattaaagtaattaatttttattgttaagttctcttttggta

SEQ ID NO: 84653 - DNA, 338 bp, Homo sapiens
tatgaaatatgtcacatatcatctacatctttttggtaattatttatgtacctttcattttgacactcaaaaatggccacttttttttctgtgtatgaaacccatctattacatcmgattttattctatttcaaaactattccaatcagcattcattggacaaacagattctcaatattttaggactttcagtaatggcacagatagttctttattgcactttcagaatcctttcagtcagttctcagtcaataaagtaggaatgtttggaaatttcttcctcctgatcaagccagctttttcatttccagctggtctcctacctgtccctcaaccct

SEQ ID NO: 84654 - DNA, 338 bp, Homo sapiens
tatgaaatatgtcacatatcatctacatctttttggtaattatttatgtacctttcattttgacactcaaaaatggccacttttttttctgtgtatgaaacccatctattacatccgattttattctatttcaaaactattccaatcakcattcattggacaaacagattctcaatattttaggactttcagtaatggcacagatagttctttattgcactttcagaatcctttcagtcagttctcagtcaataaagtaggaatgtttggaaatttcttcctcctgatcaagccagctttttcatttccagctggtctcctacctgtccctcaaccct

SEQ ID NO: 84655 - DNA, 578 bp, Homo sapiens
ttaagaaagaggcctggtacaaaagtattaatgtcaaaaaagacaaaggctgtgaaaagattccagattaaaggaggctaaagagacatggcaactaaatgtaatacctgaccctatcctagatacygtattggaggaaaaaaaatgctgtaaaggacattgtcagttgacaagttagaatgtagtttaatacaaatattgtatcctatttattgaagttcttattgcaaccctgagcttgaagttatttccaagtaaaatgttaaacattttaaaatagggggaggaattcttttggcacagtttatctcccatctgcctgagggccatgctagcaagacttctggacacagaattgaagacctaagagcaataaggctccagggacccgcgtaacacccaaaggagcattcttctgctttacagtgtagcccaggaggcagtaaggtggcaagctcctcaggcagcagaagtcctagtggttaaattatgtctttgaggctttctgtctgctacgcaagaaaccaaagctgcatgggctcccaccagagactacggaagccagaggagcagggtct

SEQ ID NO: 84656 - DNA, 643 bp, Homo sapiens
ttacctgtaattgaataactcaactatatattatgttaagatacaatatgactgcaaaaaaagaattgcttcartgaaaaaataagttaaatactttgaaagactaaatgaacaagggttgttaagacatttctgtcaaatttgggatgagtgattcaactagtaggaaaatgtatggacatgtaaaggaatattccaatcttatctgtggattactcatacagaataaattgaaacatatcacagactattatgaatatgtattatgcgggtatctaaatgcaggtctgcacaaagaagaggccttgaatatactcctaaatttgccgaatcaaagtacacttatgttttgacaagataaagtgtttaatgtacatgcttatttttttatttacctctctttcaactaatcagcagactactattccaaaccatgttaaataaaagcagttacgaaatatttatcacttcagcatgtaaaatcaattttagaaatatgttgattgataatacatgctcagcttatgaattaaagtgtgaataggccttatttttaataacttgatacatgtatttcatttacaattaatggaaacatcagtgaaaaaatgtcagaatattgaggaaaaatgacagaactgaa

SEQ ID NO: 84657 - DNA, 643 bp, Homo sapiens
ttacctgtaattgaataactcaactatatattatgttaagatacaatatgactgcaaaaaaagaattgcttcaatgaaaaaataagttaaatactttgaaagactaaatgaacaagggttgttaagacatttctgtcaaatttgggatgagtgattcaactagtaggaaaatgtatggacatgtaaaggaatattccaatcttatctgtggattactcatacagaataaattgaaacatatcacagactattatgaatatgtattatgygggtatctaaatgcaggtctgcacaaagaagaggccttgaatatactcctaaatttgccgaatcaaagtacacttatgttttgacaagataaagtgtttaatgtacatgcttatttttttatttacctctctttcaactaatcagcagactactattccaaaccatgttaaataaaagcagttacgaaatatttatcacttcagcatgtaaaatcaattttagaaatatgttgattgataatacatgctcagcttatgaattaaagtgtgaataggccttatttttaataacttgatacatgtatttcatttacaattaatggaaacatcagtgaaaaaatgtcagaatattgaggaaaaatgacagaactgaa

SEQ ID NO: 84658 - DNA, 1598 bp, Homo sapiens
  misc_feature (1)...(1598): n = A,T,C or G
atgtaaactacttagtacactgcgtggtacaaagtaaaggctcaaaaactatttaatagcaagtattgcaaatgagcagatagactattctagtgttcaccagtataagtatttagtnnnnnnnnnnnnnnnnnnnnnnnnnnnnnnnnnnnnnnnnnnnnnnnnnnnnnnnnnnnnnnnnnnnnnnnnnnnnnnnnnnnnnnnnnnnnnnnnnnnnttgtatgtcaattagaccataataaaactgtttaaaaacataatgaaagggaaagaaagaaggaaggaaggaagaaggaaggaaggaaagaaacaaagaaaaacaaacaaagaaagaaagaaagaaagaaagagaaagacagaaagaaagagaaagaaagaaagaaaagaaagacagataaaagagagagagggagggagggagagagaaagaaatacatgttgatgtaactattaccctttagtagtttggttattacttaatcaagttcttttgagtgttagtatttaaatgtttagaaaatatcttagtcttcttacttaaaactcctacataaaagtaatcgttctaaaaacagaaactcaatcttgtgtgaaggaattttattcatggttttgtgactactttggaagggcttctattgataatgtttaggatgaatgagaaagaaatttaatcaagaattaattttttagcttgctttggaaaatgtttcccaagacaaatacagcttctaggttttccttcccaattgcactgacagacatccaattttgtcttttctccttataataatatgataaaattattcttttaaataatgtaataattcattataaagcattctacatcattttattttaaaataatcacaaccattcataaagttagtgttaaatgcttgtctttatgattttataattttctatcctaaaacttaatacatttttatagaaacagccttgcatttcacagtattaatacatcattgctagcatgtggggtggaagaatctctcctgctcactgtgttctcatactgtgccatgtttagtattttctgataagaccattagatgtaaagtaaagagtgagatgttgattaaattattcattccttagttttttcctactcttcctggagtgcattataatgctagcaaaacagaccatctcttttttctgtttcttcctgttcttcctattctacattgattgaatgatgtacagagacatgcacaattttacaccatattttgtatttaaaaaatgacttttatatgacaaaaaggtggatggctaaactttaccacccagtatgtagtctttgaagctaattaaaatctggtggcttgagttacttgtgggaccctacagtgatggaaattgcttgtttcagtgctattgactgacagaacaggtgataacttgttttcatcctttgaacaagttcattagtttcctatgatggctgtttcgggtaaatactccaacatttaattagcagaccrtctttggtgaacccataaacaattatagaaccttttctctcctgtttgtattcaggactcagatgttttttatggcctgtctgactcatc

SEQ ID NO: 84659 - DNA, 822 bp, Homo sapiens
gccttagaaacactatcttgcaggcggctccagccacagggatctttacatcaccagcactggtctccccttccatagcttaacatagtagctgcctttccgggcttgctttatttccaccttgcctgttagtctgatgcaggactcttgggctcttggctgtgatgggaagaaggttctggaagcagcactgcaactctgagctggctagatctcagagtcaaaaccagacgacactgccggtgtctttttcacttcgctgcagtggtcttagatttaaaagccacacacatcagaactagtttctgatggaatcaactcattgagttggaaaaattataatttaacattacatggaatttaaagtctctattacacatagcggatgcacaatcaaacacggttcattcttgcctccccctctccccygccaactccccctcctaagtgatggggcagacagcacaaagggttcttgagttttgaatgttgggagtgtgtctggaagccttgttttgtttgcagcagtcgtggccgcacctgcgggcccacaccttgtgggcagtttcttggtgcgcgaaaggcgtagtgcacccaggtgcagggctctgccctggcgccctcctgtgacagtgccgggagcggcggggtgcggggcaccgccagctgtggtctgtcccggtgactggtttcttctgagtgtctcagttctgcaagccatcgtagcaatgggtcctgaccgtgtctctgaactgtctggcaggcgggcagtgtgtcacccgcttccctggtggtaagtgcggccaggaggatgcggcctgt

SEQ ID NO: 84660 - DNA, 769 bp, Homo sapiens
gccttttaaaacgtcgtagttatcattgattatgtggtgaggaaatggccctgctgcagtgagatccaacatttctggagggcagcttgagagtctgtatccaaagctttgaaaattaagcccttgactcagcagctctctgcctggggatatagcctaaggaaaggattagggatgaagacacagayttacattaaaaatacaggacccagcaaggccgggctctgtggctcacacctgtaatcccagcactttgggaggcagaggcgggtggatcacgaggtcaggagatcaagaccacggtgaaaccccatctctactaaaaatacagtggtgggcacctgcagtcccagctacgtgggaggctgaggcaggagaatggcgtgaacccagaaggcggagcttgcagtgagccgagatcccaccactacactccagcctgggcgacagagcgagactctgtctcaaaaaaaaaaataaaataaaataaaggacccagcagcctatgtgtggaaaaggttgtatcagttagaattcttgcatttgggaaaggctcagtggctcacgcctgtaatcccagcactttgggaggccgaggtgggcagatcacttgaggtcaggagtttgagaccagcctgggcaacatggtgaaacaccgtctctactacaaatacaaaaattagccgagcgtggtggtgtgtgcctgtgatcccagctactcaggaggctgaggcaggagcatcacgtgaacccaggaggcagaggttgc

SEQ ID NO: 84661 - DNA, 730 bp, Homo sapiens
ggatccaaacgatgagagtataatttacaattcatctttttcagctgtagattcctttgctgtttcttgtttttcttcatctgttcccacatccatttctttgtctttgtcttgctctttgtcttctgctgtctcctcaggttcttcgtcgggttcttccacctttgcatcaggatgtgttcaaactgaggcaaggcattctttctattctatctccatatgctttagtgtctggtaaaagacatcctgaccgaatcactgctgcattgctgtttcaaacaaaaccacagcaagatccaaaactgttttatcatcttcatcttccttaattcgtcgaagcatgtctctgatcagcggatgtctgggattaatttcaaatgttttcttccgactcgcatggtaatttgtagagatgcccttgcccgtttggtacgcttgtgctttcatgattctctccatgttgccagaccacccgtactggctggccaccaaagcacacrgagattctgtcaggcactgagataccatagccttttcaatcttgtccttaatggctttatctttcacccaattgggcagaggctcaaattctttctcaactgcttcatgactctccttagttttctcactgtcatcaaacttcactccttccttggcaacattctggaacctcttcccatcaaattcgggaagggcctgaatgcagtattcaaccacaggttctgtgagg

SEQ ID NO: 84662 - DNA, 764 bp, Homo sapiens
aagaaatagatccagggccacacagtctcattagtttaaattatttcaatgaaagaagaaacactgcactcagaaacaagaatcctgtattattctataatattacaatgtctctgggtctccagttgcctaatatgcagaatggagatagcaattaatgtactggtttaaaggcctgagtccagggcagattattataaattctcttctagctccaaaattgacaagggcaagaagacaagtaacatttgccgttttatccactaggcacagagctaaaacaaacttcaccatcagttaacacaaaaagaaacaaactcaaggcttcagtaatttgtccaaggttagaccgttcacaagggataaaagcaagggtttgataccaggtccagtggatttcaaagcttgggttcttcacagacactgactcacaagattccacaggatactaaggaaatgctgaaacaactacaaagaagttgagctctgcttaaagatttgactgttttcctcagcyctttttcccaactctctattggaaagtacctttcaataattttttttcttaaggaaagtgattttcactgggaattaataccaaattagtacaaaaggcagcaacataagctttcaataaacatgagttttgtaattttctggctatattttattattttcaaattctaattcctggctaatgagctagcacttgccattttatataaaaaggcaaagtatgaaatactatttccaaagcaacgtaa

SEQ ID NO: 84663 - DNA, 764 bp, Homo sapiens
aagaaatagatccagggccacacagtctcattagtttaaattatttcaatgaaagaagaaacactgcactcagaaacaagaatcctgtattattctataatattacaatgtctctgggtctccagttgcctaatatgcagaatggagatagcaattaatgtactggtttaaaggcctgagtccagggcagattattataaattctcttctagctccaaaattgacaagggcaagaagacaagtaacatttgccgttttatccactaggcacagagctaaaacaaacttcaccatcagttaacacaaaaagaaacaaactcaaggcttcagtaatttgtccaaggttagaccgttcacaagggataaaagcaagggtttgataccaggtccagtggatttcaaagcttgggttcttcacagacactgactcacaagattccacaggatactaaggaaatgctgaaacaactacaaagaagttgagctctgcttaaagatttgactgttttcctcagctctttttcccaactctctattggaaagtacctttcaataattttttttcttaaggaaagtgattttcactgggaattaataccaaattagtacaaaaggcagcaacataagctttyaataaacatgagttttgtaattttctggctatattttattattttcaaattctaattcctggctaatgagctagcacttgccattttatataaaaaggcaaagtatgaaatactatttccaaagcaacgtaa

SEQ ID NO: 84664 - DNA, 2344 bp, Homo sapiens
aacattctcttgcaaccctgaagttctatgacaggtagtaatttgtaattttatttgagtcacatatttcacttagatacactaaaaggctggttggtgttctcgagttggttttactcaaaagagtaaaaataatctcagacaaattaacatctgtatcttyctctgctcattcttgaatacacagtaactttcatataatacctgaagcataagttttttattttttaattatctatctttttttaatataggaaaccatatatgacagtggaatttgctaatacgtggattcacaaagcaaggtctctggatgctcctcccaagaaatcaaagggtttaatggtggctctcaataaaatgcaagattttagtactgcctatctataaggcacattcataatttatttacatgttcatcaggcagaactgaaaatcctaaggctcaaatttaaattgttctactaaattttagtatgattccttttaaaatcaaagttaacatactaggtcaggcatggtggctcacacctataatcccaacactttgggaggctgaggcaggtggatcacttgacgtcaggagtttgagactagcctagccaacatggcaaaaccctgtctctacaaaaaatacaaaaattagccaggcatggcttcacgtgcctgtagtccaagctacttggaaggctgaggcatgggaatcacttgaacccgggaggcggaggctgcagtgagccgagatcacgccactgcactagagcctgggcaacagagtgagactctgttaaaaacagaaaaaaaaagtcaaccaggcacggtggctcatgcctgtaatcccagaactttgggaggccaaggcaggtggatcacaaggtcaggagattgaaaccaccctgtgcaacatggtgaaaccctatctctaccaaaaatacaaaaattagctggggtgtgagtgggcacgcgccctgtaatctcagctactcaggaggctgaggcaggagaatcgcttgaacctgggaggcagagattacagtgagctgagattgtgccactgcactacagcctgacgacagggcaagattttatctcaaaaaaaaaaaaaaaaaaaaaaaaaaaaagttaatgtacattagttacctcactagagagtaagagagaaaacattgtatgcatttgacttttggatagtaaaatgattatatcacgcaaagttcacctaaattctcttatgtgaaattcagaactgaagtaactctttgtacaaatattttgccagagcagtgattcaaagggatattggatgcaatgcacaattgtagtaattgtagctatatctaaaatataaattctaccttcttacatttgcatcacaaaaaagactcttagtaatatttcacccattctttagtttcatcttcaaacaaatggacaaatacttataaatacatctacagctcattgcctagacatagagtgagaaatatgaatacagatttataatagacaagaaactatagtgtgctagagactatgattacctggaggtaggaattgcagttggttattagctaatcgaagatgacgtaaagctctcagacgaccaatttctgggcaaacaatttctaaggcattgtcactaagatccagacattggagttttacaagagacccaatggcttcaaagagaaaaggagaaggcaaaatgaatttgactcaagtattacatcaaatctttaaagcaagtattccaagttaaaatattttactacttaatttccttgtctcagttgctcacaaaatagtaaaaacacagatcaaactaagttcatgaaagtgataaatacttccagctcaagataaaatataacttaaaatacagcacaaataaaaacattaagactaaaataaatcaagaaatgatacacagggctttttttatctgaccagaattcttaactagatttattaaatttacaacttattatctacctaatagcaatttatccaacaatagtttacctaaccattataaccattttagatttatttaattatagttcttaactggacttattagaagaaaaaagttttgaagctaaaaaattaaaggtgtcttaaaaataaaatttgatctatttataaagcaaagcttaaattatattatcttctaactaaaatttttaagttaaacataccttccggaaccacaactatgttatttgagtgcaggtatctaggaaggaaaaagaaaaaaaacagccattatcattaagtacttttgccagataatcagtttataaaatgctcacttagaaatttatcaaatataaataggccacaa

SEQ ID NO: 84665 - DNA, 2344 bp, Homo sapiens
aacattctcttgcaaccctgaagttctatgacaggtagtaatttgtaattttatttgagtcacatatttcacttagatacactaaaaggctggttggtgttctcgagttggttttactcaaaagagtaaaaataatctcagacaaattaacatctgtatctttctctgctcattcttgaatacacagtaactttcatataatacctgaagcataagttttttattttttaattatctatctttttttaatataggaaaccatatatgacagtggaatttgctaatacgtggattcacaaagcaaggtctctggatgctcctcccaagaaatcaaagggtttaatggtggctctcaataaaatgcaagattttagtactgcctatctataaggcacattcataatttatttacatgttcatcaggcagaactgaaaatcctaaggctcaaatttaaattgttctactaaattttagtatgattccttttaaaatcaaagttaacatactaggtcaggcatggtggctcacacctataatcccaacactttgggaggctgaggcaggtggatcacttgacgtcaggagtttgagactagcctagccaacatggcaaaaccctgtctctacaaaaaatacaaaaattagccaggcatggcttcacgygcctgtagtccaagctacttggaaggctgaggcatgggaatcacttgaacccgggaggcggaggctgcagtgagccgagatcacgccactgcactagagcctgggcaacagagtgagactctgttaaaaacagaaaaaaaaagtcaaccaggcacggtggctcatgcctgtaatcccagaactttgggaggccaaggcaggtggatcacaaggtcaggagattgaaaccaccctgtgcaacatggtgaaaccctatctctaccaaaaatacaaaaattagctggggtgtgagtgggcacgcgccctgtaatctcagctactcaggaggctgaggcaggagaatcgcttgaacctgggaggcagagattacagtgagctgagattgtgccactgcactacagcctgacgacagggcaagattttatctcaaaaaaaaaaaaaaaaaaaaaaaaaaaaagttaatgtacattagttacctcactagagagtaagagagaaaacattgtatgcatttgacttttggatagtaaaatgattatatcacgcaaagttcacctaaattctcttatgtgaaattcagaactgaagtaactctttgtacaaatattttgccagagcagtgattcaaagggatattggatgcaatgcacaattgtagtaattgtagctatatctaaaatataaattctaccttcttacatttgcatcacaaaaaagactcttagtaatatttcacccattctttagtttcatcttcaaacaaatggacaaatacttataaatacatctacagctcattgcctagacatagagtgagaaatatgaatacagatttataatagacaagaaactatagtgtgctagagactatgattacctggaggtaggaattgcagttggttattagctaatcgaagatgacgtaaagctctcagacgaccaatttctgggcaaacaatttctaaggcattgtcactaagatccagacattggagttttacaagagacccaatggcttcaaagagaaaaggagaaggcaaaatgaatttgactcaagtattacatcaaatctttaaagcaagtattccaagttaaaatattttactacttaatttccttgtctcagttgctcacaaaatagtaaaaacacagatcaaactaagttcatgaaagtgataaatacttccagctcaagataaaatataacttaaaatacagcacaaataaaaacattaagactaaaataaatcaagaaatgatacacagggctttttttatctgaccagaattcttaactagatttattaaatttacaacttattatctacctaatagcaatttatccaacaatagtttacctaaccattataaccattttagatttatttaattatagttcttaactggacttattagaagaaaaaagttttgaagctaaaaaattaaaggtgtcttaaaaataaaatttgatctatttataaagcaaagcttaaattatattatcttctaactaaaatttttaagttaaacataccttccggaaccacaactatgttatttgagtgcaggtatctaggaaggaaaaagaaaaaaaacagccattatcattaagtacttttgccagataatcagtttataaaatgctcacttagaaatttatcaaatataaataggccacaa

SEQ ID NO: 84666 - DNA, 2344 bp, Homo sapiens
aacattctcttgcaaccctgaagttctatgacaggtagtaatttgtaattttatttgagtcacatatttcacttagatacactaaaaggctggttggtgttctcgagttggttttactcaaaagagtaaaaataatctcagacaaattaacatctgtatctttctctgctcattcttgaatacacagtaactttcatataatacctgaagcataagttttttattttttaattatctatctttttttaatataggaaaccatatatgacagtggaatttgctaatacgtggattcacaaagcaaggtctctggatgctcctcccaagaaatcaaagggtttaatggtggctctcaataaaatgcaagattttagtactgcctatctataaggcacattcataatttatttacatgttcatcaggcagaactgaaaatcctaaggctcaaatttaaattgttctactaaattttagtatgattccttttaaaatcaaagttaacatactaggtcaggcatggtggctcacacctataatcccaacactttgggaggctgaggcaggtggatcacttgacgtcaggagtttgagactagcctagccaacatggcaaaaccctgtctctacaaaaaatacaaaaattagccaggcatggcttcacgtgcctgtagtccmagctacttggaaggctgaggcatgggaatcacttgaacccgggaggcggaggctgcagtgagccgagatcacgccactgcactagagcctgggcaacagagtgagactctgttaaaaacagaaaaaaaaagtcaaccaggcacggtggctcatgcctgtaatcccagaactttgggaggccaaggcaggtggatcacaaggtcaggagattgaaaccaccctgtgcaacatggtgaaaccctatctctaccaaaaatacaaaaattagctggggtgtgagtgggcacgcgccctgtaatctcagctactcaggaggctgaggcaggagaatcgcttgaacctgggaggcagagattacagtgagctgagattgtgccactgcactacagcctgacgacagggcaagattttatctcaaaaaaaaaaaaaaaaaaaaaaaaaaaaagttaatgtacattagttacctcactagagagtaagagagaaaacattgtatgcatttgacttttggatagtaaaatgattatatcacgcaaagttcacctaaattctcttatgtgaaattcagaactgaagtaactctttgtacaaatattttgccagagcagtgattcaaagggatattggatgcaatgcacaattgtagtaattgtagctatatctaaaatataaattctaccttcttacatttgcatcacaaaaaagactcttagtaatatttcacccattctttagtttcatcttcaaacaaatggacaaatacttataaatacatctacagctcattgcctagacatagagtgagaaatatgaatacagatttataatagacaagaaactatagtgtgctagagactatgattacctggaggtaggaattgcagttggttattagctaatcgaagatgacgtaaagctctcagacgaccaatttctgggcaaacaatttctaaggcattgtcactaagatccagacattggagttttacaagagacccaatggcttcaaagagaaaaggagaaggcaaaatgaatttgactcaagtattacatcaaatctttaaagcaagtattccaagttaaaatattttactacttaatttccttgtctcagttgctcacaaaatagtaaaaacacagatcaaactaagttcatgaaagtgataaatacttccagctcaagataaaatataacttaaaatacagcacaaataaaaacattaagactaaaataaatcaagaaatgatacacagggctttttttatctgaccagaattcttaactagatttattaaatttacaacttattatctacctaatagcaatttatccaacaatagtttacctaaccattataaccattttagatttatttaattatagttcttaactggacttattagaagaaaaaagttttgaagctaaaaaattaaaggtgtcttaaaaataaaatttgatctatttataaagcaaagcttaaattatattatcttctaactaaaatttttaagttaaacataccttccggaaccacaactatgttatttgagtgcaggtatctaggaaggaaaaagaaaaaaaacagccattatcattaagtacttttgccagataatcagtttataaaatgctcacttagaaatttatcaaatataaataggccacaa

SEQ ID NO: 84667 - DNA, 725 bp, Homo sapiens
aaaagattctccagaatggaggaaaggaagaattggaagtagtaagaacttcatgtgtcaatgtgtaaccttaagaaagggctatgtgctttttccactaactgagccctagtttgggttttggaagagagaaaataacaggtaattcagttaggtttacagaatttgaaagaaaagacaacttgtgtcccattcctgattagagggtttgaaagtttctctcattcctgatgcaggctgggagaagtaggatagacatattcgtatagtaataaaggatcaaatctaagaggttatttgggtatcatatttttctagtaaggactttcatttcctatatgcaacataattccattgctttaaatgtgatggaaataataaatataaaaraatatcattccccactcccagaattgttaaaagaagtctataatgaaacatgctgaaatgttaacagtgaccatctctggttggtgggattatgaatgactgtcatttgcatctttatactgctctgaattttgaaaagtttccataatgaaagggctttttcacttgggtttgccattactcatcctttagtttatgtttcatctccctgatttacaaactcattagttgggattatgtccctatttgatactcctttaatattttggacagctcattgtcttatcaccacagtacattgaaataatcacctgtttcctattctagagagtcgg

SEQ ID NO: 84668 - DNA, 725 bp, Homo sapiens
aaaagattctccagaatggaggaaaggaagaattggaagtagtaagaacttcatgtgtcaatgtgtaaccttaagaaagggctatgtgctttttccactaactgagccctagtttgggttttggaagagagaaaataacaggtaattcagttaggtttacagaatttgaaagaaaagacaacttgtgtcccattcctgattagagggtttgaaagtttctctcattcctgatgcaggctgggagaagtaggatagacatattcgtatagtaataaaggatcaaatctaagaggttatttgggtatcatatttttctagtaaggactttcatttcctatatgcaacataattccattgctttaaatgtgatggaaataataaatataaaagaatatcattccccactcccagaattgttaaaagaagtctataatgaaacatgctgaaatgttaacagtgaccatctctggttggtgggattaygaatgactgtcatttgcatctttatactgctctgaattttgaaaagtttccataatgaaagggctttttcacttgggtttgccattactcatcctttagtttatgtttcatctccctgatttacaaactcattagttgggattatgtccctatttgatactcctttaatattttggacagctcattgtcttatcaccacagtacattgaaataatcacctgtttcctattctagagagtcgg

SEQ ID NO: 84669 - DNA, 725 bp, Homo sapiens
aaaagattctccagaatggaggaaaggaagaattggaagtagtaagaacttcatgtgtcaatgtgtaaccttaagaaagggctatgtgctttttccactaactgagccctagtttgggttttggaagagagaaaataacaggtaattcagttaggtttacagaatttgaaagaaaagacaacttgtgtcccattcctgattagagggtttgaaagtttctctcattcctgatgcaggctgggagaagtaggatagacatattcgtatagtaataaaggatcaaatctaagaggttatttgggtatcatatttttctagtaaggactttcatttcctatatgcaacataattccattgctttaaatgtgatggaaataataaatataaaagaatatcattccccactcccagaattgttaaaagaagtctataatgaaacatgctgaaatgttaacagtgaccatctctggttggtgggattatgaatgactgtcatttkcatctttatactgctctgaattttgaaaagtttccataatgaaagggctttttcacttgggtttgccattactcatcctttagtttatgtttcatctccctgatttacaaactcattagttgggattatgtccctatttgatactcctttaatattttggacagctcattgtcttatcaccacagtacattgaaataatcacctgtttcctattctagagagtcgg

SEQ ID NO: 84670 - DNA, 1085 bp, Homo sapiens
aactaatatgacataattactaattcacttggggaaaactggggaaaaatatcaggatgaggctaacaaaaattacatgttgtcttttctgtacatttctctctgtggttatattattaaatgttttgtcataatccatatatatataggtgtaaccctgactacattagttatgagaaaatattataacaagaagtcttgtagtatgaaaaatattactactatatttggaatttttaataagatttccatagaagcccatagtttcatgggaacatataaagccaagagagaaaaaaaatattggaaattcccgaattgcttccaacacgtggatgtcaataaataaagtaggatgttcacacctggcctgacacacacwtttttctatttcctttttaaggacaacttatgggttaatatagcataaccattttacttttgagaataaaaatagtctcttccaattctcaattgcttttgcttattaaattattacttctgaaaatcaaatggcctgtaactctctcatgcctcatcatttattgtataaagcattagatgggttaagatccagtccttcttgttttgatgtaactttattatcacttcaaattgtagtccaaaaaggctccaaaatgttttaataaataaattttattttgtttcatttgtgtgtttcttttacttgaaaaatagtggatagaaataaaaatttttatgaaaacttctggcttaaaacagaagcttatgaacacctacaagatatctctagaacaattggtaagatcataaacactatttcaaaggttattaatgtcttagtttaaataagggatagtttggttactactgtgagcacatcaaaatgttggctgagcctgaaaccttgctataagtaaaaaattgtacataatcaaatatttacagttattcaaatccattcatagagtcaatctaaaaacagaattttcttaaaataaattataagacttcaccacgatgtgaagcaattttaattcattaatttactagttttttgtttttgaggcagggtctcactctgttgcccaagctggagtgca

SEQ ID NO: 84671 - DNA, 1085 bp, Homo sapiens
aactaatatgacataattactaattcacttggggaaaactggggaaaaatatcaggatgaggctaacaaaaattacatgttgtcttttctgtacatttctctctgtggttatattattaaatgttttgtcataatccatatatatataggtgtaaccctgactacattagttatgagaaaatattataacaagaagtcttgtagtatgaaaaatattactactatatttggaatttttaataagatttccatagaagcccatagtttcatgggaacatataaagccaagagagaaaaaaaatattggaaattcccgaattgcttccaacacgtggatgtcaataaataaagtaggatgttcacacctggcctgacacacacttttttctatttcctttttaaggacaacttatgggttaatatagcataaccattttacttttgagaataaaaatagtctcttccaattctcaattgcttttgcttattaaattattacttctgaaaatcaaatggcctgtaactctctcatgcctcatcatttattgtataaagcattagatgggttaagatccagtccttcttrttttgatgtaactttattatcacttcaaattgtagtccaaaaaggctccaaaatgttttaataaataaattttattttgtttcatttgtgtgtttcttttacttgaaaaatagtggatagaaataaaaatttttatgaaaacttctggcttaaaacagaagcttatgaacacctacaagatatctctagaacaattggtaagatcataaacactatttcaaaggttattaatgtcttagtttaaataagggatagtttggttactactgtgagcacatcaaaatgttggctgagcctgaaaccttgctataagtaaaaaattgtacataatcaaatatttacagttattcaaatccattcatagagtcaatctaaaaacagaattttcttaaaataaattataagacttcaccacgatgtgaagcaattttaattcattaatttactagttttttgtttttgaggcagggtctcactctgttgcccaagctggagtgca

SEQ ID NO: 84672 - DNA, 616 bp, Homo sapiens
cagtataacaacagttatcttaaccttctacacatagttttttttggtgaatatttgaaggtaggagaggcatcctatttgactgtgtttttttagagcttcaaatgccatcacactgtacccagtacagtgttgttgcaaatgacaggatctcgtactttttatggctgaatagtattccactgtgtatatgtaccacattttctttattcatctgttgatggacacttaggttgcttaacagtggctattgtgaatagtgttgcaataaacatgagagtgtagatatctcttcaatatactgatttccttttagtttttcaaggaaactccttattgtttatactgttctccatagtgcttgtactaattgacattcccaccaacagtgtatgaggtttcccttttcaccacatcctyaccagcattcattattgcctgtcttttggatgaaagccattttaactggggtgagatgacatctccttgtagtttaaatttgcatgtctctgatgatcagtgatgtggagcaccttttcatatacttgtttgccatttttgagaaatgtctattttagatcttttgctcatttctaaatccaattcacagagtttt

SEQ ID NO: 84673 - DNA, 541 bp, Homo sapiens
tcgtatcttcattgctccctcacctaattctttgtagccacattggtctactaaattccaaccatacctgtagccatgcgtttgcctagactgtactcccatttttctcctatttaacaaattatggctactctttaagacccaagtaaagttttagcttacccatgtagcatctccacacctcaaggatcacagattctggcaaattctagcaccaatggtctgcattatcttttagtacttaattatatatacctccctttttatgcctattctctttcttccctcctatcatttttttttttttttttttgagatggagtcttgctctgtcgcccaggctggagtgcagtggtgcaatctcggctcactgcaagctctgcctcccaggttcaygccattctcctgcctcagcctcccaagtagctgggactccaggcacccaccaccatgcctggctaatttttttctgtatttttagtagagatggggtttcaccatgttagccaggatggtcttgatctcctgacctcgtgatccg

SEQ ID NO: 84674 - DNA, 541 bp, Homo sapiens
tcgtatcttcattgctccctcacctaattctttgtagccacattggtctactaaattccaaccatacctgtagccatgcgtttgcctagactgtactcccatttttctcctatttaacaaattatggctactctttaagacccaagtaaagttttagcttacccatgtagcatctccacacctcaaggatcacagattctggcaaattctagcaccaatggtctgcattatcttttagtacttaattatatatacctccctttttatgcctattctctttcttccctcctatcatttttttttttttttttttgagatggagtcttgctctgtcgcccaggctggagtgcagtggtgcaatctcggctcactgcaagctctgcctcccaggttcacgccattctcctgcctcagcctcccragtagctgggactccaggcacccaccaccatgcctggctaatttttttctgtatttttagtagagatggggtttcaccatgttagccaggatggtcttgatctcctgacctcgtgatccg

SEQ ID NO: 84675 - DNA, 691 bp, Homo sapiens
taggaaacatttgcattttccaaagtcacaagtaatttcttcaatgygttcttctagaatacatacagttatttagccctctgttaaggtttattatccactcagttaatttttgcatttcatggaaggttggtttattttttttaatatatggaaatacagttcagcaccatgtggcaactctttcttttacccatagatttgcttggcatcttatcaaaaataaattaaacacatatgtgtgtatgtctagttctgtaatctctattctatgctattggtctgtttttctttccttggccaataccagtgtctcttgatagtgtatatttatattaaaacttgaggttctatgaaacaaatcctccagtttcttagtctttatcaaaattgttctgactattctagatcctttgcatatacatataaatcttagaattcacctgtcaatttattttaaaaattctaccagaattttaattcagcctcttttgatatttgccaaatatttgccaaggagttatttgccaaaatatctctatcccttccttctacagttacacatatggtagactcagaattctcctactggtcactgaggctctgttcattttagttcaaccatttgtggtcctctcactattcttcagattagataatttctttggataagtttttgagtttactcatg

SEQ ID NO: 84676 - DNA, 971 bp, Homo sapiens
actactagaaacattaagcttacataggtggcttgtattatatttctattggacggtgccattctagatatccgaatctacaaagtgactgagattcaaactcttcaatgaagcactttttaaatgctctacttgagaattaattccactcactgctctgctgccgtcgcggtcctgactttccaaggctgtgcccagagcgcggcacacgtggctctcacacaggcaggcctgcacggcacgcagcagtggaggaggttaccctgggtcgccgacgccmggggaagccaagcgaccgaccccacacttctgagccccgccggggaagtccccgggcgcggaaacaggtggtgcgccggcggttcgcagctgctgtgcccgctggcctgggcgcagccggggacagcgacgcgtttcctgcccgggaagggcccgagcgcagggccggctatagcggtcccgcagctgcctgcttcgattttagcactgctgctccctagagggagcaacgcggccctctgtccctcgtagggcttgaaatgtaaattattcatatcaggggaatgtgtgcttcaaaaagcaagctggacaagaaccgacgggtaatcctcgccaaattcttctatttaaccctcaccattaaaagtctgaggcctgaaaaatctcttgactggagagatattaactccacaggtaaacgggatcaggatctacgacataaatgaatcaaattcactgatttctaagattatttagacagtagaaaattattaatcctttttattagttcaatacttcattcagcatttgcagagcaaaatctgcttggatttatttagtgaaaattatcttctaaaactacaaagatttaaccacagtacataaaatttagttgcagtaggcaaattatatttttaagctgaaccctaagaaattgtccaaaaatatgtacaatagttatgcacagcact

SEQ ID NO: 84677 - DNA, 549 bp, Homo sapiens
tgcaacataggaaaaatgaaagcaggccctgtttctctgtgtcaccttctccttccccacctgacagacaggctgaggcttcagactaccgggagcttccctccacccatactgcccactggctacctctatgatttgtctccctattccttacccaaatcctgctgccctagcccctcacttgcctaattccgaagttctatttcctcagagattctaatttcactgaaccaaacactgacatgcaatctgtatttttacctgtcctgtcacttccccttcttccagtgggagcttttctttggggaaccaacttttccccatggatgaccatcaagattattaatgaggccgggcacggtggctcacgcctgtaatcccagcactttaggaggctgaggcaggcgggtcacgaggtcaggagatcgagatcatcctggctaacacggtgaaaccccgtctctactaaaaaatacaaaaaattagccaggcgtggtggcgggcgcctgtagtcccagctactcaggaggctgaggcargagaatggcg

SEQ ID NO: 84678 - DNA, 2406 bp, Homo sapiens
tttccttcatctggatggaatttcttccttcctttgaatccccattgaattttattttcatccctgttgtggtacttggtatttataccgtatatgtttttatgtgcatactctctctcactagagtataagttttttgagggcatacttcatgtctcattgatcttaatggcttccttatgcctagcattctttcgctcaaaaaatatttcatggagcattttacactggtgcagaggatacagttataatgatacagtcctgccctcaagaagcttaaaatgtgatgaagagacagatattcaaagtaacaactacaaatggttatgttgattgggttaatgttgatgcaagggatgcacaagagaagcaactccaacatctgttgaccccgggaagtgagggagattctgcagagaaggcagcatttgggctttgaaaaggaagaggagttggccagatggacacccctggcggaatgcagagacacaagaaagagcaaggcatgttcaagcaactcctctgttgaatatgtgttttgcaatgccagggacctctgaactatcccactttgcactcttaagttttacaaatgtgcttagcactgctggtgttcagtagtgcgttgcgtcagccctgagacttcaatctattatgcatggagtaatgcaaataggaacaatctagaatatgctgctcttttatgaaatgttgggtacttctagataacaatgattaatttaaagcattcatctacttgtactcccttcctaaaatctatttaaataacaggccagagagtatttttaaaggcctaagcccagtgaatagcaaacagagataaacaaccagctagtatacataccaagccttttggactattgtttactagaggaaacacgtaggataaataactggtgtgtgggcataagatcatcaatgtggccgggcgcagtggctcacgcctgtaatcccagcactttgggaggccgaggtggctggatcacaaggtcacgagatcaagagcatcctggccaacacagtgaaaccccatatcttctaaaaaatacaaaaaaattagccaggcgtggtggcgggcacctgtagtcccagctacttaggaggctgaggcaggagaatggtgtgaacccaggagacggagattgcagtgagctgagatggcaccactgcactccagcctgggcgacaagagcgagactctgtctcaaaaaacaaaaacaaaacaaaaaaaaaaacaaaaaaaaaaaaaaaaaaaaaaaagatcgtcgatgtagtgaatgcggattgagccatgggatggtgagataatgaagggacccaacgactaaattacagcataaagaagagttgggccaggcgcagtggctcatgcctgtaatcscagcactttgggaggccgaggagggcagatcacttgaggtcaggagttcaagaccatcctggccaacatggtggaaccctgtctctactaaaaatacaaaaaaattagccaggcgtggtggcaggtgcctgtaatcccagctactcgggaggctgagacagaattgcttgaacctgggaggcagaggttgcagtgagcccagaccatgccacttcactccagcctgggcgacagagcgaaactccatctcaaaaaaaagaaaaaaaaaaccagaatctcgaataagttgtgcccatattgttataatcagcccaatctaaagtcatatttcttcccctctggtccaacacccatgaaatccatttcttcatacattccccgttataaatcagcaaaatgttgtagttctttttgctatgtaaatctcctcttcctctgtttcactttgttataggccccctgggtcatgctgggatctgactttagttaaggtttggagaccttgaggggaggtggggagaggaggcttgaagagagcgggcatccccacaaaatgcacctgcctcaggtgagatctgagagtctgcagcaaggcagaaccagccttattgtacaagtttgggggctacttcctatgagaagagaagtttggaaggaagttagggtgctcttagttacatgaatactttcaagtgtcacattccaattcctggactatttttccttctcatctcattaactgagaaactaattatcctcacataaattcagtctttgttgtcattgagcaccctgcagggttattgtctgtgtcagtgttttagtaatctcatggagatcccagtggatctgtgaagtgggtcctacagaaacaagaagtaaggggttcttttagggtcgatatcaaaatgcctgacgtcctaactgtgccttgaaccaagatattaaagctctgaacctgtgcttttttttctttaatttctccagtgaagttagaagcaacc

SEQ ID NO: 84679 - DNA, 1512 bp, Homo sapiens
  misc_feature (1)...(1512): n = A,T,C or G
caggtcacctgaggtcaggagttcgagaccagcctggccaacgtggtaaaactccgtcccactaaaaatagaaaaattagccgagtgcggtggctcacacctgtaatcccagcactttgggaggccaaggcgggcggatcacaaggtcaggagtttgagaccagcctggccaacgtgacgaaaccccatctgtacagaaaatacaaaaagtagctaggcctggtggtacatgcctgtaatcccaagaactcaggaggatgagtcaggagaattgcttgaacccaggaggcggatgttgcattgaactgagatcacaccactgcactctagcctgggtgacagagcaagactgcatctcaaaaacaaaacaaaacaaaacaaaacaaaaccagggaatgatgacgtgtctcttttcaagtctatcttagaatatcaccagtgaaacagcccccactatattattagcttaatgaatcatgaacattgacctgttgcctccatttctctgtggtagagtattaggccagattttaaagctcctattggggttgagaaattatttccaagtaagactctggaatgtatttccaaagagaatacatttttctcatgagaaaatctttgagtaaattaaaaatcataaactaaagagtcttgttgatttcaactaggaaacagaaagttgaatctgttctttatgtacgcaagcatgcatttcaagcaaaatgctttaagatgagtatacacaaaccgatctaggaattccccttcttcaaatttatcatagcatgtaatgaactcagaaaaaggtttgagaacaaagatcttcatcacagcattatcatgatttataataatgaaaacgtggaaataaacctaaaagtccaaaaacaggataattttagggcmtagtgaaatatagcaaaggcctttttaaaatggggttttaaaaatctgtattacttttcagattatagagataatagcaatatacaaaaattgaaaaaaaaaattaaacctccaaatatttccccacaatctgcacctccctccccacccacccccatgtttttttaagacagagtcttgctctgtcgctcaggctggacactgcaacctccacctcccaggttaaagcgattctcctgcctcagccacccaagtagctgggcttacaggcgaccatcactattcccagctaatttttgtatttttaggagagacagggttttgccacaatggccaggctggtctggaactcctggcctcaagtgatcggcctacctcagcctcccaaagtgctgggattacaggcgttgagccactgcgcctggccacaatccctctttcttaagagacacgtgacnttaattgcttggtgaatattttatatgatcatcctatannnnnnnnnnnnnnnnnnnnnnnnnnnnnnnnnnnnnnnnnnnnnnnnnnnnnnnnnnnnnnnnnnnnnnnnnnnnnnnnnnnnnnnnnnnnnnnnnnnntttttgg

SEQ ID NO: 84680 - DNA, 798 bp, Homo sapiens
taatgataattggtccctgtgccatgcggctgaaaagagaaatagacaaacactggaaaactatcgagttacaaacgcggcacatagtaccatggtgcatcagtatcatgaaatgctgggctgccattagtagggatgtttgcagagtttcagtggcatcggaaaatgtttaagacatggtaagagaaaaaggaaagtgaaaacatatgtattcagtatgatctcaactatacaggaaatacatagaaaaaaattactgaaatatatatgaccctcaatttaggaaattaagtgaatgatagtcatccaatgcatggtatagatgcggtgtcatagatttggggtttttttcctggaaatccattatataccaccaaaatacccaattgtcacaaaaataagtgaaaaaacctacacagatacgccattacaagcattaagaacataagagcagcatttcatataaaagttacttcataattgttccttttggggatttttctccatgggctggcaaagcttcttaaactggcaatacttccaaacgtataaatatttttaatttytcatgaatatgcattctttttttcctttcctttttcattttcctttgcatttctgagctgaatatgcaagtcagctttcctactgagttttcctgtagcaaacatagtcattcttgtctgaatgaagaaccttagaactgagttcaatgttagggtcatctgtctcagaaattttgactgcatgaacacatccagaagtctgaatggtgaacccactgtggcaattccaata

SEQ ID NO: 84681 - DNA, 1199 bp, Homo sapiens
tacagttattatttgtccattaaaaataaagtaaaactttaaatatatatatatataactttaaaaaattaaataagagtgtagacaattaacaaatattacaaaattttgaaggtagtacaaacatttctggaatttaagaattattccccaaatccaccatactgtatagtactggggtagacataagcagaaactgtaattgcaaattttattttaaattataatttcttttttctaattgtgtagtaaagcaacactattcaagatcacagtagtaacaacattcctgtctttttttccacataatcttagtccctcattcttatctgctgcatacgataatgccatttctttccttgatatacatcaatctgaatgtatagcctcccagtcatgggatcccttatatatggttcaaagaaaaggtcatattacttatccaactcttcacccatttaaacaaaactaatattttatcacttcttttctcatggttttcaggaaacatcaccattttaccacttactgcacgatgttagaagtatgtgttctcatgtctctcctgaaatcaagtgaacatcattgagagcctatcaaagcagaaattatctttctattatttttatctttggtcctaatatactgcctgacagatcataagtttcttataagaagaaagggagcctggagtggagaattccagcatagtygtagtgtccctgatactcagacttttctcctgtaggtctttagtgtataattcatgaacaaggcgaagaaaataagagagacaaattccaggttattcaatagtaagtctaggcagatttttttttttttttggaggagtttggcaggtgggaaaatacaaagcaaagagaagaaaaatggagaaagcagacctagaaaaagaggtctccaatagaaggtagcaaaagggacttgagctggggatatgtccacatgtgttctccgttgagaatttgcttcttcccactgtatcagaaagggagttataaagtgctccaacaacctgacatcatagatgttttctaaagtggcatactcaatttcactaatgtatacatagtagatgaagcaatcttgcttgatgttttaagagctggatagaaagaatgtggtggccagtttgcacttttgattgtatgttaaagatagtgtcatttaccccatgc

SEQ ID NO: 84682 - DNA, 1185 bp, Homo sapiens
tacatgcacaaacacacatttcattccacaaaccaccaactccagtaatgagtgaggaatttagayccttggaccagattgacgctgttaattaatttcatctgcctgagatacgtgtttctaaagagagaaactaatcatgtagcatttgaatatattttcaaaatattgtagtaattagaaattacaagaaatatagcattactacatattttatcatttatataaatgagttagtttaatggatagaatattctctcacctagcaaattaatcttcaggtaagtttgtatgaccagaatttattcagtccatttaacatctatctatctagctagctagctagctagctaactatccatccctatttttttttttaataccaaagtatcattggacttcagagtggtaatgggacaggattcatgtacaaaccaagcaaacctaatcttggtattatgttggtaattcattctctgagcgctccagttgagacatgtttggaacattgaatgcttagacaaatctacaactgtcttgttctgaaagccaaagaagaactttatagaggagaggtcattaacctgagtgtggtgattttatctcactctttgggtcattggttctgtaatagaaaaacgatgacttactccttcataggggattgttatgagccagctcactgggtctctacatttgcttcacccttggaatatggcttagttcttactacacaatgctagaaaggaattacattaaggaaattttcattatctgggccttggggacggaaaagaatccaaaactcatgttgaactaacttatacatccatttctctcctagaacacctaagatatagaaatctctccattttccagaagatttcccaagtacaaaaaatatttaccccagccttttttttttgccaaaatatatgtttttctatgtctaaaacactgtctctaaagcatgatgcctcataggtagatgcctgtattttctgcaaaatgtgaaaatttcttctcattcaaggtttgtatttacagggcttcattgaaaaataccgttttggacatgacaatgactagagtactaatacataattataatacctattatggattgtttgcaactgtgttcattaattattcttttacatcaatataatcattagtctaaaatgc

SEQ ID NO: 84683 - DNA, 1185 bp, Homo sapiens
tacatgcacaaacacacatttcattccacaaaccaccaactccagtaatgagtgaggaatttagatccttggaccagattgaygctgttaattaatttcatctgcctgagatacgtgtttctaaagagagaaactaatcatgtagcatttgaatatattttcaaaatattgtagtaattagaaattacaagaaatatagcattactacatattttatcatttatataaatgagttagtttaatggatagaatattctctcacctagcaaattaatcttcaggtaagtttgtatgaccagaatttattcagtccatttaacatctatctatctagctagctagctagctagctaactatccatccctatttttttttttaataccaaagtatcattggacttcagagtggtaatgggacaggattcatgtacaaaccaagcaaacctaatcttggtattatgttggtaattcattctctgagcgctccagttgagacatgtttggaacattgaatgcttagacaaatctacaactgtcttgttctgaaagccaaagaagaactttatagaggagaggtcattaacctgagtgtggtgattttatctcactctttgggtcattggttctgtaatagaaaaacgatgacttactccttcataggggattgttatgagccagctcactgggtctctacatttgcttcacccttggaatatggcttagttcttactacacaatgctagaaaggaattacattaaggaaattttcattatctgggccttggggacggaaaagaatccaaaactcatgttgaactaacttatacatccatttctctcctagaacacctaagatatagaaatctctccattttccagaagatttcccaagtacaaaaaatatttaccccagccttttttttttgccaaaatatatgtttttctatgtctaaaacactgtctctaaagcatgatgcctcataggtagatgcctgtattttctgcaaaatgtgaaaatttcttctcattcaaggtttgtatttacagggcttcattgaaaaataccgttttggacatgacaatgactagagtactaatacataattataatacctattatggattgtttgcaactgtgttcattaattattcttttacatcaatataatcattagtctaaaatgc

SEQ ID NO: 84684 - DNA, 1185 bp, Homo sapiens
tacatgcacaaacacacatttcattccacaaaccaccaactccagtaatgagtgaggaatttagatccttggaccagattgacgctgttaattaatttcatctgcctgagatacgtgtttctaaagagagaaactaatcatgtrgcatttgaatatattttcaaaatattgtagtaattagaaattacaagaaatatagcattactacatattttatcatttatataaatgagttagtttaatggatagaatattctctcacctagcaaattaatcttcaggtaagtttgtatgaccagaatttattcagtccatttaacatctatctatctagctagctagctagctagctaactatccatccctatttttttttttaataccaaagtatcattggacttcagagtggtaatgggacaggattcatgtacaaaccaagcaaacctaatcttggtattatgttggtaattcattctctgagcgctccagttgagacatgtttggaacattgaatgcttagacaaatctacaactgtcttgttctgaaagccaaagaagaactttatagaggagaggtcattaacctgagtgtggtgattttatctcactctttgggtcattggttctgtaatagaaaaacgatgacttactccttcataggggattgttatgagccagctcactgggtctctacatttgcttcacccttggaatatggcttagttcttactacacaatgctagaaaggaattacattaaggaaattttcattatctgggccttggggacggaaaagaatccaaaactcatgttgaactaacttatacatccatttctctcctagaacacctaagatatagaaatctctccattttccagaagatttcccaagtacaaaaaatatttaccccagccttttttttttgccaaaatatatgtttttctatgtctaaaacactgtctctaaagcatgatgcctcataggtagatgcctgtattttctgcaaaatgtgaaaatttcttctcattcaaggtttgtatttacagggcttcattgaaaaataccgttttggacatgacaatgactagagtactaatacataattataatacctattatggattgtttgcaactgtgttcattaattattcttttacatcaatataatcattagtctaaaatgc

SEQ ID NO: 84685 - DNA, 900 bp, Homo sapiens
ttatatgctttctgtgtaaacctttttcagaagaatgcttaaagaagcaccttgggaggctgaagcaagtggatcacttgaggtcaggagttcaaaagcatcctggccaatctggtgaaaccccgtctctactaaaaatatgaaaattagccagggatggtggtgtgtgcctgtagtcccaactactcaggaggctgaggcagaagaatcgcttgaagccaggaggagaggttgcagtgaactgagatcatgccactgcattccagcctgggcaacagagtgagactccatctcaaaaaaaaacaataataataataaaattttaaaaagcagcaaataagcagaatgaagagaagcaaaaaaataaaattatttttgttgatgatattgttttggttattattactaagtaacaaaagaaaggttaaaaaaatatagagaagtgatagacttcaaacttccaacatagggaataagaaaaaatctctattaaggatagatgactaacagcaaaggagatcatttaaggcttaataaattttttaccagttgagtttcctgaagtctgttcccacctcccatgaagtcatctgtttggtcatataagcattaccccacattaatccacatttattaccatccctcttctcttctttctctcatcagtgcattatcccccacctcttattcactcaagtccttggtcatamctggctatcttatgtaataaactaattgccaccaaagtacaattatacacaataggattatctatgtcacttcagaggatagaacatgactggttttgacacttgtatgctctaaaaatgtggtcaccaaaagtatcttcaataaataaatatctcttagacataatgcgtgtgtgtgtttgtatatgca

SEQ ID NO: 84686 - DNA, 564 bp, Homo sapiens
ggtttagggtatgcatatatgatttatagctgagtattgttagtgaagatattggagtcacagaggtgagagtcaaattctgactctttaatattcaactaatgtgcaactttgcacttgacactctcagctcccttctcctcccttcctttccttcctccctttcttccttcctttctttctctttctttctttcttttttctctctctctctgtttctttcttttccttccttccctccttccttttccttccttccttctccttccttctttccttccttccttccctccctccctcccttcgttccatctctctttctttcttttatyaaagacggggtctcaatcagttacccaggctggagtacaggggcatgatcataactcactatagcctgatcctcctgggcttgagcaatcctcccacttcagcttcccaaatagctgagactacaggtgtgcaccgccacactggctaaattatttaatttttaaaaataatttttgtagacacagggtcttgctatacttatcaggctggtctcaaactcctggcctcaag

SEQ ID NO: 84687 - DNA, 769 bp, Homo sapiens
tcccaaattttaaagtacttctggaagctgaagaaataaaaatgaaaaataatccaaggagtgacaaagaggccattttcaatgccagacgtagaggagccctgagaaggatctggaaattcaaggagaacccccaatcccagaagagcagggcttagtatgcagatggcctgggcagctcatagggtgctcaggcataatcctctttggctttgatcccggctcttccagatgacaagccagctactaccagtggatgggaacagtcacctgggtgaaagccrtgtgctcttcctggtctgcgatgctttctgtggcccctggacactggtcccttgccctgaagatggtgcattactcagcatcagaaagtgctggcctagtctcagcacagtgttatacaaattagaacatcatgtggcaaagacccacagaaaagttatctagaaagagtatttttttcagagcaagatttgccacagtctccataggaaaaatgcaaaatattctctgtcttcgtccattccggttgctgtcacaaaaatgccataatcatataaacaagagacatttgtttctcacagctctggaggctgggaagtccaagatgaacacggattcggcatcgggtaaagagttcatttcctcatagacagggccttctaatacagtcctcacagggtggagggtcaaggcacctctctgcggcctctattataaggagacaaatcccattcaggagggtggtccccatgatttagtcacctcc

SEQ ID NO: 84688 - DNA, 612 bp, Homo sapiens
cctctgtttccccatctgcctggaggggaggacaatacggttacctgttagggttgttgtgaagatgaagtgagttatgatacacagagtgtttagtacactccctgacactaggcaattgtcatttaagtatgagaatttttaaaataatttggattaatcaacaagcatactgctttgtgccaggtatttgatcgaaagcaaactcaaaatttggaaccctcatacattgccagtaaggttataaaatggtacagactctttgggaaacatttgggcagttattcgaaatgttaaacctagagtgaccctatgactcagcaattttactcctaggtatttacgtaagagaaacgaagacacatgsccatacaaaaacatgggcacagacgttcacagcagccttactcataatagccaagagatggagacaatccaaatgcccattgattgatacgtagataaaaggcagtctctccttacaatggagtattgtgcaaccgtaaaaaaggaatgaagggctgatacatgctgtggcaggatgaactctggaaatatggtgctcagtgaaacaggccagacacaaaagaccacagggtgtgtgattccatt

SEQ ID NO: 84689 - DNA, 944 bp, Homo sapiens
tgcattgtcttcataagaaggaaaaggaaaaaaaaaaaaaaaaaagaaaaccagctaggtgatttataagcttccatggagcatttttggtaaatgagaagtgctgggttttccaggtaaatggaatatgcaaaccatgggtgccggggctgggaggaagtgacaagaggggacactgcttagttgcgtagggtttccttttggggtgatgaaatgttagggaactagagagggctgatgcgcgttgtgattgcaccgaacgttctgcatttactaaatgcccccgaattggacacttggagacggttaatttcctgttatgtgaattttacctcaataaaaagtgccagattctctagtaaaacaagtcacctaatcaagttatctgtgtgtcttctagttttatatgtaataatttacctgatttggagcgcgctggtgtgggtgctccagaggaccggtctgtcctgaggctggaacccgatttctcagcctgcttttgtggaacccagaggcactgactctctaatgaatgggaggcagggaaataatttccaagattcctttcggttcacaaaaataagagtattcagaagaatgaaacctstccatgtataacatctgatcattttcttatagtcaccgtcgctcttaatttctccttcacacaaagttctagtctgacatccattgaaaccagaacttctagaactttcttttcagtaaaacattctctctctctctcttccattcctcttcattgcatacaatatttgagatagcttataggaaatcagtgttaaaaaggagtaaatcatcaatgcaagaatacaactacgggaaaatataaattggagttgaatatcaagatttagagaggaaatacttagaactcatcctctgaagctctgaaattacgcacagctgctgtggcgggccatgca

SEQ ID NO: 84690 - DNA, 944 bp, Homo sapiens
tgcattgtcttcataagaaggaaaaggaaaaaaaaaaaaaaaaaagaaaaccagctaggtgatttataagcttccatggagcatttttggtaaatgagaagtgctgggttttccaggtaaatggaatatgcaaaccatgggtgccggggctgggaggaagtgacaagaggggacactgcttagttgcgtagggtttccttttggggtgatgaaatgttagggaactagagagggctgatgcgcgttgtgattgcaccgaacgttctgcatttactaaatgcccccgaattggacacttggagacggttaatttcctgttatgtgaattttacctcaataaaaagtgccagattctctagtaaaacaagtcacctaatcaagttatctgtgtgtcttctagttttatatgtaataatttacctgatttggagcgcgctggtgtgggtgctccagaggaccggtctgtcctgaggctggaacccgatttctcagcctgcttttgtggaacccagaggcactgactctctaatgaatgggaggcagggaaataatttccaagattcctttcggttcacaaaaataagagtattcagaagaatgaaacctctccatgtataacatctgatcattttcttatagtcaccgtcgctcttaatttctccttcacacaaagttctagtctgacatccattgaaaccagaacttctagaactttcttttcagtaaaacattctctctctctctcttccattcctcttcattgcatacaatatttgagatagcttataggaaatcagtgttaaaaaggagtaaatcatcaatgcaagaatacaactacgggaaaatataaattggagytgaatatcaagatttagagaggaaatacttagaactcatcctctgaagctctgaaattacgcacagctgctgtggcgggccatgca

SEQ ID NO: 84691 - DNA, 571 bp, Homo sapiens
ttgaaaatgccccagagaatgttttcttcccttttataggatgcaggyttctctttagcttctccaccaatcctgaaattcctttgtttaaaacaaaacgaaacaaaacaaaacttgtggcttttctcaaaatgacaaactaaacatgcagaatctaaaaatccccaaacacatcccagactataaacctttctgactcaacaagcagattttatggagaccccagtaaaaccccaaggatggcaataaataaatcgccagccggttctcccatacagctgcctcttccacaagacctcaagcctctgaaggcagagggaagaccccatgcgtcttggttttggggacccacagatgggccatccaaatggccgagctgcctagatttctcccaaatagtcgcgatggaaggtagctgagaggcgggggggaatattcatcacaaagcattttcccaaacttccacctcaaacaaggatgcaaatatttggaataaacaaggacagaactaatacaatgaagcaacaagtaaaagtggcaacgacactggtcacatggaaaggatgtgaaa

SEQ ID NO: 84692 - DNA, 1189 bp, Homo sapiens
tattatgctaagtgaaagaagccagttacacaagactatacatgtgattccattcatatgattgttcagaatagggaaatctatagaaactgaaattggttacttaagtttggggaggaatgggtgaatagggagatgacagctaaagggtacagtgtttcttttcaaggtgatgaagacattctaaaactaactgtggtactggtcacatatacctgtgattacatggaaaatcatcaaattatacattgtaaatgggtgaactgcaagatatataaattctatctcaataaaactgttagaaatcttataaaaatgagcaagcaagatgactaggggaaaaaaaaaactttttaaaaagcaatagaggtaaactcagtccaataataaaaaagtatgagattatgataccacctcatgaacaaaggacagataaatgggacacaatacacagagtaaacccagatcccatgaggatattatacatgtggtaagagatatataaaatcagcgggaaaacatggactattcaaaatatctattgagactagctacttagctagatcagggagggggaagaagtaaacttggattcgtaccttatatcaaataccaacacagagttccaaatatccaagatttcttggtaataataaaataataaaggtaataaaaagagaattttggtttccaaattaatttataatctcaatgcagaaagactttttctaaatgtgattcataacatagaagctacgaaaggatgagtcaattaaaatttaaaacttttatgtcaaaaatacatatgtaagatacattttttaaacagtgtcaaaatgcagatgacacactggagcattacttacaaatcactaaacagaaagaagactaattttcctcatatrtgaagagcttctagagaccaataaaaagataaactgactttctaaaaattggacaaattatgtaaccaagcttgcgcagaaaaaatgaacatttaggttcttaagtacaaaaagatgctctacctaactcataatgaaaaaaaacaaaatttaaaacagacttggatacaacatgttcagattggtaaatttcttgatgtttgatgagggacaacattggcaatgctgttggaaacaaaccttcacaatttgctgaaagaattgtaacctgaagaaaaacctaa

SEQ ID NO: 84693 - DNA, 873 bp, Homo sapiens
tgcataactgaggtttgtcaaattcaaatttggttaggtaaagagtttaccatgtcacaaggaatctggttttggaaagctccaagaactgtaggatccatttcatctgtagactgcgatactgctcataagtatttttcataaagaaaaataccagctcattttctttagactccttgtttaaaaatcaattaaatcaacaaatatttattatgaaatgattgaaaatgaactcatgagatggaccaagattccagtgaagattccagtgaccacagtgaagaaatctaaaacttatcttgccaaatcaagatgaatggagaaatttttgaataaagtataatttttttctatttcaaaaagtaaaactacattctatcatttcatagattgagagcccatttttttgccctccttatacacacacatatgcacccacacttgtgcccacacacctaagtgtcaatcggtgcttcatcttagagtaaattctattctatgtaggaaattgtgacacaccatgtgccactgtggagtatgtttccagtgtacctatgtgtgtttctggtgtgaggagttctgtcatctgcttctactaagagcaccactattgacctctgccagagcaagatgatgttcatatcagtagaattctaggatacaaaacagtgagatttccatttcctgttttcacactgaaagtargtattttaactcatttttagctttattgatgtacaatggacatataaaaaattgcctacattgaatgtgtacatcttgatgagtttggacataacgcctacactcatgttaccatcactacaactatgttaacaaacatatccatcatctcaaatttgtgtgtcagta

SEQ ID NO: 84694 - DNA, 873 bp, Homo sapiens
tgcataactgaggtttgtcaaattcaaatttggttaggtaaagagtttaccatgtcacaaggaatctggttttggaaagctccaagaactgtaggatccatttcatctgtagactgcgatactgctcataagtatttttcataaagaaaaataccagctcattttctttagactccttgtttaaaaatcaattaaatcaacaaatatttattatgaaatgattgaaaatgaactcatgagatggaccaagattccagtgaagattccagtgaccacagtgaagaaatctaaaacttatcttgccaaatcaagatgaatggagaaatttttgaataaagtataatttttttctatttcaaaaagtaaaactacattctatcatttcatagattgagagcccatttttttgccctccttatacacacacatatgcacccacacttgtgcccacacacctaagtgtcaatcggtgcttcatcttagagtaaattctattctatgtaggaaattgtgacacaccatgtgccactgtggagtatgtttccagtgtacctatgtgtgtttctggtgtgaggagttctgtcatctgcttctactaagagcaccactattgacctctgccagagcaagatgatgttcatatcagtagaattctaggatacaaaacagtgagatttccatttcctgttttcacactgaaagtaagtattttaactcatttttagctttattgatgtacaatggacatataaaaaattgcctacattgaatgtgtacatcttgatgagtttggacataacgcctacactcatgttaccaycactacaactatgttaacaaacatatccatcatctcaaatttgtgtgtcagta

SEQ ID NO: 84695 - DNA, 696 bp, Homo sapiens
ctctattaaaacacataaacacagacttgaatctaggagagaagtacctcagataactgtccttgtcttagcaaccaccagtacctaattaattcagtggatggcccacagtagttactcggtaaacattacatcaaaacactgaaaaatcttgagctaggtgattttaaaggtctggccgttttttgatatgtatgtttctacttgtaccatttatcaggtaaattcatgaaatttgtaccagatcttttttacattttcatttatgttttgttttagaaataaagcacatttttcaaaactgcaaattgatgaaagtgtatgttaatgatgtccatgtttaatgtttcaaagaattttcacattatgacatttcctcttcaaagcaatcctatccttatgaacgatactattgccatttttttcagatgatggaatgggttcattatagggccttaggaaaattcctaaattattctgtgtttcagtgatttctctgtcccccattttactctcccattctgatttctgactgagcacaatgttcaaatgccttttctgcataaaatatacaaaaagatactgttggcagaaaaaaaaawttctgtctaaaacgtgtgccaaatatgaacaataaaaaagaatgcctaattatgtaaagtttactgcttaatttaaaagcctttctattgtaca

SEQ ID NO: 84696 - DNA, 1768 bp, Homo sapiens
cattgcaatgttttctgggctcatatccctcagaagagaggcacagacattaaggattttttttttttttgagacagagtctcgctctgtctccaggctggagcgcagtggcatgatcttggctcactgcaacctctgcctcccaggttcaagcaattctcctgcctcagcataccaagtagctgggactacaggcacgctccaccatgtccagctaatttttgtatttttagtagagacagggtttcaccatgttggccaggatggtcttgatctcttgacctcgtgacccaccccccttggcctcccaaagtgctggggttacaggcgtgagcaccaaacccagccacattaaggattttttaaaaaacaattgtgatcagtcagagcaacactatggttgttaatttattttcctactgttactaaaacaccagggattcagtctaggtcctgctgcttgctgtatagactgccagtcactgagtcaacaagtattgccagggagaaggctttaatcaggtgctgcagccaargagaatggtagataaaaatctcaaacctgtctctctgagtaaaattgggggatttacacagaaaggaaggtaggaaaacaggaattagagatgggtgaagaagcaatcatgatggatgaggagtctgacttctcattatctgggtgcagtgatccgttgagtttcagttccttgcctaagggtcgatttcctaaagaaggaattcagatgagaaaaacgttttaagaccagggagtttaaagaccagtgggttttaagaccagggagggaaggttaatttctatgtttgttcaaaaaactgtaaatattacttctatgaacaagtgggctagtttcactaagagaattagaacttatatttcaaaaacagcattaatttttcccttcttttttttatagtcaagctcttgtttttatagtcaggaaccatttcttgaatgggtaccctgcttacctcacatttttaaaggaataaaaatttttccaactgtgctaacatttcttgttgaccaagagcgtggtactggagtttacctcttctataacaaggtaggccttatatcccagagggaatttatcttgacatgacaacaataaaaatttaccttagcaaaagttattttcaagttcttgttatgtctggcaatagaacctataaaattggctatagcaaaattatttaaaatcaataatatagcttgacactttagagatttctcacctggtcgtcattcattttgatgaaaatggaaaacgtgatgctgtatgcatagtgattctcccttgctaattctctaaagaatataagctgggatttttctatacaaatttaagattccataaaatggttaattaaacagaaaaaaaaatggaagtaattgccacagatctatatttttttcttccaaacgtccttaaccctacctgtgaattagaattcttcttagagccattaaaaaacacataaactgacagttgtgatggctcatgcctgtaatcccagcaactcgggaggctgaggcaggaggcttgaggccaggatttcaaaaccacagtgaggcactactgcactccagcacaccaggtgaggtgacagagcaaaatccagtctgagaaaacaaacaagcaagcaaacaaaaaaacaaacaaacaaataaaaccataagttcggcccctatcgtcaagattgtagggaaggaaaaagctctttcctccatcttcgtatgttcaat

SEQ ID NO: 84697 - DNA, 1004 bp, Homo sapiens
tttaagaatagatgccacattcaatacatagaataatgggaaaatgggaaagtattttccttgggacaaactcattaatgcagtttgctctatttaactaaaggaagaacctccatgtgccacaaacatctccaaatcttcytccaagtcccatatggaattatatagcttcaattccacctagaatatcttcatgcaaatatcttcgcaacagaacaccactaaacattctaagctagaaccattacttctaagctagaaccattactcccaacccaggccaaggtaggattgattctctacctcttaaggttgtccctgaagaaacatgggttgtgaggccaggcgccatggctcatgcctgtaatcctagcattgtgggaggctgaggtgggttgatcgcttcagcccaggagttggagactagcctgggcaacaaggtgaaaccccatctctaccaaagaattaaaaaattagcctggtgtggtggcattcatctgtagttccagcttcttgggaggctgaggcaggaggatcacttgaacctgggaagttgaggctgaagtgaactgcgatcacgctgctgaagtgagctgtgatcgtgccactgaactccagtttgggcaacagagcaagaccctgactcaaaaaaaaaagaaaggaacatgagctgtggtctacctttcttctttcctattaacccttctccctggtttcttctttttctagtgacaacaaaaaaaggagttatcttctttacagatgacacttgataccggtttttataatagtttaatgtataatatgctgcttgtgaaggtagctcatccttgggcaccagttacaaaactggacactctcaaaccatcagcaaattatcaaacatttttgactggggttagtaaaacctgccctttgacttaaaggaaaaggaacaaaagatgaatctggttttaaaagatcattccaattaccaggccaaagctgcagttgagaggatggtg

SEQ ID NO: 84698 - DNA, 1004 bp, Homo sapiens
tttaagaatagatgccacattcaatacatagaataatgggaaaatgggaaagtattttccttgggacaaactcattaatgcagtttgctctatttaactaaaggaagaacctccatgtgccacaaacatctccaaatcttcctccaagtcccatatggaattatatagcttcaattccacctagaatatcttcatgcaaatatcttcgcarcagaacaccactaaacattctaagctagaaccattacttctaagctagaaccattactcccaacccaggccaaggtaggattgattctctacctcttaaggttgtccctgaagaaacatgggttgtgaggccaggcgccatggctcatgcctgtaatcctagcattgtgggaggctgaggtgggttgatcgcttcagcccaggagttggagactagcctgggcaacaaggtgaaaccccatctctaccaaagaattaaaaaattagcctggtgtggtggcattcatctgtagttccagcttcttgggaggctgaggcaggaggatcacttgaacctgggaagttgaggctgaagtgaactgcgatcacgctgctgaagtgagctgtgatcgtgccactgaactccagtttgggcaacagagcaagaccctgactcaaaaaaaaaagaaaggaacatgagctgtggtctacctttcttctttcctattaacccttctccctggtttcttctttttctagtgacaacaaaaaaaggagttatcttctttacagatgacacttgataccggtttttataatagtttaatgtataatatgctgcttgtgaaggtagctcatccttgggcaccagttacaaaactggacactctcaaaccatcagcaaattatcaaacatttttgactggggttagtaaaacctgccctttgacttaaaggaaaaggaacaaaagatgaatctggttttaaaagatcattccaattaccaggccaaagctgcagttgagaggatggtg

SEQ ID NO: 84699 - DNA, 884 bp, Homo sapiens
caatgttcaatctagtgctgtggaatttaaatgaatttcatctgctcctcaagccacatctctcttcttaggattatttcatgaagaaagataattttcctggtgggtccaaggtctagcaagcagtactgccatggcaacacagctctgggttatgaataacacagggactcctgccagggttgctggctgcgcagagctctggaagttgtactcattactgtctccacgaaggagcgcgttcacagagaggagtattttctcatttatccacagtcgagaagcacagtaatttggattgtggaaactggttttgctgaaaacacaagaatggaccaaatggcaaaggagcaacatacatgaagaagctgagcctcttccctcacactgatagagtggaaggattccagagagggtatcagaaggcccttccccagcagacgcttgaaacggaaaaaggacaggcaaactcactcctcttttctattagagagggacacataactaaaataatcaaatyagatgcctacacaactcccagaaaagagaacaaccaatattaatggaataaaacaagcccgtgtggctgatgagttttgccttgtgttttactttttacttttgtttgtaatactgccggggctcagggtaggcagggaagaagtaaatgcttctctgcctaccaaggagtgctggagtagaaaggggaagacttttgctcctaaagggcaaggggaagctcagcctttgagaaggaaaagggggaagcccacgcatttagattcataactaatcacggataactgagcagttgccaatgtcatgtcgcaaagctcggaactcctgtgtcataagccacatggacctgcctgtgtggtttgcca

SEQ ID NO: 84700 - DNA, 561 bp, Homo sapiens
atgttatgtcactggctggggagaaacccaaggtgagatcaattccattgcccgtataacaaattgtttttgacctacagtgcatgttacaaaatgagcattttagagatccttgtacaaattcctatccatgaacattgtccaactctcctgactttgcctgggcacctgtctatgtctccataatcagtcttcaagggatgtgggcaaggggagggggccatttctttgagtctctctctttttttgctttcagaatctttttttaaatgatcgtatgtttcccttacaccaaaagcaagcaaaaagccagtagaggtcactgagtctcttaatcataatttcagcgttcatattgcttcccaggtaagtggggttttgacccagatctcaagttaagggtgttagattatttttcatttgaaattcaccagactgggtttctaaatatgatgtaaaacaataacaacaaaagttatagttaaactrgtcttcttcccaaatacccacatgtctaacgtgtgtgggagggtgttaggcaggggacctacatctggggaa

SEQ ID NO: 84701 - DNA, 561 bp, Homo sapiens
atgttatgtcactggctggggagaaacccaaggtgagatcaattccattgcccgtataacaaattgtttttgacctacagtgcatgttacaaaatgagcattttagagatccttgtacaaattcctatccatgaacattgtccaactctcctgactttgcctgggcacctgtctatgtctccataatcagtcttcaagggatgtgggcaaggggagggggccatttctttgagtctctctctttttttgctttcagaatctttttttaaatgatcgtatgtttcccttacaccaaaagcaagcaaaaagccagtagaggtcactgagtctcttaatcataatttcagcgttcatattgcttcccaggtaagtggggttttgacccagatctcaagttaagggtgttagattatttttcatttgaaattcaccagactgggtttctaaatatgatgtaaaacaataacaacaaaagttatagttaaactggtcttcttcccaaatacccacatgtctaacgtgygtgggagggtgttaggcaggggacctacatctggggaa

SEQ ID NO: 84702 - DNA, 871 bp, Homo sapiens
  misc_feature (1)...(871): n = A,T,C or G
tctaaacttgtgaaattgggagacatgaaagtattaaatctgtttgaataataattcctgtcatttattaacttctgcccttggtgactcatcctcaggttgtacaagatacatatgatacgtcagcccctctctctccaggctgttttatttctttgtagtgaaggcttgcagttacgcatcttaaaatgtttacaatttctctaaataactgagactgtctaaagacgagaagaagatgaaaggttctaaatatgttctgggttctcttggcaaagacgagtcctagttctggagccagacagcctggatgtcttgacttggccgctcccaggtctgtgtcctctggcgattttccaacattgttgactcttgtgttcctatctgtaagatgaagaactggaatgatgagtcattggtataatatacataaagtactcagcccagtgcctgagacacagtaactgtccaataaatgttaccaattgcattataatcagtgatataatgctgatgataataaaatatatatatatasaattacttgaggtaaatgaaaaaatgcctgagcccaactccagtccaattaaataggatttagtctaatatgcagttgatatagaggttatcaactatttacctgctggaagatagttgatttcagcgtattttataggactggcttcccccctccctcaacaccctacattttatgtctacctgaaacctcagaagttgacctttggaaatagggtctttgtagatgtaatgagttaagatgaaatcatgctgtatcagagcgggccctagtccaatgacaggtatcctttgaagaagagaaaacagagacacagccacataccangaaaaa

SEQ ID NO: 84703 - DNA, 871 bp, Homo sapiens
  misc_feature (1)...(871): n = A,T,C or G
tctaaacttgtgaaattgggagacatgaaagtattaaatctgtttgaataataattcctgtcatttattaacttctgcccttggtgactcatcctcaggttgtacaagatacatatgatacgtcagcccctctctctccaggctgttttatttctttgtagtgaaggcttgcagttacgcatcttaaaatgtttacaatttctctaaataactgagactgtctaaagacgagaagaagatgaaaggttctaaatatgttctgggttctcttggcaaagacgagtcctagttctggagccagacagcctggatgtcttgacttggccgctcccaggtctgtgtcctctggcgattttccaacattgttgactcttgtgttcctatctgtaagatgaagaactggaatgatgagtcattggtataatatacataaagtactcagcccagtgcctgagacacagtaactgtccaataaatgttaccaattgcattataatcagtgatataatgctgatgataataaaatatatatatatagaattacttgaggtaaatgaaaaaatgcctgagcccaactccagtccaattaaataggatttagtctaatatgcagttgatatagaggttatcaactatttacctgctggaagatagttratttcagcgtattttataggactggcttcccccctccctcaacaccctacattttatgtctacctgaaacctcagaagttgacctttggaaatagggtctttgtagatgtaatgagttaagatgaaatcatgctgtatcagagcgggccctagtccaatgacaggtatcctttgaagaagagaaaacagagacacagccacataccangaaaaa

SEQ ID NO: 84704 - DNA, 1110 bp, Homo sapiens
atttttttttctaattgtacactctgacatgtattgctggtcaccttctaggaagccaaagaatatgactgcaggcatgggcattgtagacaaacttaatgcatctgttttctattgctatataacaaattaccaccaacttagtggcttagaataacacatattcatgatcacatggtgctgtaggtcagaaggctgggggaggctcagctcttctccctgttagtgtctcccacgcaaggtgtcaggggcaggctgaactccatctgcaggctctggggaggaatctgcctcccagctcatctggggcatttacagaatcccagtccttgtggctgtgggactgagacccccattttcttgctggttggaggctgggagtacagaaacaagttcatgcccataataaaaggagttagaattcatttccagattataatccaggtaatagacattatctccaggacaagggtgaaatgcacatgctattctgggaagatactaggagaactattaactgagcacatttctggatttttgtttggttttctttactagtttttaccttggaaaatactgacagcatttctgaagatacgagatccaaagcctgatggggctggcaaacagtcagaaaagtctagggcagcatttcctaaggtgacgcctataaacactactcccatgaggcctccaaaaacatgagtggagaccatcatacattagtataatgtctcggatagcccttctgaatgcagacattccaatacattgacattttaaggttctgacaaatcctgtagcaaagaaatctttttgcctaagctgagattgggtctacatgtatttccttgggagcccctcttgctgtgcagtattggaaatactgctcatgagtgtggcagtgataactgtaaagccagaagcaggctctgggagaaaagccrggggtcagactcctgctcacttacaggcagtgagaagagtttgtctttggcctccttccctctgtccaatgctcctcccccaccactctttcttcacttatttgctttcctctgccaacctgaaacctacagaaagcaaagttgggctgggcctgtttatgca

SEQ ID NO: 84705 - DNA, 769 bp, Homo sapiens
ggatccaaccaattaagggtttctttataaactaaatcctcaaatctgactttcacaaacaaaatagagtaatgttaagtttaagagtaagcaccaaaggtattattttgcttttgcccatttattgtaatctaacatctttttgatccagaaaaattcagctcatctctagctggccrtccaagaaactggtcttttcaattcaattcaacaaatactgctattggccaactacatacaaaacactgaaaaaagcgaagctggagaggacaccccccaatccccacatcctgcctccagtctaacatgcggaagcatcagagcatgataccctgcagtgaccgcagctccagtttcctgtgcttgtcagtctcttacctctgcatggagggctctttgacctcctcagtcctgattttacctcccctgggaagcctttcctagcctcagatagaactgatggctcccaaattctgcctctactccccggacctctatcctagcacctgtacaacagcactcccctgtgggtctggagctcttggaaggcgggagtgcattgtcacaccaagcaaagtgcctggtgttcaacaactgtttgtgtaatgactgagtgctgaaacaagaagtcaagtgccctggtcatatctgttcctcagtgtcgtcctgggtttctctcctcctattaaacaaaaatgctggctactaaggacaagaccgatgctatctatttgtacaactccagatttggcccagattgaatgaaaat

SEQ ID NO: 84706 - DNA, 875 bp, Homo sapiens
  misc_feature (1)...(875): n = A,T,C or G
cctggatcttaactaatataatgtctattaagatgacccctgagctaaccttctaaatttgaagaccccagtgagggatttttctgtgtctaccttaacctttgctgctcaaaaaacaagacaggaatatcaaaagtgaaagataggaactccatagattacaaatatatattatggtatagtttgttgccaaaatgttttctacaattcatttctatgtgttaatacattaaaatggctagtgtttatggagtgtgtgatattagattctagactaagcactttacgtggattattttaagtctcatcaaagctctataaagttagtacttctgttaatcttattctataaataaggaaaacaaggcttaggactttcaggagtgaatagtacacaggtaaatcagccaggaattgaaaccaggcaactgattggtggagcctgtgttcctgatccccacacagcactgctgaatatatttcattctagaaacattcttgatagttgatggccacatctaaatatttttaaagaaagacactgtgcacttgacctaaaactgaatctttaattaaaacattgttttatgaaaaaaatttgactagataatttagattttraagatctttaaattcaggattaaaaccacccgtcctgcaaggacatggtccntcatgnnnnnnnnnnnnnnnnnnnnnnnnnnnnnnnnnnnnnnnnnnnnnnnnnnnnnnnnnnnnnnnnnnnnnnnnnnnnnnnnnnnnnnnnnnnnnnnnnnnnagtttttccttttactgagggcttttccacaactcagacttggggctgccgggcagtgtcagtctcagactcttctctctccagggattccctgaca

SEQ ID NO: 84707 - DNA, 1029 bp, Homo sapiens
ggttgtcaagtgtattgacatataatagtttatagtcatctcttttttttattatactttatgttttagggtacatgtgcacattgtgcaggttagttacatatgtatacatgtgccatgctggtgcgctgcacccactaactygtctataaagacacatgcacacgtatgtttattgcggcattattcacaatagcaaagacttggagtcatctcttataatcatttttatttctgtggtatcagttgtaatgtcttatcttttatttctaatttagttatttgagctttctttccttttttattagttattctagctaaagctttgtccattttgttgatcttttcaagaaaccaactcttagcttcattgattttttttctattgtttttctattcactattcgatttatttctgctctaatctttatcatttgtttttgccttttacttttgggtttagtgtgtttcttttttagtttcttaaggtataaagttagattgtttgagttcttttttctttttgttacacatttgtgatataaatttccattttagcatgatttttgtatccaatgtttggccgcttaatatcaggtgctttataaagtacatttatttcttctctttttttctatcctggatcctcatcctttcatgtgactattattgattgagtgccttctctgagccaagcaacaagctgtaactggtgaacaccatacataagcaaaacagtggttatcatgccgtgtactaagactttaaggaaagtagtgtatgctgaaaacagaatatgtataacaagtcctgtatcaataacagtttttttctgcattcagaaaatctaagccattatgacttaaacaatgaacacatgtactgcattgaataattagaagttcagaggaatatcaagcattgagattgtctttgtgtgaaaattctgtctctctctctctgtggttatcccagctctgcccttctttgtgtgctgggttcatcttccggccaataacaatgaggctg

SEQ ID NO: 84708 - DNA, 1029 bp, Homo sapiens
ggttgtcaagtgtattgacatataatagtttatagtcatctcttttttttattatactttatgttttagggtacatgtgcacattgtgcaggttagttacatatgtatacatgtgccatgctggtgcgctgcacccactaactcgtctataaagacacatgcacacgtatgtttattgcrgcattattcacaatagcaaagacttggagtcatctcttataatcatttttatttctgtggtatcagttgtaatgtcttatcttttatttctaatttagttatttgagctttctttccttttttattagttattctagctaaagctttgtccattttgttgatcttttcaagaaaccaactcttagcttcattgattttttttctattgtttttctattcactattcgatttatttctgctctaatctttatcatttgtttttgccttttacttttgggtttagtgtgtttcttttttagtttcttaaggtataaagttagattgtttgagttcttttttctttttgttacacatttgtgatataaatttccattttagcatgatttttgtatccaatgtttggccgcttaatatcaggtgctttataaagtacatttatttcttctctttttttctatcctggatcctcatcctttcatgtgactattattgattgagtgccttctctgagccaagcaacaagctgtaactggtgaacaccatacataagcaaaacagtggttatcatgccgtgtactaagactttaaggaaagtagtgtatgctgaaaacagaatatgtataacaagtcctgtatcaataacagtttttttctgcattcagaaaatctaagccattatgacttaaacaatgaacacatgtactgcattgaataattagaagttcagaggaatatcaagcattgagattgtctttgtgtgaaaattctgtctctctctctctgtggttatcccagctctgcccttctttgtgtgctgggttcatcttccggccaataacaatgaggctg

SEQ ID NO: 84709 - DNA, 1029 bp, Homo sapiens
ggttgtcaagtgtattgacatataatagtttatagtcatctcttttttttattatactttatgttttagggtacatgtgcacattgtgcaggttagttacatatgtatacatgtgccatgctggtgcgctgcacccactaactcgtctataaagacacatgcacacgtatgtttattgcggcattattcacaatagcaaagacttggagtcatctcttataatcatttttatttctgtggtatcagttgtaatgtcttatcttttatttctaatttagttatttgagctttctttccttttttattagttattctagctaaagctttgtccattttgttgatcttttcaagaaaccaactcttagcttcattgattttttttctattgtttttctattcactattcgatttatttctgctctaatctttatcatttgtttttgccttttacttttgggtttagtgtgtttcttttttagtttcttaaggtataaagttagattgtttgagttcttttttctttttgttacacatttgtgatataaatttccattttagcatgatttttgtatccaatgtttggcygcttaatatcaggtgctttataaagtacatttatttcttctctttttttctatcctggatcctcatcctttcatgtgactattattgattgagtgccttctctgagccaagcaacaagctgtaactggtgaacaccatacataagcaaaacagtggttatcatgccgtgtactaagactttaaggaaagtagtgtatgctgaaaacagaatatgtataacaagtcctgtatcaataacagtttttttctgcattcagaaaatctaagccattatgacttaaacaatgaacacatgtactgcattgaataattagaagttcagaggaatatcaagcattgagattgtctttgtgtgaaaattctgtctctctctctctgtggttatcccagctctgcccttctttgtgtgctgggttcatcttccggccaataacaatgaggctg

SEQ ID NO: 84710 - DNA, 1029 bp, Homo sapiens
ggttgtcaagtgtattgacatataatagtttatagtcatctcttttttttattatactttatgttttagggtacatgtgcacattgtgcaggttagttacatatgtatacatgtgccatgctggtgcgctgcacccactaactcgtctataaagacacatgcacacgtatgtttattgcggcattattcacaatagcaaagacttggagtcatctcttataatcatttttatttctgtggtatcagttgtaatgtcttatcttttatttctaatttagttatttgagctttctttccttttttattagttattctagctaaagctttgtccattttgttgatcttttcaagaaaccaactcttagcttcattgattttttttctattgtttttctattcactattcgatttatttctgctctaatctttatcatttgtttttgccttttacttttgggtttagtgtgtttcttttttagtttcttaaggtataaagttagattgtttgagttcttttttctttttgttacacatttgtgatataaatttccattttagcatgatttttgtatccaatgtttggccgcttaatatcaggtgctttataaagtacatttatttcttctctttttttctatcctggatcctcatcctttcatgtgactattattgattgagtgccttctctgagccaagcaacaagctgtaactggtgaacaccatacataagcaaaacagtggttatcatgccgtgtactaagactttaaggaaagtagtgtatgctgaaaacagaatatgtataacaagtcctgtatcaataacagtttttttctgcattcagaaaatctaagccattatgacttaaacaatgaacacatgtactgcattgaataattagaagttcagaggaatatcaagcattgagattgtctttgtgtgaaaattctgtctctctctctctgtggttatcccagctctgcccttctttgtgtgctgggttcatcttccgrccaataacaatgaggctg

SEQ ID NO: 84711 - DNA, 732 bp, Homo sapiens
cctcctgggttcaagcgattctcctgcctcagcctcctgaagtagctgggtttacaggcacccaccaccacgcccagctaacttttttgtagttttagttgagacggggtttcaccatgttggccaggctggtcttgaactcctgacctcaggtgatccgcccgccttggcctcccaaagtgctgggattacaagcatgagccaccacacccggcccattgttttatgtagacaataataatttagattaatccacatacttactctttttgctgttcttcatttccttccatataagcatgcttctctctcagcttaatttctttctacatgaataactcctattaggggtgtgtgtgtgtgtgtgtgtgtgtgtgtgtgtgtgtgtgtstgtctgtgtggtggagggtgtctgctggtgttccagttctcccagtttttgtttgtcggaaaatgcgttttattcaccttcatatttgggagatttttttcccctgggaaaaaaatctttattcaccttcatatttgggagatttgggcttgttttattttctttcagtcctttggaaatgtcattccattgtcttctggcttccttcatttctgttaaaaagtcatctgtcagttttattgtggttcttctgaaagtaacatatctgttttttctctttggctttgtttttttttttagcaattttactatgatgtacataggtgtggttctcttcatat

SEQ ID NO: 84712 - DNA, 1968 bp, Homo sapiens
tgcatgagaagcccaagaccacagtccaaggctattattcattaaatgagaggagaaaaagtctacaaataaagcgttctgggtctttttcctaaatattaattgtttatttcatgattcttttccaatctaaacagaccttaagctgccccttcttaatatgctcccataaaggattataaaccagagaggagcttggtttaaacaaagtaatcagaaagtaagcaatcttctctttctctctggctcgcagcttgttttgtctgttaggaaacttttctctttagtgtgcagatctcaaggtcaaacagaggtcacccttctgctttttgaggtatgggtgctttcacattatttgctcatttttattgctgagaataaccatccatttgcctaaataactggggcctccccaacacaaagacttgagggtggacactggcagggggtttaatctcattcagtgcaaagcaaacaagttcaaatctcattaaatggtggacaaatgcagcaagaatacaaacatttccaatttagaaaaggaagatagaaatatgacacagaagtattctaatcatttagtagaataaatcgtaccaacatgatactaaaactgtcaacttggtggaaaaaaggataaaactccattaataatacaacagcaatgcttactttttcacatgaggaaaattccattaaaacaaacagcctggggctttcaaattgcttttgttcaagatcagtggaatattgttataaagaccatattgctagcaatgacattttggatctgaagatgaaacttagctgattttttagggtgaaccaggagagatggggtagttgcacaaagggctatatgtgaataaccccctttatgcaaattttaaaaatgtagacccaacgagattctgtgactcatgcatgtaatcttagcattttgggaggctgaggtgggaggatcacttaagcccaggaggctgcagtgagttgtgatcgtgccactgtattccagcgggggcgacacagtgagaccccatcttaaggaaaaaaaaaaaagaagaaatagacccttcacgtgggttcacagcttggttagaatagggcaggctggaattcaatcccacttgtccctgcagccaggggataaattgtacagcctttgcagaggccttggttgcacacgattgtcctttgaaggcctgtttataaattagctttctgggcaaggtgcagtggctcacgcctgtaatcccagcactttgggaggccaaggcgggcggatcatgaggtcaggagatcgagactagcatggccaacatggcgaaaccctgtctctactaaaaatagaaaaaattagccaggcgtggtggctgatgcctgtaatccctcccagctactcgggaggctgagacaggagaatcacttgaacccgggaggcggaggttgcaattgccactgcactccagcctgggctacagagaaagactctgcctcagaaaaaaataaaaaataaaaataaaataaattggctttctggaatttgtttcttgagccattatggcataggcctcactgtatgaaaccttttaaattacacataaaatttcccatttcaggatttggactaatgctttcccccgacccccctgcccccagtttttaaagtactttagattcatcctacaaaggtttgagctctcgacccctccccacctacccaactatgacataattatggtgcatctggccagatattgtacaaagtctgccataggccttgtctatacggtcagaattctcaactgacatatgctctccgaaggtgctgtcttaacttagkttcccttaaaagcagacctaaagaaaagggttttgatataagtagtttatttcagaggtggtcccaggaagcacagtgagaggctggggaattgagacaagaaaataggaaatgtcgataaagga

SEQ ID NO: 84713 - DNA, 541 bp, Homo sapiens
ccaagctgtaaaatataatgtgaagggaagcattaaaaataagcaatgtactggcttctaaaccataataaaatatgactgacaagaatgtctgtttgrctgtccttccatcctcttttagtctgcaagtgaaaagatcacctcaacagcataagccagcatctacattttatcatactttaagattgccccttagggcagactgagtgaaaagcacacatttcccagtgtttccttctatcatcttcatttgtttgcctaccccttcccccaaagcatttgtgtcactctcttcccacatttggacgttcttagcttctgaactgaacttctgaaagagtttaaaggggagatgatctgacaaggagatttgcttgtcttaaagcccggctgtgcctgcctttaattaaaaatggtattgatttttctctgctctaatgataggcactagtctgccctccccatgttcgtaagtgacagtttaagtatgaaacaaagggcatttattcagcacttaatgcaaaattatgactgattaaaa

SEQ ID NO: 84714 - DNA, 706 bp, Homo sapiens
tttgggtccaggagttcaagaccatgttatgaataatacacatgtcatgcactcaccacctagtttcaaccaatatattttgccatactttcctacatattaaattaaattaaatctgatatacataatttttcatatacatattatgtatatgataaatatatataaccatataatatgtatattataaactcacaaaagttttatttcttccattttcaattatttctaatctatttttcaattaagtataatgttttatcataytttatcatgttaaagatggttcctatgtttttgttttgctaggagattattatttttaaaatcataagtaggtattaaactttatcaaattcttctgcatctatgagatgatcatgtgattacttttttattctgttatagtgaattatgctgtttttttaaattactcaaacttctcttcctagaatgaactctaatcatgagatacttttatttttacatattcctgcattcaatttgctaatactttattgttttttatatctatgtttgtaagatagattggtctctagttttcctttcttagacagtccttgtcaagttttagtatcgagattatgctgaactcataaaacaatttgggtagttttccctctttttcaatttttggaagagtttgtgtgacattgttctttcttccttaaacatttggaagaac

SEQ ID NO: 84715 - DNA, 974 bp, Homo sapiens
ttaatgcataatactttatatatcccttatgttgacatatttttacctgatatagattacgatataggtgttaactaccattaatgatatatctagaatcccattagtttccaagagcttggatattaatggtaaagtatttcaattagttttgtctggtctccaactatatgggtagggcctatccaaattttcaaaactgttagtctgttaatgtgattacctcacaatattccattaagttcttttctatcatagaggctagttaattgggctagcagaagaatttcctcttccaagaaatsttatattaatgtttagacccctaaaacactcttttccatctttaataagcacatggaagaactggcagaggagagtggggggaaattgtaaacaactactactaatgtctacatgtttatgggtagaactgaaaaagtgatcaaataattatctccaccagagatctggtactcacacaatttataccagcaagtcttttgatgctttacaatggaagataattcttagtctaagtaaactgctctggaacttctccttactttcttttgaccccaccacgagcgttaaaattgaatttcttatagggcacatttttttaagagaaattttaatctcttcaagaaagttcagggtaacgaatgaaaaacataaaattgctgagctgcagaaaccaagcagtagtctgggttttatacaggtcaagcaacccactctcacagagactcactacatgcagggtctctgtgccatgcagagagagctgtaaaggcagtaccagttagaactataatttcccatctcttccatcaattattagtgttggagaactaggaaatggggcaagtgagttgggctgccttccacctggagcctagaaagaggcttcgatccaaagagacagaagcactaaaaccacaggccttctatgttggcaaatagtgaatgca

SEQ ID NO: 84716 - DNA, 974 bp, Homo sapiens
ttaatgcataatactttatatatcccttatgttgacatatttttacctgatatagattacgatataggtgttaactaccattaatgatatatctagaatcccattagtttccaagagcttggatattaatggtaaagtatttcaattagttttgtctggtctccaactatatgggtagggcctatccaaattttcaaaactgttagtctgttaatgtgattacctcacaatattccattaagttcttttctatcatagaggctagttaattgggctagcagaagaatttcctcttccaagaaatcttatattaatgtttagayccctaaaacactcttttccatctttaataagcacatggaagaactggcagaggagagtggggggaaattgtaaacaactactactaatgtctacatgtttatgggtagaactgaaaaagtgatcaaataattatctccaccagagatctggtactcacacaatttataccagcaagtcttttgatgctttacaatggaagataattcttagtctaagtaaactgctctggaacttctccttactttcttttgaccccaccacgagcgttaaaattgaatttcttatagggcacatttttttaagagaaattttaatctcttcaagaaagttcagggtaacgaatgaaaaacataaaattgctgagctgcagaaaccaagcagtagtctgggttttatacaggtcaagcaacccactctcacagagactcactacatgcagggtctctgtgccatgcagagagagctgtaaaggcagtaccagttagaactataatttcccatctcttccatcaattattagtgttggagaactaggaaatggggcaagtgagttgggctgccttccacctggagcctagaaagaggcttcgatccaaagagacagaagcactaaaaccacaggccttctatgttggcaaatagtgaatgca

SEQ ID NO: 84717 - DNA, 974 bp, Homo sapiens
ttaatgcataatactttatatatcccttatgttgacatatttttacctgatatagattacgatataggtgttaactaccattaatgatatatctagaatcccattagtttccaagagcttggatattaatggtaaagtatttcaattagttttgtctggtctccaactatatgggtagggcctatccaaattttcaaaactgttagtctgttaatgtgattacctcacaatattccattaagttcttttctatcatagaggctagttaattgggctagcagaagaatttcctcttccaagaaatcttatattaatgtttagacccctaaaacactcttttccatctttaataagcacatggaagaactggcagaggagagtggggggaaattgtaaacaactactactaatgtctacatgtttatgggtagaactgaaaaagtgatcaaataattatctccaccagagatctggtactcacacaatttataccagcaagtcttttgatgctttacaatggaagataattcttagtctaagtaaactgctctggaacttctccttactttcttttgaccccaccacgagcgttaaaattgaatttcttatagggcacatttttttaagagaaattttaatctcttcaagaaagttcaggrtaacgaatgaaaaacataaaattgctgagctgcagaaaccaagcagtagtctgggttttatacaggtcaagcaacccactctcacagagactcactacatgcagggtctctgtgccatgcagagagagctgtaaaggcagtaccagttagaactataatttcccatctcttccatcaattattagtgttggagaactaggaaatggggcaagtgagttgggctgccttccacctggagcctagaaagaggcttcgatccaaagagacagaagcactaaaaccacaggccttctatgttggcaaatagtgaatgca

SEQ ID NO: 84718 - DNA, 637 bp, Homo sapiens
ggatcctgggcctccccataactcgtggtctgtttctgttttacagaccctgacgtcgggcacctcatctccacgaagccctctctcagccygaccacctctccaaagccaggtacatacctgctccccattcccttttctgggaatttggcttgttttgccttggatctctccaccaagaccagccagcaggatctccacccccgcgtcccctctgttcccctgatttctgcctggctgtccgggagggatttccagaatttgctgccccctggctgaaccccatggggagaatcaatgtccttatttttattttttattttttatttttttaagacacggatggtctcactctgtctcccaggctggagtacagtggcacactcacagctcacccgacattcccggtggctgatcctcctgcctcagcctcctgagtagctggtactacaggcacatgccaccatgcccagctaattttttgtatttttagtagagatggggttttgccatgttgctcaggctggtctcgaactcctgggctctagtgatccacctgcctgggcctcccaaagtgctgggattacaggtatgagccaccgagccggccattgtctttattattctgatgggccca

SEQ ID NO: 84719 - DNA, 717 bp, Homo sapiens
cctcatctgcagactcagtctcatccctccccacctccttagaatcaatctaagcctgagatagggggatctgttcagtagcagctagtccatttgggattaaagacctacatctcatctggaccccaattccaagtttcattggcattactgaggcccaggagagtaggtgtttgtaggtcttctcagtctacagtgaccttggtactgctccctccsctatagacctggccagcagggaaaaaagaatgaagtcaatgtgcagaaaaaagcaaaggcaagttagactcctggcagttttcgagttctcagttgcaagctcttcccaaggtcgagatgctcttcctgctcttggattccatatgacactagtgtccatatactgtgttcccatttgctgcttaaactgcatcaaacaggcttctgtgatttgaagtcatgcccttttcaggtctctgtacaggtgccttttctagtaaattaactaacactgctaccagaatagaagatgggtattgttattccaattatgacagacaaggaaaccactcagagacgcatgttggcattcccagtaactctttgatgtaggagtagagcccagagcacggaatccacagggaggtattactcagaaatccaggcaagtacttggtcaacaagtagacagagtcaagatccggtcaggaaagtagacaccatattaggtatttcaag

SEQ ID NO: 84720 - DNA, 947 bp, Homo sapiens
gccacagtaagttcttaaaagtttactctccagctgttctcagtgaagatattggggcagagttggactgaagatgtcaggaagtatatcagagaaatcagtttggaggccatttccagagtccaggtgttggcttatatcaaagtggtgaaaggatagtaggaaccagagaacttacagatgaattagatgtgggagatgagggaaagggaaagatttctgatctgtatgaaatggagtgccgtttactgagctggaaagacttgggattgacagagctgggaggctttcaagggaatctagagtttgatggagagtatgttatgtttgagatgcctgagagacatcgagagagagagagaaatagaaagagaaagtttgagttactaattacattttcaggtctggagcctattagaaatatagtttatcagcatatattgatagtatttaaagaaatgtcagaagaactctatattttagaagttgaagagaagaagactatatagaaatagccaaagtagatgggaaactagatgggtaatgtaccagaggtcaagagaggagaaaggtcagctgagaagtatgcagcttgaatgctgttgarcaatgagcatgaggacaagcaaagagactattcagttgcatgctactagggtcactggaagctttaaccaggcagcttcagaaatatctaggatgctgaagacggatcagagaacatgggagaagtatagcattttgagacagcacaagcagacaactgtctttgggagttcaggagagtacatagaaagaaaattcaagaggaggagagagatttgggggagggagttggaggtgagatgtgaactaagtttttaggtatgatgagcttcattcaggtagctgcagagcatccaagtgaaaatatcttacagaaggctggattatgacttgagagagag

SEQ ID NO: 84721 - DNA, 1256 bp, Homo sapiens
ctaggtgtcaaatgacaacaatttccttctgagctgaaaaataactacagcactgattgtctcagtccctgttcacccacataaaaacaggaatgtgatcctgagagagaagaatttaattgggtgagtcaataggtgtcaggtatcagcatgttggtggcagaatccagggctgcagtcctcatgtagctactaaataatcaagtattggttacttgaattaaaagtggaaactagtaggtgttggtaaaaatgtgttgagcttggctactcctgttttccaaaagcattttaggacacatataygctgcagtatcccagaaatagaagtgtgggtaacttaacccaaagttgtggttcctgtgtccagcctgtgttggatggtgtgtcagcacaatgaatgctgaagaatctctgtggactgtcattctagagcctcctaagaatgcctcactagggttggcagagaggtaggggtgctggccaggcagacgaagggaagtccacacacggctttggttgaagcagtgccaaaggccaggataaaagctgtagacctgtttaactccagattttagggctctcgcttttgattttatagatgtagtactgatgggaacagctggtggtatgtagcgggaggacagcctgaacaaagtgaaatatacgaggttcctctcatcatccctccctacttctgcagaggtggcattagagcacctttcatcttaatgtgactggtgaataccccagcatcaggcagatatttcacatgtgcttgccaaaaataataaccactcttttctgcccgatggatgctagacactctgattcctcaatctgtgattgtccctcaggtctatggcagcaggaatagatgtcctgcatcttaccatggagagggaattagttacagttctactggtgaatcaggaattgagtaactctcctggaggcagcttctctacctcctttcctgacagtcattaaagcaggcaaggcggcactcagcagcaactgacaagctggaactgaattaaatcaacacctgaatggtcagagggtttagaaggagccaaaaatgtgttttccagccaggatgattgagaacccacacctggtgccagagtacaacacacaggtgcctgccagggcacccaggcagatatgctatgctcctggtatagggtgggtggagggggctctgcctgcaatgtcacactcctttaaacacaggtcgggtgttgctacaagat

SEQ ID NO: 84722 - DNA, 617 bp, Homo sapiens
tgtgtaaaatcatcttctttcaaagtgacagggccccaggctactataagtcactcttcagaggacaagtaatacgttcttttttattcttatatccccagggcccggcataagtctggctctgatgagatttgtgctatgagtactaactgtatgcaggcctgctttccaggagaaaattaaccagtggtacaaaatcgaactaaacgttcaagaacctaaggaattccagagagcatccatgaacagaaaaacaaagcaaaacctagtgcttatgaagctaatgaagccacatcacagtggttagctgactactgagacactagtaattctaagtctccactggcaattctaagtttccacttgtccatgagttttaagtaaatgaccatcctccttttcctcatcatccatggagaagctgcctctggctgcattgttccacctatgtgtttataacacygctaagctaccctgaactgatgtgacacctggagtcatcacctgactacacttgagaccatttggttgccttccctccacaaagccttttttattcttgtttgcaaagtatcctggaaagccagaggaacaattctgtcctatagctcaaaact

SEQ ID NO: 84723 - DNA, 658 bp, Homo sapiens
ttcccctagatcttgaggctatttctgttttgtcccttattttctagcctataaataggcttaggttttgccatcctaaaaagaaaagatgaccctcaaacccaccatcctgtcttgccgtttcactgccagactctttggagaaactgcatttgctatctatatttccaaaactcccattcacttttcagctcattttaattgggcttcctgagctactctactgagactgctcttgctaaggccaccagggatgtcttagttgcagaatccctggctcgctttctgtctgcatcttattcagtctctgtgaagcacttaatgctgtgggtctttccacccttctggagactctctgctccctcagcttccacgattgttttctcttgttcctcctcagatctcttggtctttttctgctcagtatttttttttctgactcctcctattacgccctccatttaaatgggtactgttagtgggattctctcaatgagccccctttcttcttcttcttcttgmtcctcaggggatgtcgtatttcctatggcttcaaccaccctctaaatcccagtctatgctcctctgcccccacactctatcccctccatcccttatttccaattgcctcttagacaattccatctggcttttgcct

SEQ ID NO: 84724 - DNA, 715 bp, Homo sapiens
taacaagaacaacataatagaaaaaaaacaaagcaggccaggtatacamaagaaaaagaaaagatatatacatgggaccaagaaggatttgtttcttatggacactactaaagcaacacagcaggacaagctgggctgtgaatggtagcagagcccagtctgagctccagggtgacaggtgtctggtagcagctgtgcacactggaggccacatgccttgctcacatggactgttttaattcaatgcagcaggcccagggcagtcagatctacttgtttttcttttccctaaaatgtattttttcatgtaaagttaccattttttttctcatttgcatcacagatgcttatatagtccatgtttcacaggacaaagcaaatacgtctgtgagttagatacagtcccatatgcaagagtttgggagttctggcatgttctttagggcccaaactatgatctatcgattcatatcaatcattcatccaatggctaaacattttgccttatagcaaccctgtgaggaataaattattatgcccaacttcctgataaggagatttagttaaaaataggtgagaaaaacttgctcatgttcacagatctggtaggtgggtgatcattcccaggtgcacatgatttattattgtactttccatgagtcacataggaacatacatttgttctggagaatgcagaatttggggcaagggggaa

SEQ ID NO: 84725 - DNA, 715 bp, Homo sapiens
taacaagaacaacataatagaaaaaaaacaaagcaggccaggtatacacaagaaaaagaaaagatatatacatgggaccaagaaggatttgtttcttatggacactactaaagcaacacagcaggacaagctgggctgtgaatggtagcagagcccagtctgagctccagggtgacaggtgtctggtagcagctgtgcacactggaggccacatgccttgctcacatggactgttttaattcaatgcagcaggcccagggcagtcagatctacttgtttttcttttccctaaaatgtattttttcatgtaaagttaccattttttttctcatttgcatcacagatgcttatayagtccatgtttcacaggacaaagcaaatacgtctgtgagttagatacagtcccatatgcaagagtttgggagttctggcatgttctttagggcccaaactatgatctatcgattcatatcaatcattcatccaatggctaaacattttgccttatagcaaccctgtgaggaataaattattatgcccaacttcctgataaggagatttagttaaaaataggtgagaaaaacttgctcatgttcacagatctggtaggtgggtgatcattcccaggtgcacatgatttattattgtactttccatgagtcacataggaacatacatttgttctggagaatgcagaatttggggcaagggggaa

SEQ ID NO: 84726 - DNA, 703 bp, Homo sapiens
catctgattggagaaaagaggaaattaatcgtggataaagtggcatttgaaatctgccttgaaagctagatagtattctgatagggataaggggataattccacctacaggcaacagaataaacaaaaggtccaagatggctattgtgtggggttttggaaataaagcagtagtctagtttggttagatcgcaggatatgagtaggagaatcaagcatatgtgggtttaaaggaatgaatacagatcacagggtcttaaccactctaataaggactgtgagtgtaatgttgacarcaatgggaggcaacagcagtttttgaccatggagagagggggattaacatgataggataagtgtgatgactcctaagcctaaatttcccattctaatcccttaatcaaacttgatctctaaatgctctaagaacatttctaatcttgcatttcaccaaaaattaaaaggcatatattactggcaaacaaattgtctctattttttaataagtaaatttgagttaccagagtccagcgttgatttctggcacctctggttatctgtggactcttctaggttccgtaactacagagctaacaaggatgggcatgggtaggatctcccatcagaaagtttcagtgccagggggtggatggatgtctcaaaaaaagggcactcatgctatgaagacattctgaacactgaat

SEQ ID NO: 84727 - DNA, 565 bp, Homo sapiens
tgaactcagattgatacaggagataacagagtatacacaaatatctgtttatttgaacaaaggaaatggaaaggacaaaccaaaactatagagaytgattgcctgcaggggtgggtgggaaaggggtggaaagaagggagggaatgggaacaggttagtaggaacaaagagggagtgacacttttgactcttaggatcatagtaatgtgtcacatatttttcacacaccccaaatgtaatcagacaattaaaaccaactaggatgtagggggaacccaaaactgaattcaaaaactaaaaaataaggctagttgtattacggatgtgtaatataacaccactgaaaagggtggggaagaaagaactaaagtctgtattaaagcctgtctttttttttttttttttttttttgagcacttcatgaatttgcatatcatccatgcacaggggccgggctaatcttaaatatattgttccgatttttaaataataaaatgctaccaaaagcgtattttgatataatgtaaaggggaaaacaaaactgtttataatttagtgtttctca

SEQ ID NO: 84728 - DNA, 567 bp, Homo sapiens
acagcgcaatatgtatgaagttgtatgcgtgcccatctgaggctttcttcccttttccgatagagtccccctgaaaggtcatactccccgattttgtctcttaatgcatatgcccaggaagttgcttctccctgtcacctgcattcaacgagcactttagtgcaacaggtgtgrgccatcaggaaatggcctctccctggcaccggctgccaatttatcacttttagaggcaatgtgataaatgcctaagcatcaccccacattcctagtgggtgagggaagagccctctcctgccctgctcatgcctaactacctgtaacaaaccttgtaaacattaagccagccaccaaaagaccatataattccgtttatattaaatgtccagattagttaaatctagagagacaaagtaggttcttggttggctagggctggaggagttgggaggatcaggggtgatagctaaaaagtacaagtttcttctttcgagtggtaaaaatgctctcaaatagtggtgatggttgcccaagcctgtgaatataccaaaaatcactgaacacttcaaa

SEQ ID NO: 84729 - DNA, 673 bp, Homo sapiens
tgttgatctgtgaccttacccccaaccctgtgctctctgaaacatgtgctgtgtccactcagggttaaasggattaagggcggtgcaagatgtgctttgttaaacagatgcttgaaggcagcatgctcgttaagagtcatcaccactccctaatctcaagtacccagggacacaaacactgcggaaggccgcagggtcctctgcctaggaaaaccggagacctttgttcacttgtttatctgctgaccttccctccactattgtcctatgaccctgccaaatccccctctgtgagaaacacccaagaattatcaataaaaaataaataaatttaaaaaaaaaaaaagaatggttaaaataaaaaatagcaacaacgctaaaaaaaaaaaaaaaaaagaaaggtttaggccaggcacagtggttcatacctgtaatcccagcactttgggaggctgagggaggcagatcacaaggtcaggagttcgagacaagcctgaccaacatggtgaaaccccgtctccactaaaaatacaaaaagtagccaggtatggtggcatgcatctgtaatcccagctactcaggaggctgaggcaggagaatcacttgaacccaggaggcagaggttgcagtgagccgagatcgaggcactgcactccagcctgggtgacagcga

SEQ ID NO: 84730 - DNA, 770 bp, Homo sapiens
atggactgtcacgcaaaagtcctctctgtatccttaaaaggacgatgtactctatttggggatcaggatgttagagtaatgctcacagtatatgtggtagaggcagaaaaaaaaaaatgtttttttctccttccatagtgaggcactgcaacaataatagcatggttcaattttggtaaaaactgcaagctaacagcaaacattgtattgctcttacaatgagcttggcactgtcctaaacatcaacagcacatattaacttagtgaatcttcacaatcctcaaatgggggaagtagatgaggaaactagtcatgagggtaaatattgatccaactcacacactatttagtggcaagttcaggtttaggacctatactatcaggttcctaactattgcatcatgctacctctcatactgaaattcgtcttggaactcatccaatatggacagaaacatwtggggccagaggtgcagtagatggcgacttggagtatttagcttttccctggaatattctaggaatccagaaatacttgtgattactttaagttcaggaaatctggcaatcctaaatatttgctgttatttatgatgttaagcattagatatactttatgtattttttctcatttaacttattttatatatagagagagagattattttattttattttaagttccaggatacacatgcaggacacctgcaagtttgttacataagtaaacgtgtgccatggtggtttgctgtacctatcaacccatcacc

SEQ ID NO: 84731 - DNA, 498 bp, Homo sapiens
cctgtaatttaatttagtatctttccattaaatttcttgtttattcaagcaataattattttttgatacatgcaagtaaaagaaacatatctaattcagtatatgagagtattttttttttttgaggcagggtcttgctctttcacccaggctggagtgcagtggcgtgatcttgactcactgcaagctccacctcccgggttcacrccattctcctgcctcagcctcccgagtagctgggactacaggcgcccaccaccatacccggctaatttttttgtattttttttagtagagacagggtttcaccgtgttagccaggatggtctggatctcctgaccttgtgatccgcccggcttggccttccaaagtgctgggattacaggcaagagccaccatgcctggtcagtatatgagagtattaaaaaataaagttctaatacaaatggatgtttgtcaatggacacttgataaccatgcactttccatgtaccaac

SEQ ID NO: 84732 - DNA, 1312 bp, Homo sapiens
gccaaatataaggacaaatcctgtccctgcacagttaaataaaacttttttaattttaaattttaatgagtacatggcaggtgtgtttatggaatatatgagatattttgatacaatgcacaataataacctcagggtaaatagggtatctatcacctcaagcatttattatttatttctgttatagacattctaattatgctgctgtagttactttaaaatgtacagtaaaatattgttgactgtaatcaccctgttgttctatcaaatactagatcttattcattctatttaactatattttgtacacctcaaccatccctgcttcygtcccacatcccccagctagtttatacttctataaactagctaatgatagaatcaggaacaattgtgtttaatcagaccatcccttcattttctaggcaaaaagattagacaataaatgacacagagaaaaaaatactaaactgatagtacctaaaccataaaacaaagcagcccagcttttgagtgagaccaaggtcttaaagagaaaattgtatgatgtccagcgagtcaacatcatttacaaaatagtgaaatagttcaatctgctatcacaccttttcccaaaccatggtgtttaacctttcaaaatcttacggttgtagtttcaaaagcagagtcaattaccaagacaaataaaactgatgaattaactaatttgtattctctttaactgttttgatgaaactccacaaacatgctgttagttccattcctctgagctttgaatagtttactgtttgtgacgataaaagcacggctgggaatactttaacatatgccagattcaaacagagtgaaatatgacagtttataatctgtgagacagaagcttgatctttgaaaaatatttgcatataaagtacatgcttcaatatcataattctgaaagcccacatgaactgaaattcagtgatatcacttaatatgttgtgtaaacagtaagcagaatctatctttccttgtctgcacataaaaataactttttcttttgggactatttttgtaggaaatattttaattaataatgtaaagataaaaactgtagaaagagtatccaaaacaaaatcacacatgctccgtttgagagaatgagatgttacatttatttctgaaaaaaataatatgtacatataaatataaaagcataaaatgtacttagagagcctccttccattgttctcatccagaccatttccttttgaagaatagggcaggggaaagcacttttaattgtttcttatgaaaagatcaaagaccatgc

SEQ ID NO: 84733 - DNA, 1312 bp, Homo sapiens
gccaaatataaggacaaatcctgtccctgcacagttaaataaaacttttttaattttaaattttaatgagtacatggcaggtgtgtttatggaatatatgagatattttgatacaatgcacaataataacctcagggtaaatagggtatctatcacctcaagcatttattatttatttctgttatagacattctaattatgctgctgtagttactttaaaatgtacagtaaaatattgttgactgtaatcaccctgttgttctatcaaatactagatcttattcattctatttaactatattttgtacacctcaaccatccctgcttctgtcccacatcccccagctagtttatacttctataaactagctaatgatagaatcaggaacaattgtgtttaatcagaccatcccttcattttctaggcaaaaagattagacaataaatgacacagagaaaaaaatactaaactgatagtamctaaaccataaaacaaagcagcccagcttttgagtgagaccaaggtcttaaagagaaaattgtatgatgtccagcgagtcaacatcatttacaaaatagtgaaatagttcaatctgctatcacaccttttcccaaaccatggtgtttaacctttcaaaatcttacggttgtagtttcaaaagcagagtcaattaccaagacaaataaaactgatgaattaactaatttgtattctctttaactgttttgatgaaactccacaaacatgctgttagttccattcctctgagctttgaatagtttactgtttgtgacgataaaagcacggctgggaatactttaacatatgccagattcaaacagagtgaaatatgacagtttataatctgtgagacagaagcttgatctttgaaaaatatttgcatataaagtacatgcttcaatatcataattctgaaagcccacatgaactgaaattcagtgatatcacttaatatgttgtgtaaacagtaagcagaatctatctttccttgtctgcacataaaaataactttttcttttgggactatttttgtaggaaatattttaattaataatgtaaagataaaaactgtagaaagagtatccaaaacaaaatcacacatgctccgtttgagagaatgagatgttacatttatttctgaaaaaaataatatgtacatataaatataaaagcataaaatgtacttagagagcctccttccattgttctcatccagaccatttccttttgaagaatagggcaggggaaagcacttttaattgtttcttatgaaaagatcaaagaccatgc

SEQ ID NO: 84734 - DNA, 722 bp, Homo sapiens
ggatccacgatatattctgatggactacataaagtcacattgctaatctgtaaaagatgatggttgaaagaatttagaattatcttgttcagacatctgtaggttaataccattttgtgatattaacaaaataaatagtgaatattcatccactattttacagttcagcaaaataacagttttatgtacattattcatggctaaaggtgcttcccaaagcaatattaccctcagcaaatgttttgtttcctatacttatgtggccaaaacttgacactgagaaacgtaataaagttattttgttatattttaatgcttgaaattctagtatttcaagagaattaaagtgttcttgaggaaataaagcttctcaacaggcctaaaaataaagtttgtttcaaaaatttataaaggaaaagtcataaataatagtcaaatgtatgtgaggtggctggtcaaaaagaacatgtaagctgtctacaatcatggattaagttgttttgatacaawcctttagtttttgaaaacagctaccttcacaagaatactaaaataaccattatccagtgaggaagcaactagctcttaatggctacctagagtagaggttggcatgcagaagaaaaatgaaaggggattttaccatggaaccgagcaaacacccatagagtaaatgtcttcacctaaagttgggggtgggggtgcttacaaatagtaatgaa

SEQ ID NO: 84735 - DNA, 722 bp, Homo sapiens
ggatccacgatatattctgatggactacataaagtcacattgctaatctgtaaaagatgatggttgaaagaatttagaattatcttgttcagacatctgtaggttaataccattttgtgatattaacaaaataaatagtgaatattcatccactattttacagttcagcaaaataacagttttatgtacattattcatggctaaaggtgcttcccaaagcaatattaccctcagcaaatgttttgtttcctatacttatgtggccaaaacttgacactgagaaacgtaataaagttattttgttatattttaatgcttgaaattctagtatttcaagagaattaaagtgttcttgaggaaataaagcttctcaacaggcctaaaaataaagtttgtttcaaaaatttataaaggaaaagtcataaataatagtcaaatgtatgtgaggtggctggtcaaaaagaacatgtaagctgtctacaatcatggattaagttgttttgatacaaacctttagtttttgaaaacagctaccttcacaagaatamtaaaataaccattatccagtgaggaagcaactagctcttaatggctacctagagtagaggttggcatgcagaagaaaaatgaaaggggattttaccatggaaccgagcaaacacccatagagtaaatgtcttcacctaaagttgggggtgggggtgcttacaaatagtaatgaa

SEQ ID NO: 84736 - DNA, 1059 bp, Homo sapiens
tgcatctaattttaaaaattatatttctagtgtttaccctttctattaaaaactccaatgagcattttttataatgttaagccatctgctattgaatgttttgtgttttcacaacaagcctaaagacactaggatgaatcagatgtactggatctcagaaaactgaaatgggtagatttctgtatgccaaagttcatcctttcagcaggaattttgcctttctgtaaatgggaagctgtctctgacaatagtgactcataatttagctgtcatgctcaaccacttagatgaaaggcatgagaaaactctagaactagagccttgggaagaaagcctgcccaatgtccatgaaagagctctttctttcttaacttgcaatttgaaaaaaatatatgaatgaataataaaataagcatttatacaaatttttctttcrttctatccttctttcagtttttgtttgtgatttggtaataaacaaagccaatgaaacaatgataggctgggtgtgctgacttatgcctatcatctcagctctttgggagggcaaggcaggaggattacttgagcccaggagttcgaggttgcagcaagctatgattgtgtcactacactccagcctgggcgacagggcaagatcctgcttcttaacacaaacaaacaaacaaaaataggcctgagccatttcaaaattaataaaattgtctagtttatctcaaggagggcaacaaggtaaattgtattcactcctgaatacttaagcaaactttccacctctaaaggaataacacttattaaaacataaaggcagtccttgctgtcagaaatattttgacttccaggtattttattacttaatttaaaaaaaaacattcaggaaaattggccacagaaattttctatgttcttataataaattgcatgatgaattatttcatttgaactttttagtataactatagttcatcaccaattaagtgaaataggaaactgagttatcaatattgacatgcttatttgattgacaatacacttagaataagacctcccacaaaatgc

SEQ ID NO: 84737 - DNA, 1029 bp, Homo sapiens
tcctcctcagaatcttgcctctcctattgctttgtgttattgaacgcggacttgtgcaagcagaagctctgcacctcttcctctgcagaagaggaaaggagctgggtcctttcctcttacacaccggggcacctccttattgcctcaccaaccagtttgttttacaacttgcaggagagtattattacatctgagcactcagaaattagatgctgacactgagtattgatttacataaaaatctacatatttgtggtttttcgagagctactcacttggaactttacaaggtcaggcatcccctgagcctaggaccatgcctgatacaaagggcgtgctcaacaaaaagttgctgaattaaaaatcatcttggaatgtaaaggtgactagcattatggaaatagtttatattgacatgattattattatttactttatttttttttatttaggtgctcactctgtctcccaggctgtagtgcagtggygtgatctcagctcattgcaacccccgcctcccgggttcaagcaattatctccctcagcctcccaagtagttgggtttgcagacacgtgccaccacgcccggctaatttttgtatttttagtagagacagggtgtcaccatgttggccaagctggtctcgaactcctgacctcaagtgaactgcctgccttggcctcccaaagtgctggcatgagcccccgtgtctggcctatgttgacattactcatcctcctaaaataataataaaataactggaaaaaatagcttggagaaaattaagctttttgtctggaattttggagaatttcttttttttaaccgccttaagtgtttgtatcttttctttgtcctaatcacgaacaggaaatttcaaagcataacaaagacccaattcttgcagctctggtgtgtggctttggtgggaatttcagcagcggttctgttgattgtcctgactgatgcccccacttttgaacactggtaaatttaaacagtgtaaattgcatttgctgtttacaagg

SEQ ID NO: 84738 - DNA, 745 bp, Homo sapiens
gaactaataggataaatgtatatataaaggggattttattaaggagtactgactcacacgatcacaaggtgaagacccacaatagtccatctgcaagatgaggaacaaggaagccagtccaagtcccaaaacctcaaaagtaggaaagccgacagttctgtcttcagcctgtggccgaaggcccaagagcccctggcaaaccactgagtccaaaagtccaagagtccaaaagctgaagaacttggactctgatgttctagggcaggaagcatccagcacaggagaatgatgaaggctggaagactcagcaagtcaagtccttctrtgttcttctgcctgctttattctagccatgctggcagccgattagatggtgctcacccagactgagagtgagtttgcctctcccagtccactgacataaacgttaatctcctttggcaacaccctcacagacacacccaggaacaatactttgcatccttcagtccaatcaagccgacactcagtatgaaccatcacatatgggtacatgaattacctttcatctatactccaggggtaattactcagcatttgaacagaaatttataatcagaggtggttaaagaaaatgttttctattttattattatagatactaagtcttcattagctagcataaggcattttagaaataattttccacagataaaataagtggtgttcaaaaaatacagtcacctgaaaagactgaatggatccc

SEQ ID NO: 84739 - DNA, 1799 bp, Homo sapiens
tataatgggaaatagaatgtgccacccccaaatatgccactttggcgtaagaattgttttgagctgaaggcaattcgctgtctgccatcccctattctgtctaaaaacaggacataaatttccatttgtaagggtgtctccctttcccataccaggaagagaaatactccagagacaacttttagcacctgaggcgactcttatctgcctaacaaacgttattaaacaacacttgtttattatacattttctcccttcaccttcccataacttacctcccatctcagaagcccaaaatcccctttcctttgtccagcctaagatggtttatataagctccaaattctaaatgcctcttcgaatcacatttcgttgtgaattcctgtgccagcatacataattgtatctgttattctctcttggtagtctgtcttgtgtgaatttaattcctggggcccccaaccactgaacacaggagagcagagaacaaatgtttttcctcccctacaagtataattaaaagtataggagatcttgcaattaagaattggcgtctgaaccaatattcccaatctctaatctcaaacctatttttttcctcctgaactgatggtatgttgacctagagatgataaagrcaaagttatttaggaaggtaacgctggcagccagttgggtggaatagctggaaaagttcctttaagagtgaaaggataggccaggtgcagtggctcactcctgtaatcccagcactttggaaggccaaggcaggcagatcacctaaggtcaggagtttgagaccagcctggccaaagtggcaaaaccccgtctctactaaaaatacaaaaattagctaggtgtggtagcacatgcatgtagtcccagtactcaggaggctgaggcaggagaattgctcaaacccaggaggcagaggttgcagtaagccgagaccataccactccactccaggctgggccacagagcaagactctgcctcaaaaaaaattaaaataaaaaaagaatgaaagtatccataattacaggtagattatcatcagttttctatttttgctagatgttgaaattaggtgtattgaataaaatacatgggacttaaagcctgagtagcttctttcaaatcccagctctgctgcttagcagctgccactggagaagtgattatcctctgagcttcattttgttcatctgtaaaacccggcgaccagcacataggaagaacacagcaaatgctggtgtcattgaacatgcagataaatgaatgattaacagtcaatgaattgaaaactgtttaccaaacccaggcttggaagattcaaaacagaaacagtggtgttgacagagcattatattttaatggatgacagtaaatagaaaaagggggttgattctggaaaagcggaaagagcttcagaaatactgggaagctcctggcttttggcgctccgtcttgttgaaatatttaagcctcaacatactttctcaacctcattgttagtgaaagaaggaagttctattaaagagagcaagagaaagaccatgcctcaatagccagagtaaatctagtttccatcacactcagggtgaccggttggtcaaggcaaagcagcatggatgctcctgatgtcaggatttttctgtcctgacctgagatgcttctgggtgaacccatcagacaagatgctttctcagactcaagttcaaccacgtggacctcagagaacgtatagcatagtgtttgttgttccagctagtacccagacaggagtcacctgtgtgca

SEQ ID NO: 84740 - DNA, 1600 bp, Homo sapiens
gccatgccgtatatatgtaaatttcatatggttctgctggaaaaaaaaaaaaaaaaaaagctagctgtgcttcctccttccttccatgagcctgagaaattatgctagagtacttgaaatgtggggaattgcaggacctggaatggtttgagaaaaatatcgacaactttcttcttgtggcaattctctctcttccccttaatacattttttctaataaatatttcttgagcacttatcaatagccaatattcatcagatgttcacttatgtaaaagtctctgtacgcctcactttctatgcagaatgggtattaaaattatctccatgttacagatgaggaaaggaagatagacgaaggtaaagttacttatgcaaaatcaactcacttccccaaaatcaactaactagtcaatggtagaaccaggattcaatcccagttggtctgcacagagctcaggctgggaaccacaagaagacgctggtcttatctctgtagagaagcaaagcaactctggctaggacgcggccccttgctttcaagtgccagggtgtaggaatgagggagcacaggtcaaaaaatgactacattactccatgcatagaaataactacacagggctgggggcgatcactcatgcctgtaataccagcactgggaggctgaggcgggtggatcacctgaggtcaggagttcgagaccagcctggccaacatggtgaaaccttgtctctactaaaaatacaaaaaattagctgggcatggtggcagasagctgtaatctcagctactcaggaggctgaggcaggagaattgcttgaacccaggaggtggaggttgcaatgagccaagatcgtcccaccgcactccagcctgggcaacagagctagactctgtctcaaaaaaagaaagaaagaaagaaagaaataactacagagctagataccaatcctgcttactctatgccagcataaccaggaagagcaaaagttaaactatcattccagaaaacttcagagtgatggatttatcgcctccaaaaacagttcaggtcttctccagagagtttctcatatatcaaatggatgagctgagtcactagctgacttggtttcttctaattttttgaaatgtaaaggctgcccacccagtgactgtcagttatccggtcagcacgtagttctctgagaggacgttccttgtctctgctctcagtcttctcctctatgaaatgggccatttggaggggataatggccgagagccccttcccactctcccagtctgattctcactacagatgaggccacttgtgagaaagtgaaagtcacatttaaccccctttctggtgaaagtatgcaaaatccaagacagccttcatttttgtaactttaatgttcgtcctggggaataaacagtaacaaggaaatgttggctttagggttctctatactgtatagaccacacatttgacctttaccaaaagagacttttcagggctctctgaatggaatgcagcttgaaataactctcagaacattgttggacaattttttgaaattccagggcattgtaagtaatgtgattatctttaaaacctaa

SEQ ID NO: 84741 - DNA, 714 bp, Homo sapiens
actattcataatagcaaagatatggaatcaatctaggtgcccatcaatggtgggttggataaagaaaatgtggtacatatacactatggaatactacacagccataaaaatgaatgaaatcacatctcttgcagcaacatggatgcaggtggaggccactatcctaagcaaattaactcaggaacagaaaacccaatactgcatgttctcacttatatgtggaaactaaacactgggtactcatggtcataaatataggaatgataaacaccagggactactgtgagggcaggcaagggagaaaagctaactattggatactatgctcagtacmtgggtgacaggatcaatcatacctcaaatctcagcatcacacaatatgcctatgtaacaaatttgtacatgtgccccctgaatctcaaataaaagtgtttttaataataagaaataaataatataaaagccattcatgtcttccaaaattactattcactgtgctatgctagtcactgtataaggggctgcaatccattagaacaagtgagatggagaagcacattatgctaggggcgggaattgtgtgttaagcctggggaaagtgaaaaagagaattagaagacgagccttgcattggataacctatttttttaaagtatatataataggcttattgtgctgtaatttacatatcaaaaatcagcttttttttttttt

SEQ ID NO: 84742 - DNA, 572 bp, Homo sapiens
gaataacacactatagggcgtagactagactgagctccaaagtctcagtaaccagagaacagtaagcaaatagcacagctgggataaatcagtcaaccccttcattccctgcagccatcaaaccctaattcctccccacctctgcactcgcctgatttggaaagagcagcggagtgttgaggcagtggctagctcattctcaggttctgagcttaggcaattttactgtgaaaaatacttgctttttctaaaagctgttcaaagggggtccgtatagcttattcatagagcaagtgattttttcccaacagaccccaattcaattttcccacccgtaaaagaaggaagccaatttctgctattatcaccagataccatagttccattagcacatttgtgcatgaggtcttctgttgaaccattgcacacagaccttaccggtatcatttggaggcagctaaggaagtctcctccaaattccccctctagcagcaactggagacctgcctatccctgccaggcacatccaggcacactccagaatyctcccccatgttagcttgttgcaggca

SEQ ID NO: 84743 - DNA, 1603 bp, Homo sapiens
tttcctgatatggattagacatgcaatatttcctttaaattaacaaataaatcaaagcataaatatttatcttttccttgattgagatttctatatatcaggtatatctgggatctcctctagggtccagtaattggtcatggatattttagtgaccaagtcacttcaggagaaaatggcaagaaaaagttttaggactgcacaatttgtcaaatttccagaattttccactgagataaattttaaaacctaggaacataacaatattaaaagctagatgtttttaggaattagaaaaagaagttcatagacacttttcaaaagaagacatacaggtagccaacaaacatatgaagaaatgcccaacatcactaatcgttagagaaatgcacatcagaaccatgatgagataccatctcacatcagtcagaatggctattgctaaaaaataaaaaaaataatagatgctgatgaggttgtggagaaaggggaatgtttacacactgctggtgggagtgtaaattagctcagccactgtggaaagcagtrtggcaattcctcaaagaactaaaaacagaattggcattcatcccagcaaccccattattgggcatatacccaaaggaatataaattgttctataaagacacatgcatgtgtatgttcactgcagcactatttaaagtaacaaagacatggaaccaacctaaatgcccatcggtgacagactagataaagaaaatggtggtacatatatactatggaatattatgtagtcataaaaagaataagatcatgttctttcaacaacatgaatggagctagaggccattatccttagcaaactaatgcaggaacagaaaaccaaatactgcatgttctcacttgtatgtgggagctagataacaagaatacatagacacaccaagtaaaagacacctgggcctacttgagggtggatggtgggaggagggagaggatcagaaaaaaacaaatatggggtaacatacttagtacctgggtaacgaaataatctgtgcaccaaactcccatgacacgagtttacctgcagaacaaacctgcacatgtacgcctgaacctaaaataaaaattaaatagaaaaaaaagaataagacgaataaaattttttatattaattaaaaaaaattcatctgtggaaacttaatgtctaaagtgttctgtttctttcttacagccataggattacattcgtacttaaaatgaattattttaataataatgaaatatgtttttatatttatatctaattcttataatacagccatgtcttggttattgattattttggtattgattacttggtttctaaactatccaggacctttatttcttctcacttgactcctttggtccgcttttctattgaaaataccaccaccaaacaattgtcagaaaaattagccaagaaaaaaggaagaagtaaagaggaaaggagaggaacaaaatgaaggggagagaaataggacaagcacctgtgcagcctatgaatttttttttccattagggcaattaattaagatttaaacgcacaggcataaatgtgtaagtttctgtaagtgcg

SEQ ID NO: 84744 - DNA, 1603 bp, Homo sapiens
tttcctgatatggattagacatgcaatatttcctttaaattaacaaataaatcaaagcataaatatttatcttttccttgattgagatttctatatatcaggtatatctgggatctcctctagggtccagtaattggtcatggatattttagtgaccaagtcacttcaggagaaaatggcaagaaaaagttttaggactgcacaatttgtcaaatttccagaattttccactgagataaattttaaaacctaggaacataacaatattaaaagctagatgtttttaggaattagaaaaagaagttcatagacacttttcaaaagaagacatacaggtagccaacaaacatatgaagaaatgcccaacatcactaatcgttagagaaatgcacatcagaaccatgatgagataccatctcacatcagtcagaatggctattgctaaaaaataaaaaaaataatagatgctgatgaggttgtggagaaaggggaatgtttacacactgctggtgggagtgtaaattagctcagccactgtggaaagcagtgtggcaattcctcaaagaactaaaaacagaattggcattcatcccagcaaccccattattgggcatatacccaaaggaatataaattgttctataaagacacatgcatgtgtatgttcactgcagcactatttaaagtaacaaagacatggaaccaacctaaatgcccatcrgtgacagactagataaagaaaatggtggtacatatatactatggaatattatgtagtcataaaaagaataagatcatgttctttcaacaacatgaatggagctagaggccattatccttagcaaactaatgcaggaacagaaaaccaaatactgcatgttctcacttgtatgtgggagctagataacaagaatacatagacacaccaagtaaaagacacctgggcctacttgagggtggatggtgggaggagggagaggatcagaaaaaaacaaatatggggtaacatacttagtacctgggtaacgaaataatctgtgcaccaaactcccatgacacgagtttacctgcagaacaaacctgcacatgtacgcctgaacctaaaataaaaattaaatagaaaaaaaagaataagacgaataaaattttttatattaattaaaaaaaattcatctgtggaaacttaatgtctaaagtgttctgtttctttcttacagccataggattacattcgtacttaaaatgaattattttaataataatgaaatatgtttttatatttatatctaattcttataatacagccatgtcttggttattgattattttggtattgattacttggtttctaaactatccaggacctttatttcttctcacttgactcctttggtccgcttttctattgaaaataccaccaccaaacaattgtcagaaaaattagccaagaaaaaaggaagaagtaaagaggaaaggagaggaacaaaatgaaggggagagaaataggacaagcacctgtgcagcctatgaatttttttttccattagggcaattaattaagatttaaacgcacaggcataaatgtgtaagtttctgtaagtgcg

SEQ ID NO: 84745 - DNA, 727 bp, Homo sapiens
atcacactgtgtagcgatcaaatccagtccaacttgttttattgttacttgttaagaccatttcaaaaaccgctttaaaggggtaagagaaatgctatttgcacataagtgtccacagatatttctagtttaggaaggagctgttcaggttttgcatactttttccagtttttagaaggcactaactgcatttattcaaacatacacatggattattggtgatattctgtcacggtaatttaggaaaaggtcaagacaatgtgacataggcttggtatatgataaagacaagttcaaagtgatgaaaaaataatttttgtctgttgagctccaaatataaagggggaaataggggaatgctttcaggattgagcaaatggattatatacacaacttggattatctatccttactcatcctgcacgaagtaaacaattgtgctgtcttcttaaactttttctttgctttcaacaatttaacgaaatacctgagtgcagtgatattgaaataaagaatgtgacttrattcactttttagttgcacttaatgttgttagaataggctagagacccttcttacttaaaggtttctggaattaacattaaaattagtggagaagaacacactaatatatctagtgaaatagtgtttgtgttaaatgagcagagatactcagctgttattctaaaacctttattcatagggaatttgggtgacaacaccaggt

SEQ ID NO: 84746 - DNA, 733 bp, Homo sapiens
actttcaacttttgaacaaagggctctgaaggtttcgaaagaaacaaaagtccacagagagtcatacgagctatacccaatataattcctttctttttctgaatttaaattcaaagtttatttagtgtctaaatcagattggaaagaaatgtatcttttacaatgatattttaaggtaaatcttccccatttcacagtaaatgtttaaaggcttattgaaatttaaggttttaggaagaatagtcgctatatgaaataagttttgcctgtcctacattctctaattaattaattctttcaacattcaataagcatttattttgtggcatrtactgtgcaacaaatcctaaactggaccctaggaatagatatagatatttattttaatgactgaataagtctacattccggaattggtccaatgatcctcacaacctagtagggagggaagcaattaggcaaaaatatatagggaataaggaaaactgaatgagtactctacatggaaaagtaaagcatggattcaccaaagcagtgacatttattctaaactaaatcctaaatttacccccatataaaagaaaatcataattatagatctaataaaagtgttaggatcaactatttcaatgacaaaggtatctcatctatgaaaaatcctcaaaatattataaaataatagctcaatgaaaaactaaacaatatgccccaaatttaattcttttgaattcaa

SEQ ID NO: 84747 - DNA, 692 bp, Homo sapiens
gtacattaaacacatgatgcttggaactattaaaatattgtgttagtaaagctttgtaatctaagactttacaaaatttaaaagtgcttaaatttatttcatcattttgtaaataactattatcaaagctgtcagaaatttataagacaggccaggcacacagtgtctcatgcctgtaataccagcactctgggaaactgaggtgggtggattgcttgagctcagatgttcaagaccagcctgagcaacatagtgaaatttagctggatgtggtgacacacacctgtggtcccagctactcgggaggctgaggtgggaggaytgcttgagtctgggacgtggagtatcaatgagcagagattgcggtaagctgagattggccactgcactccagcatgggtgacagagtgagaatctgtctcaaaaaaaaaaaaagaaatatacaagatagtttgtctttatactatttacagtatctgactagtaataacactaactgatatttaatctataaccctttgcataagaaagtgccagggtccacagcagcctgggatgaatacttattctaaggttagttttgcacctttgtttctaggataaatggatgtttcagtgggacttgggcagcagaagttaggggcaggctgattttacccagtgaatatctctggtggagtgagggaaaatgc

SEQ ID NO: 84748 - DNA, 542 bp, Homo sapiens
  misc_feature (1)...(542): n = A,T,C or G
gcattcaacaaagtgacataggaaagttggctcaagagaaaaaccccaggtactagagaagtgttcattacagagttgatatttttccacctgacccatatgayaccaaagtggagtaggttataaaaaaacgaacttggctaatacagtttaaactaagctggtattcaaggatggccaaagccaaattctgatatatantactaccccaacacacacacacacacacacacacacactgttagaattcctccccttttctagaagtgtccttatcttgtccaaagagctcacctaggcatgtctacctcatgtttcatgttcattttcctctaggaaaatgagatttttttttctgcatctttttccttcgtggcacttagaggtaacttgttggataatcatccagaacaatagcttagggaatatgtaatttctcacaatgatttattgaatatattatgttggtgcaaaagtaattcctgtttttgccattaaaagtaatgatgtttttgccattacttttaatgcaaaaacaagaa

SEQ ID NO: 84749 - DNA, 542 bp, Homo sapiens
  misc_feature (1)...(542): n = A,T,C or G
gcattcaacaaagtgacataggaaagttggctcaagagaaaaaccccaggtactagagaagtgttcattacagagttgatatttttccacctgacccatatgataccaaagtggagtaggttataaaaaaacgaacttggctaatacagtttaaactaagctggtattcaaggatggccaaagccaaattctgatatatantactaccccaacacacacacacacacacacacacacactgttagaattcctccccttttctagaagtgtccttatcttgtccaaagagctcacctaggcatgtctacctcatgtttcatgttcattttcctctaggaaaatkagatttttttttctgcatctttttccttcgtggcacttagaggtaacttgttggataatcatccagaacaatagcttagggaatatgtaatttctcacaatgatttattgaatatattatgttggtgcaaaagtaattcctgtttttgccattaaaagtaatgatgtttttgccattacttttaatgcaaaaacaagaa

SEQ ID NO: 84750 - DNA, 1565 bp, Homo sapiens
cttccattatttcaagaatcataagctcaaatcaaggaactttttgatttattggggttaaggattaaggagctagatagagaaagagatctatatagctatacgtttatatatagatctacacatctgtaaagctatagctaaagatatatacacctctctctctctctctctctmtctatatatatatatctgcctatctatctatctatctatatctatcatctatcacctgctctccaagcatcaatttctgaactcccattttttgttgccttcactatatagaatgaaaaatccagcaacaactgggataactaaacaaacaaacaaactttgaggcagggcccagaggccctcaaaccaaggcaagctgggcctcatctctgatttatgcagttttttcactagttagttttccttatagttaaaaattacatttcatcttgtgtgtgttttaacaactcccttaggggataatgagcaagaaaaattttatattctaaaatatgaacataatcccttagcagataagcgagatgaagaaatatggattcaggaaaggtggtgttaagtctgtgaacagatgccagcttcctcataatcaaaaacgcctgaatcaggaagcaagttaaggtttgtgatgtttattgcagaatttccatttctaagagagtgattaacatactgccaaaaaatatttagcacattgttttaaaaaaagtagggtgagattatgcccctaacacctacacattttctgatctaagctggagttggtataaaaatccatgagatgaattagaatttttaaaccaagcagtaaattattatccaagtcatatgcctcttttctttactttccattctcttctggtttcttggtgcaaaatcagctatattagaataaactgaaagcaaaaatggaataacatatgagaaacagatcacatccaagatacatgcttgtcatattctgtcaaagatgtaatattagctagcagtgcataagctaaatcaagaagaaaattcaaattgcacgcattagggactgggatgctaaatggaaaatatgcaagaaatctccatgcatattaagcatgccatcattgtctatctcccctctttttgtgtcagggtcacaaatgagaaattattccagactgccaaagcctcccaaacaatgttaataccttaatgctcaggaaactggagtggaagtttccatttctcatcattgttttcagccttttttcttttcatccataaaaacttgtcttaagggttttaatttcttctccaaatatgtcagccaaatggacctatcacctaacatgcactatgcatgatggttaggaaccttgaatgtggcactaatgtacctatatctgaatttccctctgcaattgactatataattgctcaactcttctgtgcctcagttccttttctgtaagaaacaatgatatgagaataatatgtagggctagtgtgaggattatgtcagccattatgtacaaacgaattagaatagggctggtcatatactaagcattgttagtatt

SEQ ID NO: 84751 - DNA, 1565 bp, Homo sapiens
cttccattatttcaagaatcataagctcaaatcaaggaactttttgatttattggggttaaggattaaggagctagatagagaaagagatctatatagctatacgtttatatatagatctacacatctgtaaagctatagctaaagatatatacacctctctctctctctctctctctmtatatatatatatctgcctatctatctatctatctatatctatcatctatcacctgctctccaagcatcaatttctgaactcccattttttgttgccttcactatatagaatgaaaaatccagcaacaactgggataactaaacaaacaaacaaactttgaggcagggcccagaggccctcaaaccaaggcaagctgggcctcatctctgatttatgcagttttttcactagttagttttccttatagttaaaaattacatttcatcttgtgtgtgttttaacaactcccttaggggataatgagcaagaaaaattttatattctaaaatatgaacataatcccttagcagataagcgagatgaagaaatatggattcaggaaaggtggtgttaagtctgtgaacagatgccagcttcctcataatcaaaaacgcctgaatcaggaagcaagttaaggtttgtgatgtttattgcagaatttccatttctaagagagtgattaacatactgccaaaaaatatttagcacattgttttaaaaaaagtagggtgagattatgcccctaacacctacacattttctgatctaagctggagttggtataaaaatccatgagatgaattagaatttttaaaccaagcagtaaattattatccaagtcatatgcctcttttctttactttccattctcttctggtttcttggtgcaaaatcagctatattagaataaactgaaagcaaaaatggaataacatatgagaaacagatcacatccaagatacatgcttgtcatattctgtcaaagatgtaatattagctagcagtgcataagctaaatcaagaagaaaattcaaattgcacgcattagggactgggatgctaaatggaaaatatgcaagaaatctccatgcatattaagcatgccatcattgtctatctcccctctttttgtgtcagggtcacaaatgagaaattattccagactgccaaagcctcccaaacaatgttaataccttaatgctcaggaaactggagtggaagtttccatttctcatcattgttttcagccttttttcttttcatccataaaaacttgtcttaagggttttaatttcttctccaaatatgtcagccaaatggacctatcacctaacatgcactatgcatgatggttaggaaccttgaatgtggcactaatgtacctatatctgaatttccctctgcaattgactatataattgctcaactcttctgtgcctcagttccttttctgtaagaaacaatgatatgagaataatatgtagggctagtgtgaggattatgtcagccattatgtacaaacgaattagaatagggctggtcatatactaagcattgttagtatt

SEQ ID NO: 84752 - DNA, 1474 bp, Homo sapiens
catgggggaggaggaagcagaggagacagaggtgggagaggagaggctaagccccacacccaactgaagaagtggttggcggtttcagcggcacctccctcctcgctgaggtggactgtgaaggtggagaagcccagagcacagcctcctgtgagcagcttcccagggtgttgagggctgccaggcaaggacagggccctcagagttaggccttgcctgggcaggggtctcctgggggaaccttccctcagggccctgaggctctgggctccagagctcagcttccgcgttcagatacatggtctgctctgctttggagactgagaagcctgagaggtaaaatcgtgctgggtggtaggtagggtaagggagagggagcttcctccccatctccctcacccactgcagaaaggcttctctgtttccttycccagcccagtcccacctcctctgtgaggccgctcctcacctccctactggcctgcagtgatcctcctgcttgggagtcacagagcacccctacacgggccctttgccattctttatagtataaggcaaggccgtaacattttgtggggcatcttcttcagtgtcctcagccttgtgtgaacatcagaagcacttgggggcttgggaaaatgcaattgctggccccatctccagtttcttaaacagcagatctggggtggggcccaagaatttgcatttctaacaagttcccaggcgatgctgatgctgctagtctgggatccacactgggagagccactgatctgttaggcgtgtaactttacttgtattatctctcaattctcagggcaacctgttactctcccccattttgcaggtgaagaaacagagggaagacccagtgccttgtgcaaggtggctcagtttgtaagtggcagagccgatttgaacccacgtttgtctgactctaatactgtatcaaccctccttcctctaccctgttcctctgcattgtcaactattccacatgtatcttgttcctcaacaaaatagtaacgttttcttttgcatactttatatctctcaccttgcctgacccagtaacataggcttggttgggagggactgaaggacttggaaaggaaatgccccagtggagccaggatggaaatgggttcctctgtgtctcccacatggtgtcacctaaataaacagccatgtctgtgaggttcagtcatggggagaggagggcaagagagcactcgcaccaagcgatggggttagggggacacgaaaggaaatgtgataaatagagaggggggcgtgtggggcgaaggtgaggactggggacccgggagggggcaggctgtttcagagtgaaggcaggacgggcagcagagacagagaagaggctgccgggtggttagggctggggaggacaaggagggtgaggacagacgatcccggcagcccctggagccagaagagaagtcaggttaactcca

SEQ ID NO: 84753 - DNA, 590 bp, Homo sapiens
gcctctgcagaaggaggatctagaaacactcctccagatctaggcttcaggacagcattggtggacccaggacccaggttcagtcccatggacttagacctcaggcccattttagaggacataggttccaggtccatcctgttgcctggctggctcctaaagactcgggtacaaggccttttctaatgccaagctagtccctgtggatccaggcttcaggctagcccgtgtggatagaggatggaggcccaccccagcagacctaatcaacaggtacatcacagtgcaactaggccccaggcccacacacttgctgaccygggcacacccaagccaacctgaaaactccaaaagcaagcctgtccataaccatgccaaatggcccacccagaatctctggataggctggcagatgaaaggcttttcccaacacagccagtctgcaaagactgaagaagtacctacatcatcaaatgtataaacattgacacatgaccacaaggatcaagaaaaatcagagaaacatgatattactaatggacaaaacagggtgggtactagtgactcaaatttttgagtagaggagtaca

SEQ ID NO: 84754 - DNA, 732 bp, Homo sapiens
aactttcttttttttttttttttttgagacagagtctcgctctttcactcaggctggagtgcggtggtgtgatcttagctcactgcaacctccacctcccgagttcaaggaatcctcctgcctcagcctcccgagtagctgggattacaggcacatgccagcacacctggctaatttttgtatttttagtagagatggggtttccccatgttgaccaggctgktctcgaactcctgacctcaggtgatccacccgccttagtctcccaaagtgctaggattacaggcgtgagccaccgcgcccggctaacatttacaacttttagcaattcagaagataagtaataatattttgaaagaaatcttaggaggtgcctgattcctagtcctgaatctgggtggcaacctaggttttcttcccagctgttagataaggagatcatccaacgtcccttatcgcctccatatgacaactaataattttatatatttggtgactaaacacgaactattatgctttacttttattttggtaatcatgatatcttctagcaatgacttcttttgaacttggttagtctttacttatagatccgtaaccagttctgagaaagtagttgtgacaaaatgtaacgaaaataagtggggaaagatagttatggaggcaaaggtggactaatgttcctttctgtgtcccagaaattcctaatttgacttttcctggtttttattg

SEQ ID NO: 84755 - DNA, 664 bp, Homo sapiens
tgccctcaaggagcttaaattggcatggggaaggcagatgataagcagtaaagaaacaaacaaacaagataactactaaaggagctcaaatgcyttgaagggaataaacagagtaatcttagatagaagcttcaggaagttgaggattaaatgaaataatcaggatagtatccagcacaaggtaggttattattgataaagttactattcttccttaaaggatgaacattttatctactaactacctcctgtattttaatttgcagcagcagatgatggatttttctgccctaaacaaaacatctttttttcttgttatgtttggggcagctcatttgttttaatgcaatggtggtcaaatgggttttccaatctctgattgcaaagtgcacatatgctctgtcaaaaacaagagcctagactgaacagaccagatttcagagccctccactgtttcctcttcctttcctctgatccctgtaaccaactctcagtcagagtgatctctgttgcctcactggccccagctttttgccttggaggacgggcttatttacgtctccttacagcaccttctcctgtcttcccttggaatccagatctcattctcccctccacattggacactctcctcatttcaacatctttatgcttataataattg

SEQ ID NO: 84756 - DNA, 670 bp, Homo sapiens
agcaggagattggggaccttctagaagaacccctgccctgccacatataccacctggaatctggtcttttttttttttttttgagacagaggctcactctttcacccaggctggagtgcagtgatgcgatctcagctcactgcaacctccacttcccaggttcaagcgattctcctgcctcagcctcccgagtagcagggactacaggcatgtgcaacctccacctcccaggttcaagcgattctcctgcctcagcctcctgagtagcagggactacaggccatgcaccaccacccccagctaatttttgtatttttagtagagacggggtttcatcatgttggtcagactggtctcgaattcctgacctcaagtgatctgcctgcctcggcctcccaaagtgctgagattacaggcatgagtcaccatgcccgsccaggaatctcttctttcagtgatcttgtcttcctatcactgctcaagaatgaaacttccacctaggtgcattcaatcggctggtgtagttccacgccctggctgccaggagagagcaggagaatccttgctgggtttctatagtgggaggaagagtcctgtccgctccctgggagtctcatactggtggaagagggttggtgtaaggcagccacaagagacaagcatcccccat

SEQ ID NO: 84757 - DNA, 734 bp, Homo sapiens
tgcctacaatgatccaggaactgaactggttgtggagatacatacgtgttacatacatactaatggagagtgtgtagatcatttcagacactacaacgtgctataagaaaacaaaatagaaccttgtaatggtgagggactcagtggaggtcaggaarggcctctttgaaaagataacttttgagcaaagcccagaatgacaagaatgagccagctatgtaaaagtctgtgaggccagtattgcaggcaggttgttaaatatatattcattcatttattagaggcacagtcttaaatcagtaatatttatttcctggacgccatttagagtagcttcaagacagtagtagaaactgactagaaaattttttttttttttgagatggagtctcgctctggctcaggctggagtgcagtagcccgatctcagttcactgcaacctccgcctcccgggttcaagagattcttctgcctcagcctccggagcagctgggactataggcacccaccaccacacccagctaatttttgtatttttagtaatgacggggttccaccatattggccaggctggtctcgaactcctgaccttgtgatccacctgcctcggcctcccaaagtgctgggattacaggcgtgagccaccgcccccagccactgagcttcatttgtaagaggaagatcatatccatcgtatagttcggctgaaactgctggtttctctcccagggtc

SEQ ID NO: 84758 - DNA, 734 bp, Homo sapiens
tgcctacaatgatccaggaactgaactggttgtggagatacatacgtgttacatacatactaatggagagtgtgtagatcatttcagacactacaacgtgctataagaaaacaaaatagaaccttgtaatggtgagggactcagtggaggtcaggaaaggcctctttgaaaagataacttttgagcaaagcccagaatgacaagaatgagccagctatgtaaaagtctgtgaggccagtattgcaggcaggttgttaaatatatattcattcatttattagaggcacagtcttaaatcagtaatatttatttcctggacgccatttagagtagcttcaagacagtagtagaaactgactagaaaawtttttttttttttgagatggagtctcgctctggctcaggctggagtgcagtagcccgatctcagttcactgcaacctccgcctcccgggttcaagagattcttctgcctcagcctccggagcagctgggactataggcacccaccaccacacccagctaatttttgtatttttagtaatgacggggttccaccatattggccaggctggtctcgaactcctgaccttgtgatccacctgcctcggcctcccaaagtgctgggattacaggcgtgagccaccgcccccagccactgagcttcatttgtaagaggaagatcatatccatcgtatagttcggctgaaactgctggtttctctcccagggtc

SEQ ID NO: 84759 - DNA, 528 bp, Homo sapiens
ccagaggaggggactcagaagtgggggctcccaaagaaacacaatccagggccatttgtttcaactcctctcagctactgcgtgctggggacacagaggtggatgggggctgtccccgtcctgtgctgtgttmggtgctttccctgtgctggaatcctgtaaggcggagactctgtccacttttgcatgaggaaacatgtttcacagaacttgactattttgcccagggtcattttcatgataagggttctagtactgattgtgtaacaaactcagtcacttaaagcatttcataaatcactttgttttgttcccaaatctgtagactggggaggacttggcgaggatagtgtggctgtgctctgtggcatctgctagggcagctccgtgagccgaggtagccacctcggagcggggccacccccttggcctgctggctggagccggtggtgtgttgggagctctctgaggctgtgtgctgggagctctctgtgggctggaggcgccttcctgggtttcctcacgctg

SEQ ID NO: 84760 - DNA, 497 bp, Homo sapiens
ggatccaaggtgctgggtttgaaacaaaaaggagtgactctgtcccacaccaagtaacaccaaacctcactgacctcagttttcttatctgtaaaaagagcaatgygggggctggctcagtggctcatgcctgtaatcccagcactttgagaggccgagacaggtggatcacctgaggtcaagagttcgagaccagcctggccaacatggtgaaaccccgtctctacaaaagtacaaaatttagccgggcatggtggcacatgcctgtaatcccagctactcaggaggctgaggcaggagaattgcttgaacccagggggcggaagttgcagtgagccaagatcgcaccactgcactccagcctgggtgacacagtgaaactccatctcaaaaaaaaaaaaatttttttttagatttaaaaaagcaatgcctaccttgcaaggctgctgggaaaatcaaatatgccaatagatgtgaacaagccccgtgtagagaat

SEQ ID NO: 84761 - DNA, 717 bp, Homo sapiens
cgcaccggggctgcaggtggagctgccttccagtcctgcgccctgcaccggcactcctcagcccttgggcagtggatgggactgggcgctgtggaacagggggcggcactcgtcagggaggctcgggccgcacaggagcccaccgcggtggagaggctcagacatggcaggctgcaggtccccagccctgccccacaggaggcagctaaggccaacgagaagtcgagcacagcagctgctggcccaggtgctaagcccctcactgcccagggccggcagggccggctggacactccgagtgcagggcccactgagcccacgcccacccggaactcacrctggcccgcaagcaccgcgtgcagccctggttcccgccggcgcctctccctccacacctctccacaagctgagggaggcggctctggccttggccagcccagaaaggggctcccacagtgcagcggcaggctgaagggctcctcaagcgcggccagagtgagcgccaaggccgaggaggcgccgagagcaagcgagggctgtgagggctgctagcacgctgtcacctctcaccaccacaacgccactaccatttaccttcccctgtcccagtactgccccattcttccaggtccatgtcaaaagccttctcttcctccaggaagccttccccaggtgtcctccttcctcctccccctcccattgccacctctgcaagag

SEQ ID NO: 84762 - DNA, 1192 bp, Homo sapiens
gagtgtggttatggcaggtgtcagtcaaggctctctcattggatgggctgtgcatggctgtatgtgtcaagttggcaggcaggggaatggaattaggaattgttttcaattgtggcagggcccaatgagcaagaaagataatttgcaagaatgtggtagggtgtcacgccagactggacggggctccagttccaatagaaacacagaaaaacaggcaggaaacagagaggacacatggttgtgacaattcaggtggcctgattatgcaggtgggtgggaaaatattgtccagcacctacaggcaaagatgacttgaaatatttcattattcacatacttacagcccaatacrtaagaatggacactagatttagcctcaaatcaaattcccagggagctttgctagccagaagttatatactaacctttcaattgctggacactggaggtaaggggcaaggtgaggggtattggggcataagtgtcagtcctgctgttaggactgcccacactcatgcctggcacagtggcacgaaggccctgtcattctgctgtgtcctagtagccacacctgtgccttatgtaataatactagctctcagccaggcacggtggctcatgcctgtaatcccagcactttgggaggcagaggtgggtggatcatttgagatcaggagttcgagaccagcctggccaaactggtgtaatcccatctctactaaaagtacaaaaattttagcagggtgtggtggtgcgtgcctgtaaccccagctacttgggaggctaagtcaggagaatcgcttgaacccgggaggtggaggttgcagtgagctgagattgcaccactgcacttcagtctgggtaacagagtgagactccatctcaaaaaaaaaaaaaaaatacaagctctccaagaggaagctcatttcaattgcagcacagccttagtgagaccaaggcagccagtgccttttatcccctggcaaaaatgaggtggccctgggcagaggcctgcttccaggaggaaggcaggtatcagctgccccaagaggtggggaaggagggccgggcagaggcactgctagttgccataatcaccttcaactctttctccagcgtttactacacttttcacattcatgccagaaactgagcacttctagtctttgacttctaggagcttcagttctga

SEQ ID NO: 84763 - DNA, 679 bp, Homo sapiens
ttttttaaacatgaaataaacaccaatgtaattttcataactgccttcagtgaataaagtacaaaagtttcttgataattgctattttcctgggaaagaatactttttcagaaaatatttcatatttgatgaaattccatttctgaaaagtcaaatattttaaggaataaaatttgcatgacctacttgagggttctttagaatattttcaaaaattgcacggacatatttgtaattaaatcaaactatttcttttttccaccctgtggcactatggattccatgagcatagaaagagaacaattgccagattccctcagaaggaagtagtggccttcagaagaattgcaagtgagacgtttttcagtaataggcctgtggcacccatgtgtcccctccacatgcacgacgctcagggctctgcaggtgcaagggcaaatcctgcctttattttaaattttgatatattgttcattgtggatgttttgtattaattttgatttttgaaaaattatggcaaactacttctcatcttgattgccaaktgccttgctttcccccaaaattttgcctccttcatctgaaccaagtcctggccctaccctgcctgcttccctgcagacttctcaatgtgtgatgtcttcggctactcccacaggcagggagattctctgctcat

SEQ ID NO: 84764 - DNA, 594 bp, Homo sapiens
cttccttacactttatacaaaaattaattcaagatggattaaggacttaaacattagacctaaaaccataaaaaccctagaagaaaacctaggcactaccattcaggacatagacatgggcaaggacttcatgtctaaaacaccaaaagcaatggcaacaaaagccaaaattgacaaatgggatctaattaaactacagaacttctgcacagcaaaagaaactaccatcagagtgaacaggcaacctacaaaatgggagaaaattttcgcaacctactcatctggaaattttttaaaagcaaaatgtttaaaaytcaaggatttagtagagagcattttgagaaatggcttaattgcatattctggaaatagaaaacttattggatagggcagagagtatattcagggaactagtggatgatttattggggctagacagaggacagtttcaactcaataggtaaatcccctaggtaagtggataggaatgtggtttctgatggaggacatctgagtagaggaataatagggtggaaatgtgatttctgaaagttgttctgggcatgagtcataggatgttatagaaagacaaaa

SEQ ID NO: 84765 - DNA, 748 bp, Homo sapiens
agaatccattgaggccagaagagtgaccccatctctacaaaaagtttttttaaattagctaggcatggtggtatacacttgtagtcctagctacttaggaagctgaggcaggagggtcacttgagcccaggagtttgaggttaacaatgactgcgccactgctctccagctagggcaatactgcacccttgcctgggggacagagtaagaccccatctcaaaaaagaaaaaaatttaaaaagctctactttataaagtttactccagtcaattacagattaaagttaactrtgcctcttaggctagatgtggaataagtcatgaggttgttagaagcattcagttttttctggcagaagtattctctcaaactcaaaggtaaaatttgaacattacaaagatatttaatacatctagtctatctacttctaaatgaatatttgtattttatgtatctaaaatatatgtgtgtgtgtgtgtgtgtatatatatatatatatatatatctgccatgaataaatacatatatgtttatctctaataaagtcacactgcagcctcaaactcccgggctcaggtaagcctcagtctcctgagtagctgggactacaggcatacgccaccatgcccggctagtttttgcattttttttggtatagacggggttttgccatgttgcccagtctggtctcaatctcctgggctcaagccatctgcctgccttgcactcccaaagtgacaggattac

SEQ ID NO: 84766 - DNA, 748 bp, Homo sapiens
agaatccattgaggccagaagagtgaccccatctctacaaaaagtttttttaaattagctaggcatggtggtatacacttgtagtcctagctacttaggaagctgaggcaggagggtcacttgagcccaggagtttgaggttaacaatgactgcgccactgctctccagctagggcaatactgcacccttgcctgggggacagagtaagaccccatctcaaaaaagaaaaaaatttaaaaagctctactttataaagtttactccagtcaattacagattaaagttaactatgcctcttaggctagatgtggaataagtcatgaggttgttagaagcattcagttttttctggcagaagtattctctcaaactcaaaggtaaaatttgaacattacaaagatatttaatacatctagtctatctacttctaaatgaatatttgtattttatgtatctaaaatatatgtgtgtgtgtgtgtgtgtrtatatatatatatatatatatctgccatgaataaatacatatatgtttatctctaataaagtcacactgcagcctcaaactcccgggctcaggtaagcctcagtctcctgagtagctgggactacaggcatacgccaccatgcccggctagtttttgcattttttttggtatagacggggttttgccatgttgcccagtctggtctcaatctcctgggctcaagccatctgcctgccttgcactcccaaagtgacaggattac

SEQ ID NO: 84767 - DNA, 1096 bp, Homo sapiens
ttcctcattcctttgtctttggacaacttagaaacaaaaaaagctttctacatttttgccaagaagcttagtttccatttatttcaggatktaaaataactggattttcacaagaagaagatgagatggggtggaggaaggagattgggatgtttcttttgcctatatacatgcgaggggtgaagactgaagggaggggaatcatgcttacttttgatagatgcagctgcccacgagtgggaatgacacccagggagagagaagcagttctggaaagtcctgggcatgcaattacaggtagccagtgtaagttgtgcacttacatggccatcaaaagaatcatctccacttcatgacacggggaggagggaactcaaatcacaagtctatgactagagattacctttccactgcctctattcttcatcacattgtctttatttttatttctattttttatttttatttttttgagacagagtctcgctctgtcatccaggctggagtgcagtggcgtgatcgtgatctcagctcactgtaagctctgcctcctgggttcacgccattctcctgcctcagcctcctgagtagctgggattacaggtgcccaccaccacgcctggttaattttttttttgtatttttagtagagatggggtttcaccatgttagccaggatggtctcaatctcctgacctcgtgatccgcccgcctcggcttcccaaagtgctggaattacaggcgtgagtcaccgcgcccagccccatcacattgtcttaagattattattttaataaaggtaattatatttctcctggtattaggataacgttttatgtttaattataatcacacatgattacaacagatggatttcctaattctgtcatttccaagcagatttccacactgccgagtgtctatcacaataaaggaaagtgagattactttaatttcacaatgcaaaatatccaaagaaacgtttactgatgtttcttaagtacttagtatttgctaggtcctaagctaggagtttcattgtgatctgttatagatattaggaatttatcatgtcagagtgtgataagctaatgca

SEQ ID NO: 84768 - DNA, 1096 bp, Homo sapiens
ttcctcattcctttgtctttggacaacttagaaacaaaaaaagctttctacatttttgccaagaagcttagtttccatttatttcaggatgtaaaataactggattttcacaagaasaagatgagatggggtggaggaaggagattgggatgtttcttttgcctatatacatgcgaggggtgaagactgaagggaggggaatcatgcttacttttgatagatgcagctgcccacgagtgggaatgacacccagggagagagaagcagttctggaaagtcctgggcatgcaattacaggtagccagtgtaagttgtgcacttacatggccatcaaaagaatcatctccacttcatgacacggggaggagggaactcaaatcacaagtctatgactagagattacctttccactgcctctattcttcatcacattgtctttatttttatttctattttttatttttatttttttgagacagagtctcgctctgtcatccaggctggagtgcagtggcgtgatcgtgatctcagctcactgtaagctctgcctcctgggttcacgccattctcctgcctcagcctcctgagtagctgggattacaggtgcccaccaccacgcctggttaattttttttttgtatttttagtagagatggggtttcaccatgttagccaggatggtctcaatctcctgacctcgtgatccgcccgcctcggcttcccaaagtgctggaattacaggcgtgagtcaccgcgcccagccccatcacattgtcttaagattattattttaataaaggtaattatatttctcctggtattaggataacgttttatgtttaattataatcacacatgattacaacagatggatttcctaattctgtcatttccaagcagatttccacactgccgagtgtctatcacaataaaggaaagtgagattactttaatttcacaatgcaaaatatccaaagaaacgtttactgatgtttcttaagtacttagtatttgctaggtcctaagctaggagtttcattgtgatctgttatagatattaggaatttatcatgtcagagtgtgataagctaatgca

SEQ ID NO: 84769 - DNA, 1096 bp, Homo sapiens
ttcctcattcctttgtctttggacaacttagaaacaaaaaaagctttctacatttttgccaagaagcttagtttccatttatttcaggatgtaaaataactggattttcacaagaagaagatgagatggggtggaggaaggagattgggatgtttcttttgcctatatacatgcgaggggtgaagactgaagggaggggaatcatgcttacttttgatagatgcagctgcccacgagtgggaatgacacccagggagagagaagcagttctggaaagtcctgggcatgcaattacaggtagccagtgtaagttgtgcacttacatggccatcaaaagaatcatctccacttcatgacacggggaggagggaactcaaatcacaagtctatgactagagattacctttccactgcctctattcttcatcacattgtctttatttttatttctattttttatttttatttttttgagacagagtctcgctctgtcatccaggctggagtgcagtggcgtgatcgtgatctcagctcactgtaagctctgcctcctgggttcacgccattctcctgcctcagcctcctgagtagctgggattacaggtgcccaccaccacgcctggttaattttttttttktatttttagtagagatggggtttcaccatgttagccaggatggtctcaatctcctgacctcgtgatccgcccgcctcggcttcccaaagtgctggaattacaggcgtgagtcaccgcgcccagccccatcacattgtcttaagattattattttaataaaggtaattatatttctcctggtattaggataacgttttatgtttaattataatcacacatgattacaacagatggatttcctaattctgtcatttccaagcagatttccacactgccgagtgtctatcacaataaaggaaagtgagattactttaatttcacaatgcaaaatatccaaagaaacgtttactgatgtttcttaagtacttagtatttgctaggtcctaagctaggagtttcattgtgatctgttatagatattaggaatttatcatgtcagagtgtgataagctaatgca

SEQ ID NO: 84770 - DNA, 830 bp, Homo sapiens
actactcaaaataggaattattatctaccattttacagttgagaaaacagactaaagtgccttattcaaattcatagctgaattgaaatccaggtgtggttccaaagccagaactctaaactagtatgctgcctttgcattttccatctgtgtacatacacctttccaggagcctgtacaaacttttggagacatagttaccataatcttagatattattatagtcttcattttgaggtacacaattagtatcctctttaagatagagagcccttaccatctgccattccatgtggaagggacacacacgaccccatccagaaacagagggcatacccaatctcagattatagcagcctgtttcttcatacacctgacagaggacagcagaacagggctgggtcgagcatggtagatgcttctccaccaaagacctacatccagagacttgatttacctatttaagcccacatgacatcccaagagatgggctcaatagcatattaaaattttcaagactgagaagcacaactcagggaagcaatttagaagaaaatgtaaaaatattagaaatacctgaatttatttgtttcccattagttaagctgaagtgcggtgaaccatgtgttatacactggcttttcataaaagtaattatcaaatgggagctgaatccctgcataaccagctatatcctatagtgtaataaatatgytaaacatcacagattttgtatcacagagaagaaatatttagttttggagctcatggaagccatagaggaaaggaattttagtttgcatctctttctaatgactgtgggttaaaaa

SEQ ID NO: 84771 - DNA, 588 bp, Homo sapiens
agagcagagactgatgaccacaggagtgagagagatatctgtaatacagggcactgttgccttaatcttataraagttaatagtacaactagggagtaagagtgtgcacatttgaagacaagcaaaaaaagtacctaccacattaataccatcccaaattcattcaacaaacataccaaaaatcattattgagcatattctatgtgtcaagcacccttcaaggtacaggtaggtattggaggcacagtgatgagcaaggtaaagaaggcctccatccctaaggagcttgctctgcttaaattggaagacaggatgtgctatacagaatggcaaagagctggacaacatgaagatcgagatgccctgtaaaactcagattgtataatcaatgtctccataggtttgtgctgccgtttatagtgctgtctttgttattaagatcatccagattgtgtattgggtacagtaactttcatgagtaaaagaagactgacaatggttaacttagttaatcaaaatagcaaatacttaagaagggcttactatgtggcagacactatacacatgttaacttattcagtcatcaca

SEQ ID NO: 84772 - DNA, 645 bp, Homo sapiens
cccttaaaaggaatgtagccagcctttaggaagggatgaaaagaaaaataggaaaacgggtggcaaataaagcagtattcagctttgatctctcagttctgcctcaccagccacctggtggagtatggcaaccagaggaacatggtaacccagagttcctgagtttacacagttgagttgtagcccccatgggtctctcactctttttatctcagttttatccttatttatactcttattctctatctaatgccaaatccctagaaaggaattgtgactsaagtgtgagtagatgcccaactcggtccagtcattagggtctaaggtccccactaacaacagctactggagggatcatctctgatataagaggcagttattccttggcaatgactgtaaattgcatagtctacccaactttttatcatcaaacatccttggacttgaaattgaaaaggcctaaacttagatttgtgttatacaactaccattaacaagccacttgttctctctgggtcttgatttcctcgaaaataagatactcataattatgcttgcacagtctacctcacagggtgattatgagggccaaatggaataactgctttctagtatagctaaaattaataaagtgcttatcatgca

SEQ ID NO: 84773 - DNA, 1250 bp, Homo sapiens
accacaggtgatccgcccgcctcagcctcccaaagtgctgggattacaggtgtgagccgccacgcccggccatgtccggctagtttttgtatttttagtagagatggggtttcaccatgtcattcaggctggcctcaaactcctgacctcaggtgatccgcctgccttggcctctcaaagtgctgggattataggcgggagccaccgcacctggccgatctttttaaaaattaagagatttagtgttaattgaagatgctgaggaatgcaacctcaattagatttaaatacaaaaacaaaaacctccacctctctgtatgtaaatacatctagaaagatgtgaactaaacaggcacctctggggatagacagagattgcaggtgctggtcaagggggtgatctcactttgtgttgtgctgctttttaagtaacacagttactgaaaaataatttgatgttttgatacctgtatctatccatctatgtatacacacagacactgggaaaggatccttacggtcaagctaattaacatatccatcacctcacagttggttttcatggtgacaacacttaagattggctctcttagcaaatttcaagaatacaatatggtatcatcagctgtgatcaacatgatggacactactcccagatctcccaaccgagggatgtatcctttgaccaacatctcccctttcccccaacccctcactgtcttcattcttacgagaatgcactcatatactaagcaatggaaggccttttttwcaaaagaggctaagaaagatgtcaggctgtctcttcagacttaccagctcctcttggatctgctgtgtgcgtctgctgagttgagcgttatactgatgtctcaagaaacgcctgaaggagaatcaaatgtgggctgccttcagtatctcagaaagaattaaatagaagttagataactgctgaccaggctgtctcctttatggtttcagcaacacgaatgcaagtctgaaaaagcaagaggcccacccgcctgggaagagtggggggcccttctgacacacaccccagctctgccttctgccggaaggcttccatctgctttcgctcttcctccagcctctctagctcccaccgctgcttcaacagattctcctgctccttctttagtttggtcgcctgtggtgatgatgagagtaagctcgactgagatctgagatcgtgggaatcagatcttccttcattctccatctccattttt

SEQ ID NO: 84774 - DNA, 577 bp, Homo sapiens
caaggctggtcgggtgctaagacaacttgaactgccagaataatttgcctccattttagacataaacactttgtatcagaaaatgcyataaggaaatggggcaaaaatgatccatgccaataaaaattagtttttatctgcctcattttttttcagccatcttctttaggaagtacacaaaggtctcttctgagctggcaaagaaagacacaagtgtaggttggttttacctggttttctagcctgtgagcactttgatggtatgactcactgagtccggctctaaaagacatccttggaacttcagagtattttgtgtaagaacaaagggtgcttgggttcagtttgcaacacaagtcacttttaccacacaaattcccttcttttgtgctggcaaagggggatgctttgagccctttgggtttagaagatcttcaaacagacaatagtgtgcaaacaaccctcaagaacgtaactttgctaggacaacctcaaggctgagaccaaggctttgagaaaggccccttcagctgatttccttctgctcctcaccctgaacaaagcctgactgacaata

SEQ ID NO: 84775 - DNA, 577 bp, Homo sapiens
caaggctggtcgggtgctaagacaacttgaactgccagaataatttgcctccattttagacataaacactttgtatcagaaaatgctataaggaaatggggcaaaaatgatccatgccaataaaaattagtttttatctgcctcattttttttcagccatsttctttaggaagtacacaaaggtctcttctgagctggcaaagaaagacacaagtgtaggttggttttacctggttttctagcctgtgagcactttgatggtatgactcactgagtccggctctaaaagacatccttggaacttcagagtattttgtgtaagaacaaagggtgcttgggttcagtttgcaacacaagtcacttttaccacacaaattcccttcttttgtgctggcaaagggggatgctttgagccctttgggtttagaagatcttcaaacagacaatagtgtgcaaacaaccctcaagaacgtaactttgctaggacaacctcaaggctgagaccaaggctttgagaaaggccccttcagctgatttccttctgctcctcaccctgaacaaagcctgactgacaata

SEQ ID NO: 84776 - DNA, 661 bp, Homo sapiens
ctgccaacaacttaaatcagcttggaagctgattcttcccagagtctcctggcaagtacccagctggttaacatctcaatgacgacctcgtgaaaccyggagcagagaaatcagctgagtcaatctgacctcccagctacagagcggtgagctaaaaaatttacattgttttcaacctctgcatttgtagtcatctgttactcagaaataggaaatgaaaacatgtttgtaaaattgagtgggatatacaatttaaccaaatcatacttcctaacctacctcattaagatattgtttattacgtattccgctatttaatagtgttgtgcctgctagggcatgtttctgcacacttgcccagaaaacgtaaagaagctgtgtatggtgtactgaacctattcctgtaccctccctcggtcttcaaggttgataacctattttccaggttaacagtgctaggtctgctagacttactgatacacggtagtcacatgattataaatgtgaacccttatgttcctgaagtattctccaacgtgctcttgtttttaggggttatatctctgattttagcggttattttctagatagtagtcctttgtcagttatgctatgtgtaaatattttctgctcaaactatagctaccttttcatcctcctt

SEQ ID NO: 84777 - DNA, 661 bp, Homo sapiens
ctgccaacaacttaaatcagcttggaagctgattcttcccagagtctcctggcaagtacccagctggttaacatctcaatgacgacctcgtgaaacccggagcagagaaatcagctgagtcaatctgacctcccagctacagagcggtgagctaaaaaatttacattgttttcaacctctgcatttgtagtcatctgttactcagaaataggaaatgaaaacatgtttgtaaaattgagtgggatatacaatttaaccaaatcatacttcctaacctacctcattaagatattgtttattacgtattccgctatttaatagtgttgtgcctgctagggcatgtttctgcacacttgcccagaaaacgtaaagaagctgtrtatggtgtactgaacctattcctgtaccctccctcggtcttcaaggttgataacctattttccaggttaacagtgctaggtctgctagacttactgatacacggtagtcacatgattataaatgtgaacccttatgttcctgaagtattctccaacgtgctcttgtttttaggggttatatctctgattttagcggttattttctagatagtagtcctttgtcagttatgctatgtgtaaatattttctgctcaaactatagctaccttttcatcctcctt

SEQ ID NO: 84778 - DNA, 1695 bp, Homo sapiens
ttcaaaatagagtgcagaataaattgcacattattttttccatttattcttagactccctaaagtgctttgcacataggatgtagaaagcactcraatgtatattgaattgattatttgtgaagattacaatgaagaggcagattggtccaagacgtataataaaacccaggggctatattttcctgacatcaatgtttactctaccaaatagaggtataaaaatgatgacagtggcctttcaactattatttttttgggtcctaaacacttcaaagtttcacacttctaaagaaaaaaaatttgattattttttagatagtaaggttaatattaatgtttgattattgtttacattgtttacacatttcttgtgcagggatattatcactataatacatctgtgataataatgattcaaacaatttgaaacataagatgattgaaatttcaggcaaaatcaaaatagagaaaaacctagtaaggcctcttttgtgacttctttatttaaaaaatttaaaatatataaggaatataatcacttctcagttctttaaaacttagtataagattttcttaatgccaagacagttaatgaatttttggacagattgattaaagaaatggcattaccaaccaaaattgcccttttaatgataaattccttcagctttgaattatacgttatgttccataattctgatgatcttaaggagacattcattttaaacttaattatttgataagattagaaataaaatattaatatgcatctccaagatacttattttttattatctattaaaaatgttctctgttactatatacttacaggggaaaatattgaaagtggtctttagaacacagtacattaaagctcagtaacttaaaactggggtggctttttgcatttcacaattagtatttaatatttttccagaattagaaatattaaagattctttggctaggaaaacatatactttgtctttctctattccctctgataatatctttcttaaccatatttcctcaaatcttagagacatcttaactaatgatattgtgaaaagtgtgaaaatacttgtcactagtcattagaatcattaattttcggatgatttcacagtaacatcctcatcatcattttttggagggtaggggagacagggtctcaatctgtcaccccggctggagtgcattagcataatcttggctcactgcaacctccacctcctgggctcaagtgattctcccacctcagcctccagagtagctaggatcacagattaggtgacaggtgtgtgccaccatgccaggttaatttttgtattttttgtagagatgggtcttgccctgtttcccaggctggtctcatcatcatttttatataataatgtcatcattgcaattttagtttttaaccataaagctttcaaaatgcaatggacaattgatataaatttatgttttatatgaacaaatcctataacacaatcttaatagtaaatccaaatttaaatcctcatttaagtagtggagaaagagcttaatttacacagtgggcaaatttaataattttaattcttatcttctaaattttgaatcaacatatctatcccatatgtaatctcacttcaaatagaacatctaaattaaaattaggagtaaaaacaaccagaacagagataaatgca

SEQ ID NO: 84779 - DNA, 1695 bp, Homo sapiens
ttcaaaatagagtgcagaataaattgcacattattttttccatttattcttagactccctaaagtgctttgcacataggatgtagaaagcactcgaatgtatattgaattgattatttgtgaagattacaatgaagaggcagattggtccaagacgtataataaaacccaggggctatattttcctgacatcaatgtttactctaccaaatagaggtataaaaatgatgacagtggcctttcaactattatttttttgggtcctaaacacttcaaagtttcacacttctaaagaaaaaaaatttgattattttttagatagtaaggttaatattaatgtttgattattgtttacattgtttacacatttcttgtgcagggatattatcactataatacatctgtgataataatgattcaaacaatttgaaacataagatgattgaaatttcaggcaaaatcaaaatagagaaaaacctagtaaggcctcttttgtgacttctttatttaaaaaatttaaaatatataaggaatataatcacttctcagttctttaaaacttagtataagattttcttaatgccaagacagttaatgaatttttggacagattgattaaagaaatggcattaccaaccaaaattgcccttttaatgataaattccttcagctttgaattatacgttatgttccataattctgatgatcttaaggagacattcattttaaacttaattatttgataagattagaaataaaatattaatatgcatctccaagatacttattttttattatctattaaaaatgttctctgttactatatacttacaggggaaaatattgaaagtggtctttagaacacagtacattaaagctcagtaacttaaaactggggtggctttttgcatttcacaattagtatttaatatttttccagaattagaaatattaaagattctttgsctaggaaaacatatactttgtctttctctattccctctgataatatctttcttaaccatatttcctcaaatcttagagacatcttaactaatgatattgtgaaaagtgtgaaaatacttgtcactagtcattagaatcattaattttcggatgatttcacagtaacatcctcatcatcattttttggagggtaggggagacagggtctcaatctgtcaccccggctggagtgcattagcataatcttggctcactgcaacctccacctcctgggctcaagtgattctcccacctcagcctccagagtagctaggatcacagattaggtgacaggtgtgtgccaccatgccaggttaatttttgtattttttgtagagatgggtcttgccctgtttcccaggctggtctcatcatcatttttatataataatgtcatcattgcaattttagtttttaaccataaagctttcaaaatgcaatggacaattgatataaatttatgttttatatgaacaaatcctataacacaatcttaatagtaaatccaaatttaaatcctcatttaagtagtggagaaagagcttaatttacacagtgggcaaatttaataattttaattcttatcttctaaattttgaatcaacatatctatcccatatgtaatctcacttcaaatagaacatctaaattaaaattaggagtaaaaacaaccagaacagagataaatgca

SEQ ID NO: 84780 - DNA, 1695 bp, Homo sapiens
ttcaaaatagagtgcagaataaattgcacattattttttccatttattcttagactccctaaagtgctttgcacataggatgtagaaagcactcgaatgtatattgaattgattatttgtgaagattacaatgaagaggcagattggtccaagacgtataataaaacccaggggctatattttcctgacatcaatgtttactctaccaaatagaggtataaaaatgatgacagtggcctttcaactattatttttttgggtcctaaacacttcaaagtttcacacttctaaagaaaaaaaatttgattattttttagatagtaaggttaatattaatgtttgattattgtttacattgtttacacatttcttgtgcagggatattatcactataatacatctgtgataataatgattcaaacaatttgaaacataagatgattgaaatttcaggcaaaatcaaaatagagaaaaacctagtaaggcctcttttgtgacttctttatttaaaaaatttaaaatatataaggaatataatcacttctcagttctttaaaacttagtataagattttcttaatgccaagacagttaatgaatttttggacagattgattaaagaaatggcattaccaaccaaaattgcccttttaatgataaattccttcagctttgaattatacgttatgttccataattctgatgatcttaaggagacattcattttaaacttaattatttgataagattagaaataaaatattaatatgcatctccaagatacttattttttattatctattaaaaatgttctctgttactatatacttacaggggaaaatattgaaagtggtctttagaacacagtacattaaagctcagtaacttaaaactggggtggctttttgcatttcacaattagtatttaatatttttccagaattagaaatattaaagattctttggctaggaaaacatatactttgtctttctctattccctctgataatatctttcttaaccatatttcctcaaatcttagagacatcttaactaatgatattgtgaaaagtgtgaaaatacttgtcactagtcattagaatcattaattttcrgatgatttcacagtaacatcctcatcatcattttttggagggtaggggagacagggtctcaatctgtcaccccggctggagtgcattagcataatcttggctcactgcaacctccacctcctgggctcaagtgattctcccacctcagcctccagagtagctaggatcacagattaggtgacaggtgtgtgccaccatgccaggttaatttttgtattttttgtagagatgggtcttgccctgtttcccaggctggtctcatcatcatttttatataataatgtcatcattgcaattttagtttttaaccataaagctttcaaaatgcaatggacaattgatataaatttatgttttatatgaacaaatcctataacacaatcttaatagtaaatccaaatttaaatcctcatttaagtagtggagaaagagcttaatttacacagtgggcaaatttaataattttaattcttatcttctaaattttgaatcaacatatctatcccatatgtaatctcacttcaaatagaacatctaaattaaaattaggagtaaaaacaaccagaacagagataaatgca

SEQ ID NO: 84781 - DNA, 1077 bp, Homo sapiens
ttataacagtgcagccatcaaaaagaatgaaataatgtcttttgcagcagcatggatggaattggtggacattatattaggtgaactaactcaaaagcagaaaatctaatatggcatgttctcactttaygtaggagctaaacatgggtccatgaggacattaagatggagataatagacactaggaactccaaaaatggggagtataggagagagtgaaggctgaaaaattatttattcagtaaaacattcaatattcaagtgacggatacactggtagcccaatcccaccattatacaatatacccatgaaacaaacatgcacatttacccctgaatctaaattaataaataaaatttaatatctctttgaattatacaacatgtatttctgaaaaaaagaaatactacagtgtaccatctaaatatgtacaattattatgtgtcaattataaacttaaaaatttaatttaaaaaaatgccaccttggttattgtttgtttcaattaaaggaacttgaaaaacaacaggtacaagaggatcactctgacctttgctctgtgtcttaaaagttaaagatgaaattcttatgtaaaatgtatccttcctatactagaaaaaaggcaatggtcttatcatcaaagatggaaaggtgaggccgagagaattctgtacaacagcaaaccttgttaaactaacccttatctgtccaagtaaagactctcacctaagcccctttgtcttatcaaattctcagtttaccattctttgtttcatcagtatacaggtaactgactctaactgcttctttggggttttcatttctttataagggtgccgatgccacatgaaacttacatgaagtaaatttctacgccttcctcttgtgaatctgttttacatcaatttaattatcagacctagccaagaccctgagaggatacaggtagagtcttgctgcccctacactcatgtattgtaattactgctttattatttctagaaaatctttgattgctggttatgtcttcttaactccagctggcttattcaaaccagttttcttcattttgggtg

SEQ ID NO: 84782 - DNA, 1048 bp, Homo sapiens
ttggttttgggttgataggtgcagcaaaccaccatggcacacgtttacctaggtaacaaacctgcacatgtatcccagaacttaatatatatatgtgtgtatatgtgtgtgaatatatatatatggtatatccatgttgaaatattctatcactcatttatatatttgaattggattgtcttctacatttatcagatttttggtattcattgtaataggtagtatttttagtcttttattataaagacatacatattttcgcaactrtgggcatatttactgaatgtcctttttttaaatcacaaagccacgggttcatgcctaggtttagtaatatgaatacaaataaggctgttagaattctaaacatgaaatctcataatcatgtacttatatggaaatattataaaaagagtattaaaatgtgtcttttctaaaattaaaatttatattgaataatatgattttccattttacaattagaaagaggataagtgtattgtacttgtctgtatctcatagttaccaattttatttattgagaaaatagtatgtataaactttttttatataaattagctagtttctttctcacaaatgtctttggggataaatactattactttctccattttacagatgaggaaatttaaacatatggaatttaaataattgggcttaaatctcaatataatgaatggcagagattaaactgatatctttcctgatgatgataaacccatcatatgatgaactggccaactatctttattgtgacaggaaacatctgttctcaatgcaatgaatttgtaattttgttgaagatttaaagaatgtacaagaatcagcaaaataggatatatatatatctatctatcttatatatatattatacagcagtcaagtcaactcttgaccattgttaaaactgttgactccactagctggagaaggagccgtggaatcctggaaacttagcctgtccttgactgtcaggtatgatttgcacagacagaaaggagtaatcaaagcattttcaatagaagga

SEQ ID NO: 84783 - DNA, 1048 bp, Homo sapiens
ttggttttgggttgataggtgcagcaaaccaccatggcacacgtttacctaggtaacaaacctgcacatgtatcccagaacttaatatatatatgtgtgtatatgtgtgtgaatatatatatatggtatatccatgttgaaatattctatcactcatttatatatttgaattggattgtcttctacatttatcagatttttggtattcattgtaataggtagtatttttagtcttttattataaagacatacatattttcgcaactatgggcatatttactgaatgtcctttttttaaatcacaaagccacgggttcatgcctaggtttagtaatatgaatacaaataaggctgttagaattctaaacatgaaatctcataatcatgtacttatatggaaatattataaaaagagtattaaaatgtgtcttttctaaaattaaaatttatattgaataatatgattttccattttacaattagaaagaggataagtgtattgtacttgtctgtatctcatagttaccaattttatttattgagaaaatagtatgtataaactttttttatataaattagctagtttctttctcacaaatgtctttggggataaatactattactttctccattttacagatgaggaaatttaaacatatggaatttaaataattgggcttaaatctcaatataatgaatggcagagattaaactgatatctttcctgatgatgataaacccatcatrtgatgaactggccaactatctttattgtgacaggaaacatctgttctcaatgcaatgaatttgtaattttgttgaagatttaaagaatgtacaagaatcagcaaaataggatatatatatatctatctatcttatatatatattatacagcagtcaagtcaactcttgaccattgttaaaactgttgactccactagctggagaaggagccgtggaatcctggaaacttagcctgtccttgactgtcaggtatgatttgcacagacagaaaggagtaatcaaagcattttcaatagaagga

SEQ ID NO: 84784 - DNA, 1516 bp, Homo sapiens
ccctcagcccatttcataaaactgcacattttcatatattctcaatcttggtcaaaagcaatactgtctacgctgcacactcaaagcctaaaatctgagacaccttcttgactcttcctctttccttcaaacccaccaagtctcattcattttatcttatcaatctctctcaatctgtctgctccattttattttcctgctgcctcaactcagaatctgtcatgcctaggttactgcagcagtccctttcatctcttcctacaggcttttaagtttttacctgctgggtactgtattgcctgtaggtagtcattataaatgcaaacctatgcagatttcttccaggggaatttagggctttgtgctttgaatagtttctacttaaaaaaaaaaaaaaagacaagaacttcttacctattgtagggaaaggaatgaacattcgttgttcattagacaaagggcccttaagatcaaggatagtggactgtacactttttttccttctcagctttgaaataatctgacatagcctggttgctcagtgatgactgaatgatgatttatacagcacaattgaattgacagtaataaaattctgggctcttactttcttccagacatatttgctgaataaagtattcatgtcagatttttaagtacacacttattagacatgtaactagtttttcaatagtcaagtttttgtaacagtaaagaaatattatctgcatttacatacgtggggttttagcaagctttacaaaaggttttcagtggcctatttctagctgattaccaaatgaggaaatatttatacatgtgtctgtacatatgcactcatgcacatatatatatatatatatttaagtaagtgtagttctttttttttttttttgagacggagtctcgctctgtcgcccaggctggagtgcagtggcaagatctgggctcactgcaagctccgcctcccgggttcacgccattttcctgcctcagcctcccgagtagctgggactacaggtgcctgccacctcgcccggctaattttttgtatttttagtagagacggggtttccccctgttagccaggatgttctcgatctcctgacctcgtgatccgcccgcctcggccttccaaagtgctgggattacaggcgtgagccmccgcgccaggccgtgtagtttttttttttttttttttttttttttgtcagtgcagatgctgatgatgattgctgctgtttttattgtagccagctgcgatttgtctaattctcaccactactgttagtgctcttgtcatcttgttattgaggaaagcaggtattggtgtgttttaagttgagaagatacgcaacgaacatacacagacatatgcactttctttcaaaacaaggtaaaataaatttacatacaaattaaaatagaaatgcaattgtgttttgactctaggacagcatagatctttaggaccaaaagattccaaggttagaagtctaaaaatggatgctagcat

SEQ ID NO: 84785 - DNA, 1516 bp, Homo sapiens
ccctcagcccatttcataaaactgcacattttcatatattctcaatcttggtcaaaagcaatactgtctacgctgcacactcaaagcctaaaatctgagacaccttcttgactcttcctctttccttcaaacccaccaagtctcattcattttatcttatcaatctctctcaatctgtctgctccattttattttcctgctgcctcaactcagaatctgtcatgcctaggttactgcagcagtccctttcatctcttcctacaggcttttaagtttttacctgctgggtactgtattgcctgtaggtagtcattataaatgcaaacctatgcagatttcttccaggggaatttagggctttgtgctttgaatagtttctacttaaaaaaaaaaaaaaagacaagaacttcttacctattgtagggaaaggaatgaacattcgttgttcattagacaaagggcccttaagatcaaggatagtggactgtacactttttttccttctcagctttgaaataatctgacatagcctggttgctcagtgatgactgaatgatgatttatacagcacaattgaattgacagtaataaaattctgggctcttactttcttccagacatatttgctgaataaagtattcatgtcagatttttaagtacacacttattagacatgtaactagtttttcaatagtcaagtttttgtaacagtaaagaaatattatctgcatttacatacgtggggttttagcaagctttacaaaaggttttcagtggcctatttctagctgattaccaaatgaggaaatatttatacatgtgtctgtacatatgcactcatgcacatatatatatatatatatttaagtaagtgtagttctttttttttttttttgagacggagtctcgctctgtcgcccaggctggagtgcagtggcaagatctgggctcactgcaagctccgcctcccgggttcacgccattttcctgcctcagcctcccgagtagctgggactacaggtgcctgccacctcgcccggctaattttttgtatttttagtagagacggggtttccccctgttagccaggatgttctcgatctcctgacctcgtgatccgcccgcctcggccttccaaagtgctgggattacaggcgtgagcccccgcgccmggccgtgtagtttttttttttttttttttttttttttgtcagtgcagatgctgatgatgattgctgctgtttttattgtagccagctgcgatttgtctaattctcaccactactgttagtgctcttgtcatcttgttattgaggaaagcaggtattggtgtgttttaagttgagaagatacgcaacgaacatacacagacatatgcactttctttcaaaacaaggtaaaataaatttacatacaaattaaaatagaaatgcaattgtgttttgactctaggacagcatagatctttaggaccaaaagattccaaggttagaagtctaaaaatggatgctagcat

SEQ ID NO: 84786 - DNA, 1172 bp, Homo sapiens
gtttacatacaaattttacatgcatataatacagaatacagcttcctctcaagcactagtttctcttcacaaaaattgattatatattcagtatgaaataatacctcattaatttccttaaagtagaaataatggtaacaacattcttcaatcacagtataacaaaactggaattaaccatgagaaaaaaatggccctttcatctgtgaggaaaaatctctgttatacaaatgtaggggaaaagataaaacagaaataaaatttgtaaataaaaatagtaaaatttccaaaaaataaaaataaccaaccaaggagataaaataaaacacaaaacaagtccaaatttcaaaattagtaagagaaaaataaagcaagtaaatacaaggttttaagaaaaaagtgtaagtacaggattagtgaaagggaaaacaggaaaaaacataattaataaatcaatagactgattttttcaggaaaaaaaacagaagacaaacattagctaatttagtaaagaaagaaaatgaaaaagtrcaaatttacaaatcgaataggaaaataaccactgaaacaaaaaaaattagaaaaatcaagaaaggttactttgtataagtccatacaaatatatgtgaaagcctagatgaaggaaaaataaccagtaaaaataaaaataatcaaattttactagaagagagatagaatttttaaatcaagctatttccataaagaaattaagaagattttaaaaaggaactctacttgaaatagcaccatatttagttcctttcatagaggagttcttaccgcattgtagagactagataatcataattataacgctacatacatttttccatgccaaaaaggaaatcttctttctaattcttttaatgaatcatacataattttaatatatacgttgaaaataataacactaagaacatagatgtaaaattataaataaaacattagcgagtaaaattctgtaccacattcaaaacataataaatacactataaaccagtaacatttattctgagaatgcaagaatagttcaatatgagtatgcgcatttatgtaccccaatcctcaagctgagaacatgtttaatgggtaaatatttatttgcattcccagtggtcccattggttcctgaagaggactggctgcatagg

SEQ ID NO: 84787 - DNA, 1056 bp, Homo sapiens
aaaataatcaattccacgccagtgacgagacaggaggtgattcagctagctggctggcagtaaaggttgtttagcaggtttcacatcctaattgggtgtccagcttgctaagtagcagctggtctttaattagttgaaaaattattaccactaagagttgctttaaaaagaaaaagaacaaaataattaaaatgttaaaatccatatggtgggtgctcatcctcacttgtcaatagctgttttccttctttatcactaataagtttaaaaatattcctaagccacttacttcttaaagtgtaactcatgtaaatgtaaaatccccaaagactcccagaatggcattgcaaaataatagctgctcrtcatttaataattctttttgactatgaattatctccaacacccaccccctgccaaagttgaatatgtgattagtaagggaatcttagaacaattctcatagttaaagggactagtacattttctgacctgattcgttataaactataatgacactggagaaaatatcagtaccttacagatgacaggaagatgtcttttgcacacagattcctttcaaggactagcagaaagttaattttgcctgtaataacagaaaacccacatttggtataatattgtaattataattctatcctatttaaatataaagttttgtaaaaatataatatatagtatttagagataaattagcctacatattgaataggttgtgaaattctgcatttattatacacatattacaatcttcctacctcccatattgacaaattagttttcttagaccagctgcttttaaaaaatattttacttttaaatatttgtttattttagagttgagtggtagtacagtagaaagtgtatgaatttggtgctagtacaactggattcaagttttagctcactcttttatgaacctaatgtactgtaaaacatctttggttgtattattccttctacaatataagaataataaaatctaacttacaagattattgtcagctgaacaaagtacctagcattgtttgtgga

SEQ ID NO: 84788 - DNA, 963 bp, Homo sapiens
ataatttatagtcatcatattcttacaatgaagatatatttataattaccaaactgctttccaaatatttaaatgcaaatgtcacagaggaatctaggtctatagaaaactatacaataattgatcacaataagtttgtcataaaaattataaagatatgtaaatatcattggtatagtctttccaaagagagctaatatatactatatatgtatatttatatgattcagaaaatttcaacaggttttaaaatattgttttctccctcaagataataacaaaaaacaaaatcccgctgcccagagttgttgagataaggaataaaaagcaaaaaggcacttacctccctttttctaccaagagtaaaacatccagtttttccccattttgaaccattgtgctgattgctgaagggagaatgaaaagcaaaaatttattttttaaaacactrtaataaacacccatgaagacacaaatattaatactgcttagtcataagtttgggagtaagccatcaagatcttactaaaggctatcactattgtatgcaataaagaaaagtgttccaaagataagggaagaaaaaagctcttacttagctcttgcagtcttcttaagtgcattctatctccctgaacttcttgcatttgaaggcaaaaatgcaagctggatttgtccatagcaaaccagccttttctccactgatccagggcatggcagtctttgtagaagagttgaccaatcaaatcatagtcagcttctgttaagttttcagcaaataagggaacaaaatgctgttaaaacaaatacaaaaaagtaataaagacagtgaaaataggaaatcccttccctatctactgatatgagagaaggtagacaaattatcttagtttttcaattttaaagattcaaaggtaacaccaaattcaaaacaactaaacttgctatcagtcttaaaactga

SEQ ID NO: 84789 - DNA, 963 bp, Homo sapiens
ataatttatagtcatcatattcttacaatgaagatatatttataattaccaaactgctttccaaatatttaaatgcaaatgtcacagaggaatctaggtctatagaaaactatacaataattgatcacaataagtttgtcataaaaattataaagatatgtaaatatcattggtatagtctttccaaagagagctaatatatactatatatgtatatttatatgattcagaaaatttcaacaggttttaaaatattgttttctccctcaagataataacaaaaaacaaaatcccgctgcccagagttgttgagataaggaataaaaagcaaaaaggcacttacctccctttttctaccaagagtaaaacatccagtttttccccattttgaaccattgtgctgattgctgaagggagaatgaaaagcaaaaatttattttttaaaacactgtaataaacacccatgaagacacaaatattaatactgcttagtcataagtttgggagtaagccatcaagatcttactaaaggctatcaytattgtatgcaataaagaaaagtgttccaaagataagggaagaaaaaagctcttacttagctcttgcagtcttcttaagtgcattctatctccctgaacttcttgcatttgaaggcaaaaatgcaagctggatttgtccatagcaaaccagccttttctccactgatccagggcatggcagtctttgtagaagagttgaccaatcaaatcatagtcagcttctgttaagttttcagcaaataagggaacaaaatgctgttaaaacaaatacaaaaaagtaataaagacagtgaaaataggaaatcccttccctatctactgatatgagagaaggtagacaaattatcttagtttttcaattttaaagattcaaaggtaacaccaaattcaaaacaactaaacttgctatcagtcttaaaactga

SEQ ID NO: 84790 - DNA, 1339 bp, Homo sapiens
ttcaaactatagaacaacatctatcgctggtggctctgcctcctcttcttccaccctgcaaggactgggccatgggcggaaaattgtggggcaaaggaggggagcttttctgacataagccagagttttcctgggaaggaaagaatatctcagtgtctgatgcccctgtcaatacaaattaatccaaaaatagatgaatctgacatgtctttatacatcacacatcatcaaaaatggattttaatgacaaacattttgttagatatttttgatcttttaatacctgtgatagcaccttcccagtctagctaggtggacctgactttgaattctgatgacagcactctttaactgtgtgccttggataagtttcataattatatcaaacctgtttctacatctataaaattatattaattgtgattaatttacctaaagtgtggttctgagcctttaatgaggcattcatggaaagggctagcacagtgcttgcctcgtgctccacatacactagaggtgattctatgagttgttcacttaaagggtgctcagattattaccattgtgttaacacttcatgccttcacatattctttctttctgaaatatcctttgccttttccctttctgttgtgttcctgggaattctataattttatttgtccctctaccacagtgccaaacacaatgcttgatagtaagaaaaagtacatttttgatggaagaatgaataaagaaactactgaactaaaggcaaagagattgaacaggttcttggtggagaggagtttcccctaaggctattcttgagaagtgagagtcaacaagcttttttccgtaaaaggcctagagttaatgttttaggttttgtaagccataaggtctctgaaacaactactcagctctgtccctgtatcatgttcgcagccacagatagtacataatgtgaggctgcattccaataaaactttatttttataggactaatgaatttcatgtaattttcatgtgtcatcaaacttttgagaaatttttttcaaccatttaaaaatgtaaaaattattcttagctcatgggccatataaaaataagcagagggttggatttggcctgcagccataatttgccaatctctgagctacaaaaataaygtgtaaaccaaactggagggaattctggcttattagtcaatgtccattagacccatcataatagtaggaaaaggatattatggaaatgtgagggggcttctctagtgatatgttaggtttaaacttggactcaattattgtaaaattcctcagtttcttctctgaggtagcaatgtctagaaaagaac

SEQ ID NO: 84791 - DNA, 1156 bp, Homo sapiens
tgatttgcttcagcctatggtataagatattaatgcactcagtaacacagtgaataattttataaggcctttttaggcacctcagattttgaggggcagtaaatgacttaagccctgaagaaaagtctaatatgtattataaatcaacatctcagtcaataaaattaatagagaatgtgtgataccctaaaataaaaggcttcagattagctactggaaattaataaaaggtgcaataaaatgaccaaacccaaaagttaaaataaatcttattagtatctttcctatatggttgaatgaattgacttatttttaatttcatatgtattaatgtaatcttattgatatattccgtctaatttatttccctaaaagatcttattaaataattgtggagtggataagagaattagagatataaaagagggagtagataaatgatgtagctataaaaatattgaacttaacatcagaaaatctcatctctgtgaagagctggttacatgaataagtaacttaacctctcaacctcagtatccaaatctgtaatttaagatagtatgagttctgcatgtcaggttgttttaatgcttaaaaaataatatatgattttttttatattctctgggtgcaggttacaccagtatgttcactttattaaaattcacggagctaatatgtatgatttgtgtactttttatatgtgtattatatatacactgcaatttttaaaaagcattaggataaaaaaagtaaaacaaatgtgcacaggccccacctccagggatttggtttttataagactgcgacaggttaacagcatttttctttaatttgttgaaatttttttttggtttttaagttcaggagtgcaagtgaaaatttgttagataggtaaacttgagtcatggggattggttttacacattatttcatcacttaggtattaagcctagtgcttattagttgttttttctaatcctctacgctccaccaaccaaaaggccccagtgggtgttgttcccctctatgtgtccrtgtgttctcatcatttagctcccacttgtaagtaagaacatgcgttatttgtttttctattccatgctagtttgccaacgataatggcctccagttctatccatgttcttgcaaagga

SEQ ID NO: 84792 - DNA, 962 bp, Homo sapiens
ttaaagcagggatgtgttagatttatcaattattctaaaatatctaaagcattgtggaatgatcataaaggaaatggcctcaacatttctttcatggtatgtcattattaaataatttccaatgaactattaatttgaaacttttagaatgtgtaaattaaaatgtctacgattcttcataatatgtcagttgtgatttctaggctctttagaaaatgttatggttttcatttggaaactctctacatgtaaaattttgcttcagcaaaaagtgttagtctcatgactttaaaacattttattcttgtcaggtrcaacttggaccttaggtcaataaattacacttgctttggtagaaaacatgccatttcttccttgattaacatgttttcttaaagactccaaccagccacctgtcttctttgatatctttataatactgattatttttcaactttacttagtgttgaatgtgcttttgctttatcaatatgtatgtaagtgggtctgtatagttcaatgtaaaagtgacagacatattttctgcatagcttgtcctgcacatttgtataactttataaaatctacagcaaaatcacttacaatccacatcaagtttctcatccatccatgttcttcaaaatgtaaagctcctaagagatcagaagaactcctttaaagggcggtgtagcctcttaactgtattcatttacatttccaaagggcatacttcttcatgctgtacatctggttccctccgagtagaaaggagattccagggttacagagcagagtgcacaccagctaattcatgttactgatggtcagaaatcctgtggggatgtgtttctcattctgacctcggctctttcctgtggaagacatacatttttcaagaactcatggtatcaagctctgtaaaatcatcatgagaaggtggcattgtcttgcctgctttacca

SEQ ID NO: 84793 - DNA, 616 bp, Homo sapiens
cagcgtcagggggcagggaaactgggtttgggatgagaagtgggtggctctgggggcacgtcccccagtgcttgtccagagcccagggacccacagagccagagaggggaccagtgggccagcttggggtctggctacggccagccctgcccagcgaggctggcaggtggctctggttttgggggagaagtggggtggggtgtggccatgccacggcccacggggacagggtggggtcaggtgctgttgccctgctcctgttcaaagagtagcatggccagctgggttcgggagccgaggccctcaagcacgctctggaggcagcggtggtacaggtcctcactgagcctcgcgctgcacgtctgggcccggtagcgctgcagcagcgccggctccaccgcccgcagcacatgcagactggagaagtggaggaacagctcgtacacatccaggctctccagcagctcctcttcttgttctgaggctgccgccaggcgcccacgggctgccacrtagtcggagttgtagaagcaggcctcgctggctgcctggcgatcaaagcggccagtgtcacggcccagctctgggggcccaggcccttgtggtggggccacag

SEQ ID NO: 84794 - DNA, 1158 bp, Homo sapiens
ggggaaagcccacccacctggccaggacagcaaggcatgcccagacctggctttgagatggcaatccaagctgggccagggagggtgattcatggaggcaagagggaactgagggaggggaaactgagagggccacgtggtggcagagacatcggcgggggaaaaaaaaacacaacacaccagataggtacaaactggactttatttgagttaagaaataggtgtttccaaatttctccacgctcactacagtggccccctgcccctgctcctgcaccaaacttggttaactccctcattcccagacagagcaccccagccctgacagagaaggagggggccccaaatgggccctaaacctgccagggccagggctcagccaggctgttcatcagcacagagcctggggcctctggcttttggtcttttgtgaaatagaaagtgttgtgccattcgaaacccatttctagaatggtcagtgtcctaacccttcctggtaaggcctttgtcaacagcccctgctccttgggcccctccatgccatgccgtaatctctcccactctgtctcaccccacctcagctccgaggcatccttccctgactgtcacagacacacagacagacaaacagatagacaggcctgtagcagcagtagcacatgcactcgcccggtgctccccttcagggagagactcggggggttgatacccctcgcagccgccccttcccagcactcagtccatctgtgggcctcctggcctgcacagccatgtgtccacttggggagggagggtccacaggggcccatgggctatccccctgggggctgcatggggtggggaggggaggctgggacgggtccgggccggcaggcctgggtctgtgggcaggaggcagtgaaacacagcgaggtccgagaggtgcctgagacaggggcgcggctcggagggtagcggggggagcrcaggtggccccctgagctcactcgcctgtgtacagacaaaaacctcagtcagcaagcggcaggttagtgcagcatacgcgcacgcacgcgcacacacacacatgcacacacacgcatgcacacgcacacatgcacgcacacgtgcacgcacacgcgcgcacacacacacgcatgcacacacccatacgcacac

SEQ ID NO: 84795 - DNA, 1158 bp, Homo sapiens
ggggaaagcccacccacctggccaggacagcaaggcatgcccagacctggctttgagatggcaatccaagctgggccagggagggtgattcatggaggcaagagggaactgagggaggggaaactgagagggccacgtggtggcagagacatcggcgggggaaaaaaaaacacaacacaccagataggtacaaactggactttatttgagttaagaaataggtgtttccaaatttctccacgctcactacagtggccccctgcccctgctcctgcaccaaacttggttaactccctcattcccagacagagcaccccagccctgacagagaaggagggggccccaaatgggccctaaacctgccagggccagggctcagccaggctgttcatcagcacagagcctggggcctctggcttttggtcttttgtgaaatagaaagtgttgtgccattcgaaacccatttctagaatggtcagtgtcctaacccttcctggtaaggcctttgtcaacagcccctgctccttgggcccctccatgccatgccgtaatctctcccactctgtctcaccccacctcagctccgaggcatccttccctgactgtcacagacacacagacagacaaacagatagacaggcctgtagcagcagtagcacatgcactcgcccggtgctccccttcagggagagactcggggggttgatacccctcgcagccgccccttcccagcactcagtccatctgtgggcctcctggcctgcacagccatgtgtccacttggggagggagggtccacaggggcccatgggctatccccctgggggctgcatggggtggggaggggaggctgggacgggtccgggccggcaggcctgggtctgtgggcaggaggcagtgaaacacagcgaggtccgagaggtgcctgagacaggggcgcggctcggagggtagcggggggagcacaggtggccccctgagctcactcgcctgtgtacagacaaaaacctcagtcagcaagcggcaggttagtgcagcatacgcrcacgcacgcgcacacacacacatgcacacacacgcatgcacacgcacacatgcacgcacacgtgcacgcacacgcgcgcacacacacacgcatgcacacacccatacgcacac

SEQ ID NO: 84796 - DNA, 1158 bp, Homo sapiens
ggggaaagcccacccacctggccaggacagcaaggcatgcccagacctggctttgagatggcaatccaagctgggccagggagggtgattcatggaggcaagagggaactgagggaggggaaactgagagggccacgtggtggcagagacatcggcgggggaaaaaaaaacacaacacaccagataggtacaaactggactttatttgagttaagaaataggtgtttccaaatttctccacgctcactacagtggccccctgcccctgctcctgcaccaaacttggttaactccctcattcccagacagagcaccccagccctgacagagaaggagggggccccaaatgggccctaaacctgccagggccagggctcagccaggctgttcatcagcacagagcctggggcctctggcttttggtcttttgtgaaatagaaagtgttgtgccattcgaaacccatttctagaatggtcagtgtcctaacccttcctggtaaggcctttgtcaacagcccctgctccttgggcccctccatgccatgccgtaatctctcccactctgtctcaccccacctcagctccgaggcatccttccctgactgtcacagacacacagacagacaaacagatagacaggcctgtagcagcagtagcacatgcactcgcccggtgctccccttcagggagagactcggggggttgatacccctcgcagccgccccttcccagcactcagtccatctgtgggcctcctggcctgcacagccatgtgtccacttggggagggagggtccacaggggcccatgggctatccccctgggggctgcatggggtggggaggggaggctgggacgggtccgggccggcaggcctgggtctgtgggcaggaggcagtgaaacacagcgaggtccgagaggtgcctgagacaggggcgcggctcggagggtagcggggggagcacaggtggccccctgagctcactcgcctgtgtacagacaaaaacctcagtcagcaagcggcaggttagtgcagcatacgcgcacgcacgcgcacacacacacatgcacacacacgcatgcacacgcacacatgcacgcacacgygcacgcacacgcgcgcacacacacacgcatgcacacacccatacgcacac

SEQ ID NO: 84797 - DNA, 1158 bp, Homo sapiens
ggggaaagcccacccacctggccaggacagcaaggcatgcccagacctggctttgagatggcaatccaagctgggccagggagggtgattcatggaggcaagagggaactgagggaggggaaactgagagggccacgtggtggcagagacatcggcgggggaaaaaaaaacacaacacaccagataggtacaaactggactttatttgagttaagaaataggtgtttccaaatttctccacgctcactacagtggccccctgcccctgctcctgcaccaaacttggttaactccctcattcccagacagagcaccccagccctgacagagaaggagggggccccaaatgggccctaaacctgccagggccagggctcagccaggctgttcatcagcacagagcctggggcctctggcttttggtcttttgtgaaatagaaagtgttgtgccattcgaaacccatttctagaatggtcagtgtcctaacccttcctggtaaggcctttgtcaacagcccctgctccttgggcccctccatgccatgccgtaatctctcccactctgtctcaccccacctcagctccgaggcatccttccctgactgtcacagacacacagacagacaaacagatagacaggcctgtagcagcagtagcacatgcactcgcccggtgctccccttcagggagagactcggggggttgatacccctcgcagccgccccttcccagcactcagtccatctgtgggcctcctggcctgcacagccatgtgtccacttggggagggagggtccacaggggcccatgggctatccccctgggggctgcatggggtggggaggggaggctgggacgggtccgggccggcaggcctgggtctgtgggcaggaggcagtgaaacacagcgaggtccgagaggtgcctgagacaggggcgcggctcggagggtagcggggggagcacaggtggccccctgagctcactcgcctgtgtacagacaaaaacctcagtcagcaagcggcaggttagtgcagcatacgcgcacgcacgcgcacacacacacatgcacacacacgcatgcacacgcacacatgcacgcacacgtgcacgcacacgcgcrcacacacacacgcatgcacacacccatacgcacac

SEQ ID NO: 84798 - DNA, 949 bp, Homo sapiens
tgtgacgttgagcaaatcattagcctctctggtttcatctccttggctgttaaagggacttatccctgcctctcctacttctcggggtcgaatagaggatcaagagagataaggcgggcgaaagcccctgaatgttcacacatctcgcggtgcctcagagaccgctccgggtagtggaaattgccagagttgggagccagaagacccgggtccaaccctggctctgcctctggcttgctgtgtgaccttggggacccggagccgcgtgatggaagtccacagctgactgctcagcccgggtggagctggatcccgaggtagggaaggacgcacttggctggcgcggcgatgcgccccaggccgtgcccagagctgggctggcggggaccctgtagctaggcccagaggtaaacacgcgcagctggaccgggctgcgggctctggctgagtggtgctggtctgcgccctggcgctgcgcccggggcgcgcgtaccttccacgaggatgcgcgccgagtcggagcactggccgaaggggttggtgacgttgatgctgtactggcccaggtctgccagctcgccgtcgcgcaccaccagtgccaccacgtcagggtcctcgaagacgtagcggtacttgggaccgtcacgtagctccttgccgtccttactccagcggatgaatgggtccgggaaagccgaaatgcggcaagtgagcttggccgcgctgccttcgatcagcaccacgtccttcagcggctccagcacccgcggcggccccttctcgcgcagctccttccgggacctacccgcgggccgagtcagggcccagagttcctaagacaggcccggccacagcccttaccgcgagcgcaccatctcctacctgccccctggaccsgccagacccctaaacgtgtggcttggtagggaagaggactgctcctgaactg

SEQ ID NO: 84799 - DNA, 945 bp, Homo sapiens
tagggtgagatccaagaggatcccaaatgtaaagcttcagtgtcttcaggagatgtcatcataccggtacaaccacgcatatcaccaactaggaagctgacccaagcttcagatgtccagagttttattgaagttccattatgtaggcataattgatagaataactggccataagattgaactmaatctccagctctgctcccctccactcctcagaggtaaggatatcaggcctgcagcacctggttcagggtcaaatccttaggctggatatagtggttcatgcctgtaatcctaacaatttgggaggccaagccaggaggattacttgaagccaagagtttgagaccactctgagcaacatgacgagaccctgtctgtctgtctttaaaaaataaataaataaacaaacaaacaaattagcctggcatggtggtacatgcttatagtcctagctattcaggaggctgaaggatgaagatcacttaagccctgaagttcaacgtggcagtgaactatgacggtaccattgcactccagcctgggtgacagagtgagactctgtgtctctaaaaaataaataaataaataaataaataaataaataaataaataagtcaaaaccttttacttgcatggttggtcagtcttagcatggccatgccaacccccatatgaaactatctggggtccaccatgaatcaccttgttagtataaactcaattgtggtcccaggtgtccaccattcataacaaagacattcctatcactggggaaattccaagaaccagggacaaaggtcagcaaaatactttagtattcaacattggcattaactaaaattgtccaacatacctttgaaacacatttaaatcaagtaaattattgacatattaaataatataatttcctagccatcaataaatttagattttttaaatgca

SEQ ID NO: 84800 - DNA, 945 bp, Homo sapiens
tagggtgagatccaagaggatcccaaatgtaaagcttcagtgtcttcaggagatgtcatcataccggtacaaccacgcatatcaccaactaggaagctgacccaagcttcagatgtccagagttttattgaagttccattatgtaggcataattgatagaataactggccataagattgaactaaatctccagctctgctcccctccactcctcagaggtaaggatatcaggcctgcagcacctggttcagggtcaaatccttaggctggatatagtggttcatgcctgtaatcctaacaatttgggaggccaagccaggaggattacttgaagccaagagtttgagaccactctgagcaacatgacgagaccctgtctgtctgtctttaaaaaataaataaataaacaaacaaacaaattagcctggcatggtggtacatgcttatagtcctagctattcaggaggctgaaggatgaagatcacttaagccctgaagttcaacgtggcagtgaactatgacggtaccattgcactccagcctgggtgacagagtgagactctgtgtctctaaaaaataaataaataaataaataaataaataaataaataaataagtcaaaaccttttacttgcatggttggtcagtcttagcatggccatgccaacccccatatgaaactatctggggtccaccatgaatcaccttgttagtataaactcaattgtggtcccaggtgtccaccattcataacaaagacrttcctatcactggggaaattccaagaaccagggacaaaggtcagcaaaatactttagtattcaacattggcattaactaaaattgtccaacatacctttgaaacacatttaaatcaagtaaattattgacatattaaataatataatttcctagccatcaataaatttagattttttaaatgca

SEQ ID NO: 84801 - DNA, 698 bp, Homo sapiens
tcccacctcagcctcccaaagtgctgggattacagagccaccatgcctggccttttacttttggccctctattttcttcatcattaagctcccccttttgttggattatacccaccagcatgtacatatgccttgatatctttaatttttataaaatgccttttctttagcctttgcctaccaatttttaaaaatatatgccccattattacttttcctgcagtcacaatatatgtctttaatataacagtgcaccttcacagaattatactcagaggatgagaaggaagataaaataggacaggataaataaggtaaaagaaagatstcaatagctgagaactttcaaaatttctacaaaaatgattactaatatagccaggaaactcataaaatctgaaggaggggaaagctataacaaatatcttatttagataccttgtcatcacacttataaaaccaaagttaaaaagaaagtgttaaaagcaaccagagagaaagcagacatgttatgtgatatattggtgacaataatatggtgtaatggctgacttcttattcaaaataatggaggctgaataacaatggaataatacctgtaaagcgctaaaattttttaaaaaggaaaaaaaaatctgtcaaacctaaaattctatatccaaataaaataaaatatcattgaaaatgaaagttaaaca

SEQ ID NO: 84802 - DNA, 994 bp, Homo sapiens
tgcattttaaaaatgttcaattatactttaaatttagtaactatagcattatattgatcaaacatatttgatgatttaggctataatttttaaaaatgcagtaactcagggtcattattaggaattaaaacccacatttgtggcaggttgtagactaactgatctatttagttacatttggatctgcatttgggtccattcttgccctttccctttcatgccactgcctgcttaattttcctcatcagatattttctcacagagcagtccctgaacaggatcacatgaaatacttcataatttactgattttatttacacttaacaaaatatactctctcaggtgtggggtttaaaattttagcataaatttcttagataatactaatactggaaagaatttgtgacgtctccttctagtagatataaacgctaccaattcagttatttttattaagtagtgaaagagaaagagagagaagaagagagacagagagaaggagaggtagaaggagaggaaggaaggaaggaaggaaggaaggaaggaaggaaggaaggaaggaaggaaggaaggragggagggagggagggagagaggaagaaagaggaagggaggaagggaggaaggaaggaagaaaggaaggaaggaaggaaggaaggaaagataaatttaatataatgcttttctggctattattttcattttacaagacaggtgaaatggaaaaatgtaatgctcaaagatgaatttttattttgtgaaatttagtgtttttaacatacaaactagtcctagattattattcaaggcagatttcaaatttctcaatattgaaaatttttgattgacagaatgacagataaaccaattgtttctgacaagacttgtacaacatcttatttttttacaattctgaagattttgtaaaatgccaattagtgctcaaatcccattagtaaattaattagaatgtagttaaaatctgccacagaga

SEQ ID NO: 84803 - DNA, 659 bp, Homo sapiens
tgcagagcattatggttatttcagtaccagaaaaaaagcttctcctgacctcactcttagggaattctatttgtgaatatgtttccccaacatcctaaagggtggattccagtctggcccacaatcagagcacctaagtgacttctctgccattcagtgcaccacagacatgcactcaaaaacaagatattatttgccatattcaagttattgatttgcaataatttttagaataygtttaattaggaaactccacttttgtgaacagaaaacaatattattaaatattttaaaatatagctgtcatgggcatattttatctatcttttcatgtacttttaaacattacacatttgtatcaaatggactaaacacttttattattcttaacaatgactcccatacaatcagccatgctatgcgtattgagcaacacatgaaaagttgaaatttatgatacagccatagctctaaagagtctgttatttttcatcgttaactattttggtcaccaacttggtgactgattatctagctaacctaaccaaatacaggtttagcaaatacaatgcattgttttcctaaagtttaaatagaaaattatttaaacaaatagtataaatatattttaagtgctgtaaaagtgaaagagtaataaa

SEQ ID NO: 84804 - DNA, 771 bp, Homo sapiens
cagtggctcatgcctgtaatcccagcactttgggaggccaaggcaggtggattgcctgaggtcaggagttcgagactagcctggccaacatgacgaaaccccatctctactaaaaatacaaaaattagctgggtgtggtagcgggcgcctgtaatctcagctactcaggaggctgaggcaggagaaacggttgaatccaggaggcaaaggttgcagtgagatgagattgcaccactgcactcaagcctgcacgacagagtgagactccatctcaaaacaaacaaacaaacaaacaaaaagagtacagggactcactaatcctctctcccaccccttgcacattgcagattgaggtcatttctcgggatggttaatgaaaaaggaacctctctaaatgttttgcttaggggtccaaaatttagtttgtgctcaaatcactttttgctctaaaggtctcatttttctaaaggaagctgaaatcatgttttgctgattaggcctctgtgttactaaacactgaaaaaaaaaagtttagygaaaggtcaccgaaccggagttccttccgttgttaatttgggtttttccatcatcagtaatgcagatttgggaatctcaggttttatttctcatgaagcattctagtaatttttgatcctcaggaagtaatgagctaaatgaatactgaaatgagatcaaggaagctcttcccagagaaggtagtagatgaataataagatgctagtttcctaaggggaacaaagatttttacat

SEQ ID NO: 84805 - DNA, 614 bp, Homo sapiens
gttaaacccaggagttggagaccagcctgagaaacatagcgagayctcatctctacaaaaactaaaataattcgtcaggtatggtggtgtgtacttgtagttccagctacttaggaagctaggatgggaggatcaaggctgcagtgagctgtgattgcaccactgcattccagactgggtgtcagagccagacacagtctcaattaaaaaatctttaaaaaaatgcaaatgtctcggtcctcctcagaatgtgcaagagggcatatgcagcatctgtatttttgaaaagctccaggcatgattcagatgtgcacattaattttttcaccgtcgattatagtgcaaacccttaggagagagatttttctaaactgttgagtaacccaaaggtccatcatttgtcatcttggtgaggtcgttctatgaatgtgtccccttctctgagccagaaagagaatccagtactcccaattgcagtgtttctcaaagttttcttctatacagtaaatcttataaaggtacagaaagggcaacttgaaatacttaatcaattttactttattttatggggaaacatcttacagtagtgcagcatttgtggattgaagattaaa

SEQ ID NO: 84806 - DNA, 660 bp, Homo sapiens
agaaaaggacctaaaaccccaagaagtaccaacatttaaaagttaaatagaataggagctctcaaagtagactgaaatgagagaccagagaaacagaaggaaaatcaggggagtgagatctttggaagacaagagaagagagcgcttaaaggagcagttagtagcttataatgttaaatgttcccaaatgaccaaacaagaaaaggactgaaatgtgggcawttaatttatagataaaggtcattcttgacccaaatgattgtggtgatgtagcaaaggcagggccaaatgagagtaggagaagtgaatggaaggtaagagagtaaatacatcaagtagagagaactccttcaattgtctattcttttgtctattctatttacactgtggagtatattacagagttagttggttttctaagtcagtataaggcccaatcaaggttaaagtttatgcagattaactgttatttttaacaacaatctattaatctattaagaagtccttaaaatagattacaaggacttctttgatttgtctcttatgtggctgaattccttgatctttgaggccactccccagcatctcatcatgtttacgtcctgttacccgaaagtaccagagtgtttcaggcttcccatttttatacacaatgctttt

SEQ ID NO: 84807 - DNA, 660 bp, Homo sapiens
agaaaaggacctaaaaccccaagaagtaccaacatttaaaagttaaatagaataggagctctcaaagtagactgaaatgagagaccagagaaacagaaggaaaatcaggggagtgagatctttggaagacaagagaagagagcgcttaaaggagcagttagtagcttataatgttaaatgttcccaaatgaccaaacaagaaaaggactgaaatgtgggcatttaatttatagataaaggtcattcktgacccaaatgattgtggtgatgtagcaaaggcagggccaaatgagagtaggagaagtgaatggaaggtaagagagtaaatacatcaagtagagagaactccttcaattgtctattcttttgtctattctatttacactgtggagtatattacagagttagttggttttctaagtcagtataaggcccaatcaaggttaaagtttatgcagattaactgttatttttaacaacaatctattaatctattaagaagtccttaaaatagattacaaggacttctttgatttgtctcttatgtggctgaattccttgatctttgaggccactccccagcatctcatcatgtttacgtcctgttacccgaaagtaccagagtgtttcaggcttcccatttttatacacaatgctttt

SEQ ID NO: 84808 - DNA, 676 bp, Homo sapiens
cccattatgtatcagacactcttcttaggaactgagagtacaaatatgataaatttcacctccaagaagcccacaaaccagagggtggggggaagcagattttgacaaaatataaattatacataatgtgttaggagtttcaaggctatggtttaactatcttaattggtgattccaaatgtattctagattttaaaaaattgtaaagaactctcaatagaaaagacaacaacattacatgtcatagcagctaagatagcgagggtctggggttagacaagtttcaatctagttttggatctcggacaatttatttcacatttataatcatctacttttatccgttaaataaaaataataaactaaattcataagcctgttcaacttaaatacagtaatgcttatgcctgaaacgtgataagcaggcaataaacattggtaaacagtcattatttcctttctctttctagagaaycaaaatgcacattgcgatctgagagcgaatcctgcaataagataactagatttaaatttgtctaacccaggttcatttgactattttaaaagatttcttgtcaaatgtattaatagcatgcccacttactatttaatggagcacattttgaaaaattctgttctaaatattcaaatgtctaaatgaaaaaagtgactgtcc

SEQ ID NO: 84809 - DNA, 730 bp, Homo sapiens
atcctgttaaagtggsatgaaccgcctaaaacagcagactgcattgagggtctagtgttatgaaagccagggcaagagatgaagccagctcagaaaagaaatgaaggaaatggtaaatgaggataaagactgctaatcttgtgctgtattgaaaaaagctttcaaggaattaatgactcaagagacaattttattgtatgttgctgttaatgttgctttagctaattttgacttgatttaaatctagacttaaagtgttgatcatttttctccctggtgagccatatggtgcactcagatacttctacctagtttctgttcaaatatcagattgtcagtgagacccttactgacactctataaaagtgtaaaatatcgtcacatacctcacatccaccctctttttgcaagttttttctcaataaaatgtataaagaagacatttagttttttatttgcttatacatctcttttcgtcacccgaatgtatgctgtgtggacacaggaagaatgtttgttcactgctccacctccaacatctagaaaattatagaagatgcttaattgttccctgtttgaaaccttctcctccatgttgtcacagtatttccctcgatcattcctctttaagctttccaaactatacaaggcaagggagtctgattcaaatttaattaaaataaaaatcaattcaaatattcttatttagaaaaattttgtccaatgacca

SEQ ID NO: 84810 - DNA, 736 bp, Homo sapiens
tccttaaatcaagagaggatacttgcaatgcagaatttatattaacgtgctttgagaagcaacttaggtcaaagaaaagacacaacaactcacagattaacaattgcattatttcaaggcaccagacctcaattccttttgaaaaatgtaagaattacttatagataagaaaaattcatccagcgtgtcatttatttgcttttgtttgtatggaggaacattttatggtatttctttacagaccataattgacttgctttagactttctgatagaagcttagtgtacataaagaaattggtttggtctacattagcaattttaaggcttgattgtaagagccaagtatatctgctggaactacatgtgacacttatatttattttctgaaatattatatttaacttcatgtggagaaaattttaggccctgtgaaatttgtaaattaatgatgtggttgtgaaaagtaaacaatatttgccttttaaataggatgactgcaatattgacttgaaagttattttattttgtaatacatattaaacttcaaaaggtaackctgaaactaaatacagtattggaaccaaatcttgagcatttatatacacaagatttatatgtggttacatggtgacaataagcaaccccaaattcatatgacaaaacaagataattgtcatttatactacatgtccatttgcagacagcaacaggggaccacaatcacagcccttaaa

SEQ ID NO: 84811 - DNA, 1267 bp, Homo sapiens
tgcagcactattcacaatggcaaagtcatggaatcaatttaggtgctcatcaacagtggactggataaagaaaaatggtacatatacaccatggaatactatgcagccacaaaaaggatgaaattatctcctttgcagcatcatggatgtagctggaggccattatcccaagtgaattaaccagcaacaaacagaaagtaaaataattcatgttcttgcttataagtgggagctaaacaatgcgtcctcatggatataaagatggcaacaatagaaactggggactactagttgggggaaggaagaaataaagcaagggttgaaagtgaactactggacactatgctcaatactgggtgatgggatcatttgtactccaaacttcagcatcatgcaggaaacctgcacgtgtaccccacaaatctgaaactgaatctaaaataaaacttaaaattatagaattttttttaattcatgaataaatgtagccatcacacartgtcaaaggaaaaaagctctatgatgagcagataaacatttcaagttctttttcatctgggtaaatagtgtttttcaatatctctctactgttgtcaccacccatcatcttcaacttttcttccaagccttcattttctattatcatctctaggactcttccaacaggaagctaaaatatgtatagttttaagttcactggcctatagtatattgtcatttaccaaaagcaccctcacaaagttcaccaacaacatactaataaacaattctgcatactctgctccattctaaatctctccaaactccatacatagtgaccaacttcattctctgaagccttatcccatagagcaatattacttttagtttatctgtatgtgtctgtcttcactcactttcttctatgcttactttccatccttatcacccatagacatagatcttttctaggtatttttcttttctgcttccacatttttacctcttatcttttcataattttatgtctttctcctcctggttcttaactttgtgtatagatatcattctcaaagatctccattttttcttatatttagatactagtgaattatttttttcaataattccattaaaaagcatttgaaatgaaaatactcatgatggttagaaataactacccaagaataaacttatcgtttggctagagaatgtcaaaaaagctagcaagtattcagggatctcttgtgatgaatcacctggatttcaattaatgtaactcatatat

SEQ ID NO: 84812 - DNA, 627 bp, Homo sapiens
attttaaagataatgagttcctttgaggatattgcatttagactgacttgttcatttcatgttgctggtaattgaggggcttaatctgaaaggaacttagtcttcagattacctaagggacagaaaaagatactggtatgggactgggatcctactttcttaaaattttatggtactttttcttgcttctactcttcttgtttttttttttwaaaaatgttttatttcaaagaacaattgccaaccgtacaattattggtatgtcagttggttaagaaatgtttgggatggaggtggagggatggtgaaaaatgtagtgatgtctcttaataaaaaggaaataaaggaatgtgaagttggactttataattccttttggcataggtttgtgtcctaagtagcatgttaatttcttatcatgaaagaagtttttttttttttttttaagaaaaggaagttctatctggacaaagataaaaaaatatttgcaattctatgttttgtacaaactaagaatgttaaagcacacataaaaaccaggtttgtaaataacctacaaagtggatgaaaaatgttcctttaagctggaatcgcttcagaggtttggggaatcattttcagaatatt

SEQ ID NO: 84813 - DNA, 782 bp, Homo sapiens
tgcatctcataattcaagaataaatgctggcgcccaaaatccttgtgccttacttatgcaagtgatcaaatatgggctgagtccctgtgtatcaacagtgaaaaggaaacacatgtttcttcctttcctcatagtgtcctctgtggatgatggagtgcagaccacagacccaaaaaggagagtctggtccttgcccttgcatggaatagtggcacatcttaggtgtctcttgcttcagttgtaaaataatctccatgaatactttaagctttaacatcccaaggtacagacattgtgccttatgtatctttatctagggccaagtacatggaagatgctcagtgtatatgttttggacttaggaatgcaagacacgtgtaagtctaggaagagtcctaraagttcttagaaattaaccagctaattaattattattaattaatatatattaatatataaatatataataatactaattaataataattaatctgactcagccattctctccgtttcccaaagagcatctaccagggaaatgtttatctgctccaaggtctagttcaccacaggcaagtgacagatagtttaacttccctattatgcaaacattaataaagacacttaggtgtgtttatttttactagaaggaaggtgtgtgtgtgtatatatgtgtgttataactgttaatatatccttgcatagccaaacttatggaatgtttagatctacagtgtctagtttagtagccactagccacatgtggctattgagctcttgaa

SEQ ID NO: 84814 - DNA, 1335 bp, Homo sapiens
ttccagaccagccttggccacatagtgagacactgtctctacaaaaaaaaaatggaaaaaaaaaattggccaggtgtgatgatgtgtgcctctagtcccagctactcaggaggctgaggtggraggctctctggagcccaggaattcaaggctgcaatgagctatcatcacaccattgcactccagcctggatgacatagggaggccctgtctcaaaaaaaaaaaaaaaaaaagcctttgggtacagtggtggcttctacctgttatcccagctacttggaaggctgaggtgggtggataggttgagcccaggagttcaaggctgcaatgagctgattgtgccactgtagtccagcatgggcaacagagcaggacaccactgcctcttgaaaaataaagaaagtctttgaatcagctctgttgtattggtctactacgtgattataaactatggtttatcgtttatgttcataaaatacagagggatttttttcaagagaatttttattgaaataaaacataataccaaaaatgtgcatattttaagtacacaacttgatgaagtgaacatatccatatcagcacctccaagatatgtagtatatgtaccgccttctaatatgtagaactttaccagcaccccagatgcttgaaatgttgctgctggagctgatgcccacttccagtcattaagcctcctggaaggtaaacattactctcatttgtatgaccatggattagtttgcttatatttgaactttaaaaattgaaattatacagttgttgtctttactgtctgccttctttcccttaatattttttgtgagattcatccatgttgttgcatataacattagttcgttccatttatgtatggtattcctctgaatgactatgccataaattattaattcattctgctgctagtggacagctttgccatttccaggttggggatattatgactaatgctgctaatggaaattattttacatgttttaaaatttaggtgattaaaatataatattgttatctggaaactagaggacaaatattttactttaagtaatcatagatggcactgtagaagtcaacttttctaattagacttataataatatcccatcataatactagtgttattaataatagttataatatccagcctttattgagaacttactatgtgcctggtaaaagaccagtcattttcatatcactgaatcctcactctcattttctgaagtagtgtaccagttaaaaatgtatttaccaataagtgataacagcaacaatagctaactgacaattgattaaagacagtatacagggatc

SEQ ID NO: 84815 - DNA, 481 bp, Homo sapiens
cctttggcatggaaaactcccatgtgacagttattctatggaaaagactttgggaaatgtgggtttgttaaaagaacaaataaatcaaaagataagaaatatataccctatttggttctgatgtggtctagtggctttcattgaaaaggcagacttgggcgtatttttgtgcacaccaagaaagcctagtaccagtgtttcctattcactgaaccaaggcaacttctccttcttttcctrtaaaaagaagtcattattctgggaccacagtgcatttgggggaaatgtcggcaacatctgaacacttctcattcccttggacaggtaattccactattttctgcaataaatgggcccttaaaatgagttttgttaattcttctcttgaaagccaaatcctcttctgactacacaggggaaggcttctgcttaaagtcaccctgggttttattattcgaatggcttcacagtgagcaatgca

SEQ ID NO: 84816 - DNA, 481 bp, Homo sapiens
cctttggcatggaaaactcccatgtgacagttattctatggaaaagactttgggaaatgtgggtttgttaaaagaacaaataaatcaaaagataagaaatatataccctatttggttctgatgtggtctagtggctttcattgaaaaggcagacttgggcgtatttttgtgcacaccaagaaagcctagtaccagtgtttcctattcactgaaccaaggcaacttctccttcttttcctataaaaagaagtcattattctgggaccacagtgcatttgggggaaatgtcggcaacatctgaacacttctcattcccttggacaggtaattccactattttctgcaataaatgggcccttaaaaygagttttgttaattcttctcttgaaagccaaatcctcttctgactacacaggggaaggcttctgcttaaagtcaccctgggttttattattcgaatggcttcacagtgagcaatgca

SEQ ID NO: 84817 - DNA, 563 bp, Homo sapiens
cagcaggttgggactagcatttagtgtttcttaaattaatgattccaatgaacatcttagactgaataacactagtttgccttttataaatcaaagttataacataatgagggaaaaagtgttccaattttaattagagtccttctcttatgtttattggagttacrttcagctctgtgaataggatgagacgtcattttgtacgttaatttgagcaaatggtgaaaattaagcagagttgacttgatccaatcttcctgctgtttgccaagtcatcaaggggtaataatcatgagcatccatgaacaaatggtattggtttctctgagttagttcctacattgatgaaatgagtcatggccatttttaattatttaagatccaagagcacatatggaaatagttgggtttttgaacttgtcatttcagccaaatttcaattttagtaattattctgcttacctcatttccccatgatattatagggttgttgttgtttctttctttctttttaaattgtactcaaagcttcctgttctcagctgtgtaaattgaaaaaccac

SEQ ID NO: 84818 - DNA, 779 bp, Homo sapiens
tgggagytcctgagaacccgcagagaccaatgctccatgctcttgctgtacacacagcacacataccccagagcccaatttacctccttctccacctactggccccttttccatgtattacgctcatcaggaaacgaggattgtgtgtttgagtgctgcaatcagtaaaggaaatggcaccgatcacctgtcccctattctttctggttctctaaaggcatccctttgagtctggggagggttggaattagcggggggtacagtgggatttcttgtctgagcagagcctggggagtagggattaccttcctcacaggcgtggcctggtcaggatgggtccgcagcaatgctcctcaccctagatggccctcacagggtactctgcctcttccagggacactccctaccttctgacagctccagctccccaagggtaaggaaaagaaaacagaaggaagggttttccctctcatcctgttatcgttcccaaggcctggtcataatatagaggatgcctactaactaaatagctcagctgctttaactcaattagggaaacaagattaataatagaaaacatccctggccaggtgcagtggctcatgcctgtaatcccaacactttgggaggctgaggcaggtggatcagctaaggtccggagttcgagaccagcctgaccaacatggtgaaaccccaactctactaaaaatacaaaaaattagccaggcatggtggtgcatgcctgtaatcccagctacttgggaggctgaggcaggaaa

SEQ ID NO: 84819 - DNA, 657 bp, Homo sapiens
  misc_feature (1)...(657): n = A,T,C or G
cannnnnnnnnnnnnnnnnnnnnnnnnnnnnnnnnnnnnnnnnnnnnnnnnnnnnnnnnnnnnnnnnnnnnnnnnnnnnnnnnnnnnnnnnnnnnnnnnnnnacttacaaagttggccaggtgcagtggctcattcctgtaatccyagcactttgggaggctgaggcgggcagatcacgaggtcaggagatcaagaccatcctggctaacatggtgaaaactcgtctctactaaaagtacaaaaaagattagctgggtgtggtggtgggtgcctgtagtcccagctactcaggaggctgagacaggagaatctcttgaacccgggaggcggaggttgcagtgagccgacatcccaccactgcactccagcctgggcgacagagtgagagtctgtctcaaaaaagaacttacaaagtaaaacaacatatagacgtaatagaaatatccaaaaaactctatatatgttctacagtttcaagtaaatagaatcatagaagtcagaaatcagtacatagaaaaactgtgacttcattattaatgaaatgctaccaccaaatacatttttttgcaagctggctatgtttttgaaatgaatatatgcagtattgctgaggctgcaatgaaatacttcctacacattgctgatgaaagcatgca

SEQ ID NO: 84820 - DNA, 781 bp, Homo sapiens
tgagctgaggatttgtgagcaggtgagtatacatatatttttttgtttgtttgtttgtttttgttttttttgagacgaagtctcgctctgctgcccaggctggagtgcagtggcatgatcttggctcactgcaacatccacttcctgggttcgagattctcctgcctcagcctcccaagtagctgggactacaggtgcccgccactacgcccagctaattttttgtatttttagtagagacggggtttcaccacgttggccaggctggtctggaactcctgacctcgtgatccacccgcctcggactcccaaagtgctaggattacaggcgtgagcaaccatgcccggccgagcaggtgaatttttaagaagtgctcccagtgaaagtcagcaggggagtagggaagtgaggctgggaagggacaaggccaggcaaggatgtagaatcagcgaagtcctgtggagggcagctgtggctcagtcctcagggcagcctaggggcagcataaatcccatccaagtttgttacaagcagagatcagggtgtaagttacttatcccctgcacaggttgtttgtaaggctttccctgggggacataaactcagctcttccaggtctcagcatgttggcrcagtgacagcctctgtcacagtctctgccttgcatcataaacaaaaaatagattttaaataaatgaggggtttaaatgtgaaaagtaactataaaatcataagatgaaatattttaaaaaattttgtgtggggaaagtttttaaaaga

SEQ ID NO: 84821 - DNA, 680 bp, Homo sapiens
ctagggctgtggggtataatgggggagcctgggagagcataagctcctaaggctccctcttggcctgcactaagttagctgctgggccaggatggtgaacagacagacccagcagccaccctcctagagctgacagtctagcaggcagaccccctgattgcagagttacacraataattgaataaaaatcacaagtgtggaaaagcacagagcaagagaataggcctggggctggatgatgtatctctggtctcagcagggtgacagtcccctgcccagcttcactcctggtgctcctggcatacccactctccccccgccaagatgagcagcttctcattctctgaacagatcagccgtgtctttgcttgggctgttctcattgcctgataaactcctactcatcctgcaaaattcaacctaggtctcactccctccaggaagccctccctgccctcctgctggccctacactttagttattccctcccctgagtaacctgccattgccctaatcacactttattttaatttaccacatttgtttttagagtaaattttattgcaatgtcattcgcacaacataaaatttatcattttaaagtatacaagtcagtagttcgaagtatattcaccatgttgtgtaataaccattcccaccaattcagaacattttcatta

SEQ ID NO: 84822 - DNA, 723 bp, Homo sapiens
ctgaatctaggttttctcctttcaagctgcagataatgtaaaataatgcttctagtgcgcttaagtccaaacaaaatgcccatctagtttcttcaacacgggggacttcttggcactttggggaattaattttatgcaataagagatgagaattaagcagcttagttggagtgagacatcagatgtagccaggacccaccagccagaggcaatggggtggagtctgccaggaggcccagtgcattcacgacacagagagaggatgagttgctggttttttttttttgtttttttttttttttgagatggagtctcgctctgttgcccaggctggagtgcagtggcgcgatctcggctcactgcaagctccgcctcccgggttcackccattctcctgcctcagcctcccgagtagctgggactacaggcatccgccaccacgcccggctaattttttgtgtttttagcagagacggggtttcaccgtgttagccaggatggtctcgatttcctgacttcgtgatccgcctgcctcggcctcccaagctggttttctttcaaacagaggccagctagagccagggacggcaactcggaacgtgtctaacgagatcctttctcagttgttcactcattctttatttcatctattcattcactcagaaaatgtttactgcatatctgccacatgacaggcactggtttagatattagggaaacagt

SEQ ID NO: 84823 - DNA, 812 bp, Homo sapiens
ggatccagctggacttctttctttttggaaatcttccctaactcttcgcccctgtccccatgtccccatgtccccatgcaacattattggcagggacttctcctccgttctgctggcatccgggctcttctctgccataacgtttcrctcacagcattatctcttaatttatctctctcacctggaagaaagaacctctttatatttctctgttcagaaccaggtctgccacagataaggcattcaggaagtatcagttggttgaatcaaatgactaattaatgttttggccctgtggaatggattcccagtgtgtgcacagtcaccggaatgcagcaggtctagctgacggaatgtgctgactgcacagttcttcctccgtgccccagcatctcctccaccctagctgtgtaccaggcagggatggcttgcatgtgaaggataactcaagggatggctctccttttgtcctcactcagctcatgttccacaaacccaaggcaggcaatcattgatgcccgggtgtcatccctgggctcctctgaactctcctgtggccatggtggacaattccagaagagtccacttctctgcctggggccttttggggtgccctgagacctggcctgtttatttgcaggacagctgggaagtccagggatttaacatcccccagtgaaagacaggagttggtggatgaatatcccaacttcctcatggcttgttggaacaactctaggtggattcctctctattccttggcgggtccccagcaggactgagcccaagtgccacagtggtggcccagcact

SEQ ID NO: 84824 - DNA, 694 bp, Homo sapiens
atccctcgaccttccgtcactgtggggagggaatcgcagtgcaggcgttagtaatgctaaggtcctgttaccagcatttcagacatctgcgtgcccccttcataacagaggaccctgtcttcgcgccaattatgcaattccttatccaaacctcttaatccaatctactcgcttcatattatttgtttcagaagaaataaatgccaccaacctaagtagaaaaccagtatcatttaacctataaaaaagttgagcatgcaaataaatacaattcaaatacagttttaaaatttccactcgtgataatggtgtttttatggggttatggtaaagacttgctctttttttgatcaaaggagagattagcaagtgttagaaagctgtcacagacaagctaccatcgacagagaggcaccgtcccattgactcaacacagactgagattggaaacaggaatgacttcctcaacacatggatcgatgccacgtccacattccacctgatacatattcctttgtgttccactcatatgcacgttctgcatatacgcacatgtccaatgggaaatgctaacagacttggggcaaaaatagacgcagatgcacaatcataaatcacatggacagwggacacccgcccccagttggagttaaggggagagatgcagagaaaataccttggaaggatatattgg

SEQ ID NO: 84825 - DNA, 635 bp, Homo sapiens
ctcggaggcaggggtcctgctcccggctttgtgagacgatgagcaggtcactgaccctcgttgtttcccatggacccattggtagcatgagggggctgactgcagcactgtagcctcagcccagctgtgataacacagggtgtcaggctgcatccagtttaacttctagacaagaagttcaacgcatgtattcaacccgagtttacagaaagccctggatgaaaaaatctctccaatcatcggcatgaccaaactcagagcaggctgagcttccatataaacaactaaggcttgtcttggactgaaccatttgagactgcttataagtgagcagtctgcatccacccaaatgacaatttcctagggttcaacgtcataaatatggattgttttcaaaaatcaaaatatcatagatataaaaagggactccatgccttaaaaagattacatgttttaactttatagaaataactcctgattgatattatctctaaacttgtatcttcacatgtgagttatagtaaaaacaaagargagacaaagaatatttcagcccctctctgggcaccctctccccatttgcctagccacagttctgtgacctctctggctgcattatcaaagtcaccttgctg

SEQ ID NO: 84826 - DNA, 1127 bp, Homo sapiens
  misc_feature (1)...(1127): n = A,T,C or G
gcatgcccactggcaagttgtatagagacaaatgcaatctgtaaaagacacataagtgcagtgaaaagccttgcagttcagcaagcctttatgtttcttggtgaaataggttccttattatagaactgttttgaggggaacattagatccaataacaaacacaaaatgccaaacaaagtaccaggcagggagttgatcctcaagccacagtagctaataataactaaataagttgttagcacctttcaatacagatgagtttaaaagtacgtcctgttgaaaggccaagaggtagtttacctgtcagcgtgtctaaatatattagtgcaatatgggcattgtgcaaatggatccaagattgactccagtcttaaatacatttcttccttgtgaaagaattgtttttcaaatatacaggcttgtgtgttgttacagaatgtttctcatatctctgaggatatttctaaattaatcaattggtattgtttgggaaaagattagatatatttatcttctagaggacccctgtaatgtttcagtttccaactttattaaactaatgccaattctatttatcaacttaaatgtcctttcttctaggaagtcttcccttacttaggtgaggtgttcctactttggctctagggaagtctaggggagcaaaggtcacagatgccagtgtctatgttccattaagcaccaaaattggtgattctcaggcattgctttagaaactacttagctccctgcctgagccctctgatcatgtatatgcctgaaaataaatcaacagaattgtggtgtcttcttctctccaaatttcaaatctcaccttagtgactctcataagaggaagcaaaaagaaacgcttatattgtccctggcttgtaccctacaatacaacagagatctgagaagaagctcgtggcaatagtgagttaacaatcacagactttaccagaataaagataaagaaaaagatgttccctyaatcattctattttcctcttttgggtccatgactacnnnnnnnnnnnnnnnnnnnnnnnnnnnnnnnnnnnnnnnnnnnnnnnnnnnnnnnnnnnnnnnnnnnnnnnnnnnnnnnnnnnnnnnnnnnnnnnnnnnna

SEQ ID NO: 84827 - DNA, 731 bp, Homo sapiens
cttaggaaaaacagaaaggtgccaaagactctgttgtttggaggaacgtgtttttcctcagggaatcccaagcactgtaagcagacaaattccccttaggtctaaggctctgcggtcttttggtctttgttattatgttacttgattgctttggcttttcagagctatgagaaaatgcttggtattgtgggaggactggactctggtgtatagtggcttttagtcatgtgagctacagtgttagtcatagcagacagcagtgttgtttgtaagtggttattactatagggaactacttggctctttgcatgttttggccctaaaactttcctgatgttgttccttaaagggctctaccctaaagctagtaatctaattaaggaacaagccaagttaaaagactacctatcaaactaaatcactcttttaaattgtttgtaaaagaaatttacatctttaaagaaaatctcccatttgtaagggcatttctgtctctgcactgaaaccactaggaactctayggggaagacaatggcttaaagtttatgtaacaaaccatgcttttgtttagatctaagttctgtaactttgagatgtaaattttccccttcataggtggcctttaaaagggaggtttggcctttaaaaatcaaactgccatggaggctgctttacctgtaattttggttcacagcctcattggattatctattggcacaaacaaggtaaaa

SEQ ID NO: 84828 - DNA, 925 bp, Homo sapiens
  misc_feature (1)...(925): n = A,T,C or G
ttttattttattaaatagagacagggtgttgctatgttgggcctgattatatttttaaaaaataaaaaagggccaggtgcagtggctcacacctgtagtcccagcactttgggaggccaaggcagtaggatcacttgaggccaggaatttgagaccagtctgggcaacataatgagatgctgtgtctctgtttaaaagatacatataagtttaaaaaatattttcatttatatacaatcagatcgcctcatatgtctgctcaaagccatttggtggctcccattcatactcagaattaaacccagattccttactgtggcctatcagccctgcatcattctgtccctctcctcaacatgatcaactattgctcttccccacatgacatcctactccctcatcactctctaaaccagagctgcccaatacaggagccaccagtctcatatggctactgagcaggtgaaacctgtggctagtccaaattgagatgctgcctgtatcaaatacattgtttcagacttagttcagaaaagagaatgtaaaatttcttttctgtttttttgagacaatcttcctctgttgcccaggctggattgcagtggcacgatcttggctcactgcaacctccgcctcntaggttcaagtgattcttatgcctcagcctcctgagtaactgggattataggcatgtgccaccacacctggctaatttttgtatttttagtagaaatggggtttctccatgttggtcaggctgctctcgaactccttacctcaagtgatccactcaccttggcctctcaaagtgttgggattacaggcatgagccactgtgcccagtccaagaatstaaaatttcccattaataatttttaaatattgtttgtaaattgaaataatatatttaatatattgggttaaa

SEQ ID NO: 84829 - DNA, 1082 bp, Homo sapiens
tagaatgccccaccccaccttgcatcttgcccagtttctcaactcttttgaatttaaaattgcacgattaaaacctagcaacgacataaaattgtcaaatggcttaaactagggagttttggtttctgagaatgagaaaaaacagaaatgttcttaaagaagygggttttggttttggagaaagaatgggatggaatacacctttaacagaagtgtaaaaagatatcgcagtttcttccaggtatttctgtggtagtgataagaagatcaggtcagatgaccaaaggtgtgcacagagggagatgcactagggatgggaaccctgctacttgtcagaggatactgaattgaagagagaggaagataggctggagttgttctgtacccagagagatcactgtggggaaccttcataatatggtcctaatttagtttcattggtgagacccatgaaactgtacatagaggctggaagtaacttatggaaagataaatgatttaataaggaatcaagtgtttgtataaatcaaactgaatttctacattttttcagaagtgaatattttttctgtaaggtaggatgttcaactaggaatgaatgttcagctaggatgaatctaggaatatccaattctgttaagagttccctgttagaaagtgcatgtgaatgtatttgtgtttcgatgaactttaaatctcattcagaataaccatacatctctgtaatctttatccagaaataatgccattgaaattcacaaacattacagaaactatatcctttgtaaagcttgatcaagttcaagtaactggactgaattggaaattgaccttaggtatatcatggtaacttaaagagtatgccaaatgtcctcagactgaattaacttaattaagaccacagataaaatataaaatgttacacaggtaagttaaaataaaggttctactttgcctaaaaaacaagtaaaagcaagccaacagaatggaggaattaaggtagaatctctctaaaatcaccagggtttttaaaagcttttttccagctaggcattcagaatgaaagcctagcctactttgac

SEQ ID NO: 84830 - DNA, 1082 bp, Homo sapiens
tagaatgccccaccccaccttgcatcttgcccagtttctcaactcttttgaatttaaaattgcacgattaaaacctagcaacgacataaaattgtcaaatggcttaaactagggagttttggtttctgagaatgagaaaaaacagaaatgttcttaaagaagcgggttttggttttggagaaagaatgggatggaatacacctttaacagaagtgtaaaaagatatcgcagtttcttccaggtatttctgtggtagtgataagaagatcaggtcagatgaccaaaggtgtgcacagagggagatgcactagggatgggaaccctgctacttgtcagaggatactgaattgaagagagaggaagataggctggagttgttctgtacccagagagatcactgtggggaaccttcataatatggtcctaatttagtttcattggtgagacccatgaaactgtacatagaggctggaagtaacttatggaaagataaatgatttaataaggaatcaagtgtttgtataaatcaaactgaatttctacattttttcagaagtgaatattttttctgtaaggtaggatgttcaactaggaatgaatgttcrgctaggatgaatctaggaatatccaattctgttaagagttccctgttagaaagtgcatgtgaatgtatttgtgtttcgatgaactttaaatctcattcagaataaccatacatctctgtaatctttatccagaaataatgccattgaaattcacaaacattacagaaactatatcctttgtaaagcttgatcaagttcaagtaactggactgaattggaaattgaccttaggtatatcatggtaacttaaagagtatgccaaatgtcctcagactgaattaacttaattaagaccacagataaaatataaaatgttacacaggtaagttaaaataaaggttctactttgcctaaaaaacaagtaaaagcaagccaacagaatggaggaattaaggtagaatctctctaaaatcaccagggtttttaaaagcttttttccagctaggcattcagaatgaaagcctagcctactttgac

SEQ ID NO: 84831 - DNA, 1659 bp, Homo sapiens
  misc_feature (1)...(1659): n = A,T,C or G
tnnnnnnnnnnnnnnnnnnnnnnnnnnnnnnnnnnnnnnnnnnnnnnnnnnnnnnnnnnnnnnnnnnnnnnnnnnnnnnnnnnnnnnnnnnnnnnnnnnnnagagcgagactccatctcaaaaaagaaaagaaaagaaaattataacagaatatttaatatgatatctctcccccgccccaatccatctgaataaaaactaagtaaatgttagagcagctgtattcaatatgcaaaattatgattattcctgctccaaggcaagtaaaaagcaacacaatattttccattttaaaaaaatgtatttcatttcagaatactcttcctacagattattttttaaatgcctttatttagtcattttcttgttctcagtttttcgctcaaaaattctgtcatttctctgatgtgttcattttagctgcaaacacctaatcagaattttaaggagaattagtaggttggctaactttcagaaagaaatactagtggtgttttcaacaggccggcagaatgtctccaattataaagacggaggaaataaaaacaacaggatggtaaaatccattgagggacagattgcattttataggaagagatgtaacttcatttaccttcggtctttatgtcttgcaaatgtgctcagcactcctacatcccatgggtctcagcgtcaatatttatgtgctggaatacttcattgcctcataaaccaggaggtaactgagtattttcactctctgggaaaaaaaaaatgggttatactaggtagtttccaacagctccacttctcactcatacttctatgcattgacttgcaagaagacacaaagctagataaatgagaagcgttgatctttttcttcttgctccttgaattagacgttaaccatttctaatttctcgttaaacgttattcagctccaaccaaaatttcaatcatggataacctaggggtaaaggcttgaagcttttttaaattttgttttaatgtaaatttcaaaagtctttatgggggatgtcctagtaccttaaacagcaaattcagattcaaagttgatgtccttccaaaaagaaacacagaggacttctaaataaatgatccctaaaagacttttaaaaatatcgacaaacattgcattcaatatccagaaacagtgagtatttctcaatggagaatcactcacctcatgaagagtcctcatgtggagtcccagattacaagcctcctttctcaattccacagagggttctcagtctttaagtatcatacatccaagttacctggatgcttaccctctggtttgtgctccaaagcccttcattccatcaatatttttcatctgtattaaatttgagagcagaaatgcaggctcctgacaggaatgagctcatacatctaataggtggtcatgtcatctaccarccaaaccagtctcccaataaataagctgttttccatactgtgttctacagacttgtattctatgggatgttttctctccctgtgtctccctatctgtctccccacttccttcttttctctcttcctctcttttatacaaacacacacacatacacaaaggagtttgtaatgaaataagcttgaaagatgtagacttaaagtagttctatttgttagatgatatctcaaagcata

SEQ ID NO: 84832 - DNA, 1009 bp, Homo sapiens
tgcatggtttttaggcctgagaaaattatagaaacaggtgatgatctgtctatagaagtaaggaccccaaatccatatttcccagtctttaataacgcctacaggttaagcaggacagaaaccagggtacagagggtcagttctttgacttttgctcttaaagttaatgccttttcccaatagagaacatccatttccttcaagagccacttttaagcacacacaaagctttgagaagccagaaaggaaagaaagagcctcatctcagctgcaatatttccagaaccttcaagcatcttattttaaaatcagaagagacaaaatgcctcagacaccagtggtatcctcatttgtacaatggagaaagtgaacaccacctacccgaaaaaaaaagcccaagtaagaaaaagcagcaaacgtgtgtgtgtgcrtatgtgtgtgtgtgtgtgtgtggcctatgtgtgctggtagctcgggtgcaaaggtttctgggagagctaaggctgaacatcagaacctagagcatttttagagttttctagaacacagcagagatgatacagaatttccttacgcctgaagaggaggcgtacacgagatggaagactgtaagttagatctttgttctccctactgcactctaggctttaaaacaaattcaataattacataaaattcaagatttattttgtcctctgttcgttcttttatctgtaatacacctgcaattttcaagctcctattttccttgttttcttttacttctacttgattatttttatttatttttcttttcataaaataaaaatgtttctccaagagagcactggcaagccttgaggtagagtaaattagccagtaaccatttctttgacatctattcaaccactacaaacccacctgagagtgaggaggagaaaaggtgagagaggagattggtaggaatagcactccatgttttattcatcttttcaggacactgtagagattaactaattaccctacacta

SEQ ID NO: 84833 - DNA, 1009 bp, Homo sapiens
tgcatggtttttaggcctgagaaaattatagaaacaggtgatgatctgtctatagaagtaaggaccccaaatccatatttcccagtctttaataacgcctacaggttaagcaggacagaaaccagggtacagagggtcagttctttgacttttgctcttaaagttaatgccttttcccaatagagaacatccatttccttcaagagccacttttaagcacacacaaagctttgagaagccagaaaggaaagaaagagcctcatctcagctgcaatatttccagaaccttcaagcatcttattttaaaatcagaagagacaaaatgcctcagacaccagtggtatcctcatttgtacaatggagaaagtgaacaccacctacccgaaaaaaaaagcccaagtaagaaaaagcagcaaacgtgtgtgtgtgcatrtgtgtgtgtgtgtgtgtgtggcctatgtgtgctggtagctcgggtgcaaaggtttctgggagagctaaggctgaacatcagaacctagagcatttttagagttttctagaacacagcagagatgatacagaatttccttacgcctgaagaggaggcgtacacgagatggaagactgtaagttagatctttgttctccctactgcactctaggctttaaaacaaattcaataattacataaaattcaagatttattttgtcctctgttcgttcttttatctgtaatacacctgcaattttcaagctcctattttccttgttttcttttacttctacttgattatttttatttatttttcttttcataaaataaaaatgtttctccaagagagcactggcaagccttgaggtagagtaaattagccagtaaccatttctttgacatctattcaaccactacaaacccacctgagagtgaggaggagaaaaggtgagagaggagattggtaggaatagcactccatgttttattcatcttttcaggacactgtagagattaactaattaccctacacta

SEQ ID NO: 84834 - DNA, 1009 bp, Homo sapiens
tgcatggtttttaggcctgagaaaattatagaaacaggtgatgatctgtctatagaagtaaggaccccaaatccatatttcccagtctttaataacgcctacaggttaagcaggacagaaaccagggtacagagggtcagttctttgacttttgctcttaaagttaatgccttttcccaatagagaacatccatttccttcaagagccacttttaagcacacacaaagctttgagaagccagaaaggaaagaaagagcctcatctcagctgcaatatttccagaaccttcaagcatcttattttaaaatcagaagagacaaaatgcctcagacaccagtggtatcctcatttgtacaatggagaaagtgaacaccacctacccgaaaaaaaaagcccaagtaagaaaaagcagcaaacgtgtgtgtgtgcatatgtgtgtgtgtgtgtgtgtggcctatgtgtgctggtagctcgggtgcaaaggtttctgggagagctaaggctgaacatcagaacctagagcatttttagagttttctagaacacagcagagatgatacagaatttccttacgcctgaagaggaggcgtacacgagatggaagactgtaagttagatctttgttctccctactgcactctaggctttaaaacaaattcaataattacataaaattcaasatttattttgtcctctgttcgttcttttatctgtaatacacctgcaattttcaagctcctattttccttgttttcttttacttctacttgattatttttatttatttttcttttcataaaataaaaatgtttctccaagagagcactggcaagccttgaggtagagtaaattagccagtaaccatttctttgacatctattcaaccactacaaacccacctgagagtgaggaggagaaaaggtgagagaggagattggtaggaatagcactccatgttttattcatcttttcaggacactgtagagattaactaattaccctacacta

SEQ ID NO: 84835 - DNA, 1285 bp, Homo sapiens
tgcatcatttttctctctcttcttttttctttaagtttctaaagagtgagaaagcagatatagtttaccttttaaaagttatatccagattctctatcagtgagataaatattatatttgacctttcaattatcatgatatgctgttctaagactaaacatgaatatttaaaaactggaagttattgaatgcacttttactctttcatcaattactacacatatattcctataagaatataaagatgaatgaaataactttcctgtctccaagttctccagatctagagtgtgaatcagatttgaacatacatatgtatatgtacattggagtttcaaaggggagtctcatagaaatacaagttaaatgttgtagtaaggatagtttaaaatatcaactagggtatcgtggtggatatacttaacagaaagctcatcaaattgaaaaggaggggctgaggagggattacattccagctagaagaatgagcatataaagtgtgcagaggcaaggattatcataagagttacaaaaattacaaacgtttaagagctctagaaaacaaaatttgcatataactgtgacatgattgggttgtacccaggtcatcataggccttatatgccaggggtttggattttatgttagagagataatggaaactattacacatatttgaacagcaagatcatctagttgatcttttaataaaatcattatggtggtacaatagaggcacagttttcaactattttggatgagtatcttttttatgttaaaatatgttgtgataatgttgcagtgtttcagaattgggaaatgttgcagtattttagagttggttggaaggcctgaagccatttagagcagcttctcaaaatttaatgtgcatatggatgacctaagcatcttgttaaatggctttttgcrcatttttcacaagctccagctgaacatattgagtattagtatattgctctttgtacagccaaattaaaaagtccagttactagttataattactgttctccaattctggagagagattttagtaattctcaggctaaatcatcgtatttatctcgtatgataaaaataaaaaaatccaaagcctgaatctgatagattatcctccaacactgctactaccaatttcatgtaaatctcagaattttcaagatacttctgcctgatgtttttcacagttatagactagaattcaagcacattaaatgtgtactactgggagaaattttccatagttttggagttcaaaatgtttaaa

SEQ ID NO: 84836 - DNA, 757 bp, Homo sapiens
ccatcaggtgacttcaaaatgattgcaccagacacaggttacagatcatgcatatgttttcaaacaataaagatgtaattttagaaacagctgagaagttaccctgtccttgttcttcaattagctataacgttgctgggctggagatctacttggagcagtccctcatgcctagttagttttgcttgtcagtctatatgataggtctctggatgccaggagaacatgtcaaccccaraaagtgattttatgaggaagcccaatttaacttttatgttttcactcaggcagtcattatttatactaataaaagatttcaaaattgacttacaatgtcaagtgtataaggatgccagtgttttggtggtctgaacagtgaatcaaaggggttaataagaatccagtgcatgccactgttcattgagctgcctggtttgacagcacagcatacttttgaatgtcaactcaacttttaaaaataacttggactcttaaacccttacgtctgtataataatttatagacatcagattagaatcccatagagtgctttggaaatttatttaggtggcctttattccaggaaaatctcatcatgtaagtttgatagctaaaactgtgttaaatgttccaggcaattgcctgctaacttgaaatcgtgtacactcaatataaaaatgatagccactaaattttcaaggaaaatatgacagtttttattttcttattgaagtcagtgtttataccctaagctcaa

SEQ ID NO: 84837 - DNA, 1866 bp, Homo sapiens
gctcctttctgtagatgatctaatgatcaactaatccccatttttttataaaaaggcaaaatatgtcactcttttctgtagattatctaatgatcatctaatctcctcattttataaatgggcaaaatatgtgtcagagatycaaagacttggaaaagtcacatagcttacttgaggtttatgatttctttaaattcctaaaactttatctgtaacacaatctttatcttaactacctgtttataaacatccaatgtgtgaacaatgtaatcctgtgttgaatattaggggcactacccattaaaaatcctaaaatgtgagcaatatttcttgagtgccacaatctgttctctacattggtacttttatcataggcccggaaatatgggaagaaatagcactacttcccatgttttttaaactggaattagatctgaaatgagcactttggtttgacaggttctctaatattgccctataaactatttgtattattgtggtgttttagttcattttgactgctttaacaaaaatgccaaaaattgtgtggcttatcaacaattaagacatatttctcacagttctggaggctgaaatgtccaatatccagaaaccagcatattggtgtctggtgagggcccattcctcataaaggatgtcctcttgctgcatctttacatggtgaaagggactagctagctccctggagtctcttttttaagggcacaaatcccattcatgacgattctgccctcatgatctattcacccgccaaagccctatcttctagtattatctcattggggactgggttttatcacatgaatttgaagaagatacaaacatttagactatgacatgtggtattaaaaaccccgaattttctattgtctcttatcacctattcaaccaggaaagaataataagataaattttactatcccctggacataagatttcaaaataatgtctagtcacttggaatctagtagtgacatagaaaacaaaataatctgggaatctaaaatgtcttaataatgaatatatatacacacatacatatatattcatatatattcattattaagaaactaagaaaataaatatacatgcattacatatatattcttatagacacatatacatatatatcatgtatcacataaacctataataactaaaactcaaaaaagcaaaataatttgcgtacaatcaccctgcgtataactaaagtcagaaacccagctgtaagaccaatgttagcgtcattgccatttgttttagtttcccaggccaagattctaccaccgtctgatcagtctcttctctataatagtgataaattccttttagggttgttatttgtaaaggattctaaaataaggggaaataattatttttttctcttgaaaaatttaagtgcctcacaggacatggcatgaaataagaaaatgtaagtggcacccaaatatgactaaatgagtcagccttcttactcatatcctggaagtcatgttgcgatgtattcaggatatcattcggctcaaacacttataaatagctcctaagtgactgtttgatttcccgacttcccctaaggatgactggcttcagtatgtaatccttatacaaattagcagatttaagttaactccaaggttagcaatagtcaagggtataaggatttaaggtaacaataccaccaacattgagaagtcacgtatgaggccttcaagatcaaagattactacttcaccaaattcatttctcatctctcttctttccattctctaaatttataattttcttagataccattaccattagttatattcactagtattctctaaataagaaatcagatct

SEQ ID NO: 84838 - DNA, 1866 bp, Homo sapiens
gctcctttctgtagatgatctaatgatcaactaatccccatttttttataaaaaggcaaaatatgtcactcttttctgtagattatctaatgatcatctaatctcctcattttataaatgggcaaaatatgtgtcagagattcaaagacttggaaaagtcacatagcttacttgaggtttatgatttctttaaattcctaaaactttatctgtaacacaatctttatcttaactacctgtttataaacatccaatgtgtgaacaatgtaatcctgtgttgaatattaggggcactacccattaaaaatcctaaaaygtgagcaatatttcttgagtgccacaatctgttctctacattggtacttttatcataggcccggaaatatgggaagaaatagcactacttcccatgttttttaaactggaattagatctgaaatgagcactttggtttgacaggttctctaatattgccctataaactatttgtattattgtggtgttttagttcattttgactgctttaacaaaaatgccaaaaattgtgtggcttatcaacaattaagacatatttctcacagttctggaggctgaaatgtccaatatccagaaaccagcatattggtgtctggtgagggcccattcctcataaaggatgtcctcttgctgcatctttacatggtgaaagggactagctagctccctggagtctcttttttaagggcacaaatcccattcatgacgattctgccctcatgatctattcacccgccaaagccctatcttctagtattatctcattggggactgggttttatcacatgaatttgaagaagatacaaacatttagactatgacatgtggtattaaaaaccccgaattttctattgtctcttatcacctattcaaccaggaaagaataataagataaattttactatcccctggacataagatttcaaaataatgtctagtcacttggaatctagtagtgacatagaaaacaaaataatctgggaatctaaaatgtcttaataatgaatatatatacacacatacatatatattcatatatattcattattaagaaactaagaaaataaatatacatgcattacatatatattcttatagacacatatacatatatatcatgtatcacataaacctataataactaaaactcaaaaaagcaaaataatttgcgtacaatcaccctgcgtataactaaagtcagaaacccagctgtaagaccaatgttagcgtcattgccatttgttttagtttcccaggccaagattctaccaccgtctgatcagtctcttctctataatagtgataaattccttttagggttgttatttgtaaaggattctaaaataaggggaaataattatttttttctcttgaaaaatttaagtgcctcacaggacatggcatgaaataagaaaatgtaagtggcacccaaatatgactaaatgagtcagccttcttactcatatcctggaagtcatgttgcgatgtattcaggatatcattcggctcaaacacttataaatagctcctaagtgactgtttgatttcccgacttcccctaaggatgactggcttcagtatgtaatccttatacaaattagcagatttaagttaactccaaggttagcaatagtcaagggtataaggatttaaggtaacaataccaccaacattgagaagtcacgtatgaggccttcaagatcaaagattactacttcaccaaattcatttctcatctctcttctttccattctctaaatttataattttcttagataccattaccattagttatattcactagtattctctaaataagaaatcagatct

SEQ ID NO: 84839 - DNA, 1866 bp, Homo sapiens
gctcctttctgtagatgatctaatgatcaactaatccccatttttttataaaaaggcaaaatatgtcactcttttctgtagattatctaatgatcatctaatctcctcattttataaatgggcaaaatatgtgtcagagattcaaagacttggaaaagtcacatagcttacttgaggtttatgatttctttaaattcctaaaactttatctgtaacacaatctttatcttaactacctgtttataaacatccaatgtgtgaacaatgtaatcctgtgttgaatattaggggcactacccattaaaaatcctaaaatgtgagcaatatttcttgagtgccacaatctgttctctacattggtacttttatcataggcccggaaatatgggaagaaatagcactacttcccatgttttttaaactggaattagatctgaaatgagcactttggtttgacaggttctctaatattgccctataaactatttgtattattgtggtgttttagttcattttgactgctttaacaaaaatgccaaaaattgtgtggcttatcaacaattaagacatatttctcacagttctggaggctgaaatgtccaatatccagaaaccagcatattggtgtctggtgagggcccattcctcataaaggatgtcctcttgctgcatctttacatggtgaaagggactagctagctccctggagtctcttttttaagggcacaaatcccattcatgacgattctgccctcatgatctattcacccgccaaagccctatcttctagtattatctcattggggactgggttttatcacatgaatttgaagaagatacaaacatttagactatgacatgtggtattaaaaaccccgaattttctattgtctcttatcacctattcaaccaggaaagaataataagataaattttactatcccctggacataagatttcaaaataatgtctagtcacttggaatctagtagtgacatagaaaacaaaataatctgggaatctaaaatgtcttaataatgaatatatatacacacatacatatatattcatatatattcattattaagaaactaagaaaataaatatacatgcattacatatatattcttatagacacatatacatatatatcatgtatcacataaacctataataactaaaactcaaaaaagcaaaataatttgcgtacaatcaccctgcgtataactaaagtcagaaacccagctgtaagaccaatgttagcgtcattgccatttgttttagtttcccaggccaagattctaccaccgtctgatcagtctcttctctataatagtgataaattccttttagggttgttatttgtaaaggattctaaaataaggggaaataattatttttttctcttgaaaaatttaagtgcctcacaggacatggcatgaaataagaaaatgtaagtggcacccaaatatgactaaatgagtcagccttcttactcatatcctggaagtcatgttgcgatgtattcaggatatcattcggctcaaacacttataaatagctcctaagtgactgtttgatttcccgacttcccctaaggatgactggcttcartatgtaatccttatacaaattagcagatttaagttaactccaaggttagcaatagtcaagggtataaggatttaaggtaacaataccaccaacattgagaagtcacgtatgaggccttcaagatcaaagattactacttcaccaaattcatttctcatctctcttctttccattctctaaatttataattttcttagataccattaccattagttatattcactagtattctctaaataagaaatcagatct

SEQ ID NO: 84840 - DNA, 735 bp, Homo sapiens
tcctgatgagagctaagtagagtaccaaaggtcatttccgtttttttttttttaatgtatcacagctactacaatttgtattttgtatgtttacaagcacatgcttggaaaacagaaaataatttggttttaaatattccaggaaattacaatctaattgcatcagttcccaactgtgcctcagtttctagcctggaaaatggggttgtattacaattaactctctctgacttgtgatcagggttcctattttttttttttttttttggttttttgtttgttttttgtttttgagacggagtttcgctcttgttgcccaggctggagtgcaatggtgtgatctcgggtcactgcaacctccgcctcctgggttcaaacgattctcctgcctcagcctcccaagtaactgggattacaggcrcccaccaccacgcccagctaatttttgtatttttagtaagacggggtttcaccatgttggccaggctggtctcgaactcctgacctcaggtgatctgcccacctcggcctcccaaagtgctgggattacaggcgtgagccactgcgcccggactctatttggttttaaaagctctctagggttccctcttcccagacagccaaattagggagtgacataacccgcagcacagttgtcaaaggggcccttaattattcacccatcccagaggcatcgtttgaagaaagtgccttctttaagggcattggctgcct

SEQ ID NO: 84841 - DNA, 735 bp, Homo sapiens
tcctgatgagagctaagtagagtaccaaaggtcatttccgtttttttttttttaatgtatcacagctactacaatttgtattttgtatgtttacaagcacatgcttggaaaacagaaaataatttggttttaaatattccaggaaattacaatctaattgcatcagttcccaactgtgcctcagtttctagcctggaaaatggggttgtattacaattaactctctctgacttgtgatcagggttcctattttttttttttttttttggttttttgtttgttttttgtttttgagacggagtttcgctcttgttgcccaggctggagtgcaatggtgtgatctcgggtcactgcaacctccgcctcctgggttcaaacgattctcctgcctcagcctcccaagtaactgggattacaggcgcccaccaccaygcccagctaatttttgtatttttagtaagacggggtttcaccatgttggccaggctggtctcgaactcctgacctcaggtgatctgcccacctcggcctcccaaagtgctgggattacaggcgtgagccactgcgcccggactctatttggttttaaaagctctctagggttccctcttcccagacagccaaattagggagtgacataacccgcagcacagttgtcaaaggggcccttaattattcacccatcccagaggcatcgtttgaagaaagtgccttctttaagggcattggctgcct

SEQ ID NO: 84842 - DNA, 865 bp, Homo sapiens
tgaaattattgatccctctctctaaccctccaactacaggcaagaagctgcccatacattccccaaagcaggagtgcactctgccacaggcctagatgccgtcaacctcctggaccttgaactccctaaattaatggcctctgtgtgagtatgtgtaagcagcccctctctgtcccagtccatcctaaaatcactcccttggagccaccactgcccctctcatcttctagaatttctagaaagataaagagctagataagcatctaggtacctttcttctgctgttagctctaaagacaagtgaatatatcctagctaggatgtactctaaggaatgcagaagtaggccgagtgcagtggctcattcctgtaatcccagtgctttgggaggccgaggtgggcggatcacctgaggtcaggagtttgagtccagcctggtcaatcatgcaaagccccgtctctactaaaaatacaaaaattagctgggcgtggtggcgggtgcctgtaatcccagctactcgggaggctgaggcaggagaatcacttgaacccccaaggcagaggttgcagtgagctgagatggtaccactgcccatttcaaaaaaaaaaaaaaaagaatgcagaagtaaattaaatgaccacaaagagtwttttttaatttgagacagggtctggctctgtcacctaggctggaatacagtggcgcaatctcagctcacttcaatctgtgcctcctgggctcaagccatcccctgacctcagcctcctgagtagctgggactacagtcctgccactatgcctggctaatttttgtattttttgtagagatgttgcccaggctggtctgaaactcctgagctcaag

SEQ ID NO: 84843 - DNA, 3878 bp, Homo sapiens
tacctaatcttcctccccttccctctcttccccctgccccctctttctcctccttctcctccccttcatcctcctactcttccgccccctcctcctcattttccttctcctcctcctaatcttcctcccccttctgccccccttcctcctactgatcttcctcttcttcctcttcctctccttcctccttctcctccctcctcatcctcctctttgtcctctcctttttctaaaaagccttttaacttgcctggccaacacagtgaaaacctgtctttactgaaactacaaaaatgcaaaaattagccaggtgttggggggaatgcctgtgatcccagctactcgggaggctaaggcaggagaatcgcttgaacccaggaggcagaggttgcagtgagccaagatcactccactggcactccagcctgggtgacagagagagactctgcctcaaacaataaataaataaatcttttaaaatgtgaaaagcattcttagcactctaactgccatggttttcacactcctgaactacagtatgattccgatagcacgtagtacattttatgtatgcatatatgtgtatttacaaggccaagaaaataaatagcaaaattaaaaatatgattacttccagactgtctgaatatgaagtaaaaactggtattttaaattaaaagcgttaacaccttttattctcttggatccaataattctacatccaatctttttatctttttcatttctctctgaggatttcatatgatgtggtcaagttagtgtataaggctgttgttctacctttctgtggaacagtgaaatactgacaaccttattctctcttcccagaagaacaccatggcttaatcaaaaacttcttggctgggcacagtggctcatgcctgtaatcccagcactttgggaagccgaggtggggagatcacaagatcaggagttcaagaccagcctgaccaacatagtgaaatcccgtatctaccaaaaatacaaaaaattagctaggcatagtggtgggctcctgtaatcccagctacttgggaggctgaggcaggaggatcgcctggacccaggaggtggagcttgcagtgagcggagatcatgccattgtgcactccagcccaggcgacagtgcgagactctgtctcaaaaaaaaaaaaaaaattctttcataggaggaacttccagaaaaccaacacctagtgtatatttaaatattcctcccggctgggcacggaggctcacgcctgtaatgccaacactttgggaggccaaggagagtggatcacctgaggtcaggagttcgagaccagcctggccaacatggtgaaaccccgtctctactacattcaaaaaattaggtgcagtggcgggcgcctgtcatcccagctactcaggaggctgaggcaggagaatggcttgaacccgggaggcagaggttgcagtgagctgagatctcgagccaccgcactccagcctgggcaacaagagtgaaactctgcctcaaaagaaaaaaattatatagatatattcctcttctcaaggaaagaagcccccaccacccagtcccagttccctgagacagaaactggggaatccctgactccctgtcacaccctggacatccagccgccggggctgccaggtacttctccgggtggctcctgagtcagctgagactcaggagtgtggttctccctctgcccaccccttgtgctcttcccccgggacccatttcccgccacctgcacccactatgcttgactttcatcagttgtccacacagaacacggactggaatttcttacaggaaaatctgaaccatggccctcccttgcctaaaacacctcaaagaatacactttgcattttatataaatactcgaattcttctcaagattcacaagctgttggagctctagaatttctacatgggagggagtaagagtagcaattgagccacaatagggatgcttggaggcttgccttgaagctgtgttcacaaaatgttgtcaccagttgtgggagggaggaaggaaggaaggaaggaaagaaggaaggaaaggagggggaaggagggaaaacggcttcttttacagtatgtttctgtgggtacacacacagaaagcaaggttatgaaatcataaaggttattcttacatgttatatctcacttattatrcatatgttatatatctcatttattttaatcctcattcatttttactttaattcaacactatacagaattttggaaatgggtttgcaaggcccccataaagtcacttagtacaggaactaaaaccaatagaaattagagccaaggtttttaaccccaggaaaggagagagaaactcatttacaactggagccagggacataatctaggaaacagacacctagtattaaatatgtttatgaacatattgaaaatgaacaggcccagaatcctggccacattttactctttccgagaaagccattcccttcctgagtgagaaggcgagagagggagattcagagagattttgggcttcaccctggcattcgggacattaatcagggaaaattccaagtaggttgatttatctggcacttggctgaatgttgacattcttacagcctcgtccaaaaagccgtgagattccgggagaaacttccctctcatgggagccctcctttcagtttaagtctggcccagattcctctgtgagcaactggagccaggaccctgctgaacagagtttctctgtgggcacaaagtgcactcaccattgccttttctcagcttggtgtgagagggtgtaagtgttcttatcatcacagacaggcaagacattccgtttttaaaaggtaaaaagcattcttagccctctaactgccatggttttcacactcctgaactacagtataattccaatagcacgtacattttatgtatgcatatatgcatatttataaggccaagaaaataaatagcaaaataaaaatgtgatgacttccagactgaatatgaagtaaaaactggtattttaaattaaaagccttaacaaattttattctcttggatccaataattctacatccaatcaagtatgaaagaaaaggtacatgcttcttaccacatagagacaatgagataccacctcggacccatcggcagggctactgtcaaaacaaaccaaccaaccaacaaacaaacaaacccagaaaatagcaagtgttggagaggatgtggagaacctggaaccctgtgcctggcaggtgggactgcgcttctgatagggtattcataaagcagaaaaatgccagagcttgggcaacatccacaaagctctcacctcacttgtaatccaaaaactggatgccagaccaggtgtggtggctcatacctataatcccagcaatttgggaggctgaggcaggaggatttcttgagcagaggagttcgagaccagcctggacaacatagtgaagccccatctctacaaaaaatacaaaaattagccgggcatgatggtgctcatctgtggtcccagctacttaggaggctgaggtggaaggatcagcctaggagtttgaggctgcagtgagccaagattgtaccactgcactccagcctgggcaacagagtgagaccctatctcaaaaaaaaaaaagaaagaaaaaaagaaaagaggatacccaaaccgaattgaaccacagtttccactgtatcctatgggtgaagatgaaaatgcagttggcaggggctggggcaggcacgtgtgtgacatactgcgtctgttcagcattttggggaatgagttcagactttaaaatatgttcactctttgacccagcggttctgcccctgagtgcaca

SEQ ID NO: 84844 - DNA, 635 bp, Homo sapiens
atctcagctcactgcaacctccgtctccccggttcaagcgattctcctgcctcagcctcccgagtagctgggattccaggcgcatgcgccgccacgtccagctaatttttgtatttttagtagagacagggtttcaccatgttggccaggatggtcttgatctgttgacctcgtgatccacccgcctcagcctcccaaagtgctgggattacaggcatgagccagcacgccyggcctgaaacctcccttttaaaccacaatttgggaaagcaatttggtcccatctagaaaactgtttatggtttgaaaatgcacgtacccagaatcctggccacattttactctttctgagaaagccattcccttcgtgagtgagaaggcgagagagagatttagagagactttgggcttcactctagcatgtgggtcattaatcagggaaattccgagtaggttataaatctgtgcttttcctctcccccagcagctccattcctagaagtttcaccagagcaaagtctcccacgtttgggcgaaggagagaagtacatgtagcaagcaccagctctgtgctgtttcagggttgtttgtaacagcagaaaatcctggggccatcgacaggagaagagatgagt

SEQ ID NO: 84845 - DNA, 1079 bp, Homo sapiens
ttctaatttttctggcctcagtccaagtactactgcatgttggagtcaacttcattgactacccaagccacttgggtaactttcttccagccactatgctctatcacatttctggtttttatgaactatattttttattcaaactcatcacactctctaattcttttgtttattcagttacttgaataaaggctgtctgtatcccccattcactaaatcatgggaccttgcctttttaacaaatagatgggtatttccaacacctaaacagggttcatcaaatgtaaagactatttaatttccactgatacagattccacaagacagataaagcaaagagacaaactggcttaatttaccaagttaatatcactaagctcaattagtactgttttttcgtttgtttgtttattttaaccaactatggccaatcttcacacagaccagacaatatttctcctcttttagtgtgttcttacctttgcttttgaaagattttacatatgccagacacctctggaagggcagctatcttagtattatccagagttgggaaatagccatgatatcattcagttatgaaaatcagaaatatgtgcttcctttttttttttaagaaatagtctcagatattcaacttgtttgtcttagatttgcttaaaccccaaacaatctgtgtttaatgtttttggtgtcccactgctttgcaagcagacataccacttgcaaatgtgccagccctttgtgcaaacacccaaaaggytacatcagatccaaaagctctggctcacaagggggccagcaggtggagagcagaagaatcagccatgagtgtgtgcctttcggcctgctaagaaggaagacagtggcataaagagagtattatggttccaggcacaacttcagtctgtccaagaggctctatcgttaacggagaatacagagattacattcagttacccgaattctacaagctttctgtaatgctcaaaaggtttaagtgcacttatctgtcatcccttcactttcctttttgaaataaatccctttgtaataacaaatcagactttccttcttct

SEQ ID NO: 84846 - DNA, 749 bp, Homo sapiens
tatgagctctagagatgcaatgaggaaatctccccatctagaaaggcaatcctgatatcattcacaggatgtaaggattctgggcagcatacacatgatccccctttctgcacagtggggatcagtgttagctgcctgctccaggatccatgtttcytctgtgtggtttaactgctaatgtaactgtcaagtgcccctcagggtttctcttctgctaatcacaagagttttcctaatagttctccttggcttgggttaactccctgaactctaacaccacgacaaatcattagctgcttcatcttcaacactcagctggagatagccataatacattgtcaagggggaataattggggaatgaacagtaaggctttaagtttaaagcccttaagcaataaatgtggccttttcctcaaaaggcagcatacacatcttaaaattcagcacatagcaaaagccattgtttctctttgctattcctgacttttgatcaagtcagacaagttgagagcaccatacttgatattatgatatagattttatcattcatttcctacttaaaaggagtgggaagatccactattgacattatgtttaagatgctcccacagaatctgtgtccagaatttctatcagaattttaaaacctgagaatcaggagcccagtttgcaataaaatcagaataagttctctataaattagagagaactttgggggaactttttttaatacatgagcaaacaagt

SEQ ID NO: 84847 - DNA, 749 bp, Homo sapiens
tatgagctctagagatgcaatgaggaaatctccccatctagaaaggcaatcctgatatcattcacaggatgtaaggattctgggcagcatacacatgatccccctttctgcacagtggggatcagtgttagctgcctgctccaggatccatgtttcctctgtgtggtttaactgctaatgtaactgtcaagtgcccctcagggtttctcttctgctaatcacaagagttttcctaatagttctccttggcttgggttaactccctgaactctaacaccacgacaaatcattagctgsttcatcttcaacactcagctggagatagccataatacattgtcaagggggaataattggggaatgaacagtaaggctttaagtttaaagcccttaagcaataaatgtggccttttcctcaaaaggcagcatacacatcttaaaattcagcacatagcaaaagccattgtttctctttgctattcctgacttttgatcaagtcagacaagttgagagcaccatacttgatattatgatatagattttatcattcatttcctacttaaaaggagtgggaagatccactattgacattatgtttaagatgctcccacagaatctgtgtccagaatttctatcagaattttaaaacctgagaatcaggagcccagtttgcaataaaatcagaataagttctctataaattagagagaactttgggggaactttttttaatacatgagcaaacaagt

SEQ ID NO: 84848 - DNA, 674 bp, Homo sapiens
agccataactggcatacagctgtgagcaaagaagagcctttggagcatgcttcaggaggcatctcacaattctaacaaagaccaagacatgctcaaaattatattacaccattcggtaaaatacagacatttgcttttgaacccctgtggaaattctagttcccattttcataggtaatgacttatcaatcctaatagaactagacattattgctccattcattttaacagatgagcaaaccaaagctcagagatgttaagctctccacctaaagtcacacagccaggaagtagccaacctcacatgcattcccctctttagtaacagctgctcccagataaggctccctcttcccaactccatctccacccccacctggctccatgcttggccaattagctcatttctttttctgtgaccayacagattggttctgggaatgcacatgacttagagttagttgaatatccatcagctgtggaatttttgctggcactgtaggggagaaaagtgctcttttcctaatggggaaactaggcaaggagaatgtgagcctgttattgctcgagtcaaattgtcacaattagggacctagaaataggcctgcctgtgtgaaaaagggctgatttctgatgatgtatttaagcatctggattcagccatacctgaattc

SEQ ID NO: 84849 - DNA, 1140 bp, Homo sapiens
atcaaagtcatgtgctcatccagccacattattttcacacttttattctgaactgagatgcttgaataatttcacgtctgaattaactgatcaatatcatgctatgttaagaacaccatgcaattacatgtttgaactctraagtcctatcttccttatctttgtacagggctttattaagtggcatggacccaagaatgaatgaatgcttaaaattttagaaaagatagatgtgtataatagaaattcagagtcagttatacatgctattatggcatggaagcaatgtgttggacagaaatgccatgagctttggagacatacggccctgggattagattcagctttgtcaccagcaatctatggaatcttggaaattttacataaactgttcaactcttcattacgttatttgtttaaaaaaatacttcacatgattcttgtgttgaataagatgatgtacatgataataccaagtatggatcatagaaataagtgaatgttcaacaaatgattatttcctttaaaaaactataccttaacttctaatacaaaaatgagaaacaaacattcctgtatcaatagaaaagggaaattattacctgcagatgaatgtacatcagcaataataacaaattgcaaagaactgtcactgtataggaaggtgatatttatgagatttggggtcctttgggatatagcctcttgagtacactacttgtttataaaaatttcactgaaaattcatcaagacaatggaaattacaggtacatatgctcataaaaatatgtgttgctgctgggcatggtggctcacacttgtaatcccagcactttggaaggccaaggtgggagaattgtttgaggccaagagttcagacaagtttgggcaacataacaagaccccatctctacaaaaaaaaaatataaataaataaaagtaaaattagccaggtgtcatggctcatgcctgtagtctcaactactcaggaggcagaaatgggaagattgattgaagtcaggagtttgaggctgcagtgagctagaattgcaccactgtactccagcctgggcaactaagcaagacctcaactgaaaaaaaaaagtctaaaaacatctgtaaatttatttatttttagt

SEQ ID NO: 84850 - DNA, 1528 bp, Homo sapiens
tgtcctgggtatgtggaagcaataaggaaacctcaaaacttcattgctatgttgtttttcaagtccaatagttcctaggcagttaaccctttttattccacctttgaaagtcttcctacttgtttttgtgctacatatagggattttttggtaataagaggaagggcctggaagaaatggggctacttcagcatcaaggtaatcaaaaatctatgccttcaaacatgtagaaatatgcagtttcttatgtatttcatgccacaaagttggtgtaatacaaattagcctgccatatccagatatagaagtctctatacttactgtgaacagaaagggtttgctagaaagaaatgtgtcagagacaaatgaaagttcatggtgaagtgttctcaaattgcccttcactccacaggaagtatgtgccttaaaaaaagccaaagtattatgagaatatttgtgccattgatcttttgcttaaccttacgtgcctcagttacatcctttgtaatacaataatttttaaaaaaactttaaagagttattccaagaaataattaggttaatactttacttgtaaacagtgataacagtgcccagaatgtagtagacagtttaatcctgttactactattactaacatttgacttctagatcttttagctctccaaccatgcaaatgcataaaggagcaactatttagtaaagtgtgaattcaaaccttttagtaaactaggctgagattctagttgctaatctaggttataaaagtgtcaaggaagtgatgtagatgtgctgaggatgggtttgttgtaaaagcctgtctctgttatagcaggatctcacctaaacattcagtcacttgaatcaggcagaagcattcagctgatcagtggccaggattcaaagtcagcagagtcagcagttcaagcaggaacaaatgcttcattcagccatccattaattcattaattttttctttatctctccattttaaatatgcaagtatgcttattaagttctagaaactgtttgaaaattaggtacatggggagaagaaaagatgtggtagattctacatgaaactttcaacactgtcaagaaagcaaacactaaatctgtatctacacgtgcattgagtattctcaagagaagagatagggttctatgtaatatcattatttgaagttctactaaaataacaagcatcatgagaaagtatttttctaacaagctctctcttcagagcccccttaatctccttgttcctgaggctgtagatcagggggttcaacatgggaatcaccactgtgtacaacacagacaccaccttgttctggtcagttgagtagctaaaattgggcatcacataaatgaaggtaatggtcccatagaacagggtaaccacagtgaggtgggaagtgcaggtggagaaggccttgtggtgcccctcagtggagcgcatcttcaggatggtgatgaggatatagatgtagcagacrgctatgacacacacagtgaccacaatgat

SEQ ID NO: 84851 - DNA, 1139 bp, Homo sapiens
tacattttgtggtatacagaaaggcagtggaacaatcccagatttcagaagttggttgataaaatcaacatacaatgttaagagaaaatatatttatcttcctgaagataaatcaagcagcttgatcacagcttgatcagttgtgttaacatctgtagggagaatgtgtgaatcagtaagagatggaatcattatggacacagagagaaacaagatgtcagagagatcccaggtggcacagtgtatccagcaaagtctaagcaccaccagaatttgaagacacccaaactcaaagttcctagaaagtgttgttaacagrtagagatggtctggataaaatatcccttaaaattatccaccttctttttgcctgggtcctttctcattaaacaaccatattcttatgctgaataatccctctttctaggaggtaatattcctcccttgcagactttcttctgttttgagtctttcttttactctacactcttgttggacaattaccttctctgccacagcttcaatgtcctcccataattaatgagtatcatatcactagctctagtttaggcatctctcttgagctccaaacccattgatccaattctctacttctttatatctccacctggagattccacatgaacttcaagctaaacttgctgaaaacaggggattagttagagtctcaagcagaagcagatggcacactcaaaatagaataatttcaaacagacttctttacaaaggcactatttataaaggggatagatatgagagagaaacaagagatagggaagtcagccaagatagcggaccttgagctgttatcacttctaggagaggactaagggagggagcaattgctaatatctggaagaagaggcaattctgtagagttggccaccttgaaatgagcagtgttttttggtttacagatttaagccacacaggccaagttctcagagaggaagccaaggcaataataatgctgaccttattgtcctttatccaattttcttatagtgcctcctgttgactgaacccagaggacacaagaatctagaagatgaagtccaattaggtcagccaccttggaagttgattttgaggaacaaacggaagatatatggcatatg

SEQ ID NO: 84852 - DNA, 1139 bp, Homo sapiens
tacattttgtggtatacagaaaggcagtggaacaatcccagatttcagaagttggttgataaaatcaacatacaatgttaagagaaaatatatttatcttcctgaagataaatcaagcagcttgatcacagcttgatcagttgtgttaacatctgtagggagaatgtgtgaatcagtaagagatggaatcattatggacacagagagaaacaagatgtcagagagatcccaggtggcacagtgtatccagcaaagtctaagcaccaccagaatttgaagacacccaaactcaaagttcctagaaagtgttgttaacagatagagatggtctggataaaatatcccttaaaattatccaccttctttttgcctgggtcctttctcattaaacaaccatattcttatgctgaataatccctctttctaggaggtaatattcctyccttgcagactttcttctgttttgagtctttcttttactctacactcttgttggacaattaccttctctgccacagcttcaatgtcctcccataattaatgagtatcatatcactagctctagtttaggcatctctcttgagctccaaacccattgatccaattctctacttctttatatctccacctggagattccacatgaacttcaagctaaacttgctgaaaacaggggattagttagagtctcaagcagaagcagatggcacactcaaaatagaataatttcaaacagacttctttacaaaggcactatttataaaggggatagatatgagagagaaacaagagatagggaagtcagccaagatagcggaccttgagctgttatcacttctaggagaggactaagggagggagcaattgctaatatctggaagaagaggcaattctgtagagttggccaccttgaaatgagcagtgttttttggtttacagatttaagccacacaggccaagttctcagagaggaagccaaggcaataataatgctgaccttattgtcctttatccaattttcttatagtgcctcctgttgactgaacccagaggacacaagaatctagaagatgaagtccaattaggtcagccaccttggaagttgattttgaggaacaaacggaagatatatggcatatg

SEQ ID NO: 84853 - DNA, 1694 bp, Homo sapiens
agaccttccataaacagtagctgccaccactccaggtacgaggcagctacgtggcacaaacaaccaggcctcacttcacacagttatagtgaaccaggagtcatctcctccactatattatgcctttaactaatatatagctcattcgtagaatgaagaattggtaagaacagtggttaaagttatgtattctttattctactatcatcttttaaaatatgacccatattagaatatgatttaaaagaactacaaatggtatttaaccaggtacttatcttggtaatccttgagtaaaagatttcattcatttcaccctcagtattttgagataaaaagcaaaaaaatcttcctaaggattgaacaaccatcactgcttctaactaccttgcagcagtttatctacatgctaatcaaaaagacctgactctgaatttagtcagagaagagtcattaaattgttttgcccggcactcccaacaggcaagtgagttgtttcatgctatttcctctaccagagtagatgcaaaaaggaagaggaaaaagctaagtgtgttcaagtaagacttggcaattgtctttttaccaatcagaaaagcaattctctttctgatcggttagtgagaactaggaatttctgagcactaaaaagaatctcagtaaccactacaaaccaagatccaaaagtgctttatgaaatgtcacagtggcaccraagatgacttcaacataagtttggttttcaaaagttaacttcaagtcctttaacactaataggtcaagaagatgaactagaggacttaacttcttgctgttccaggatcctaaggagaaaaatggtggcctgccacagtcgtgcacaatgacattctagcaaggtcctacactttttctgggaccacacccacataaatcctttggattgttccaatttaaagtaaaatctcaattaaccacaacccaactaaccaggaccaggccactggacttccacaagcaatatggattaaaagaaaatacattcatatttaaaatcaacttctagggaacatccagtatttgcacactcaacacctctcctatgccattttcatctacagaacaagtacagtaagattactgtttcaagatgctaagaccctgatatggtttggctgtgtccccacccaaatctcatcttgaactgtagttcccataatccccccgtgttgcgggagggaccaggtggagataactgaatcatgggagcagtttcccccattctgtttttctgatagtgagttctcatgagatctgatggttttataagaggcttttccccctttggctcagcacttctccttcctgccattatgtgacaaagcacgtgtttgcttccccttcagccatgattgtaaatttcctgaggcctccccagccatgctgaactgtgagtcaattaaaaaacctctttcctttataaattacccagtctcgggaatgtctttattagcagtgtgagaacagactaatacagacccacatccaaaggaagttattttctttagctccactttcttaggtacaaaaaagcataaaggtagcccaatacattctaggaaagaattttaacagtgtatcttacatgtaacttttccattttgatgatagaactaaaagctagaagtcagtcttgacacctctcccatcccagc

SEQ ID NO: 84854 - DNA, 1724 bp, Homo sapiens
atgtttcacattgtttctaagtaaatcattttctagtggatgaagggcaggatgggaataatgcccacataatttataggagttcctgtcttccctggatccagaaatagtaaatcttcatgattttgctagctctgtgatgccttcgggaagatgtcttttcatattttgctcagttttgttagtttccgtgtgtgataggattggttcaaatcatcttgccctcacaaacataaaagtggaattcccttactgtagatatttgaagacagctctattttttattcaagttaaaaatccaaaacactctcaatcatttcttactttacctagcttttggatcctccaccatctggtcatctacctaggtttgatcatgtttttttttgttgttgttgttttttgttttttaaatccccagcacaatctttccttattaaaggagaaaagacacatttcttccttacattaaaatattcaaaattatgagtatttatcaagttaaattatatttaattaaattatatagataaatcattcacaactatatataagttaaaatatgcatatttcataattgaaaaaagaaaagcaatgcaagttctttgtaaaacattcgaacagtttagaaggatataaagagaaaagaaagagtctgtatctggctaggcatggtggcacatgcctgtaatctcagctactcagggggctgaggtaggaggatcacttgagcccaggagtctgaggctgcaatgagctatgaccgtgtcagtcacgacagagcaagaccctgtctccaaaaagaaaaaagtctatatctgcccaactccccacggcccccttcgtttcatcctctcagtgtggtctctctacctagaaataatttctgttaacattttttggttattattatagaaattatacacaatgtccagaattttttcacaaagaataaatctattcttttcacagctgcatagtattccatcatatggatatattataatttaatctcaccattcctttatcaatatcaatatacatttaccacattttcaattttgttccctattttcaacaatgcaataatgaacatccgaacatatcttttgtacatgagtttatgttgtagctgctccaaacactggagtcagagactttattatagtttagatctttaatgtacatgtgtttagatttataagatatatttctagaataagatttatgcttaaatgtggcacccagactgtaattaagatatggatgtcagagaagctgccatttaaacttggcctttgatcttcctgcatgggaggataaagtgagtcattccaaagcggatcttctttgttctttgtggttcataagtaaagatagggtaagcagacatctattgctcttggggaaatgtacaacaaagccttttaaaaagggcttgatgaaggctgctttttaaaatatgcagagatgaaagtttkcttaagcagaagtacattttcatggaaacccaggtggctactggaagagtatgcagtatctctcacacatctcttttggacttcctcataaatagtaccttttggatggttagaggcagctcttaggggagagaaggatgagtgaagaccgggaattctgggttattacccgattctacatagtcttgggaaaaagtgggttctgggttagcttgtggctatgtctggaactggaattgtcct

SEQ ID NO: 84855 - DNA, 676 bp, Homo sapiens
aaagacaaacactcttatttcatactgatgatttggcttgtttctatgtaggagtgttttcatggttgagttagttggctagtttctgttaaacaatagtaataagcactaacatttattgagtgttttctttatgccaggaactgttctaaacacttcacatgtatttaatcatcatccatataaactctattaaagaaatcctataaaacaggtactattatccccactttayagaggacagagaagcagagggataagtaatctgttcaagattacaaagtaagtggcagagacatgatttaaacccaggaggactgattctagaattcacactcttaacctttattattccgctttctcaaatgtcaatgagaaatctgaccagccaaaactgtcatatttggcatacagaaccaacatttataccttaaataaccccatgtaactgttcagaggatcacagaattttttcccccctagggacaagttagaactcagtattcttttcagttaaagttatatttcatattaagtggaaaagaatacttgtgcgtcaacctatacttgtacaaatccttcagatgactgcaagatctcttttctgtggaaggtattagacctaggcccatacctatgaagttgttgaaccttgtctgggagacaaataaaaatt

SEQ ID NO: 84856 - DNA, 624 bp, Homo sapiens
aaaatacaaaaattagtcgggtgcagtggcgcacgcctgcagtcccagctactcaggaggctgagacaggagaattgcttgaacctgggaagcagaggttgcagtgagccaagatcgtgccactgcactccagattgggcaatagagcaagactctgtcaaagaaaataaaagaagaagaaggatttgccagatgcagtggctcacacctgaaatcccagcactttgggagactaaggtgggcagatcacttgaggtcaggagttcaagaccagcctggccaacgtggcaaaaccttgtctctaccaagaatacaaaaatggcccagaatggtgacagctgcctgtaatcccagctactcrggaggctgagggaggagactcgcttgaacccagatggtgggaggcagtgagctaagaccacgccacggcactccagccttgacgacaaattgagactccgtctcaaaaaaaaaaaaaataaaataaaaataaaaataaactctcccccaccaaagaagggtgaggggattttcagtttctggaaaccttatgtgcattcaggcaggaaggctggctgaggggtctagggggcaacaacaggagtggcagaggcgggcttgctg

SEQ ID NO: 84857 - DNA, 1237 bp, Homo sapiens
tcaaatcctatgtggaatttatcacgagagcaaaaccagaagaggaagaaatgcttcatttctgaaaggagactaaatgatggggcttgtcaatgaggtgtaagttttgagacccacacgtgtgccaaaacaattattcattctaaaagcagatagtgccttcaggaagaaacaaaagtaataattaaattgtttttccctcaaactaaaaacaccaggcatgcttgctacagaatccaggttattagtgctctaaatgcagatacttcaaatataaattttgaatccatggtatttgcttatatacagcaggctgactttcagtgtgactacttagaaattctgtggatggtgcatttcagtcggaatttgttttcgtacagctgctcctccctttgctggattcaggacttcagctggatctgggagcaaagctaactcaaactgtgatttctgaatggccagcagacagattgcagcaccaagtttagtctccaaacaattctcactgggatgttatgatcgtttgcaggctttctgctccgtgacgcacggaggcttggcagccactcttaaagagaactgggaggctgcaggtttttaaccattgaaggtccccaataagtaatattccatgcagtggtaactttgaactttggggagaaaaagaatctaatggaaaatatagaggagttatatcttcatttgttttgctaccaaaaccctgatttctgggtttttcagtttttacatgggaatagtcagaatgaaaagccattccaaagactcttttccccatttttgttgatttcttcaggtgcctaggagttgcactgtttgagactttartctaattcattaccctagcttttctttaataagcagattaactggtcttcaaattagaatgacacacttctttattttaaaaaagccagcatctggattaagtaaggtttagattttcttttctttcttcatttggtaatagctatgatgagtttaccacaggctggttttgctttttttaatgtaatattttctgaactcattgataagtatacccccttcttgctggtcttgcagcctcaggaaacccaggctgttgttaacagtcctagaagcaccagtgtgtgtcctgccacttggcatggatcagtcgcatcataaacatttgtggtattcattaattcacaagttccaaaacaattttcaaatgtgtaagactcattttatt

SEQ ID NO: 84858 - DNA, 873 bp, Homo sapiens
ggggatgccagcctggccaacatggtaaaactctgtctctaccaaaaaatacaaaaaaaattagcctggcatggtgatgtgcctgtaatcccagctccctaggaggctgaggcccgggaatcacttgaacctgggaggcgaaggttgcagtaagctgagatcatgccactgcactccagcccaggtgacagartgagacaccatctcagaaacaaaaacaaaaacaaaacaaaacaaaaaaaccaatgcatcagaagctcaaatgactaattccagtccctgttacatcatgaattattttcttatccttaaagaaatcattaactaatatcgccttaaatccttggtatagtaggacaagtttgtcacaatgaaggatgaaaattaaattacaaaaatgtatacaaatatggaacataaaatattggtttttaaaagatgtatactaaacttaggaataaattaacaccagaaacagtaccaaaatcaaaaatgtaaatttacattagaaactttaaatgtatatactaattaaaaccatttttataacaaggtagaatataaagcaacaatgtatttatgaatatctagtcagctattcttagtctgtgatgtactaaaggacacagtttaataaagagcacagactataggaagcacagttcctaatgcatatttttaaaagctgaaacgtaagctagcttctgaaaacatctgtgatgtagtattaaaaggcaataagacttaaaactgactgtttaataccattcatcaatcacttctttatgcattcattgtaattttattctggaaagagatgacaaaaaaaatagactcttaaagctcttttagaatctcaacaaagtacattat

SEQ ID NO: 84859 - DNA, 2732 bp, Homo sapiens
tgggtgctggccaatacaaaggaaatgaaataggagaaaattttcatacacttgtgaaatgagagmcccagggttttagagattgaaagaacttctttctggattgagagtggaaatcaaggtaggagtgacaagaaaggaaacaaaaagaaagacaaatgaggaaaaatcttaaagaagaatgtgggccgggaacggtggctcacgcctgtaatcctagcactttgggaggccgagacgggcggatcacgaggtcaggagatcgagaccatcttggctaacatggtgaaaccccgtttctactaaaaatacaaaaaattagccgggcgtgttggcgggcgcctgtagtcccagctacttgggaggctgaggcaggagaatggcatgaacctgggaggcggagtttgcagtgagccgagatcgcgccactgcactccaaccggggagacagcgagactccgtctcaaaaaaaaaaaaaaaaaaaaaaaaaagaagaatgtgaattctccagaatttacaaattagcaatatatggtttcagagatgaaactacaataacaatttattttagtataagtatgtttcaaatattgcatagaatgtaattatacaacacattggcttattatttatctgacattcaaatttacctgcgggtcttgaatttgtatttgttaaatctggaaaccatggtcaagaggtagtcaagggaagatttatttaactaatgaactaagtggcacaaaagtgataatgaatatatattgtccctgtattccagtgccagttggaataacagaaagttcataatggttgagaaactttaatgatgataattttgtctaacatcatatttaaggttcataaattcctttgaacagtaataattaaaaatgaaggtttcattcaacaagaggtcaagcaaaactaatttttaaagaaaatatagagattatttatagacaatgtgaaaagactcattaattttgtctatgtggacacatgcatatgcaatatataagaaatgtatttatactatgccttttattatgaagataaaatattacacatttcaacatacaaaaacacatttcattgcttagtgaggtcgctgagtattaaaacattcatacacactttttaaaagctaataaatatatttatcttttaaaatgcacaataaacaattgttgattgtcaacatcttcgtaaaacaaatactgcaacatacaattacattttactactagctaactttagaagaaaacgaggcagactaaaagagaatacacaagttgcattttttgaaagagaatggtttatttaatcgttcaacaaatatttatcaaacacttcctgtgtcaaaggtactggagataaatgtatgaattagactagcatcatttctatctacatgagacttcctgcttattggaggagtcagagaaaattcacacacacaaatacacattaatacaattacaaatagtaacaagtgttctgaaagaaacacagagaacatataaaaggtggggcaggaggcatgtactttaaaaaaaaagagtggtcagaaaaggtctctgtgaggtcgggagaatgatacatggtagccgaaagatgtaagggagccagtcacagcagtagaagggcagcatccgcccatgcagagagagcagcatgcacaaaaatcctgaggccagagagaactcagtatgtccaagaaactgaaagaagggctctgagccttgagcattgtgattgaagggccaccagcattaggtgattacagcaaggtacaaatcaggacatggttaggagtgttaatttcatcctcaaatgcaatgaaaatcatttgcagattcttaagagaatgacatgatcaaattatgcattgttttcaatgatcactctggttgccgaatagagaatgtataggtagtgagtaagaatgggattggtggataatttggtgactgtactgatcatgatgagagaggacttgtgtttggaaccaggactttagcagcagagttggaaagtggcagatctgagcaaagaagagctaaggagaactcttgggtgtgtgactagggctctgtgaaaaactgtgggctgaagatacaaatttgagtgctgtcagcatatcgatgataataaaagccatagggatgggtagaatcacctggggagaaaatgcagaagaaagaaaggaggagtaccaaccaagtcggaggcctgaacagcgtgaacatttaaaggctaggccaggaaacagtaaagcaaagagaaggcagagctaatgggggaggaaataaatcccatgagatggtgacaccaaagtcaagatatccatgttacaagaaagacttagagttttgttttcagaatgaaagaaaaatcactggttagtttttttattgcttgtgctggccttccctctttagttatgtgaaaatagggcttacctttcctactttcaatcggatgacaagaaacatataagccagtgtgttgacatgccccaatcctttatctcagatctctgacaagctttaattagtttgctagttgagagcttcctgcgtaaattcaattctgtcacttcgtaggcattttcctgcttggtgtaatggattttttggtctccagttcagataatatttctacattgtccaaaatagttaaaagcaattttgttagctaaccgcccccaatctttcccttgaaatttt

SEQ ID NO: 84860 - DNA, 2732 bp, Homo sapiens
tgggtgctggccaatacaaaggaaatgaaataggagaaaattttcatacacttgtgaaatgagagacccagggttttagagattgaaagaacttctttctggattgagagtggaaatcaaggtaggagtgacaagaaaggaaacaaaaagaaagacaaatgaggaaaaatcttaaagaagaatgtgggccrggaacggtggctcacgcctgtaatcctagcactttgggaggccgagacgggcggatcacgaggtcaggagatcgagaccatcttggctaacatggtgaaaccccgtttctactaaaaatacaaaaaattagccgggcgtgttggcgggcgcctgtagtcccagctacttgggaggctgaggcaggagaatggcatgaacctgggaggcggagtttgcagtgagccgagatcgcgccactgcactccaaccggggagacagcgagactccgtctcaaaaaaaaaaaaaaaaaaaaaaaaaagaagaatgtgaattctccagaatttacaaattagcaatatatggtttcagagatgaaactacaataacaatttattttagtataagtatgtttcaaatattgcatagaatgtaattatacaacacattggcttattatttatctgacattcaaatttacctgcgggtcttgaatttgtatttgttaaatctggaaaccatggtcaagaggtagtcaagggaagatttatttaactaatgaactaagtggcacaaaagtgataatgaatatatattgtccctgtattccagtgccagttggaataacagaaagttcataatggttgagaaactttaatgatgataattttgtctaacatcatatttaaggttcataaattcctttgaacagtaataattaaaaatgaaggtttcattcaacaagaggtcaagcaaaactaatttttaaagaaaatatagagattatttatagacaatgtgaaaagactcattaattttgtctatgtggacacatgcatatgcaatatataagaaatgtatttatactatgccttttattatgaagataaaatattacacatttcaacatacaaaaacacatttcattgcttagtgaggtcgctgagtattaaaacattcatacacactttttaaaagctaataaatatatttatcttttaaaatgcacaataaacaattgttgattgtcaacatcttcgtaaaacaaatactgcaacatacaattacattttactactagctaactttagaagaaaacgaggcagactaaaagagaatacacaagttgcattttttgaaagagaatggtttatttaatcgttcaacaaatatttatcaaacacttcctgtgtcaaaggtactggagataaatgtatgaattagactagcatcatttctatctacatgagacttcctgcttattggaggagtcagagaaaattcacacacacaaatacacattaatacaattacaaatagtaacaagtgttctgaaagaaacacagagaacatataaaaggtggggcaggaggcatgtactttaaaaaaaaagagtggtcagaaaaggtctctgtgaggtcgggagaatgatacatggtagccgaaagatgtaagggagccagtcacagcagtagaagggcagcatccgcccatgcagagagagcagcatgcacaaaaatcctgaggccagagagaactcagtatgtccaagaaactgaaagaagggctctgagccttgagcattgtgattgaagggccaccagcattaggtgattacagcaaggtacaaatcaggacatggttaggagtgttaatttcatcctcaaatgcaatgaaaatcatttgcagattcttaagagaatgacatgatcaaattatgcattgttttcaatgatcactctggttgccgaatagagaatgtataggtagtgagtaagaatgggattggtggataatttggtgactgtactgatcatgatgagagaggacttgtgtttggaaccaggactttagcagcagagttggaaagtggcagatctgagcaaagaagagctaaggagaactcttgggtgtgtgactagggctctgtgaaaaactgtgggctgaagatacaaatttgagtgctgtcagcatatcgatgataataaaagccatagggatgggtagaatcacctggggagaaaatgcagaagaaagaaaggaggagtaccaaccaagtcggaggcctgaacagcgtgaacatttaaaggctaggccaggaaacagtaaagcaaagagaaggcagagctaatgggggaggaaataaatcccatgagatggtgacaccaaagtcaagatatccatgttacaagaaagacttagagttttgttttcagaatgaaagaaaaatcactggttagtttttttattgcttgtgctggccttccctctttagttatgtgaaaatagggcttacctttcctactttcaatcggatgacaagaaacatataagccagtgtgttgacatgccccaatcctttatctcagatctctgacaagctttaattagtttgctagttgagagcttcctgcgtaaattcaattctgtcacttcgtaggcattttcctgcttggtgtaatggattttttggtctccagttcagataatatttctacattgtccaaaatagttaaaagcaattttgttagctaaccgcccccaatctttcccttgaaatttt

SEQ ID NO: 84861 - DNA, 2732 bp, Homo sapiens
tgggtgctggccaatacaaaggaaatgaaataggagaaaattttcatacacttgtgaaatgagagacccagggttttagagattgaaagaacttctttctggattgagagtggaaatcaaggtaggagtgacaagaaaggaaacaaaaagaaagacaaatgaggaaaaatcttaaagaagaatgtgggccgggarcggtggctcacgcctgtaatcctagcactttgggaggccgagacgggcggatcacgaggtcaggagatcgagaccatcttggctaacatggtgaaaccccgtttctactaaaaatacaaaaaattagccgggcgtgttggcgggcgcctgtagtcccagctacttgggaggctgaggcaggagaatggcatgaacctgggaggcggagtttgcagtgagccgagatcgcgccactgcactccaaccggggagacagcgagactccgtctcaaaaaaaaaaaaaaaaaaaaaaaaaagaagaatgtgaattctccagaatttacaaattagcaatatatggtttcagagatgaaactacaataacaatttattttagtataagtatgtttcaaatattgcatagaatgtaattatacaacacattggcttattatttatctgacattcaaatttacctgcgggtcttgaatttgtatttgttaaatctggaaaccatggtcaagaggtagtcaagggaagatttatttaactaatgaactaagtggcacaaaagtgataatgaatatatattgtccctgtattccagtgccagttggaataacagaaagttcataatggttgagaaactttaatgatgataattttgtctaacatcatatttaaggttcataaattcctttgaacagtaataattaaaaatgaaggtttcattcaacaagaggtcaagcaaaactaatttttaaagaaaatatagagattatttatagacaatgtgaaaagactcattaattttgtctatgtggacacatgcatatgcaatatataagaaatgtatttatactatgccttttattatgaagataaaatattacacatttcaacatacaaaaacacatttcattgcttagtgaggtcgctgagtattaaaacattcatacacactttttaaaagctaataaatatatttatcttttaaaatgcacaataaacaattgttgattgtcaacatcttcgtaaaacaaatactgcaacatacaattacattttactactagctaactttagaagaaaacgaggcagactaaaagagaatacacaagttgcattttttgaaagagaatggtttatttaatcgttcaacaaatatttatcaaacacttcctgtgtcaaaggtactggagataaatgtatgaattagactagcatcatttctatctacatgagacttcctgcttattggaggagtcagagaaaattcacacacacaaatacacattaatacaattacaaatagtaacaagtgttctgaaagaaacacagagaacatataaaaggtggggcaggaggcatgtactttaaaaaaaaagagtggtcagaaaaggtctctgtgaggtcgggagaatgatacatggtagccgaaagatgtaagggagccagtcacagcagtagaagggcagcatccgcccatgcagagagagcagcatgcacaaaaatcctgaggccagagagaactcagtatgtccaagaaactgaaagaagggctctgagccttgagcattgtgattgaagggccaccagcattaggtgattacagcaaggtacaaatcaggacatggttaggagtgttaatttcatcctcaaatgcaatgaaaatcatttgcagattcttaagagaatgacatgatcaaattatgcattgttttcaatgatcactctggttgccgaatagagaatgtataggtagtgagtaagaatgggattggtggataatttggtgactgtactgatcatgatgagagaggacttgtgtttggaaccaggactttagcagcagagttggaaagtggcagatctgagcaaagaagagctaaggagaactcttgggtgtgtgactagggctctgtgaaaaactgtgggctgaagatacaaatttgagtgctgtcagcatatcgatgataataaaagccatagggatgggtagaatcacctggggagaaaatgcagaagaaagaaaggaggagtaccaaccaagtcggaggcctgaacagcgtgaacatttaaaggctaggccaggaaacagtaaagcaaagagaaggcagagctaatgggggaggaaataaatcccatgagatggtgacaccaaagtcaagatatccatgttacaagaaagacttagagttttgttttcagaatgaaagaaaaatcactggttagtttttttattgcttgtgctggccttccctctttagttatgtgaaaatagggcttacctttcctactttcaatcggatgacaagaaacatataagccagtgtgttgacatgccccaatcctttatctcagatctctgacaagctttaattagtttgctagttgagagcttcctgcgtaaattcaattctgtcacttcgtaggcattttcctgcttggtgtaatggattttttggtctccagttcagataatatttctacattgtccaaaatagttaaaagcaattttgttagctaaccgcccccaatctttcccttgaaatttt

SEQ ID NO: 84862 - DNA, 2732 bp, Homo sapiens
tgggtgctggccaatacaaaggaaatgaaataggagaaaattttcatacacttgtgaaatgagagacccagggttttagagattgaaagaacttctttctggattgagagtggaaatcaaggtaggagtgacaagaaaggaaacaaaaagaaagacaaatgaggaaaaatcttaaagaagaatgtgggccgggaacggtggctcacgcctgtaatcctagcactttgggaggccgagacgggcggatcacgaggtcaggagatcgagaccatcttggctaacatggtgaaaccccgtttctactaaaaatacaaaaaattagccgggcgtgttggcgggcgcctgtagtcccagctacttgggaggctgaggcaggagaatggcatgaacctgggaggcggagtttgcagtgagccgagatcgcgccactgcactccaaccggggagacagcgagactccgtctcaaaaaaaaaaaaaaaaaaaaaaaaaagaagaatgtgaattctccagaatttacaaattagcaatatatggtttcagagatgaaactacartaacaatttattttagtataagtatgtttcaaatattgcatagaatgtaattatacaacacattggcttattatttatctgacattcaaatttacctgcgggtcttgaatttgtatttgttaaatctggaaaccatggtcaagaggtagtcaagggaagatttatttaactaatgaactaagtggcacaaaagtgataatgaatatatattgtccctgtattccagtgccagttggaataacagaaagttcataatggttgagaaactttaatgatgataattttgtctaacatcatatttaaggttcataaattcctttgaacagtaataattaaaaatgaaggtttcattcaacaagaggtcaagcaaaactaatttttaaagaaaatatagagattatttatagacaatgtgaaaagactcattaattttgtctatgtggacacatgcatatgcaatatataagaaatgtatttatactatgccttttattatgaagataaaatattacacatttcaacatacaaaaacacatttcattgcttagtgaggtcgctgagtattaaaacattcatacacactttttaaaagctaataaatatatttatcttttaaaatgcacaataaacaattgttgattgtcaacatcttcgtaaaacaaatactgcaacatacaattacattttactactagctaactttagaagaaaacgaggcagactaaaagagaatacacaagttgcattttttgaaagagaatggtttatttaatcgttcaacaaatatttatcaaacacttcctgtgtcaaaggtactggagataaatgtatgaattagactagcatcatttctatctacatgagacttcctgcttattggaggagtcagagaaaattcacacacacaaatacacattaatacaattacaaatagtaacaagtgttctgaaagaaacacagagaacatataaaaggtggggcaggaggcatgtactttaaaaaaaaagagtggtcagaaaaggtctctgtgaggtcgggagaatgatacatggtagccgaaagatgtaagggagccagtcacagcagtagaagggcagcatccgcccatgcagagagagcagcatgcacaaaaatcctgaggccagagagaactcagtatgtccaagaaactgaaagaagggctctgagccttgagcattgtgattgaagggccaccagcattaggtgattacagcaaggtacaaatcaggacatggttaggagtgttaatttcatcctcaaatgcaatgaaaatcatttgcagattcttaagagaatgacatgatcaaattatgcattgttttcaatgatcactctggttgccgaatagagaatgtataggtagtgagtaagaatgggattggtggataatttggtgactgtactgatcatgatgagagaggacttgtgtttggaaccaggactttagcagcagagttggaaagtggcagatctgagcaaagaagagctaaggagaactcttgggtgtgtgactagggctctgtgaaaaactgtgggctgaagatacaaatttgagtgctgtcagcatatcgatgataataaaagccatagggatgggtagaatcacctggggagaaaatgcagaagaaagaaaggaggagtaccaaccaagtcggaggcctgaacagcgtgaacatttaaaggctaggccaggaaacagtaaagcaaagagaaggcagagctaatgggggaggaaataaatcccatgagatggtgacaccaaagtcaagatatccatgttacaagaaagacttagagttttgttttcagaatgaaagaaaaatcactggttagtttttttattgcttgtgctggccttccctctttagttatgtgaaaatagggcttacctttcctactttcaatcggatgacaagaaacatataagccagtgtgttgacatgccccaatcctttatctcagatctctgacaagctttaattagtttgctagttgagagcttcctgcgtaaattcaattctgtcacttcgtaggcattttcctgcttggtgtaatggattttttggtctccagttcagataatatttctacattgtccaaaatagttaaaagcaattttgttagctaaccgcccccaatctttcccttgaaatttt

SEQ ID NO: 84863 - DNA, 559 bp, Homo sapiens
tttcaatatgagcagaagaaaaacttaatcctcattttaatttaatcataaagctaaaatacagttgtttaacaccagaacttcaaaatacataggtttcttcttggcaagaagctgctgtgaaatgcacaaagtaaggctcaataaatgttgaatgaattattccatatatatctcaagagtttttagtaacaactgtaggcaatttaatgtgatagatctgtgaaagttaagaaaccctctttacaatccagttgggaaaatgaacaaattctattaactgtactgagataagcatgtatgtgtgtgcattttgagaagatacatgttggcrgggaagacatggagaaacatagtagagggaggacagtgaagggagggaagtcctggagatgaacatggtagggaaaagaatgatcaaatttatgtaaaaattaagacagagtgaaaattaggggataagaaggtaagccactcttcccactgaagattcctctgcagagtttaacaaaaggaatccacacaattatgtgtgatgagtttccaagtataaagaata

SEQ ID NO: 84864 - DNA, 588 bp, Homo sapiens
tgccagtgacatgaaaaaaggccacactggtattttactgtagggtcatcttcatggatagaatagccagccttccacttgaatgcactgccatattgtcaagctgcattccttaagcatcacttcttagaggcctcaagcttctcgggaatgtttgatgacttaaaggggaaatgaacaggttgcaattatgcttgtcaaggttcttcttgtgaacctttatttggacaattcacacaaaaaaagaaagcagctcattttctaattcaggatattatttctttttaaaactggtattagcatttctgaaattgcagaatgggccctggataattagtatggaagcattcaatactgcagagtgaaatgtcagtgagaggaagcagcacgggtcaggggacagaaacaatacagaatttrgaacttcccatttcttacttaggtgccaaatgattgaatctgagactcagcttcccattctgaaaagtgaagacaataatatacaccttaaagggatgctgtgaggcttaagtaagacagtttatttaaggaacttagctctgtagccaaaggaatgcttcaacaaat

SEQ ID NO: 84865 - DNA, 871 bp, Homo sapiens
ctaaagctttgaaaggccaaggcaataggactgcttgaggccagaagttcaagaccaatctgggcaacatagctagaccatgtctctacatgaaattaaaaaactagccagaaatggtgatgcacagctgtagtcccagctacttgggaggctgagacaagaggatcacttgatcctagaagttttaggctgcagtgagctatgatcacaccactacactccagcttgggtgacagagcaaggcttcatctaaaaaaaataaaataaaaacaattaaagcacaatagataaatgaatgaattattgaaggaattatctttatcttgcaggggaattaatggtttatcctaaatttgttttgttttgttttcattgtgacaagctaaagaaaagatttagatatctayaaaatgtttagttaccaatttttgtgccattattaggagatttattttgtttatgttatattagtagtatgaaaacttgatgaatgtataaacatattgattaaaaaggaaccaagcattccaggaaatacataaaagacaacaaccattaaaaattttctacagaattgcattttggaacaaccctttctcatgtagtatttcagttaacgggaaaagaaagatgaggtaaatattgaatgtgaaattaggggtcctatgtccaaatttcagatctgcagctaagcatcaatatttccaagcataagtcatttcattctgaggaacatgagatttattgaagatgaaagaccagtaaactggctttcagacatgtttcaaaataaacatggtgaatttcaaacttttccttcctttttccttccttcccttttcaataaaattatgtgaacacttgctataat

SEQ ID NO: 84866 - DNA, 703 bp, Homo sapiens
ttgcagtgagccgagatctgccactgcactccagcctgggcgacacagcaagactccgtctcaaaaaaaaaaaaaaaaaaaaaaagaaaaagaaatattataaaggaacctatgaacacaaaaagcatgtgggatacacttgcttcaattcatattttctgctgttgggtgatatagattatgtgaagaatgtatacagtttttaaataaaatgaacttaactctggttgcccagtttagaatagatgcagtgtttaagttaatttggaacagaacaggaaggtgaaagttcatccttcttctttgaagcttccagttgctgtccataggtattagagaatgaggccactaaaaagcctccctaaagaatcctttcagcctcctgtatgttctcaccattaataagggggttgacttttctattaattaatctattaatctaattattctattcatgtcttttagactccaaatggtaaagcatctgatcattacagtagattacttaatgatttcctgtgttttcaatgcacacttatgatcttyccccaaaccacactcactgatataatcaggttgagtttacctaattctcaataaatactgtttctatcatttatttaggccccagacttttgacaaagactattcaaacatgagctgaactgtatcaaaaataggaagcaccatcaccatatacaag

SEQ ID NO: 84867 - DNA, 557 bp, Homo sapiens
gtaggtagatgtaatggtctctatgtatttggaagttataggaaatggacccatgagaacaggttagatagccatgtgtagaaagaatgtatagaatagaaaggaagggggctcagggccaagtcttaaggcctccaacatttaatttgagtagagaagaataaatcagcaagggagactgaaagrgggcagccagggaggaataagggtagccaggcatgggaagtcaagaaaagagagtaaatcagcacggagagggaactcagcctgccaagtgctgatgaaggggcttgtttgataaagtctcaaactaacagttgctgaatttggcaacacaggggtcattgatggccttaaacaaggtatacattaatggctagattcagtggatgagactaagtgggaaattagaagaggatgaaacacttcccaagtcattctacgtatgcacttcacttcattaaaaaggaggtgtagtttaggaaggaaaaatcacctatttataacaccatgaaaaagattctggtaatctctcatcacataataggagactcaaa

SEQ ID NO: 84868 - DNA, 3488 bp, Homo sapiens
ccatgcaaaaatgaaaataaataagaaaaatccactcaaaattttcccattttattcaaaatccgtaggcaagaaaaaatatatttttcctccttctccttcttttcttttttaaggatgggtgtctcactatgttgcccaggctgaagtgcagtggctattcacaggcgtgatcattacacactacagccttgaactcctgtgtgctcaagtgatcctgctgcctcagtctctcgagaagctgggaccgcaaccatgcaccactacgcctgacctttcttcttcttttaaaacttagaataagatcaacattattagatcatttgacttttagcctgtacaaatctaatgattcctttcctctagggtttcctttcctctagggtttagaagaccatcataagaagtacatatctatctgatgaaatcccaggtttatcacaacatggctgtgtgacctcagacaaggcactttatctctcttagccttacctgcaaagtagaggcaaataccatggacttgtaagaatgtcgctcaaagtaactgcacagtgcctggaagtgaagagcttactcactgcccttactaatgtacgactctatttttactaaattgtgcatgtttaatgccacatgtgacaagcacaacagcaaatcggtcaaagtccctctctaatactcaccatgataaggctggtcacaaaggctttcctctgagcctcctttcttccagacatcagatgcatttgagattgctgtgccatgtccatccttcagagccagccggtaccgggcagctccgtacagagagtggtgctcacatttccaccacagcatggcactggagtcacagctgaacattctcagctcatttaccgatttggtaatatcgaggccaaggcacttttgggagtgcaaatgaaagagccgatgctgggacacccacttccataacttgtcctcagtttcatcacagtcgtctgctactatccagccatacactggcttgatgcacttgcccgtatttccatggacgatggtgaaggggtcattagctgagtcaaatggacagacagattgtagattatgtggttgaagcgccttgctccctgcctgctgaggagagtctgagcactactggactgttcccatcctcagtctgttcccactctttttaagctgcaggggactacaaaaggtgggacagtggtgagcagagaggcagtgcagtgtgtagggtcagaacacgggctctggagccagtccgcctgggtccatattttgctcctgctacttgttagccataggatcagggcaaatcatttaacctctgtgctccagttttcatatgatggttgtgagcatgaaaggagctaatccatgtaaagcgtgtagagtagcatgtatatttgttgttgctatttcatgaaagatttttcccttctcatttaataagacaaaagaagctctttagttttcatctcaatgaaaagtctagttgggaccataattctgccttgcttacatgttagctactacggcagggtaaattattacatgaaaagtcgatgcttaacacagcatgtgcactatatatatgttcctttcttcagatccaagtacatagtgaggcctctgtgctcctctgccttagggcaagttagtggggccactaaaaaggaaaacttaaggacaattttcttaaagaccacttccccctagatattttttggagacctaaattcattgaggtatctcagaggaaatggggaaatttctgagggagcagcagaacagtggggtacagaaacaagaagaaacagaggtctgggttctgagggtagaacctgtggccagctccactgtggcagtttcattgtcctcagtttcatcacagtcgtctgcaactatccagccatacactggcttgtggcaccctcaggaaggcgacagggcctggggaaagcctggggggattgacagtgtggatcacctaagaaggctgaaccccaaactccaggaactaccaaagtgatggctgatgagtcttgagccaccagatacaagatcctgtgggtttggacaatggaaaacccagaggtaaccagcgggatccaatgactaaagaagaatcctccctgaatgttcccctggcactttgcatgagctggcaaagaccccagtaaggacaattattgaagttctggcaacctggtggaatgggagctcagcatcaaatttaatttggatttctgaaaataaagtaatgcattgtttcttgcacacctgagtttgtggaataagattcacatctgttacaacaaactataatcagataatttggttagttattttacaaaggaaaattttaaacaattacagcacaaatcatgttgataagagtaaagctgaaatattttagacaagcttaagcaatcactgtcagtgaaccagagttcagcagaaagacctgtaaaattttggttcccaaaaggcactttcattttgataccagcttcacagtcactggtttcactaacaccagatgcttttcctagtaataattcaaaggctttcagagttaaaaattcccataccagggactggtgacttgaggggaattttaccatgtaaataataactataaaattaagtctcactgcagcttgaactttggaaggatttttttgttttgttttaaataacagaagcaacgacaagagaaacaacaacagcaacaacaatcctttaaagcttaaagttattttaaatctgaattttaaaagtattccacaggattgcagctaaggatgtttgccatagcagctttcatccttcacacttttttttttgagatggagtcttgctctgttgcccaggctggagtgcagtggcacaatctcagctaactgcaacctccgcctcccaggttcaagtgattctcatgccccagcctcccaagtagctgagattacaggtgcctgccaccacacccgggtaatttttgtatttttagtagagatggggtttcaccatgttggccaagctggtctcgaactcctgacctcaggtgatccacccacttcggcctcccaaaatgctgggattataggcatgagataccgtgcccagccacatccctcacactttcttctttgacattcctctgccattttctacttgatggacacaggctgggaagacagtcaacaaaaaaggaaaatgtgctataagattactactyacactttctctcatggccttctcccacaattcaatagctactcagatctctgatctacatcttttccaaagtattctctcttgcctctccaaaataaatcttgcattccaaagtatcaaaaattacagaagaaaaaagaagtctgctcctgcaggagacgtgcccatcacccttgttggaaacagcccctctcctgccctgtagtcttgctgctgtctttcccgggcattctgctttgtgtgct

SEQ ID NO: 84869 - DNA, 537 bp, Homo sapiens
atgaaagagatgagatccagaaacagacccatacaacttcaggtatgagattattagaaaccaaatacaaaataactcggatacatttaaggaaatgaaagagaatctttaaaatatgagtaggaaacaagtgactacaaagaaccacaaaccaaatttaaaacagaaatagactttctagaaatgaaataaatatagtatctaacactgaaaactaaaaaataaaatttaattagatctggctgaagagagaatcaatgaattgaaataattcatgactttatttaaaatgcatccttgagagacacagaggtagaaaatattttaaaaatattaacaaacatggaggagaggctgagtaattggaatgataaaaggaaatattagaatgaatggggagaggcagtatttgaagagataatgcttgaaaaatttccagagttgtgtaaaaccaaccatcttcaggttgcgggagtctaatgaaaaggataygaaactgaaggtgttccagatcacagaaggaatggtacactagta

SEQ ID NO: 84870 - DNA, 1364 bp, Homo sapiens
ggctttatttaagattggggaaagggactgaagacccagagcttgcaatcccagtcttcttacccttcttatttttaactgcctggcactaagcctgagcctctgatgccagacaggtacaccctgtggccagccctcaccaggctcttacttgctgagaccagaatgaatagctttccaagtcctgtggaccacagcacaacctttccatctttcaaattatatgtcaaaacttgcctcctctgggaacctcttcccgaatcactataagctcataaatcctaccaccatgcctatcacacacaccatgcatttgttgacatatcagggtgatatatagtagaaaaggcaccagaccagaagtcctaaaccaggcatttattccaactctgtcaataaataatcgtgatcttgggcaaatcactacatttcacaggccccagtttactcatctctaaggtttaacttattaatgggcgaggccacttttgggcctattattctatgaatgtaatgtaggattatacatgtgtacaatttaaatcgagcacattcacagctgcttcatgccatctacaagctacaacagttccagagatagagtctgtcttcattctgctctgcctgtgcagagatgctggggaacttttccccaagatttagtgaacccctatttgtaaaataaaccaagacaaaaccaccaaacatttttaaaaatcatatttcaaaaaatgtgtttctgacaagattgtaggaactaatttaaatgtaggatctaaagctgattttaaaaatagaaatgtcttcacttatatatacacacacatacatacacacacacatatatacacatacaaatcaaccgtatgcatcaatttgtttgatcttcacatgtctggcaagctgcaaaagctatccttattagtaatattgtatcattcaataataaaaactttatttgttggtttacaaacaatatgaaattataccatttaacaccctctgagtgtctacctccttcacttagtgtatgaacaatattgactggggcctcaatattgcaggaggacaggtccccagatgacccttgctgacccagctcttcctcttyttcttggcaattctcaggcagagtgtaccaagagtgcaacgtcctgagataaggaggaactgtccttatccctcctagaataggatgtcttgtaatacttttgctcagtgattcaggtggcacctgggatataaaaccccgagagaagcgctttggggagccctcagctgtcatgcaaagtggggcatgtgcagacaagattccatcttcctgggggtgctttcctgagcttgggggaatggctcaccatgga

SEQ ID NO: 84871 - DNA, 397 bp, Homo sapiens
gcttagaactggaaaaagacctgctagaggcagcctgctgctacrgaagccagcatttgtctccgtttctggctgttgacctaaagggacattaaatgaatagtgacaacattaggcaggtccaagaaagtctatctctgggaaagagaaaatccatcacccaaactttcatccttgtcatctgtggtcattttgtcattatctatctatctatctatctatctatctatctatctatctatctatctatattttttgagtcagaatcttgctctattgcccaggctggagtgcagtggcacaatctcttctcactgcaaactccacctcccgggttctagcaattctcctgcctcagcctccctagtagctgggagtacaggcaccccccacgccc

SEQ ID NO: 84872 - DNA, 700 bp, Homo sapiens
ccattcattcatttattttttcttctcctatctgctcccataacattctgtcttacaactctggatcactgcagcctattccatgagcatcttctttgcaccacagccaggcactgtgtcagtattaagaatggaactagacaacactcagtccagaaaggaaggcagacacagatatgagtcactacataacaaaggcaagggcaggtgctagaggcacccatggtgggtacctttgtgaagcattagttacagcatgtcctaatgrtgtggtaataactaaaggccatcaaatcaggctactgcaaataaaaacctatttatttatgtccacaagggcaggttcattttcaaagggctgtaaccaaaaaatagaatgagaatcagaaaatgaagtcagagtaaaaacacacattctgggcaccttgtgttccaaatctgccctcatttcatcacataggattcccaaatctcccagcaattgtccccagttcccaaggtgtctacaggctcacactccaggctgcgcaccactcctttgggaaaactccctgcttcctaagaagctggctgtggactgcaggtttcagctccttggactccatagccttttccagcaagaagctaggcagctctgcctttccctttccccgcctccctggcacgctccatcctgacacagagagtccagctcctccta

SEQ ID NO: 84873 - DNA, 700 bp, Homo sapiens
ccattcattcatttattttttcttctcctatctgctcccataacattctgtcttacaactctggatcactgcagcctattccatgagcatcttctttgcaccacagccaggcactgtgtcagtattaagaatggaactagacaacactcagtccagaaaggaaggcagacacagatatgagtcactacataacaaaggcaagggcaggtgctagaggcacccatggtgggtacctttgtgaagcattagttacagcatgtcctaatgatgtggtaataactaaaggccatcaaatcaggctactgcaaataaaaacctatttatttatgtccacaagggcaggttcattttcaaagggctgtaaccaaaaaatagaatgagaatcagaaaatgaagtcagagtaaaaacacacattctgggcaccttgtgttccaaatctgccctcatttcatcacataggattcccaaatctcccagcaattgtccccagttcccaaggtgtctacaggctcacactccaggctgckcaccactcctttgggaaaactccctgcttcctaagaagctggctgtggactgcaggtttcagctccttggactccatagccttttccagcaagaagctaggcagctctgcctttccctttccccgcctccctggcacgctccatcctgacacagagagtccagctcctccta

SEQ ID NO: 84874 - DNA, 1015 bp, Homo sapiens
tcctctcctctcccctcccctcccctcccctcttctcttctcctttttttcttctcttctctgttactttccttcccttccctccagtgcactataaaggatgcattaactacaccatgactgctctgaaaatgtatcctgggatccttggttgacatttgcttttagtacaggcagaggtcacttggagcaaagtttacaagccttttcttgattacattgtgcttaaagtgttaaccctgttagcagtcacagcacagatttcctcaatgagactcttgtgcgcctgacaatgtaactatttatttgcagagtcactaccattgacatttgtgctgctcaatgcaaagtgttaccagtgctttctttatgtcactgtttctcttcagtaaccaagaaaagcaaaacaaagtacaaataactgcttattcagaaagaaatctcagattgttccttaaacctgctccaggcagcggatacagacttttgagtgatctggaaaatatgaaaagcacttggctggkatacaaaacccgaactgatctgtggtgatggcaaaagcagaaataggagctcagtaataaaaataaatttctatatggctgatcatggtccggctggcttgaggagggaggagcaggtcttggaagttaggctattatctgagcagtcattgctttggtggtgtgtgtgggggttggggaatagggctttgcttcataggccatccctcaattgttgtctgattgattgaaaaaggcaaatggtgccgccctgttcctgccaagtgttttcttctgcgtctgctctccctgggtgcctggagcgttgatctctgtggctctctcacctgctgctttgttccaacaaagctggcgtcttacagccgccgccactcactcttccaagccgttgtcctggctgtcctgactgtgtaaaccctgccatccccatctgcccagccacctgcctccttgtctctagatatcctcccgcgaccccaccacttctggga

SEQ ID NO: 84875 - DNA, 371 bp, Homo sapiens
tggtgagagcccacagagtgagaggtagaggaggaggtgaaggcagatagatcagggggggtttggcagtaggcaagattgtctaagtcctcatagtgamatgggaaagtcatggaggagttctagagggccactgagaatgctctattagcacagactgcgggaaggcaagaacggaagaagggaggaccagttagggaacttccttaaaccaggtgggaaataagatgggttagactaggctagtagctaaagaggtgtgacagtatttggaatgtgagtatattctgaaggtggagccaataggattttccgtccaattgtatcttgggtgtgagaaaggaggcaaggactccaaggttcttgacata

SEQ ID NO: 84876 - DNA, 371 bp, Homo sapiens
tggtgagagcccacagagtgagaggtagaggaggaggtgaaggcagatagatcagggggggtttggcagtaggcaagattgtctaagtcctcatagtgaaatgggaaagtcatggaggagttctagagggccactgagaatgctctattagcacagactgcgggaaggcaagaacggaagaaggkaggaccagttagggaacttccttaaaccaggtgggaaataagatgggttagactaggctagtagctaaagaggtgtgacagtatttggaatgtgagtatattctgaaggtggagccaataggattttccgtccaattgtatcttgggtgtgagaaaggaggcaaggactccaaggttcttgacata

SEQ ID NO: 84877 - DNA, 371 bp, Homo sapiens
tggtgagagcccacagagtgagaggtagaggaggaggtgaaggcagatagatcagggggggtttggcagtaggcaagattgtctaagtcctcatagtgaaatgggaaagtcatggaggagttctagagggccactgagaatgctctattagcacagactgcgggaaggcaagaacggaagaagggaggaccagttagggaacttccttaaaccaggtgggaaataagatgggttagactaggctagtagctaaagaggtgtkacagtatttggaatgtgagtatattctgaaggtggagccaataggattttccgtccaattgtatcttgggtgtgagaaaggaggcaaggactccaaggttcttgacata

SEQ ID NO: 84878 - DNA, 843 bp, Homo sapiens
cttgagcccaggaggttgaggctgcagtgaagtacgactttgccactgtattccaggctgagcaacagagcaatgagactgtctctaaaaaacaccaaccagccaaaaaaccaaataatcaggttagcactcaaggtcttccaagaggctcccaattacttttccagcttaatttcccatcactccctatcaactctcaccttttctatgaactccaaatgaagataatcatttacatctgtgttcccaccaacactaaatatcggttacagcacttaccataatctcccttacacaataattacctgtgtacactctaccaagtcatgagcttcaccaaaccatttcttagccatctttataggaccagcacaaagagtgtcttatacctaataagtgttcaactgcttatttaataaatatawtgttattaaaacaatactaaaaggagagccactaaagcatggttatactattaacattttccttaacacccctcctacatgtcttaggaccccagtgtttctgcttactccaaatggtgtatggattaggagctttgtacagatctaggtaattttttgcatgaaaaatgttatcaaattaaaaaaaaaaaaagatgtgaaaaaacatgctggcaaaatcaggcacaatctttgcagatctgcagttttccaaaagggaacatatacctttgttctatttatgcaaaccagtctaaagctagtttgtactggaggaaattaagctatgtccataatagactgttcacattattttaaaaaaactacaatattacatttatatttcataaagcaatactgtacttctataacacaatat

SEQ ID NO: 84879 - DNA, 772 bp, Homo sapiens
aaaaataatggaatcttttgataaacactgacagccaatcatataaaaaacaaaagtgaaatttaaacttgtcagttttatacaaatataatgtagtattttctaataatcaaaaaaaaaaacttttgcctaagagccttactataatgttctcaggggctatgagattgcttgtggctgaaaatatcaattcctctgggtacttcagcaattactccttacagaaccaaagtcaaatacctatatataaattatacatatatatgaattagacacacatatactgtatacacacaagcacacacacaattttaaaattgtgccacatgaaccatgttgcaccaagatttcaaagcactgagtcctatgttcaaaaattctttttgctgagtctctatcatgtgatagacaatcttctaagtataagaatataaatgatacctgccaccaagtgacaatatttgggtgtgataattacaacttagtatcatgcttccaagagaattatatacagcatttaatactgtattaaatatacagtatttatacagccaggcaccaactgtagtctggtagatctggttagaatattcccttwgtcttgagaaataacctactaaggatcattacttttcatacacaagaacgcattaaactgctgggctcatgcagagatgtcaaaatactttaatatgactgaagcactgattatggagagaaaatggcaaacaactcagctggagaagagacagatgaaatagttatggaggat

SEQ ID NO: 84880 - DNA, 601 bp, Homo sapiens
gatgaaggttctcagggcagcactgctgtctgcacygtgcacatgcgtctcagccccacagacgcaagaggaggccctgctaaactgggggtgcactaaccactcattttattacataaaggagtgtgagggccttttgtccgatgggctgtgacatgttccaccttgcttttaagcaaacatgttcaaagagaaaaagcacacttttcccctggtgtgtgttttggggcgggtgtgaattttaattaaagtggataggccatcaggatcaagtcacaccatgttgcactacacgggaaaagatgggtataacaaagtgatgtccaaggaacaaagatgacaccatgtagaataaaaatggatctatgcagagcaagacaatgtctgtgcagagcactgtgtgtccaacaacgaggatattcctatcagagcaaagctgtgtccctgtagagaaaggatatgttcatgcagatcaaggctgtgcccgtggagatcaaggctggacccgtggagatcaaggctgggcccacatagatcaaggctgggcccatggagatcaaggctgggcccgtggagatcaaggctgggcccgtggagatca

SEQ ID NO: 84881 - DNA, 601 bp, Homo sapiens
gatgaaggttctcagggcagcactgctgtctgcaccgtgcacatgcgtctcagccccacagacgcaagaggaggccctgctaaactgggggtgcactaaccactcattttattacataaaggagtgtgagrgccttttgtccgatgggctgtgacatgttccaccttgcttttaagcaaacatgttcaaagagaaaaagcacacttttcccctggtgtgtgttttggggcgggtgtgaattttaattaaagtggataggccatcaggatcaagtcacaccatgttgcactacacgggaaaagatgggtataacaaagtgatgtccaaggaacaaagatgacaccatgtagaataaaaatggatctatgcagagcaagacaatgtctgtgcagagcactgtgtgtccaacaacgaggatattcctatcagagcaaagctgtgtccctgtagagaaaggatatgttcatgcagatcaaggctgtgcccgtggagatcaaggctggacccgtggagatcaaggctgggcccacatagatcaaggctgggcccatggagatcaaggctgggcccgtggagatcaaggctgggcccgtggagatca

SEQ ID NO: 84882 - DNA, 1520 bp, Homo sapiens
tttcagagaataacttgccctatttaaaaatatcgttacaataagatcaagaggaactttttctgaaaagtagttatctgacgtttgcatatcataaaaagtatgtcattagtttaaatttactgtggagagagatttagatatgctttttttgtctctatattctgatacaaaattattaaacttccaagactcttaaaaatctatgcacattatggtcaaatgatcacgaaattctttattgtgtttttaatgtattaaatgacctaaaataataatactgggaaaatgcttctttgatacaaaactagaaaataggactataataaatgtatttgctggaaaccgtttttcaaattaacaaatctattttctatgatatgctgccaagagtcatgttgcttctcagggcccactgcaaaggacaggccattatttaagccatttcttaattcagcaggaattaaagaacaagaaaccagacaatgraatatttgcagaattgttttttgaggtcatgtataatgcccactaatctaaagagactcctattttgaaaaaagttggcaaaggctaaagatggctcaaataacttcaagtatttgaagtagtgaaagaaaatatcggaagacagtagctgaaaatggcagtgaatgccgtgtgcacctgttattttgatcgtgacccacgatttctctaccgtgccaccatttccactggccaatctcgttctgttgcccaggctagagtgcagtgacaccatctcggctcactgcaacctccacctcccaagttcaagtgattctcctgcctcagcctcccaagtagctgggattacaggcacatgccaccatgcccagctaatttttgtatttttagtagagacggggtttcatcatgttggccaggctagtctcaaactcctgacctcaagttccctgcccacctcagcctcccaaagtgctgggattacaagcttgagccaccacacctggcacccccaccctttctgatattcttgtgaccagttcaccaaaggagatattaatttttaaaatgcacttgtttttccgttgagatcctgcccagtgaatgttttcataatgagagaaatccctacaccacgtctttagccacctgtgcattgcgctttcagggtggaggcagtgtggaagaaaagaaacacctccctccgggccggctttgaatccggatcaaatgtgggcaagtggtcaaatagctctgagcaacagtcaaaatgaaaactgaaaatctagttaaaacgtctgaaaccacttcccccttgaattctgagcttctggccctccacacccagaggcctccacacacagcaggcctgtgccctgagcacgaaaagccactcatctggggaggcccaggcaggaggagcacttggacccaggtgtttgagaccagcctgggcaacagtgagaccttgtctcttaaaaaaaaagagagagagagagaaagaaaataaaggaaaaaaaaagcctctcacc

SEQ ID NO: 84883 - DNA, 500 bp, Homo sapiens
agggtctgcacctccagagcccatgaccgacgctgcgggtctccacctcccgagcccatgaccgacaccgcgggtctgcacctcccgagcctatgactgacacagtgggtctccacctcccgagcccatgaccgacaccgcgggtctgcacctcccgagcctatgactgacaccgtgggtctccacctcccaggcccatgaccaacaccgtgggtctcyacctcctgagcccatgactgaccccgcagttctccacctcccaacccatgtccaggacatactgggggggcgggtgcattgcatgtcctcctgctgtttgtgggagacctcggtcacagcttttcatcagcatgttgactgcctgggtgtcacaaagggtgacttggggacgtggcccacatgcagcgcactctgccatgcctcactccagtgccaggtgctggcagcacacagagcaggcccagcagggtgggctgcgctcagttccaatgcatgggctg

SEQ ID NO: 84884 - DNA, 795 bp, Homo sapiens
tttggtgtaggaacaagaatattgctttttacacccagctccaaaactttagggtaattattaataattagaattgagtggaaaacccgtaccaagtgaggtattcaatgtcgtttgtagttaacaatggcttccttctggacccttgggagtcagaacaagagagccacacagcctttttgttttaatttctggcagcagaagggatcaagatttagaaaaaccatctagagggaaccacatgcttgggcattactgaaaattaaaaaagctcaacatcaacaacaacaaaagtcatttgtaaaatgcatagaatttgcggtttttaaatatatttggactctgttcaaatggaacgctcacaaaaggtgctcacagcaagctgggctttttgtttttgaattttttagtatatgctaacaaaactccatgctgaagaatattcccaggcaaaagtctccatggctgtgaagcctgagggccactgatgaccactgggcaccaggagatgacagccaggcaccaggarctgaccgtgggtgcaaggtgatgaccactgggtaccaggtaatgacctctggacactaagtgatgacttcagggcaccaggtaatgaccactggacactaagtgatgactgcagggcaccacgtaatgaccactggacaccaggtaatgaccgctggacatcaggtaatgacttctggacaccaagtgatgatggctgggcaccaggtaatgacctctggacactaagtgatgactgctggacaccaggtaatgaccactgggtac

SEQ ID NO: 84885 - DNA, 1315 bp, Homo sapiens
aaccccaaaaggggcctccatgggagagtgcagaaggggctcccagggcggggtgcatggcgggttttaggttgtctatctctccagcagtcacctccctggaaagcacgtcttgggaatcattaattcattcatcagagtctttgccagcttctccttaacaagctgagtgtcacggcaatgacacacatcacccctgctcgctgcacatggaccgtcggccgatgggcctggcagctccaagggctgtgaggaaaattaaccagggagcaatggccaggcgcagagcrgaagccacaggcacaacgacctccttgtcctctgggttgatatcctcggattcaatagccctagattgaaagcccagatacgaaggacccaccacgtcacagcattttatatcagggacttgagcatccgaggctttgggtatccgagggaggtcttggggccaatcccgggtgaatacagaggccacctgtataacctcagggcttcagggcaggaggccccaccccacagaagtctttctccttccagcctctccctccaccaaagggtccacactcacctttcctcccaggatactcgtgccagaaaccccatgcagaccccagtgaagctgctccgaggaagtgcccaggatggatccacctggcatgaaactcaaaataagcccaagaccaagatgagaattgggaaggttgaagaaagcagcccagggggacgcagcttgtgggtggaaggagatggagagccaggcactctggggccatggggcatccagacatgctctgcctacacgtcccaccgagctggggagtgtcatgagcttggcgggaccaggtgggatctgggaggggccacagggcccgctgttcccggtgtggccatctgctccatgacacggagaggacactgacctgaagctgcgtcgccagaaggcccttcaggtgtgtccagctgagccgcagccactgcctctgttggggcagccctcctgccagctctgctgagcaaactgcagtcatggtctcacagacccaccccatgagctgaagcctcggcaggggccatcccaacagtgccctgggtttctacaaattgcagtacaggcccccggggccaggcctcctgactctccccaggcacagcactcacttggtggctctttggaccctttcgagacagcacgggcaggggtctcctcctccacgctggccccaggactccgcctgtgctgtcctcatgccaatggcagccaggggcagagggaggctgcagggggctggccgccggcctgacgaggctaccg

SEQ ID NO: 84886 - DNA, 1315 bp, Homo sapiens
aaccccaaaaggggcctccatgggagagtgcagaaggggctcccagggcggggtgcatggcgggttttaggttgtctatctctccagcagtcacctccctggaaagcacgtcttgggaatcattaattcattcatcagagtctttgccagcttctccttaacaagctgagtgtcacggcaatgacacacatcacccctgctcgctgcacatggaccgtcggccgatgggcctggcagctccaagggctgtgaggaaaattaaccagggagcaatggccaggcgcagagcggaagccacaggcacaacgacctccttgtcctctgggttgatatcctcggattcaatagccctagattgaaagcccagatacgaaggacccaccacgtcacagcattttatatcagggacttgagcatccgaggctttgggtatccgagggaggtcttggggccaatcccgggtgaatacagaggccacctgtataacctcagggcttcagggcaggaggccccaccccacagaagtctttctccttccagcctctccctccaccaaagggtccacactcacctttcctcccaggatactcgtgccagaaaccccatgcagaccccagtgaagctgctccgaggaagtgcccaggatggatccacctggcatgaaactcaaaataagcccaagaccaagatgagaattgggaaggttgaagaaagcagcccagggggacgcagcttgtgggtggaaggagatggagagccaggcactctggggccrtggggcatccagacatgctctgcctacacgtcccaccgagctggggagtgtcatgagcttggcgggaccaggtgggatctgggaggggccacagggcccgctgttcccggtgtggccatctgctccatgacacggagaggacactgacctgaagctgcgtcgccagaaggcccttcaggtgtgtccagctgagccgcagccactgcctctgttggggcagccctcctgccagctctgctgagcaaactgcagtcatggtctcacagacccaccccatgagctgaagcctcggcaggggccatcccaacagtgccctgggtttctacaaattgcagtacaggcccccggggccaggcctcctgactctccccaggcacagcactcacttggtggctctttggaccctttcgagacagcacgggcaggggtctcctcctccacgctggccccaggactccgcctgtgctgtcctcatgccaatggcagccaggggcagagggaggctgcagggggctggccgccggcctgacgaggctaccg

SEQ ID NO: 84887 - DNA, 1315 bp, Homo sapiens
aaccccaaaaggggcctccatgggagagtgcagaaggggctcccagggcggggtgcatggcgggttttaggttgtctatctctccagcagtcacctccctggaaagcacgtcttgggaatcattaattcattcatcagagtctttgccagcttctccttaacaagctgagtgtcacggcaatgacacacatcacccctgctcgctgcacatggaccgtcggccgatgggcctggcagctccaagggctgtgaggaaaattaaccagggagcaatggccaggcgcagagcggaagccacaggcacaacgacctccttgtcctctgggttgatatcctcggattcaatagccctagattgaaagcccagatacgaaggacccaccacgtcacagcattttatatcagggacttgagcatccgaggctttgggtatccgagggaggtcttggggccaatcccgggtgaatacagaggccacctgtataacctcagggcttcagggcaggaggccccaccccacagaagtctttctccttccagcctctccctccaccaaagggtccacactcacctttcctcccaggatactcgtgccagaaaccccatgcagaccccagtgaagctgctccgaggaagtgcccaggatggatccacctggcatgaaactcaaaataagcccaagaccaagatgagaattgggaaggttgaagaaagcagcccagggggacgcagcttgtgggtggaaggagatggagagccaggcactctggggccatggggcatccagacrtgctctgcctacacgtcccaccgagctggggagtgtcatgagcttggcgggaccaggtgggatctgggaggggccacagggcccgctgttcccggtgtggccatctgctccatgacacggagaggacactgacctgaagctgcgtcgccagaaggcccttcaggtgtgtccagctgagccgcagccactgcctctgttggggcagccctcctgccagctctgctgagcaaactgcagtcatggtctcacagacccaccccatgagctgaagcctcggcaggggccatcccaacagtgccctgggtttctacaaattgcagtacaggcccccggggccaggcctcctgactctccccaggcacagcactcacttggtggctctttggaccctttcgagacagcacgggcaggggtctcctcctccacgctggccccaggactccgcctgtgctgtcctcatgccaatggcagccaggggcagagggaggctgcagggggctggccgccggcctgacgaggctaccg

SEQ ID NO: 84888 - DNA, 1315 bp, Homo sapiens
aaccccaaaaggggcctccatgggagagtgcagaaggggctcccagggcggggtgcatggcgggttttaggttgtctatctctccagcagtcacctccctggaaagcacgtcttgggaatcattaattcattcatcagagtctttgccagcttctccttaacaagctgagtgtcacggcaatgacacacatcacccctgctcgctgcacatggaccgtcggccgatgggcctggcagctccaagggctgtgaggaaaattaaccagggagcaatggccaggcgcagagcggaagccacaggcacaacgacctccttgtcctctgggttgatatcctcggattcaatagccctagattgaaagcccagatacgaaggacccaccacgtcacagcattttatatcagggacttgagcatccgaggctttgggtatccgagggaggtcttggggccaatcccgggtgaatacagaggccacctgtataacctcagggcttcagggcaggaggccccaccccacagaagtctttctccttccagcctctccctccaccaaagggtccacactcacctttcctcccaggatactcgtgccagaaaccccatgcagaccccagtgaagctgctccgaggaagtgcccaggatggatccacctggcatgaaactcaaaataagcccaagaccaagatgagaattgggaaggttgaagaaagcagcccagggggacgcagcttgtgggtggaaggagatggagagccaggcactctggggccatggggcatccagacatgctctgcctacacgtcccaccgagctggggagtgtcatgagcttggcgggaccaggtgggatctgggaggggccacagggcccgctgttcccggtgtggccatctgctccatgacacggagaggacactgacctgaagctgcgtcgccagaaggcccttcrggtgtgtccagctgagccgcagccactgcctctgttggggcagccctcctgccagctctgctgagcaaactgcagtcatggtctcacagacccaccccatgagctgaagcctcggcaggggccatcccaacagtgccctgggtttctacaaattgcagtacaggcccccggggccaggcctcctgactctccccaggcacagcactcacttggtggctctttggaccctttcgagacagcacgggcaggggtctcctcctccacgctggccccaggactccgcctgtgctgtcctcatgccaatggcagccaggggcagagggaggctgcagggggctggccgccggcctgacgaggctaccg

SEQ ID NO: 84889 - DNA, 707 bp, Homo sapiens
tttgtgcatataaaagaagtactattgaagatgagcattcatttatttacttaacaaatatgtataaaaggtatgctctatgccaggcaataatcaaaaggcaaaacagacaaaactctccatgactgtagagcttacctcctaattgagagtaacaggtcacatacactgtttattaaaaggggataagtgtttaagaagaaaaggaaacagacaaggggaataggaacacaggttgaagctaaggcatgtgtgggagagtgcaatgttgccgctgatatttgggaaagactttcaaaagatcttttaaaattctacaaaagtattctgacatgaatattcttgttacagccttccttaagcctgccttcttcatcaccttcagatattgccacaaagtcactttctttgtattcttttcagrtttcttccttccttttaatgtttgttcaaatttcaccttttcaatgactcctatacttaaaattttaattctgcactcctacatttaactccactgtctacatattttcccttgagtttattttgtgcagttatcaccatctcttgaactatatattttacttcctacttagtgtattctctatctttcccaaacagaatgtaaattccatgaaagtagaaatttctttttttccctgatgctatatttggaccccttaaatagcatttagaaggtgctgaaa

SEQ ID NO: 84890 - DNA, 1183 bp, Homo sapiens
tgtagtagaggctgtcatttatcaattaccctctgtagtagacagaactaggttttaggagtcataatttttatcatttgttttgtttttcacaatacaaatgtgcaaatgtcaaactcctagaaaaatacattattcttcatatatattatatcaatgatataaaaactgagaattattagacctatgtgcaatgtagaaaagcattgaaactcatttcaaacatagcataaatgtattcaaagcattattgaggaagaatgaataatatgggtttgaaaatgtggcaaattatcccaaaaatatgtagctacttacccagctggcatcatggccacacaaacaaaacactgttcccacattgtttcacttactttccatggcaagtctcaagggcagtcatatcttcattcttatattaaagctgaatttcagaaaagccaagcaaattacccaagggcaaataggtaactgaaataaaaartataattcatttctgtctcatttcaatgttgataatttgctcattacccatgcctcaataccagtcaaaactcaatatttctgtatctttggtgtcattttaaaatacttccagtatgtatgtataatttagtaggaaagtttgctgaattatacctatatatatgtgtgtgtgtgcatacgtcttaagatattgacagtcccaatagaataataattatttagttcatttttcataaaacattaaaatcactgccaaagtcactgatgtaaacactttgtgacataataaccactctgttccttagatgtagcagttaatgcgtgcgtattattgatcattatctagttgtaacagtaaaagtaattgtacacttgagtaattcttgtaattattattagatgtattccatgtctacacttgtaaatgtggaaagcatcaatagttcaaaagttttaatcaagggcagagagattatatctgcggctaaccctcatttccaaggcctccatctctttatattgtatctttatggattaaaagttaatgcagtttctcagtgcctgcatcaccaacaaatcacatacagtgagttgaagctggatttgtgggaacaattactgttggttgtatttattatataaatacatttgatgattcccaacagttctggagagacatggtcttaataattcagga

SEQ ID NO: 84891 - DNA, 1183 bp, Homo sapiens
tgtagtagaggctgtcatttatcaattaccctctgtagtagacagaactaggttttaggagtcataatttttatcatttgttttgtttttcacaatacaaatgtgcaaatgtcaaactcctagaaaaatacattattcttcatatatattatatcaatgatataaaaactgagaattattagacctatgtgcaatgtagaaaagcattgaaactcatttcaaacatagcataaatgtattcaaagcattattgaggaagaatgaataatatgggtttgaaaatgtggcaaattatcccaaaaatatgtagctacttacccagctggcatcatggccacacaaacaaaacactgttcccacattgtttcacttactttccatggcaagtctcaagggcagtcatatcttcattcttatattaaagctgaatttcagaaaagccaagcaaattacccaagggcaaataggtaactgaaataaaaaatataattcatttctgtctcatttcaatgttgataatttgctcattacccatgcctcaataccagtcaaaactcaatatttctgtatctttggtgtcattttaaaatacttccagtatgtatgtataatttagtaggaaagtttgctgaattatacctatatatatgtgtgtgtgtgcatacgtcttaagatattgacagtcccaatagaataataattatttagttcatttttcataaaacattaaaatcactgccaaagtcactgatgtaaacactttgtgacataataaccactctgttccttagatgtagcagttaatgcgtgcgtattattgatcattatctagttgtaacagtaaaagtaattgtacacttgagtaattcttgtaattattattagatgtattccatgtctacacttgtaaatgtggaaagcatcaatagttcaaaagttttaatcaagggcagagagattatatctgcggctaaccctcatttccaaggcctccatctctttatattgtatctttatggattaaaagttaatgcagtttctcagtgcctgcatcaccaacaaatcacatacagtgagttgaagctggatttgtgggaacaattactgttggttgtatttattatataaatacatttgatgattcccaacagttctggagagacatggtcktaataattcagga

SEQ ID NO: 84892 - DNA, 1380 bp, Homo sapiens
ccctcttattctctgcacccacaggtgtattcataggccagcggtgcacctcttttgggatgaaatttgaagaattcggtctctagaatccatgggctggagctgttaaggttctatactcctccctctccccaagagtccgtttctttccccccttggattggcttattttattgctacttctttggggataaaactctttttgactgttagcctgtgagtgaattaactcatctttgagcaagatgcgtttctcttctccccagggaagtgtcacaagccctgaggaagtctccaagctggctggggctcctgatgaaggtgctggtaggagctcagcggatgtgtctgggctaatgagggctctgtggctggacacagcgcaaaacatgggttcccccaaatttatttatttatttatttatttatttatttattcattcattcattcattcagagacagggtctccctctgttgcccaggctggagtacagtggcacaatcatagctcaccacagctttgacctcctgggctcaagggatccccctgcctcagcctcttgagtagctggaactgcaggtgtgcaccaccatgcccagctaatagctaatttgtaaaatttcttgtagagatgtgggctcactatgttgcccaggctggtctcaaactcttggcctcaagtgatgctccctcctcggcctccaaaagtgttaggattacaggtatgagccaccacgcctgcccaggctggagtgcagtggcacgatctcggctcactgtaacctccacttcctaggttcaagtgattctcctgtctcagccttccgagtaactgggattacaggcatgtgccaccatgcccagctcatttttgtatttttaatagagacagggtttcgccattttggccaggctggtctcaaacttctgacctcaggtgatccacccgtctcggcctcccaaagtgctgggattataggtgtgagccaycccacctggccatatctttgtttctcgcaacacacttatacacatcacaatattcttttttttaaattttcttttcttttgagatggagtctcactgttgcccagggtggagtacagtggtgcgatctcggctcacttcccgggttcacaccattctcctgcctcagactcccgagtagctgggactacaggcgcccgcaaccacgcccggctaattttttgtatttttagtagaaatggggtttcaccttgttagccaggatggtcttgatctcctgacctcctgatctgcccacctgggcctcccaaagtgctgggattacaggtgtgagccaccgcgcctggccctgggtattttcatttttatttattttttttgagatggagt

SEQ ID NO: 84893 - DNA, 1380 bp, Homo sapiens
ccctcttattctctgcacccacaggtgtattcataggccagcggtgcacctcttttgggatgaaatttgaagaattcggtctctagaatccatgggctggagctgttaaggttctatactcctccctctccccaagagtccgtttctttccccccttggattggcttattttattgctacttctttggggataaaactctttttgactgttagcctgtgagtgaattaactcatctttgagcaagatgcgtttctcttctccccagggaagtgtcacaagccctgaggaagtctccaagctggctggggctcctgatgaaggtgctggtaggagctcagcggatgtgtctgggctaatgagggctctgtggctggacacagcgcaaaacatgggttcccccaaatttatttatttatttatttatttatttatttattcattcattcattcattcagagacagggtctccctctgttgcccaggctggagtacagtggcacaatcatagctcaccacagctttgacctcctgggctcaagggatccccctgcctcagcctcttgagtagctggaactgcaggtgtgcaccaccatgcccagctaatagctaatttgtaaaatttcttgtagagatgtgggctcactatgttgcccaggctggtctcaaactcttggcctcaagtgatgctccctcctcggcctccaaaagtgttaggattacaggtatgagccaccacgcctgcccaggctggagtgcagtggcacgatctcggctcactgtaacctccacttcctaggttcaagtgattctcctgtctcagccttccgagtaactgggattacaggcatgtgccaccatgcccagctcatttttgtatttttaatagagacagggtttcgccattttggccaggctggtctcaaacttctgacctcaggtgatccacccgtctcggcctcccaaagtgctgggattataggtgtgagccatcccacctggccatatctttgtttctcgcaacacacttatacacatcacaatattcttttttttaaattttcttttcttttgagatggagtctcrctgttgcccagggtggagtacagtggtgcgatctcggctcacttcccgggttcacaccattctcctgcctcagactcccgagtagctgggactacaggcgcccgcaaccacgcccggctaattttttgtatttttagtagaaatggggtttcaccttgttagccaggatggtcttgatctcctgacctcctgatctgcccacctgggcctcccaaagtgctgggattacaggtgtgagccaccgcgcctggccctgggtattttcatttttatttattttttttgagatggagt

SEQ ID NO: 84894 - DNA, 698 bp, Homo sapiens
cacccacctaattttttttttttttttttttgagacggagtctcgctctgtcattcaggctggagtgcagtggcgcgatctcaactcactgcaagctctgcctcctgggttcacgccattctccagcatcagcctcccgagtggctggggctataggcgcctgccaccacactcggctaattttttgtatttttagtagagatgaggtttcaccgtgttagccaggatggtctctatctcctgacctcgtgatcctcccacctcagcctcccaaagttctgggatcacaggcatgagccatcgcgcccagccaatttttatattttttgtagagatgggcttttgccttgttgtccaggctggtcttgaactcctgggctccagtgatcctcctgtctcgacctcccaaagtgctgggattacaggtgcgagccactgtgcctggcctgtgtgtgtttttwaaaaattatttgtagaaacaaggtctcaggccttgggtctcactgtgttgcccaggctggtcttgaactcctggcctcaggtgatcgtcccacctcgctctcccaaagcactgggattgcaagtgtgagccaccatgctggccctctaacccatccattgaagcccaacacctgtgctgcctcctccaggaagggctctcaggttagtgtttgtgcagtggttgtcttcaggtctga

SEQ ID NO: 84895 - DNA, 759 bp, Homo sapiens
agggattaaatctattgcagtgagttgaacagatggctgtattgtctcagttaactttttacttcttgtctttttacctccaaagacttcctccttaaaggaggttgagatttatgaaaccctgtgtgttcttctcttcatattctttgttcatgtgtttatttttgcccttgacttctgggaaatgggtggctatgtgtctctggatgtgggggaaagtggatttcttttctcccttcagttgtttattcttatattcaggagaagatgataatctgcacccagcatctgtatcctgtatttgttcattgtccaaaaagtattcactttaataataatacagttatagaggctagcgtgaacaactgctagctgcgactttgcatcattggtttgggctgcatattaagtgcaacctatggtgaaagctctgtgtggtggaagtagggccttgtgaaatgcacctccagcttggtgcccttcactaggcttttacagtgttctggtttmtttctttccttttgaagaatacacagctgacttagggaagatggatttttttctgaattcagtatactggggtcttccctatgattgcaaaaggcaagcataactttttgatagacttgccttcgtagttttttgattttcaatgctgttctagttaaaatgctattcttaattttcttcatctatgtctgcaatatattgtaatagaactttcatgtcagttttaaagcttaagtttgctgaactaag

SEQ ID NO: 84896 - DNA, 1426 bp, Homo sapiens
caaaggtaaagtataagaaatgcaaaccaaaatcaacagaagaaactaggacactatattaataacttgaagagaaagaagaaggtagagaggtcacacagaaggcaggcaaatatttagttgttttaggtatggttaatgcagataaaaggataaaaagctggagaagtaggctgaggtcatgatgtagagaactctgaatgacaggtgaaggtgtatatactattacatatgtagacactggcaatctacttttaatattagagtatgagagtgatataccagagtgatgctttgggatgatttgccttgtaggatggattgcagcaggaagtgataagcctaattagatgagtattaaaggaatccaggggagaaataatcaggatgttggaatggtaaaggaagggatgactgtgaaagtgatgagataatgtaaagggtagagtctttatatttggcttctaattttataaagggaccaatactgaataaagagactaggataattacatgcttttgtcattaagacaaagaggaaactccaaaagagaagctatcttgggcaaagagaatgaaaaaaccattctggggcatgctgaattcattatgtcgaaaagatgcccagttataaatgtgagtctgaaacttgggattaaagaaaataaatcatttggaattcatcagtatggtgttgatagcagaagtcatggatgtagttgacatttcttaaggagagagaacacagaagaggttcacaggcaaaggatccagaataacctcctgaggggaaaggaagtcaaaaatgttcagagaaattggcagaagacctagcagagcatactacaaggatcccaaggatgaagagaatttcaaaaagctaaygtaaataaaaacatcaaagtttatggaaagaaggaagagaataaagacttcacaattagtaaaccccataaaattaatctaatagcggtgttaagaaaaactaggcactctgcttataaggacagtttcaaaagagaatggaagacaggaaggaggctgtgaggggttatggcccaggtgagtgatcttctctagttgttgcattatatacagtaggccccagatgtacaaaagctttatcaaaaataaaaattgaaaatcacagcagcaaattcataaaaaataataataatattaataagttttaccttcttatgattcttgtaaacatttctgtgggcaaatccctttccacaaagtttgcatttgtaaggtttgtcttcgctgtgtattactttgtgagcacccacttgatcaagcctcttgaaagacttattacaaatctcgcaattatagggtcgtttttctattaaaaaaatgagtggagacaatctcatatctatataaaggtaaaggataaaagagaaaacacccttacctt

SEQ ID NO: 84897 - DNA, 667 bp, Homo sapiens
cataagttatgtagtaaaaaatatcttttgagacataatactcacagtccttaaaaatgtaatacagctgtcctatttagtacatattaaatttatactctgtaaaaaattacacctaatatatagtaactcttctgttatgcacaaatttagacttggaaatatgtagcatgcagttaataatattccctttacagtagccaacaatattttaaacttaaatgtacatagtagagagtgcaacattaattacagtaaaagatcagaagttacaggattctgaaaagcatttagttcacaatagaagtttcacatgagccagatgcagtggctcacatttgtaatcccagcactttgggaggccaaggcaagaggattgcttgagcccaggagttcgagatcagcctggacaacaaagtgagacctcgtccctacaaaaaattttaaaaattagccaggtgtgatgacatacgtctgtggtcccagctacamaggaggctgaagcaggatgattgtttgaacctgggaagtcgaggcttcagtgagctgtgttcatactattgcatttcagcatgggtgacagagtgagactcggtctcaaaaaaaaaaaaaaaagtctcacatgacaggaggatcacaacttttaaaatgaggaaatctagtcaaa

SEQ ID NO: 84898 - DNA, 1630 bp, Homo sapiens
agccacacaggtgctcttgggcagaaagcagcactgcatgggtcagacctgccggctccctgccgccctttagtcagtggctccagccctgccccggtttgcagggcctccaccccactgaggagggcctgccaggggcacagcagagcaaggtcagcagccaccagtaacggtggacaggaagacgtgggcatgggtgagccatgctcatctgaacgccactgagtcagggaaaacagctggtggaaaggagaaggacagcataatagagtaaaacactgcaaatcgaactttgatggaagaactctaaatagcaggcggtaaacagaaatctcttttatgaacgggacgtgggctggtggcagagacggcaaatggatggtccaggcaagcgctggtaaacaggaagccacagccgcgctgagcgtgagctcgaagggcacacggaagcatcgctgtcccccaatttctattttttaaaatttgaagtagagctgctataataaccagatcaaactagtggacaagagaacattttgtttcatttttgtgtgtgtagtgagttcctttattgcacactggatgatctataggagcaatgaattccatgatgaaagaagactcaataatcaagccatgcattttagttttaattgttgtattttttgcttttttttttcactggagagaggaagtctggttatcacagcctggtttgtgtgtttccctggccacacacttaaatacaaagatccagagcccaggctcttgtctggaccatgtaggggaagaaataagactcacttgcatcctgggctcaggatcctgcagcctgcggggtgacgagatgcacacaggaccgtgcccgctccagggggacgtgaccctgcaggcaggagtgggaggggtgccgcaaaagggccctaagcgggcaccactcccagccatggcccatccctccgaacgtgagggcacagagaaaaaaacacagtactcaccccctgggaaactgaaattgtcagataagctactatctgagtttaacaggaattttcagaaaataaaatagagatgaaatrtaattgttagtggatcacacaggcttcatctcatgagaaacaacagcttcctgtttttctcttaaattctctgaccacctaaaagaacagagtggggcaggacgtcctcacacacacatcctacgaggacggctccaggaaccacaatgggcgaggagggctcgggcggccgctgattctcatgactctgtgggtctcaatgctccatgagaacgtagcccagctcataaaagtgaccgtaagatccgtctcctcacagcgaagactgaagcagtgccaccaactgtctatctcttgacttcctattacttggggaaaaaaagtctccacatatttaagatgctccaagttgggtcttttgttccacaaaggtgaattatttgtaactaattcaagaggatagaatcattacataaaaagtaaccattttgaaatctaaaaatatcaaacaatttttataagcataacgtgaagtaatcagataaccaaagtcagtacatttgactgcatagatgtcaattcacaagccctgatctgatgaaggtcaccca

SEQ ID NO: 84899 - DNA, 753 bp, Homo sapiens
aggatgaacttactgggataaattttctaggatacattgagtgaaatggtctcattcattttatcatctgagttggtattatagcttttataatcttttatagcaattcattaacattgtagtgactactccatctatctcctcctttttcatgccattttttaatctgccataaaatatttccacctggttcaattgtcccaaagtttattccaacttttgcattcttgttgtttcatttcttctgaataatcctgctctttttcttgtcattaaaaaccctatttgagggagctgagtaaagagatcagctgcaatttccctcacaactttttgtccccccaaccaatgtaggcacccaaggagtccatgaagttgcaactcttgttattataacatcaaccctcacctaggccagttgtagcagaggttcccaacctttttggcatcagaaactggctkcatggaaggcaatttttccacgaaccagcgagggtggagtgtgtttagggggaactgtttcacttcagatcattaggcattagattctcataaagagcatgcaacctggatcactcacatgcgcagttcacagtagggtttgcactctggtgaagctctagtgtccctgctgatctgacaggaggtggggctcaagcggtaatgctggctcacccgctgcttacctcctgctgtgcagcctgggttctagcaggccatggactgctccgtggcccaggggttgggaaaccc

SEQ ID NO: 84900 - DNA, 554 bp, Homo sapiens
tacagtaagaaataaaaacgaaagaaataaatttgtgcttagtaaggtgataggaacagagaaataattcyggtatttaggggttgtagcataaatgtagaacacactctttcagtaaactaggaatagaggattacgtcctctgcttgataaagaatacctacaaaaacctacagctaacataatatttaattacgagaaattcaaacttttcccccattaaatactgttagctgcaattgtttgtagatattctttatcttaaggcaaggatgtcccacctcactattgcttttcaacatcacattggaaatcctagctaatgcgatgacaagaaaataaaaataaaaggtatatacattgagaagaaagacataaccttatttttctttgcagataataaaaatgtctgtgtagaaaatccaaaagaattggcaaaaaaatgaaaacaaagaaacaaaactagaactaatcagcaattatagcaaggtttgacaatataaggttaatattcaaaagtcaattactttcttatcagcaatgaacaagtagaa

SEQ ID NO: 84901 - DNA, 599 bp, Homo sapiens
cacttcaaccaagtcttgtcaatccaaactcttaggcctcttagtcccctcttcccttgagcattgctsccattacttctttatttcccaacaagaacttggaagtaccttctgaaaatggtcttctggttctagatatgtttctcccatttcctttcccatactgctagagtaggccccctctgtattattaaaatataatcctgattaaatcatacaaaggttaaaaattcttcaatagttcccatggccgacatgataaattcctaatatttgtatcgtgtatgaggagatttgacatcaccactagagggtgggcactgtgttgttctgacaagggacccaaatgcttagcatggtgcttgacatatagtgcataagcaatcaccatttgccagtaaagagaaaatttttaaagttgatttgtctatctcatgttcatctttccacccaataacctctccagtaaggagtgactcgtgtctccaagttgtgctgaacggcttccaactcttcaaaggtaacatacgttcatgcctctccccctgccctccagcccaggctaccctatgtgtctgcctgagttctcctcaagcttt

SEQ ID NO: 84902 - DNA, 987 bp, Homo sapiens
tttgagaagagttgagagtaaacaaataggagaaaatggaaacagaaaatacagaaatggctctttgattaaactgtcatggtaaaggagaggagagacgtagagcagtctgtacagaagagtgtcttccagttatctactggtgcatgtcaatacactcagaaatgctgaggggcttggaatagtgcaaatcctttatgctttcccctggttctgaggagtgatggggtagctagtgctttgcatctctccactgcctgcagcaacagcaggctgaggctgaggccaagaccaaggatcttctcatcaaaattaggttgagatgcagatgagcttatcaaatttattcttcctcaagcaatctgctatttacttcccagcacattagttcgagttctgctttttccctttgtcaccattgtctagatctttccgtgtccttcaattgttcaaatcctatmcaccttcaagtcctaggcttaatgcactctgctccaaaaaggatgacttccatgggccagggccactccatgtttcatcgtgatgttctttcactaattgattgcttattaatatttgttcattgttttttattagaaacacttattataccaggagaagaacaaaacaactgcagatgaagctctttggatttgttcctgaggtgaaactcctcaaacgccatttctctgaatcggagatgtaggagtaacacagtagaaacctcccagcaacagagggaaacagcaaagcatgcagcaaacaaggttcatagcaactttgacattgaatgaggcacagattaccagtttcttttactgttttaattaactctattaggatatcatttttgcacaagaaacagcatccttttaaagtatacaatttcataagttttgacagttatagtcagtcactaaatggcagcaacaattaaaagacacatttccttcatccccaaagttcctgtgccccttagtccatgca

SEQ ID NO: 84903 - DNA, 1452 bp, Homo sapiens
gttggaggaaagaaggcctttggcttggcgtggccagagcacagtattagggtagagagggccagtgagtaccagggcgaggccagaatagagggacaggctgtgtgtggccccttccagaaggtggtgatagggaagggcagtgactggtcagagttaccttttaaatcaatccttctggtggtggagaaggcaagattattagaggggcatgcttaatcagcaagaagaccaataaagagcccattgccagccagacaaaagctgcctgaggccagaacctaggtagtagctgtgaggatgaaggagaaggggatggagaagcaccaggagaaagaatctgcaagacatggggagcagacagcatgtgcaggggcagggaatggagagagtgggacgatgcccagcctaggcgtgactgctgggtgggtgttggcggcctcccggagagcgagcccrgaaggcagcacaggttggggagccggaagatagacggcgaagctgaatcccacagtactgagttcagcagaggttaggaactctggccaacctcacagaggggatttcatgtgtcagtgtcagtggtcgagaaataatgaaattggaactgaaaagtgattgagccggtacctgttactgtgggtgcaaaaggctgcgatacacgtgggatttggctcgctgaagctggaaactgtttggattcttgtggagcactctgacctctaactctctctatcatctctctaggaaaccgtatcacccaaaactggaagctttcattagtcacatgtcaaaaggatccggagcctctttcgaaagccccttgaactccttgcctctttacccaaatcacccattgtgtgagatgggagagctcacacagacaggtatgtgtgacccccatgcgctcaggggttcccccacccgctcttctgcttgcataccttccgagcagttctcctgggcggggtgctgtgcagctcagagggggtaagcaaggactggctctgcaaggagctcggtcaccagggcctctaaataaacatcagagttctcaaaactaaatagaacctttctccttcttacaaaaacaatacgtgttcatgaaaataatttaggaaagacaagtaaaaagaagaaaaagtttaagcaaccgtaattccaccacagaaatagacccttaagagtaacccttcttcctgtgcttatgcacacacacacatcttactaaacacactatttcataacccacttttccactcaacaacacattttgttaatatttccctatgaataactgtttatccactacatcatttatgatagcgccatattctttcactctggatgggcaattgatcatttatttaactaatctcatgttctcagatatttctaacaaaacttctaataggttttcatgtacaagatctcagggaggaaaatgcatgg

SEQ ID NO: 84904 - DNA, 728 bp, Homo sapiens
attgttgactcttaataccacatgtcaggacatggtttttctgaagttctgatcaaaacaaaatatagatgttccttagtttatattgtatttctggaaaattcagtgaacattaatattatacaaaaatggttttgtgttctagacacaaaarcagaattagattctacagtctaaagtattcaaatatgttttgcacgtgatggaatgtctcatgctgcattcaaaagttgtgtgggacagagacacgtgtcccttctggagaccagccccccagcccctacccactaggtgccaggaatgcctttccccatactattgtgataactccacccccaagccctctctgaaggcagtagcactcttgctgagaactgctgcttagattctctggttaaaaataacagaaaacacctcaagcaaaaaaaggaaatttattataagaattcaggaatgactcacagactctaagatcaagagtgtgaccagacctctagagactggaaccaggaataaaaaagctgtcttgtccctgcctctctctctaattttttgttgtgtctgtcaacaaaattacagtcccagccacacacacagatgaacttgcaaatccaaattcttgagagagggagaatccttgaggtcctaggggttagcatccatcagccctggctaacaggtcagggtgactgtgcagagaacaggaggtgagggcgccagtctctgga

SEQ ID NO: 84905 - DNA, 728 bp, Homo sapiens
attgttgactcttaataccacatgtcaggacatggtttttctgaagttctgatcaaaacaaaatatagatgttccttagtttatattgtatttctggaaaattcagtgaacattaatattatacaaaaatggttttgtgttctagacacaaaaacagaattagattctacagtctaaagtattcaaatatgttttgcacgtgatggaatgtctcatgctgcattcaaaagttgtgtgggacagagacacktgtcccttctggagaccagccccccagcccctacccactaggtgccaggaatgcctttccccatactattgtgataactccacccccaagccctctctgaaggcagtagcactcttgctgagaactgctgcttagattctctggttaaaaataacagaaaacacctcaagcaaaaaaaggaaatttattataagaattcaggaatgactcacagactctaagatcaagagtgtgaccagacctctagagactggaaccaggaataaaaaagctgtcttgtccctgcctctctctctaattttttgttgtgtctgtcaacaaaattacagtcccagccacacacacagatgaacttgcaaatccaaattcttgagagagggagaatccttgaggtcctaggggttagcatccatcagccctggctaacaggtcagggtgactgtgcagagaacaggaggtgagggcgccagtctctgga

SEQ ID NO: 84906 - DNA, 663 bp, Homo sapiens
ctctccaccccggttgtaattccctcatggcagggcctgctcccttgcccctccttgatcttcccttgtgtagaaggacctgaaggtcccactccccactccagcctcagacactttgccaagattgggtcctactggagggcagacatagggtagtcaatgtgctctaagccaagctagggagagcttcagactgaaacaggtttagccytggcactgccagacaggccaagcactgtcacccctggattccttttctctgactttagcagctgggctggaggacatgggcatgaggccatccatttgtcccactggctgatcctgttcctggccactatgatgtgatgagtatgagcatctttgccttcaaggtgcccctagtctaagcagagaatggggcaggatcttgagcatcaggacaccatgtgtggttgtacagcttgagcactgcacaaatgtcccaactgagggggccagtcagcactcacttgcttatctgtgaactctggcacagggctatctgcccacaggaagagatacaaaaccaccatagggctaagtggcagctctaaggatgtcatgttcctaagaccagagtcaggtctgaggaagaagctgggaagcggagccatgggagtctgaggcaccagctccaatact

SEQ ID NO: 84907 - DNA, 663 bp, Homo sapiens
ctctccaccccggttgtaattccctcatggcagggcctgctcccttgcccctccttgatcttcccttgtgtagaaggacctgaaggtcccactccccactccagcctcagacactttgccaagattgggtcctactggagggcagacatagggtagtcaatgtgctctaagccaagctagggagagcttcagactgaaacaggtttagccttggcactgccagacaggccaagcactgtcacccctggattccttttctctgactttagcagctgggctggaggacatgggcatgaggccatccatttgtcccactggctgatcctgttcctggccactatgatgtgatgagtatgagcatctttgccttcaaggtgcccctagtctaagcagagaatggggcaggatcttragcatcaggacaccatgtgtggttgtacagcttgagcactgcacaaatgtcccaactgagggggccagtcagcactcacttgcttatctgtgaactctggcacagggctatctgcccacaggaagagatacaaaaccaccatagggctaagtggcagctctaaggatgtcatgttcctaagaccagagtcaggtctgaggaagaagctgggaagcggagccatgggagtctgaggcaccagctccaatact

SEQ ID NO: 84908 - DNA, 663 bp, Homo sapiens
ctctccaccccggttgtaattccctcatggcagggcctgctcccttgcccctccttgatcttcccttgtgtagaaggacctgaaggtcccactccccactccagcctcagacactttgccaagattgggtcctactggagggcagacatagggtagtcaatgtgctctaagccaagctagggagagcttcagactgaaacaggtttagccttggcactgccagacaggccaagcactgtcacccctggattccttttctctgactttagcagctgggctggaggacatgggcatgaggccatccatttgtcccactggctgatcctgttcctggccactatgatgtgatgagtatgagcatctttgccttcaaggtgcccctagtctaagcagagaatggggcaggatcttgagcatcaggacaccatgtgtggttgtacagcttgagcactgcacaaatgtcccaactgagggggccagtcagcackcacttgcttatctgtgaactctggcacagggctatctgcccacaggaagagatacaaaaccaccatagggctaagtggcagctctaaggatgtcatgttcctaagaccagagtcaggtctgaggaagaagctgggaagcggagccatgggagtctgaggcaccagctccaatact

SEQ ID NO: 84909 - DNA, 663 bp, Homo sapiens
ctctccaccccggttgtaattccctcatggcagggcctgctcccttgcccctccttgatcttcccttgtgtagaaggacctgaaggtcccactccccactccagcctcagacactttgccaagattgggtcctactggagggcagacatagggtagtcaatgtgctctaagccaagctagggagagcttcagactgaaacaggtttagccttggcactgccagacaggccaagcactgtcacccctggattccttttctctgactttagcagctgggctggaggacatgggcatgaggccatccatttgtcccactggctgatcctgttcctggccactatgatgtgatgagtatgagcatctttgccttcaaggtgcccctagtctaagcagagaatggggcaggatcttgagcatcaggacaccatgtgtggttgtacagcttgagcactgcacaaatgtcccaactgagggggccagtcagcactcacttgcttatctgtgaactctggcacagggctatctgcccrcaggaagagatacaaaaccaccatagggctaagtggcagctctaaggatgtcatgttcctaagaccagagtcaggtctgaggaagaagctgggaagcggagccatgggagtctgaggcaccagctccaatact

SEQ ID NO: 84910 - DNA, 663 bp, Homo sapiens
ctctccaccccggttgtaattccctcatggcagggcctgctcccttgcccctccttgatcttcccttgtgtagaaggacctgaaggtcccactccccactccagcctcagacactttgccaagattgggtcctactggagggcagacatagggtagtcaatgtgctctaagccaagctagggagagcttcagactgaaacaggtttagccttggcactgccagacaggccaagcactgtcacccctggattccttttctctgactttagcagctgggctggaggacatgggcatgaggccatccatttgtcccactggctgatcctgttcctggccactatgatgtgatgagtatgagcatctttgccttcaaggtgcccctagtctaagcagagaatggggcaggatcttgagcatcaggacaccatgtgtggttgtacagcttgagcactgcacaaatgtcccaactgagggggccagtcagcactcacttgcttatctgtgaactctggcacagggctatctgcccacaggaagagatacaaaaccaccatagggctaagtggcagcyctaaggatgtcatgttcctaagaccagagtcaggtctgaggaagaagctgggaagcggagccatgggagtctgaggcaccagctccaatact

SEQ ID NO: 84911 - DNA, 710 bp, Homo sapiens
gaataaggtatgactgctatgaggctttttggattgttgaatatgtcctaaaattagaatgtggtcatggttgcgtaactctgtaaatagaataaaaatttttgaactgtacagtttaagtggattttatggtatgtgaactatatctcaataaagctgtaaaaaatgatcaagaatcctgattcctactgaaaactcttttcaaacctatgctgaatttttgagaatttaaagacttatctagtgtgacatagatggggtgtggcagattaaggatggaaactaaatctaaccctggaatttgggtttttaacctttgctagatcttcaccagacaatagatcttacttgactgagatatccatctcattcagaggtgtgaagccctgggtggtttagaagtagccattactatcacatagtaagctaagattgaaagatagaattgatgtaattataatcaggtctgcctaagaaaagactgtagatattcatttctcctactgataagatttagattctgtttcacattcattttgtacattgataatgagggtttgatggaaaaattaagactccgtaaaaaaaaaamctttctctaattaaagttagggtgtgtgcatgtgtagtgtgtgaagtataagttttcatgtattttttaaaccccttatacattcagtaaagtgttacatatttagagaaacatcagt

SEQ ID NO: 84912 - DNA, 1207 bp, Homo sapiens
tgcactacttttaatgcaaatttaatgatgccattctcatgttaaaaaatcactcartgggttacctttgcttttgtgataaattccaaaattcttattttggctggtaagtccctgacaatgtagaacttgccttatttctcattattcttcctttaattatgatctgttcttatggttaataaactgttgtctgtcttagaaacttcataaaggatttctctctcctctagaacttttccactatcttgtcttatgactatgtagataattcataccttagcactcaacttaaacctcatatcagaggaggcctcctcaaattttctgacttcattaagacccctgttatatgccctctggtcatgctgtatttttcctatatagtggtattttattctctactataatcattaactacattattcttagtgttacatttccaatatttaatatagggcatataacgaagaatgtagtcaataaaagtgtgtttaattcacaaatgacactaattaaacattttgatatctttataccatgttccgttttaagttatacttgtcctttttatgagagagatttcttataaagtaaaatatctttatttgaaactcattactgacaactggcagatcgctatgtaaattcctattgcatataaatcagcatcgatgtttacctgggaaaagatgattttcaagacaaaatagagtgaacaaaatggaaagcaaattatgattgtaagaatagatgatgtatctctagtgaaaaattaatttcttcgtgtgttaacttttagggaaaaagtagcaggagttccatatgtagttgggtaaaagtaaatttttgtcttccagaaaaagtttttaaacataatattaatatgacaagaatggaattaaaaccatcagtgtcagagaaagtagcaagactgaggtggtggcagaatttgggtcacaattaatcaaagcaagttaacaaaggctaactgctgtaaagaggaattacaaatatcagggatttaacaaaatagttgttgatagtcaagttcagtgtggattcccctggtagaacaaccctcctgcaagtgatgactctcggaattccagtctccttgcttcctaaaactcagatatgttcaaccagtgaattctaaggttgctttggaaagggaaaaattagcatggaaaaacatggggcaaat

SEQ ID NO: 84913 - DNA, 1066 bp, Homo sapiens
aaattaacaatgttttataaccaccttttcttttccttcaggaaggagaaaaataggagtaataatgagggcttataaaataatgaagcctagggaacaggctgcttgttctgtttacgatctgctaaaataactaagcaaaagacaactgaaaaactactacatgtttaatgcagatagtataaaatttaattttactcaaggacatataattttactgttttatgtatttcagataatacacacacacacacacgcacacatgctctttatacctaagctgaaggattataagatttgcaagtggtcattgtagtggtctcataatttcargtaagagcctcaaattatgtgacttgggaagaaagtgtatgagatgatttctaatcaattttaacattttcctcaagataaaattcaaggtggtgacaaggtcctctattatctggtttctgcttatctctccagtctcatatcttgccaaagtaacagtcaaaatattatctttaatcaattaattgctgcctcctttgaaaaattgccaccacgtgttcttatttctggaactttgtacttgaaggtttttcagttagatatctatgtagaaagtgtgtattatttttcacaactgttctgtccctgtgtgggaaaagaatatatacatctatactccaatacttccacaaaagtaagccttgtgacttactttagccaatgaaatatgaataaaagtgactatatgagtaaaactagtgtctgacatttccaggttttctttacactgtgtctctgactgtagaagaacatgtcaagctggagccttgatctgctttggtctctgagtgatgatcataattataagtcctttggaagtgctcttatgaaaatacagtgtaaacaataaatcaattttgttgtttaaaccactgagatttttagggtatatattcatttgttatttactacaataaaacacaacctattctgactgacattctgtctctccccacacattatgcccaccatttttctgactaattattgcttattcttcaagtctatatat

SEQ ID NO: 84914 - DNA, 851 bp, Homo sapiens
aggttgaggctgcagtgagctatgatctcaccactgctctccagcctgaatgcagactgagcccccatcttaaaaaaagagaggccagacacaaagtgtaatttcattttatatggagagtacagaataggcaacttcatagagacaaagagttgattagcagttgccaggagatgggggtagaggtaaaagagaagtaactgctaatagctatagattttgtttaaggttgatgaaaattttctgcaaaaagttgttggtgatatctatacaatattgtgaataataaaaaaagccccactaatttgtacactttaaaatggtgagttttatgatatgcaaattatgtttttttaattaaatgggtgaaaaaagaaaggacctatttttaaacatgcatttgcttatttgaattttttaagtctcttaaagggtataacattgcataatttttcaggcctcatttcctgaagtaaaatgttactaaacaaaataaaaattgtaaaacagaatgatattctatctatctatctatstatctatctgtctatctatttatcatctatctaatctatctatcatcaacaatgtatcatctacttaaaatgaataaagtataaaagaaaccacaatcattcatttagtagctttaagaatctacgatctagctattttcacatttatattccacttaataactttacttgtataagtgatttggctttctgttttgttcatctttactctatcccacattttagaattgtgcagtctgtagagacatgatgtcctattatattttcagttgagaaagatttgtacgaatgaaagttcatgagatttgtcttcag

SEQ ID NO: 84915 - DNA, 851 bp, Homo sapiens
aggttgaggctgcagtgagctatgatctcaccactgctctccagcctgaatgcagactgagcccccatcttaaaaaaagagaggccagacacaaagtgtaatttcattttatatggagagtacagaataggcaacttcatagagacaaagagttgattagcagttgccaggagatgggggtagaggtaaaagagaagtaactgctaatagctatagattttgtttaaggttgatgaaaattttctgcaaaaagttgttggtgatatctatacaatattgtgaataataaaaaaagccccactaatttgtacactttaaaatggtgagttttatgatatgcaaattatgtttttttaattaaatgggtgaaaaaagaaaggacctatttttaaacatgcatttgcttatttgaattttttaagtctcttaaagggtataacattgcataatttttcaggcctcatttcctgaagtaaaatgttactaaacaaaataaaaattgtaaaacagaatgatattctatctatctatctatgtatctatctrtctatctatttatcatctatctaatctatctatcatcaacaatgtatcatctacttaaaatgaataaagtataaaagaaaccacaatcattcatttagtagctttaagaatctacgatctagctattttcacatttatattccacttaataactttacttgtataagtgatttggctttctgttttgttcatctttactctatcccacattttagaattgtgcagtctgtagagacatgatgtcctattatattttcagttgagaaagatttgtacgaatgaaagttcatgagatttgtcttcag

SEQ ID NO: 84916 - DNA, 633 bp, Homo sapiens
tatgtaacatatcatatatattattttaattcaaatatatatatttgctggctcaagtttgccagcagcagcaaatgccctcagagcaaatatttctctattccagtgcagggcactacctctaattctatgcttctacgtttccacaaagtgttcacttagtagctcctcactgtgttttcaaatattcaatactttaagtaatttttttattatactttaagttctagggtacatgrgcacaatgtgcaggtttgttatctaggtatacctgtgccatgttggtttgctgcacccattaactcatcatttacattaggtatttctcttaatgctctcccacccccagcccccaacgattaaaaatatattatctatactttttagcaaaactgttggtccaaacaatgtgaccctctattactaaaaacaggaggtttgttttgtttttttgtcaatttttttgttatcctcaacatttattactttactactttttttattgcaaatgcaagcttttctttaaatttcaaggcagctattttcattatatattttagtatatttttattttccatatattctattctcatttttgtaatagaagaccatattttacatgtgttcacttat

SEQ ID NO: 84917 - DNA, 1014 bp, Homo sapiens
  misc_feature (1)...(1014): n = A,T,C or G
ttnnnnnnnnnnnnnnnnnnnnnnnnnnnnnnnnnnnnnnnnnnnnnnnnnnnnnnnnnnnnnnnnnnnnnnnnnnnnnnnnnnnnnnnnnnnnnnnnnnnncatgaattgttttctcattactctaaatggcagattgcttaactgtcatatgaacatgataatatcacctaccccatattattttaagagttatttgagaacacttagagcatcaggcacataagtattcaatatctattrgttatatgttcattaattattattttttaatattttttgttaagaaacatacttattttgatatatttaatgctagaacttctatctgataatgtatatacagtgtttatttttatattttcctaaatggcaaatgaacattcaaatctttctgtttgatctgtcagaacatggttctgttagttggcattttctttcaaatttcgcttggactacctgaattacattacttgtttcattctttataatctaatcaattcttttatttaattcttgtattgtgacttgtcaacccaactaagacatagataatatgattagagaatcaaaagaaacctgattaactccctcattttacctatgtgtaaactgaatacatatgtatagaataaatgtgttgcaaaaacttgtattgtcaatgaattattgagttagatcgaattcttgacagctccgttagccaaacaagatcatttgcactgatatttaaattaatataataatattactgaacatcagtaaaaagtcctataagtgataaaatatataaactgttttgggaccattattttctggcagttatttcttatattaacagatttactagtaaattgcaacaaaaaatcactacctaaagacaatacctttgaggctaacgaagtaaaaaaatgtattttttgtacatttcagaaatgtcatgatttcagtatcagcacagtaatataattttactgtgttctgtcacaccaaagggtttcaaaggagataatg

SEQ ID NO: 84918 - DNA, 1014 bp, Homo sapiens
  misc_feature (1)...(1014): n = A,T,C or G
ttnnnnnnnnnnnnnnnnnnnnnnnnnnnnnnnnnnnnnnnnnnnnnnnnnnnnnnnnnnnnnnnnnnnnnnnnnnnnnnnnnnnnnnnnnnnnnnnnnnnncatgaattgttttctcattactctaaatggcagattgcttaactgtcatatgaacatgataatatcacctaccccatattattttaagagttatttgagaacacttagagcatcaggcacataagtattcaatatctattggttatawgttcattaattattattttttaatattttttgttaagaaacatacttattttgatatatttaatgctagaacttctatctgataatgtatatacagtgtttatttttatattttcctaaatggcaaatgaacattcaaatctttctgtttgatctgtcagaacatggttctgttagttggcattttctttcaaatttcgcttggactacctgaattacattacttgtttcattctttataatctaatcaattcttttatttaattcttgtattgtgacttgtcaacccaactaagacatagataatatgattagagaatcaaaagaaacctgattaactccctcattttacctatgtgtaaactgaatacatatgtatagaataaatgtgttgcaaaaacttgtattgtcaatgaattattgagttagatcgaattcttgacagctccgttagccaaacaagatcatttgcactgatatttaaattaatataataatattactgaacatcagtaaaaagtcctataagtgataaaatatataaactgttttgggaccattattttctggcagttatttcttatattaacagatttactagtaaattgcaacaaaaaatcactacctaaagacaatacctttgaggctaacgaagtaaaaaaatgtattttttgtacatttcagaaatgtcatgatttcagtatcagcacagtaatataattttactgtgttctgtcacaccaaagggtttcaaaggagataatg

SEQ ID NO: 84919 - DNA, 1011 bp, Homo sapiens
gtatatacttatgcctccctaacactcaagcaaccaattctttcactattcaaaaattggtctttttattcaaggaaaggcttaacggggtgtataagtaatataagttaaggaaacaagaaaagaaacattcagaataaaaaagatccttaaaagaaaataaatatggatgtgaaaactaaaggataaccagtctattcataactgtacagaaataataagactttctaattcttgatagggaattatttaagctacaaatacaaaacaaaggaaatatttccatcagtgctggagtaaccctgaataatttacagctgcctttctttagggaagcaagtaattattttctaacctatcagcatagattatcaggtttgtgcacttacataaaactgctttattgtatttattattatgatttgtgattttgttgctattcagggactttgttacgaattaaatggcttacagaaggtcattctttagagacttcagaattttgagtgaaaaaaaaaatctcttccaagttgttaacatgaattcctggcaatgacttttgtgctataaaactatatttgttatcacagttccataatagtaaatacaaatattaaatatgtttytatctttacagagtttataatatttttcagaataaaaatgtagtaatatattggttaatgtcagtaaaaataggcaagctatttttattttaaagacagaatatcctagtatctttttccatttggttaattttaaataaagtcataggacttgttcactaagtgtggaacatggctctaaaacagaatttaaagttttatttgataatatcctatttctctggaagactaatatttaggaagtatatatatatataatccataaatataagcttaattttactagcatcagcataacaggatttgagagccatggcttctctatttgatgaataaaaatcatataatccattgatctttatatgtattttaggaacagtttcat

SEQ ID NO: 84920 - DNA, 477 bp, Homo sapiens
tgccgggagcgccttgcattttgcctaggaccttcttaactctccagactcatcagggaagctctgcaggagctcaggataaacaggtccttggcttgaagcctgccggcatgggttgggaatggtgggggctccatgtctgcagcagccacggcagaagctgtggccacatgagctgggctctgggtgcggctgtggccattgaggagggagcatgtcccgggttcttaggttaagtgcgtcttggcaggggggcccggggctgcagcccttcgtgtacccacgtgtccgrtgtctctgtgccatgccgtgacgttgtccttcacgtaaagttttcaagacccacgtcccattgtctgtgaaatcacaaggttttactttatggactgtgtggaatggacccagggaagggggaccagtatatgcccaatttgccagcatgtgcaacagtgaacttccctggacagctggccttgg

SEQ ID NO: 84921 - DNA, 552 bp, Homo sapiens
tgagaaggttcttttttgaacagaacaagaaagacattaactttccccaagtataaaaacacaggaaatgtcaatgtgaaagactgatgggaaagacatgaacatttatagtgtcatgggaaatagaaatatagarctatgctgcagtatctgacagcattaggtacctaggtgtaccacccatggcttaaaccacatggatgtataatattttgacatgctaaggcatatttattttgccttaatacagtgaagtgaatctagtttcaatccaaagaacagtagtgctaaggatttttgtttggcatctgagtagacttgtaaaatggtgaaggacacgtacccagtaggcatatgtcatcaatacattcttcacagagtatcagtactctgcgtggtttctgcagaaaaagctaaagctgtgtaaataacattgccctaaatcccttaccagagctattcatacaaagtctttattgtagctatctccatgagcatgatatgtagagatattgtattgttgacaatcagataatgtaaattacatttgct

SEQ ID NO: 84922 - DNA, 714 bp, Homo sapiens
ggatccctaaatgactatcatagcaatcctgatggcatgtttcatgagcaagaattaaatgtctgttattttaagccattgtgatttgggggttgtatcggtctgttctcacactgctataaagaaacacctcagactgggtaatttataaagaaaagaggtttaattgactcagagttccacatggctggggaggcctcaggaaactaccagtcatggcggaaggtgaaggggaagcaaggaccttcttcacatggcagcaggagagagaagagccagcaagagcagggaaaattgccttataaaattatcagatctcatgagaactcattatcaggagaacagcatggcggaaactgcccccatgatctaatcaactccctccaacgacgtggggattacggttccctcccttggcacgtggggatyacaattcaagatgagatttgggtggaaacacaaagccagacaatatcaagggtatttttaatataaactacaaacaaaactagtctaccctgactgacacagaaccagacccaaaggagctttttaaaccccccaagagacccagcaggtattagaattctctacacccagaatcataaactcaagtgctacagggatcgggtagggcaggtaactaaggaaagcagctgagcacatgataatagaaaggggaagggactgggtcaaactggtgagcacatgcca

SEQ ID NO: 84923 - DNA, 1106 bp, Homo sapiens
tctgtctcccctgcagcatccagagaaaggcaaattatggatgaggtgatttaatccaagcaaagtttgaatggagataaatggggtagggggcaaataggaacagagcgaggctagggagagtctttggggagaagattctgttcttttgagtcctataactggcaccatggaagggaccctagagacaatctaatgaggctccatcatggtgcagaagcagtkcagcatgggatatttgaaagggcaaattccttccatattgttcttacactagaagttaagggcgcagggggcataggttaggtgtgtggggtctggggtcagaccgtttgctttgagtcttgtttgtgttgctttttggttgtgtgtgggcaagaaatgtaacttctttcagccggagtgcaccagctgccaaatggggaagaacagtagttcccacctcatgtagtattgagtgcatgacttggagtaatgggtgggagagcacttcctgccttccttccctcattcatccccttacttaacaaataattattgaatatttatgatgtgtctaacctcttctgggcaccggggttatagtgataaacaagatagttggggttcctgatctcatgacttttgttaaaattttaactaccattattataataaatgaagaagactgaaattccaagaagctgagtcatgcagctatgcagctatattaataaaagggctcaaatagagcggggtcttgagtctccagtcccatgcttactcctccaccccccaccaacacgatgttgtgctctactttattaccctcaattttcttggtaaagaaaggtgttttttttttttaaaacaaaaacaaaaacaaaactttatttttaaagcagttttagatttataaaaaatttttgaagctagcacagataaattccatatacctcacacttggtttccccattattaaaatcttatgttagtattggtacatttgattcaattaatgaaccaatattaatgcattattattttactaaagtttatactttacatactttattcagatttccttagtttttttttttttcctccagtgttctttttctgatcca

SEQ ID NO: 84924 - DNA, 1106 bp, Homo sapiens
tctgtctcccctgcagcatccagagaaaggcaaattatggatgaggtgatttaatccaagcaaagtttgaatggagataaatggggtagggggcaaataggaacagagcgaggctagggagagtctttggggagaagattctgttcttttgagtcctataactggcaccatggaagggaccctagagacaatctaatgaggctccatcatggtgcagaagcagtgcagcatgggatatttgaaagggcaaattccttccatattgttcttacactagaagttaagggcgcagggggcataggttaggtgtgtggggtctggggtcagaccgtttgcttygagtcttgtttgtgttgctttttggttgtgtgtgggcaagaaatgtaacttctttcagccggagtgcaccagctgccaaatggggaagaacagtagttcccacctcatgtagtattgagtgcatgacttggagtaatgggtgggagagcacttcctgccttccttccctcattcatccccttacttaacaaataattattgaatatttatgatgtgtctaacctcttctgggcaccggggttatagtgataaacaagatagttggggttcctgatctcatgacttttgttaaaattttaactaccattattataataaatgaagaagactgaaattccaagaagctgagtcatgcagctatgcagctatattaataaaagggctcaaatagagcggggtcttgagtctccagtcccatgcttactcctccaccccccaccaacacgatgttgtgctctactttattaccctcaattttcttggtaaagaaaggtgttttttttttttaaaacaaaaacaaaaacaaaactttatttttaaagcagttttagatttataaaaaatttttgaagctagcacagataaattccatatacctcacacttggtttccccattattaaaatcttatgttagtattggtacatttgattcaattaatgaaccaatattaatgcattattattttactaaagtttatactttacatactttattcagatttccttagtttttttttttttcctccagtgttctttttctgatcca

SEQ ID NO: 84925 - DNA, 1106 bp, Homo sapiens
tctgtctcccctgcagcatccagagaaaggcaaattatggatgaggtgatttaatccaagcaaagtttgaatggagataaatggggtagggggcaaataggaacagagcgaggctagggagagtctttggggagaagattctgttcttttgagtcctataactggcaccatggaagggaccctagagacaatctaatgaggctccatcatggtgcagaagcagtgcagcatgggatatttgaaagggcaaattccttccatattgttcttacactagaagttaagggcgcagggggcataggttaggtgtgtggggtctggggtcagaccgtttgctttgagtcttgtttgtgttgctttttggttgtgtgtgggcaagaaatgtaacttctttcagccggagtgcaccagctgccaaatggggaagaacagtagttcccacctcaygtagtattgagtgcatgacttggagtaatgggtgggagagcacttcctgccttccttccctcattcatccccttacttaacaaataattattgaatatttatgatgtgtctaacctcttctgggcaccggggttatagtgataaacaagatagttggggttcctgatctcatgacttttgttaaaattttaactaccattattataataaatgaagaagactgaaattccaagaagctgagtcatgcagctatgcagctatattaataaaagggctcaaatagagcggggtcttgagtctccagtcccatgcttactcctccaccccccaccaacacgatgttgtgctctactttattaccctcaattttcttggtaaagaaaggtgttttttttttttaaaacaaaaacaaaaacaaaactttatttttaaagcagttttagatttataaaaaatttttgaagctagcacagataaattccatatacctcacacttggtttccccattattaaaatcttatgttagtattggtacatttgattcaattaatgaaccaatattaatgcattattattttactaaagtttatactttacatactttattcagatttccttagtttttttttttttcctccagtgttctttttctgatcca

SEQ ID NO: 84926 - DNA, 1106 bp, Homo sapiens
tctgtctcccctgcagcatccagagaaaggcaaattatggatgaggtgatttaatccaagcaaagtttgaatggagataaatggggtagggggcaaataggaacagagcgaggctagggagagtctttggggagaagattctgttcttttgagtcctataactggcaccatggaagggaccctagagacaatctaatgaggctccatcatggtgcagaagcagtgcagcatgggatatttgaaagggcaaattccttccatattgttcttacactagaagttaagggcgcagggggcataggttaggtgtgtggggtctggggtcagaccgtttgctttgagtcttgtttgtgttgctttttggttgtgtgtgggcaagaaatgtaacttctttcagccggagtgcaccagctgccaaatggggaagaacagtagttcccacctcatgtagtattgagtgcatgacttggagtaatgggtgggagagcacttcctgccttccttccctcattcatccccttacttaacaaataattattgaatatttatgatgtgtctaacctcttctgggcaccggggttatagtgataaacaagatagttggggttcctgatctcatgacttttgttaaaattttaactaccattattataataaatgaagaagactgaaattccaagaagctgagtcatgcagctatgcagctatattaataaaagggctcaaatagagcggggtcttgagtctccrgtcccatgcttactcctccaccccccaccaacacgatgttgtgctctactttattaccctcaattttcttggtaaagaaaggtgttttttttttttaaaacaaaaacaaaaacaaaactttatttttaaagcagttttagatttataaaaaatttttgaagctagcacagataaattccatatacctcacacttggtttccccattattaaaatcttatgttagtattggtacatttgattcaattaatgaaccaatattaatgcattattattttactaaagtttatactttacatactttattcagatttccttagtttttttttttttcctccagtgttctttttctgatcca

SEQ ID NO: 84927 - DNA, 1617 bp, Homo sapiens
tacacttcactcatgcacacactttaattattttgttttgtktgagaaatctatttgtccagccaggtgcagtgtctcacacctgtaatctcagcactttgggaggccaagacaggtggatcacctgtggtcaggagtttgagaccagtctgggcaatatggtgaaagcctgtctctactaaaaatacaaaaattatccaggcatgatggcgggcgggcgcctgtaatcccagctactcaggaggctgaagcacaagaattgcttgaacccgggaggcagaggttgcagtgagctgagatcatgccactgcactccatcctgggcaacaaagcgagactctgtctcaaaaaaaaaaagaaaaaaaaaaaaaaagaaaaagaaatctgtttgtccaaggcttcagttccactgtcagagactgttcttgaatttcttctcatcttcctattcaagacatccttgcatgtctagatcagagctcatgtttgtgtgtgtgtatgtgtggatcaaggaagaaggggaagatgagagtacagtattcaataagtaaagttgtaggtaactgagggatgttcatctccccaaaggaaaagtgaatcctgggttaaatggaaggagcagattattcccacagaggcaagtgatgaatgaaaacggagacaaactagttacagctgtgcaagtgtttgttggcaggtcaacaggaaagtggatggaaatgctgaagattttcaatatttagtgtattagttagaaattactttttgctcttgataacagagactcaacaatattagctcaaaccaattagggacgaattttccctcattttaaagaaaattggtgacagtagtccagggctagtttagaggctccatacaatcactgtggatccagcttcccactatcttttttgctctgccagcctcaatgcatggcttccatccttaggtcctgagatggccactagagctctaaccctcagcttgccaagcaggagggaagagaagagcaagggcaagggtctctcccagaagccctctgcccagagcttctgcacacatctcattggccatccctatgtataagggagggtagaaaagtaattatttttcagctgaacacattgctcagcgtttttatactaaagaccaaaggataaataaatataacgtgctctgccaaatctagttaagggaagataagaaaagtaatggtcattatctggccatttactaagagctagcactgtgctataagtcatcaaaacaaccatataaataaggttgttgcagataaggaaactgaggctcagagaagttaagtaacttgactgaggtcacatatttagtaaataggccagcatttccaaaagctgctgagtcatccttggaaatttaaaggagttaagatatcctttcttgataaccgtctttggtttctcatttctcctagcatggtagaattcctgcagaccaacatgaactcctaccataaactctcctactctttactattaagctttaaagccactataaaacagtagttaaaagcctttgggaaatttaggcaagtgataaattatctttggattttcaccatttctagacatttaa

SEQ ID NO: 84928 - DNA, 1617 bp, Homo sapiens
tacacttcactcatgcacacactttaattattttgttttgtgtgagaaatctatttgtccagccaggtgcagtgtctcacacctgtaatctcagcactttgggaggccaagacaggtggatcacctgtggtcaggagtttgagaccagtctgggcaatatggtgaaagcctgtctctactaaaaatacaaaaattatccaggcatgatggcgggcgggcgcctgtaatcccagctactcaggaggctgaagcacaagaattgcttgaacccgggaggcagaggttgcagtgagctgagatcatgccactgcactccatcctgggcaacaaagcgagactctgtctcaaaaaaaaaaagaaaaaaaaaaaaaaagaaaaagaaatctgtttgtccaaggcttcagttccactgtcagagactgttcttgaatttcttctcatcttcctattcaagacatccttgcatgtctagatcagagctcatgtttgtgtgtgtgtatgtgtggatcaaggaagaaggggaagatgagagtacagtattcaataagtaaagttgtaggtaactgagggatgttcatctccccaaaggaaaagtgaatcctgggttaaatggaaggagcagattattcccacagaggcaagtgatgaatgaaaacggagacaaactagttacagctgtgcaagtgtttgttggcaggtcaacaggaaagtggatggaaatgctgaagattttcaatatttagtgtattagttagaaattactttttgctcttgataacagagactcaacaatattagctcaaaccaattagggacgaattttccctcattttaaagaaaattggtgacagtagtccagggctagtttagaggctccatacaatcactgtggatccagcttcccactatcttttttgctctgccagcctcaatgcatggcttccatccttaggtcctgagatggccactagagctctaaccctcagcttgccaagcaggagggaagagaagagcaagggcaagggtctctcccagaagccctctgcccagagcttctgcacacatctcattggccatccctatgtataagggagggtagaaaagtaattwtttttcagctgaacacattgctcagcgtttttatactaaagaccaaaggataaataaatataacgtgctctgccaaatctagttaagggaagataagaaaagtaatggtcattatctggccatttactaagagctagcactgtgctataagtcatcaaaacaaccatataaataaggttgttgcagataaggaaactgaggctcagagaagttaagtaacttgactgaggtcacatatttagtaaataggccagcatttccaaaagctgctgagtcatccttggaaatttaaaggagttaagatatcctttcttgataaccgtctttggtttctcatttctcctagcatggtagaattcctgcagaccaacatgaactcctaccataaactctcctactctttactattaagctttaaagccactataaaacagtagttaaaagcctttgggaaatttaggcaagtgataaattatctttggattttcaccatttctagacatttaa

SEQ ID NO: 84929 - DNA, 597 bp, Homo sapiens
cctcrgcctcccaaagtgctgggattacaggcatgagctaccacgcccggccctcctgggtattttttatgatttaaatgttttcatgagtttgccccactaaggtaagaaaatgaactaatggatatcagcaagacttttaaacagcaagctttggcttgtaaacagtttgggttgaacctggagtataccaggaaattcagttaactataaaacgccttcgctgacatgtgaaggcaagtctgatggtaattttttttaagtgcagcacattggaaattcctgagggggcaacaagatgtttccccatgtggcagcttaaaacttcctggagtatgtagtcctcacctctgagagtaacctcaaaatcagataggacttctacattagcaaatacttcagggtaaagatgattagctggatgcttggaaaaagggagctgagaaaaagagatacagaaatggttctagagaaggaagaaaaaaattattttaaaaaatatttgcccatgatccaccaaccttatttttgagtatttccccaaggaaaggagatcgtggtatttagggatatctggattcccctgttattatagca

SEQ ID NO: 84930 - DNA, 1297 bp, Homo sapiens
tgcctttacctcctgagcttcttgggcttcctctggaaagtgacaggctacccygatcccaaaagatgttatgtgagtgtttctcctgcacgtccatcacggtgctggtagctgaagctccatgcttgggcaaatgagctagtgacactagaaaggaacagttttgaagactgacagtgtctcagagaactggctgtgcaaaaagggaagtgcttacatttaaagattttaaaaaaaaaagattttgtgcattagcattaagtaaaaataaatttaaaaggataggtgtggatagattgcattgtccatcatttgtgagaagtatcacatcagatgttgctaacatgcaagtataaaggcttttcaatcacttatttttcaaatatgaattaaagcagattagaagttatccctacaaaaatgccactcttaccagcatttcctagattagggaggaaagatactattaccaccaggatcctggaaattgtatattaagtgttccagttactgtaactgcataacaacatatttcaaatgtagaactgtaaaacaacaatcactttactttgctcacaaattccgtgggtcaggaattcagacagagctggattgggcagttctcacttggggtcactcaagaggttgcagtcagatgttagctgaggctgcagataattgaaggttccgacatccaagatagttcctccacacagctagcagtggatgctagccattgactgggagctccactggggctgaccagggagcctacttatgactgcgccagcatggccgtctcaaggtagttgacttctgacatagcagatcaaagctctaaatgcaagtgtcccagcaaccaaaaaagttgcaaaactttttatgacttgaccttgaagtcacatagatcacttctgtcatattctattggccaaagcggtcacacacctgcctagattcaagggaagaaactcctcttaaggggaagtgtgtcaagaatttacagataagactttaaaaccatcactatcactataaatactatcacttaagtgcgttatgtcattggaagttaaccacaaaggcagacgctattgctgccctgtcctatatcaccctggtccatgtctgagttcaatggcaactacggtggacagttcctgtgactgctgacagcttcctacctcaggtccccaagtgtagcatcccctgttccttccagtttttcctttgtcctggccaagaaatacaaagtgccttaactgctgtgtgaccagccagctgcatattttttcct

SEQ ID NO: 84931 - DNA, 1297 bp, Homo sapiens
tgcctttacctcctgagcttcttgggcttcctctggaaagtgacaggctaccccgatcccaaaagatgttatgtgagtgtttctcctgcacgtccatcacggtgctggtagctgaagctccatgcttgggcaaatgagctagtgacactagaaaggaacagttttgaagactgacagtgtctcagagaactggctgtgcaaaaagggaagtgcttacatttaaagattttaaaaaaaaaagattttgtgcattagcattaagtaaaaataaatttaaaaggataggtgtggatagattgcattgtccatcatttgtgaraagtatcacatcagatgttgctaacatgcaagtataaaggcttttcaatcacttatttttcaaatatgaattaaagcagattagaagttatccctacaaaaatgccactcttaccagcatttcctagattagggaggaaagatactattaccaccaggatcctggaaattgtatattaagtgttccagttactgtaactgcataacaacatatttcaaatgtagaactgtaaaacaacaatcactttactttgctcacaaattccgtgggtcaggaattcagacagagctggattgggcagttctcacttggggtcactcaagaggttgcagtcagatgttagctgaggctgcagataattgaaggttccgacatccaagatagttcctccacacagctagcagtggatgctagccattgactgggagctccactggggctgaccagggagcctacttatgactgcgccagcatggccgtctcaaggtagttgacttctgacatagcagatcaaagctctaaatgcaagtgtcccagcaaccaaaaaagttgcaaaactttttatgacttgaccttgaagtcacatagatcacttctgtcatattctattggccaaagcggtcacacacctgcctagattcaagggaagaaactcctcttaaggggaagtgtgtcaagaatttacagataagactttaaaaccatcactatcactataaatactatcacttaagtgcgttatgtcattggaagttaaccacaaaggcagacgctattgctgccctgtcctatatcaccctggtccatgtctgagttcaatggcaactacggtggacagttcctgtgactgctgacagcttcctacctcaggtccccaagtgtagcatcccctgttccttccagtttttcctttgtcctggccaagaaatacaaagtgccttaactgctgtgtgaccagccagctgcatattttttcct

SEQ ID NO: 84932 - DNA, 1297 bp, Homo sapiens
tgcctttacctcctgagcttcttgggcttcctctggaaagtgacaggctaccccgatcccaaaagatgttatgtgagtgtttctcctgcacgtccatcacggtgctggtagctgaagctccatgcttgggcaaatgagctagtgacactagaaaggaacagttttgaagactgacagtgtctcagagaactggctgtgcaaaaagggaagtgcttacatttaaagattttaaaaaaaaaagattttgtgcattagcattaagtaaaaataaatttaaaaggataggtgtggatagattgcattgtccatcatttgtgagaagtatcacatcagatgttgctaacatgcaagtataaaggcttttcaatcacttatttttcaaatatgaattaaagcagattagaagttatccctacaaaaatgccactcttaccagcatttcctagattagggaggaaagatactattaccaccaggatcctggaaattgtatattaagtgttccagttactgtaactgcataacaacatatttcaaatgtagaactgtaaaacaacaatcactttactttgctcacaaattccgtgggtcaggaattcagacagagctggattgggcagttctcacttggggtcactcaagaggttgcagtcagatgttagctgaggctgcagataattgaagkttccgacatccaagatagttcctccacacagctagcagtggatgctagccattgactgggagctccactggggctgaccagggagcctacttatgactgcgccagcatggccgtctcaaggtagttgacttctgacatagcagatcaaagctctaaatgcaagtgtcccagcaaccaaaaaagttgcaaaactttttatgacttgaccttgaagtcacatagatcacttctgtcatattctattggccaaagcggtcacacacctgcctagattcaagggaagaaactcctcttaaggggaagtgtgtcaagaatttacagataagactttaaaaccatcactatcactataaatactatcacttaagtgcgttatgtcattggaagttaaccacaaaggcagacgctattgctgccctgtcctatatcaccctggtccatgtctgagttcaatggcaactacggtggacagttcctgtgactgctgacagcttcctacctcaggtccccaagtgtagcatcccctgttccttccagtttttcctttgtcctggccaagaaatacaaagtgccttaactgctgtgtgaccagccagctgcatattttttcct

SEQ ID NO: 84933 - DNA, 1297 bp, Homo sapiens
tgcctttacctcctgagcttcttgggcttcctctggaaagtgacaggctaccccgatcccaaaagatgttatgtgagtgtttctcctgcacgtccatcacggtgctggtagctgaagctccatgcttgggcaaatgagctagtgacactagaaaggaacagttttgaagactgacagtgtctcagagaactggctgtgcaaaaagggaagtgcttacatttaaagattttaaaaaaaaaagattttgtgcattagcattaagtaaaaataaatttaaaaggataggtgtggatagattgcattgtccatcatttgtgagaagtatcacatcagatgttgctaacatgcaagtataaaggcttttcaatcacttatttttcaaatatgaattaaagcagattagaagttatccctacaaaaatgccactcttaccagcatttcctagattagggaggaaagatactattaccaccaggatcctggaaattgtatattaagtgttccagttactgtaactgcataacaacatatttcaaatgtagaactgtaaaacaacaatcactttactttgctcacaaattccgtgggtcaggaattcagacagagctggattgggcagttctcacttggggtcactcaagaggttgcagtcagatgttagctgaggctgcagataattgaaggttccgacatccaagatagttcctccacacagctagcagtggatgctagccattgactgggagctccactggggctgaccagggagcctacttatgactgcgccagcatggccgtctcaaggtagttgacttctgacatagcagatcaaagctctaaatgcaagtgtcccagcaaccaaaaaagttgcaaaactttttatgacttgaccttgaagtcacatagatcacttctgtcatatkctattggccaaagcggtcacacacctgcctagattcaagggaagaaactcctcttaaggggaagtgtgtcaagaatttacagataagactttaaaaccatcactatcactataaatactatcacttaagtgcgttatgtcattggaagttaaccacaaaggcagacgctattgctgccctgtcctatatcaccctggtccatgtctgagttcaatggcaactacggtggacagttcctgtgactgctgacagcttcctacctcaggtccccaagtgtagcatcccctgttccttccagtttttcctttgtcctggccaagaaatacaaagtgccttaactgctgtgtgaccagccagctgcatattttttcct

SEQ ID NO: 84934 - DNA, 670 bp, Homo sapiens
  misc_feature (1)...(670): n = A,T,C or G
attttttttttttttttgagacggtagttttgctcttgttgcccaagctggagtgcaatggcacagtctcggctcaccgcaacttctgccttccggattcaagcaatcctcctgcctcagcctcccaagtagatgggattacaggcatgygccaccacacctggctaattttgtatttttagtagagacagggtttctgcatgttggtcaggctggtctcgaactcccgacctccggtgatccgcccgcctcagccccacaaagtgctgggattacaggcgtaagcaaccacgtccagcccncctctattgtttttttatgatcgactcancagatacccccagaagaagagtactagttctcttgattggggagcagaaatggcacagagtgctgtcagccaaatctctgtcctgtcacgggcaggatacaggaggccatgcctggcagcctgccaacacaaagccccccacccagccctggctcactgcccagctaagcttagctctcacttggttgctcctgggtcttgggattctcttctctatctctgctttcccttagatgccacaacccacaaaagaaagaactgcagaattttggtgaacttcagagggcgcatgctcccctccttgtgaccatggtgtcacagaaagagatcactaggttt

SEQ ID NO: 84935 - DNA, 670 bp, Homo sapiens
  misc_feature (1)...(670): n = A,T,C or G
attttttttttttttttgagacggtagttttgctcttgttgcccaagctggagtgcaatggcacagtctcggctcaccgcaacttctgccttccggattcaagcaatcctcctgcctcagcctcccaagtagatgggattacaggcatgcgccaccacacctggctaattttgtatttttagtagagacagggtttctgcatgttggtcaggctggtctcgaactcccgacctcmggtgatccgcccgcctcagccccacaaagtgctgggattacaggcgtaagcaaccacgtccagcccncctctattgtttttttatgatcgactcancagatacccccagaagaagagtactagttctcttgattggggagcagaaatggcacagagtgctgtcagccaaatctctgtcctgtcacgggcaggatacaggaggccatgcctggcagcctgccaacacaaagccccccacccagccctggctcactgcccagctaagcttagctctcacttggttgctcctgggtcttgggattctcttctctatctctgctttcccttagatgccacaacccacaaaagaaagaactgcagaattttggtgaacttcagagggcgcatgctcccctccttgtgaccatggtgtcacagaaagagatcactaggttt

SEQ ID NO: 84936 - DNA, 670 bp, Homo sapiens
  misc_feature (1)...(670): n = A,T,C or G
attttttttttttttttgagacggtagttttgctcttgttgcccaagctggagtgcaatggcacagtctcggctcaccgcaacttctgccttccggattcaagcaatcctcctgcctcagcctcccaagtagatgggattacaggcatgcgccaccacacctggctaattttgtatttttagtagagacagggtttctgcatgttggtcaggctggtctcgaactcccgacctccggtgatccgcccgcctcagccccacaaagtgctgggattacaggcgtaagcmaccacgtccagcccncctctattgtttttttatgatcgactcancagatacccccagaagaagagtactagttctcttgattggggagcagaaatggcacagagtgctgtcagccaaatctctgtcctgtcacgggcaggatacaggaggccatgcctggcagcctgccaacacaaagccccccacccagccctggctcactgcccagctaagcttagctctcacttggttgctcctgggtcttgggattctcttctctatctctgctttcccttagatgccacaacccacaaaagaaagaactgcagaattttggtgaacttcagagggcgcatgctcccctccttgtgaccatggtgtcacagaaagagatcactaggttt

SEQ ID NO: 84937 - DNA, 633 bp, Homo sapiens
cagttagcccgcggctccaatctggtccccccccaaccccgagcctcgcggcgagaaaggaagmggctccggatggagagtaaagtgacaatcggagaagggcaggctgcctttcctcccgggggagccaaggggacctgcagagggcggtttctctccgcttttcctgtcccaccccgtcggcctgccccccaccccctccggcctctgcgccaaccccgcgcgccacccgcggcttcctccgctcggggtcctcgttcggcctctgctggcctccgcgactccgcggtgcccgcccccgttgagttcaaaaggacgcgcggagcggcgccggcccttcaccagcagcccgtccgactggaaaggtgagcacgagggaagggcgggggcgccggagagccgggtcgcccacattcgccgcagccacctcggccgtggcaggaaccgaaacccggagcggccgaagctcagcgctccgctggggcagagggtcgcggcggctgggaacgccgctccccgacgcaccggccgcccccagcgcagcgcgctccgcggggtgctggtaacgcggggggctcggggcgggggcggggacgggggcggggccgcggggcgaggaccaacccagcccgt

SEQ ID NO: 84938 - DNA, 633 bp, Homo sapiens
cagttagcccgcggctccaatctggtccccccccaaccccgagcctcgcggcgagaaaggaagcggctccggatggagagtaaagtgacaatcggagaagkgcaggctgcctttcctcccgggggagccaaggggacctgcagagggcggtttctctccgcttttcctgtcccaccccgtcggcctgccccccaccccctccggcctctgcgccaaccccgcgcgccacccgcggcttcctccgctcggggtcctcgttcggcctctgctggcctccgcgactccgcggtgcccgcccccgttgagttcaaaaggacgcgcggagcggcgccggcccttcaccagcagcccgtccgactggaaaggtgagcacgagggaagggcgggggcgccggagagccgggtcgcccacattcgccgcagccacctcggccgtggcaggaaccgaaacccggagcggccgaagctcagcgctccgctggggcagagggtcgcggcggctgggaacgccgctccccgacgcaccggccgcccccagcgcagcgcgctccgcggggtgctggtaacgcggggggctcggggcgggggcggggacgggggcggggccgcggggcgaggaccaacccagcccgt

SEQ ID NO: 84939 - DNA, 651 bp, Homo sapiens
aatacagtgattttcatattggttaaggtttagtcacttgataaagagctttattatagatttttttttaaggtgttgtatttttcatctcaagctgaggtcatttgtcttggttgttacagggtattcttcttacccagtaatgatttaatatacccataggcaaagtatcaagaagaaagtcatcatatggatctgtgaatctaaatacatttttaatgttagatgtaaaagttaacagctgtcacatatgttcagttatgacctgttgctgaattgaggaaaagtaggactgtgggaggaatttgcaatacaaccacaagcagaataaggctcttaagaaatacctaagagtactcatgtatggtgtcttcttgattttatattctgataaataatagagagtgaggtggtcttggttgggtaagagaaaatatacaaaacttttagaacttagggtacttgattcatattgtatgctctagtttcttcagtagaggcgagttgctttttaaatctttcctggacttgctgcattcatttgacaaaaagttactgtgcatctattacatgttaggtgtactggagatatagcagtgaacaaaatggacaacatccctgcccacaaggagrtgatgttcttgtttcagg

SEQ ID NO: 84940 - DNA, 2251 bp, Homo sapiens
attatttgaaggcaacacctgtgtgtttcatttctcgttatttcctcgcttcttagcatagggactcatgtttttcaaggtacagtgaataaatgaataaacaaatccatgaacacaaggcactgatctttatatagctaacattgaccaatgtgatgttctgtctttaatagcgcttttacaaagatgcaggaacattcgtcatgagattgtctaaaacatcaacctttgataaaagctgtaagacataatgttgaatagtttctctagtattacagcagaattttctgatgctctagcttgagaaccaatatgccttttaacagcaagtcagaatcagtggcttgtaaaaccaattcatggaccatgactagcattttaaattaatgaactattgagtggaatagaataaaatggaaaatatcagagtgcattccatgtcataagggtaagtattgtttgtgacatttttgtttcagctttatacatacccatgcacactcacacatgaaacatataaatggttgcaatgtgaaattaatttcttgttttctgatggcgggtcacagtccagtaagtttttgaaaaccactaccttaaaccatccatcttaggtaaggatgttttgacagagccgagtcagacatgtaggttcctgtggtttctgtgtaggtattttgcgttgtttggagcatgagacctttgtactatttgaatccaagtgtctgtttttcactttgttgcttactccatgaaagttttggtacttggagaaaataaattgaatgaccattttttttttattatttcaacaggcttttgaggggcaggaggtgtttggttatatgaatgagttctttagtggtgatttctgatattttggtgcacctgtcacccaagtagtgtacgctgtgtccagtgtgtagtcttttatccctcatccccacccctcttccgagttcccaaagttcattgtatcattcttatgcctttgcatcctcataacttagctcctacttataggtgagaacatgtgatgttttgaccatttctttttgaaaatacttatttacatatgtgcatttaggtaggaagctgtgcttaggctatctatcatcagcctttttggcagccttgggagcaaatgactacaccagaataagatgttgggcaatgtcctcggaagaggccgcaggcagtgttacccagagagactgccatgacctatttattggctgaaggccaggaagggcaggcatgtttctcatgcatgttcccttcctacatcgtcttgatctgcactgtgttcttgggcaagtcccagactcccatttcagtttttcttattttaaacatttgtatattgtatattgaaggaaataaaataatcctgtagcctttcaacatctttttaatgtttaatagttggtggccagagcagacaagtgttctttcccacgatgatatgactggtagttttccattttggggagcaaccttatttggaaagaactcatcagcatgctaataaacaagtgttattaacggctcatattcacttagtttatgcaaataattaatgtaagactgtgtgagtwggcaaaagtataaaataattacatattaaaatttcatgctcacgtttcatcttcctataaagttagtttttcagagagcggatcaaaaaaatgaaagtctttctcattttttctcattttactagatgctgacaaaagaaaaaaagcatttttactatttactgtcaacacatcttctcatgtgtgctcttttcccggagtcagtagcttgagcccaacgtggccgattgggtgtaggagttccactcagccacaaaaaatgtggccagggaggtttcactgtggacagcaggctttctaagagaaaggcaatttatggtgggttttcagacttgcagttttcctttctctgtagttgacaggaactttctttttataccttcctattttgttacaacatcttaagtaaagaaattctcttgtctagtcaagggcagggagggagttctgcactgttgcaggggacggaggagggggttggccactagcattaggtaaaactgctgaattgagcccagcatgtggaatcagtatttttgattcagggattcaagctctttgtccttttttccttcctcctagactgattcatagaatgtttcctcccccaggaagaaggtctttgtaaaggcgactttgttctcacttgtttg

SEQ ID NO: 84941 - DNA, 501 bp, Homo sapiens
gattcttccagaatccagccagattgtgacctctgggatagtacagataagaaactatactacctcccccccctcaacacacctgtaattatttaatattgaaggcaagagtattttgctttgagaatgagaaacgttgaatcagaatctggagtgatttccttctccatattctcttcttcccttccttctcttttataattgtttcatgatctgatctcccataatctagcagtaccacagctagactctgggctacacacaaaaaggtatgtcccatttcttggggcagggagaagagagagtagacacagcctcattaagagagaggatgtccatgcaatgtgggcatcctaccagggaggtagggtgattgtccttctcccagggtgcttaataaaggcttcmtctgaggctggtcagtggaggtctttcagatcaatgtgcttgttgcttgtttacccaagccatttaaacatcgctgagatagaattatttttg

SEQ ID NO: 84942 - DNA, 543 bp, Homo sapiens
agttccagaccagccacagaaaaataatgagtcccatctccttaagaaaaaaacagcatgatactggtagcaaaacagaaatatagaccaatggaacagaacagaggcctcagaaataacaccacacatctgcaaccatctaatctttgacaaacatgacaaaaacaaacaatgcggaaaggattccctatttaataaatggttttgggaaaactrgctagccaaatgcagaaactggaccacttccttacaccttaaacaaaaattaactcaagatggattaaagacttaaatgtaagacctaaaaccattaaaaaccctagaagaaaacgtaggcaataccattcagtacacaggcatggacaaaggcttcatgactaaaacaccaaaagcaatggcaacaaaagtcaaaatagacaaatgggatctaattaaactaaagagcttctgcacagcaaaggaaactacattcagagtgaacaggcaaactacagaatgggacaaaacttttacaatctatccatctgacaaagggctaatatc

SEQ ID NO: 84943 - DNA, 1050 bp, Homo sapiens
  misc_feature (1)...(1050): n = A,T,C or G
agcgtgaacccaggaggtggagcttgcagtgaaacgagatcgcgccactgcactccagcctgggcgacagagcgagactccgtctcaaaaaaaaaaaaaaaaaagatacaaaattatacctaaaaataaactcaatgctrtatcagtctcttcaggtaaatgtatggatttaaagccattccagtaaaatagatgctaaagctcctaagaagaataaataagtgaaaataagaaaanaaagtcataaaagaaaaaataatgaggggtgcttcaaaaactagatatgttactaaagctatcataatgactctggtgtgctaccaccatataaacagacaaataaatgaaaggaaatggaaaactgagaaaaagactcgcaacacattcattattttcctcagtccaattgtttatagccagagaatatcacatgaagcaaatctgaaattcataccatatttgaatgaacacaaatgtattgttttgcatacagaagtcaagcaagacagatgaataaacagacttagataatcagaaactacatgtgcttactaatatgatataaaggatccatcttaattagtaggaaagaatggtttaatcattgggaaggggaatggcataatttgttgattatttggaaaagataaagctttcttcctacctcataatatttatttaaaaattgcagatggattaaagtgttataaagaacacagttttaaagtcataaaacaagtacagatgaaaatacatcatttcttggtagaaaagcaaacaattaaaaacagaattgttaataaattcaagtacataaaaacaaaaatgattctcataaattatcaaaaataaattatggtaaactagtgaaaataattttaaaataaagtaaaaataaagaacaactgttatttatgaaaattattataaattaataagatacattaataaggaatattgatacaagaaaataggcaacttatacaaattatgaacaatataagaaaacatttgcatcacaattatcaaagaagtatattaaaatgtcaa

SEQ ID NO: 84944 - DNA, 853 bp, Homo sapiens
tattagtacaaagtcacatcttgtacaacagaaatgcaggttcatttatatctgttaagctttgctgttatttatgttacaaaaaaaatactgacagagcatcatgtttccaaaattctcaatcactaatgcttttctgacagttgcatattattttcccaatgatttctaatagcagcgaaacataagtgacatatagtaagatttaaaagcaaataatggactatattagtctgttttaatgccgcttgataaagatatacctgagactgggcaatttacaaaagaaagaagtttaatggagaactcatagttccatgtggctgggaagcctcacaatcatggctgaaggcaaggaggagcaagtcatatcttacgtggattgcagcaggcaaagagagggcttgtgcagagaaactcccattttttaaacccatcagatttcgtgacacccattcactatcatgagaacagcatgggaaagaccctccaccatgattcactcatctcctaccggggtccctcccacaacacatgggaattgtgggagccacaagatgaggtttgagtggggacacagagccaaagcatatcatggactatgtctacatacatcaaattcatgatagcagaacttttatgcactgcagaaaacctttaggtctagaaacaattgatccttgaattacacatttccaaacattgggataagaaagtattatcaagaaaaaactcaaaccgtcatcaaaattgawgtattgataactttagtcacatttttagttttatatagatatagctctcacatgttttaacattctaagggtttcaagtctataaaaataggtaatgc

SEQ ID NO: 84945 - DNA, 684 bp, Homo sapiens
tgtagagacggagtttcaccatattggtcaggctggtctcgaactcctgacctcaggtgatccgcccaccttcgcctcccaaagttctgtgatcataggtgtgagccactgcacccagccaatatttttttttcactctgttatatactgtgctcttttctttttttttttctttcttttcyttttttttgttttttgagatggagttttgctcttgtcacccaggctgcagtgcagtggcgcaatctctgctcaccgcaacctccacctcccaggttcaagacattctcctgcttcagcctcccaagtagctgggattataggcgtctgctaccacgccaggataattcttttttttttttttttttttttgtatttttagtagagatggggtttcaccatgttggtcaggctggtatcaaactccggacctccggtgatccgcccgcctcggcctcccaaagtgctgggattacaggcatgagccactgcgcctggccttagtgttctgtttcccaactttgggtcacaacccattaataggacatgaaattaatttaattgagtgtggtcagcatttttcaaaaaatgaaatagatggaatataagcatcagagtatattatagagagaaagctaagtgttgtatgatacacctgaacacgcatgctgggcatctacttaa

SEQ ID NO: 84946 - DNA, 652 bp, Homo sapiens
cttgaaggatcgtcatgaagattcaaggaaatatggcacatggtaagcacccaagaaatcctagtagtttgtgatacgatttgtattcagtcacttggtcaaggtgctttctgtggactactagaaacggagcattaacttttggccaggatctccattatctccctgcctctctacctctgtgcctccttycctctcttcctccttctctctcttctttccttcctcccttcccctctctcctctctttccttctccctttttctttttgcctccctccatctccctgtcatcctccatctccctccgtctctccctctcttccttccatccttcccttccattctgcttagtactagacaacccacagagtcccttgtccacaatattaagcaataagcattaggtctcagtgttcctcatgccacatctctcagatgaatgggtcagagcccttcccaggtcctgaccggttgtcactggtgtgggtgtgctctgatcagcttcatctactctacaacagcccactgccttgcctgtcctaggttctgacagccagatcaacaacctaagacttctgttcccttggagaaagactcacttaatggaaaggcagctccaccagcagtacaaagtgaacatcctcatcctg

SEQ ID NO: 84947 - DNA, 2061 bp, Homo sapiens
ttctgagcccttgaaatccagacctagacatcaaagtcaaggaaagtcagagagattcaaagcaggaggggactccatgcacaagagagtttctgttgctggctttgagatgcagggggccaaaagtcaaggaatgtgggttgcctctgggagctgagggcagccaccagcagaagtcagtaggaaacaggggccctagtcttacaacttcaaggatctgaatcctgccagcatcctgaatgagcttggcagtggattcttccacagagcatgcaggaaaggatgttcctccagcggacacctttattttgtccccaagagaccctgagcagagaagccagtcacattgtgtctaggcttctgatctagagaattgtagttaataaacaagatgtgaatgtgaactgctaagtgtgtggtcatttgttacacagcaatagcaaaagaaaaaaaaattctgcagcatgcaacaatcccagctttcaaataaaattttctcctgttcatttctttggcattcacaatgaccatgccttcagagtataaaattcataacacaaaaactcaatcaccatagctgcttttttttaattgcttaagaactggtttcaaaatgatatgtatcactaacattattattattgtaacattattatcattaatttttttgagacagagtttcactcttgttgcctagactggagtayaatggcgtgatctcagctcactgcaacctccacctcccaggttcaagggattctcctgcctcagcctcccaagtagctgggattacaggcatgcaccgccacacccggctaatttttgtatttttagtagagacgggggtttcaccatgttggccaggctggttttgaactcctgacctcaagtgatccacccacctcggcctcccaaagtgctgggattacaggcgtgagccaccgcacctggccactaatgttattcttgatggtaataatattctattctaaccagtaaatacagaccagcagctagtgtaattgtttttctctgccgtatcttactcaaaggcaagaaagaaagatttcagatccaaacagatttcagaatcaattccacaaaaggtacctgtttcagtagtactgacttattctgagctactagctggagaaaagccctactatgcatattttttgtatagaatattttctaatataatctcctgaactgcagagacgggagaaaaaaatggccttgtaaatttctcctaacaaccaaaagtacactaaaaaagacaacagcctttcaatgtcactaatttctctgaagcaatataacagcaaactccagagaccttggctagttcagacaaaatagaaaaacgtagattcaggagaagctggggagctaggctttctgcaacggattgtaagccaagtcataaattgaggtaaagtatgagatagaggggggaaggagggtggagcctgttgttttgtgcctgttcacttgaggtctgtaagatgaatgggctgagaattgtcctgtccatttctgcaatacattcacacgattaaagtcattagttagaactttctaccaggaagctattgtgagaagaatgtttcccttgaggaggaggattaaaaagaaaaagaaaagaaaatcctcccggaatacacaaaaatatatgcacaggaaaaatgaagccagtggccatttgctaatagtgttgctttaaaagcatacgcacttagagcctcttttttccagcacgtttaataagaaaccatattaacaaggtgatccaggcaatgcttgggaggaaagggaaaaagttcattcatttcataaatccattggctggagaacatctctttctcccagtctcatgctagaatttgatctacttgctcctcgacactcagtctacaggcatgtcttagtctatatccatccctggctctggcctccatgatctcttgccgggactattctaggagcccacctgctaccagtcctgaccctcacaaatccatcgttcttccctgaagccagagggctctttctaaaatacat

SEQ ID NO: 84948 - DNA, 2061 bp, Homo sapiens
ttctgagcccttgaaatccagacctagacatcaaagtcaaggaaagtcagagagattcaaagcaggaggggactccatgcacaagagagtttctgttgctggctttgagatgcagggggccaaaagtcaaggaatgtgggttgcctctgggagctgagggcagccaccagcagaagtcagtaggaaacaggggccctagtcttacaacttcaaggatctgaatcctgccagcatcctgaatgagcttggcagtggattcttccacagagcatgcaggaaaggatgttcctccagcggacacctttattttgtccccaagagaccctgagcagagaagccagtcacattgtgtctaggcttctgatctagagaattgtagttaataaacaagatgtgaatgtgaactgctaagtgtgtggtcatttgttacacagcaatagcaaaagaaaaaaaaattctgcagcatgcaacaatcccagctttcaaataaaattttctcctgttcatttctttggcattcacaatgaccatgccttcagagtataaaattcataacacaaaaactcaatcaccatagctgcttttttttaattgcttaagaactggtttcaaaatgatatgtatcactaacattattattattgtaacattattatcattaatttttttgagacagagtttcactcttgttgcctagactggagtataatggcgtgatctcagctcactgcaacctccacctcccaggttcaagggattctcctgcctcagcctcccaagtagctgggattacaggcatgcaccgccacacccggctaatttttgtatttttagtagagacgggggtttcaccatgttggccaggctggttttgaactcctgacctcaagtgatccacccacctcggcctcccaaagtgctgggattacaggcrtgagccaccgcacctggccactaatgttattcttgatggtaataatattctattctaaccagtaaatacagaccagcagctagtgtaattgtttttctctgccgtatcttactcaaaggcaagaaagaaagatttcagatccaaacagatttcagaatcaattccacaaaaggtacctgtttcagtagtactgacttattctgagctactagctggagaaaagccctactatgcatattttttgtatagaatattttctaatataatctcctgaactgcagagacgggagaaaaaaatggccttgtaaatttctcctaacaaccaaaagtacactaaaaaagacaacagcctttcaatgtcactaatttctctgaagcaatataacagcaaactccagagaccttggctagttcagacaaaatagaaaaacgtagattcaggagaagctggggagctaggctttctgcaacggattgtaagccaagtcataaattgaggtaaagtatgagatagaggggggaaggagggtggagcctgttgttttgtgcctgttcacttgaggtctgtaagatgaatgggctgagaattgtcctgtccatttctgcaatacattcacacgattaaagtcattagttagaactttctaccaggaagctattgtgagaagaatgtttcccttgaggaggaggattaaaaagaaaaagaaaagaaaatcctcccggaatacacaaaaatatatgcacaggaaaaatgaagccagtggccatttgctaatagtgttgctttaaaagcatacgcacttagagcctcttttttccagcacgtttaataagaaaccatattaacaaggtgatccaggcaatgcttgggaggaaagggaaaaagttcattcatttcataaatccattggctggagaacatctctttctcccagtctcatgctagaatttgatctacttgctcctcgacactcagtctacaggcatgtcttagtctatatccatccctggctctggcctccatgatctcttgccgggactattctaggagcccacctgctaccagtcctgaccctcacaaatccatcgttcttccctgaagccagagggctctttctaaaatacat

SEQ ID NO: 84949 - DNA, 1086 bp, Homo sapiens
gtgttataagaagccaagaatgggtgccccccaccccccaaccaagagccagttctgttaacacagcagagagccctccccaggtctcaaagtctccctgcctttgctgccacaggtaagagggggtggttttgctcactgcaaaccacataacagaaacaacacctgcttgggcacttaaccctggaacgggaaagctgaaagtggtttctgtttattttgatctcgagcgtaaaatgaagagcaatcatgtccctggagtctcggcagaggacaaacaaagctgatggaggaagacaaagtctgctttttcaggatgcttcatgggaggctggggtgttaagcrctcctcagcctgcctgtgtgatctgagaaacggggcgggggcaggtggggcgggggcagtggcatcaggtgcctgcctcccgccgagggtattcaccattcaaagcacaggcgcgaagagcaaacagctaccagacagaatcctttaggtctaggctattcctttcctttgaaccagagacaggaacagaacaccttagcccagcctccctgcaacattccaacacttgaattgtaggatgggagtcccaatttcccagacatcagggcaatattctcccatttccttacaacactgggtcaatgtaaaggttaaaaatttaaataaatataaataaataggagatcaacatcctcctttcttgggaaaattcagacaatgctacacaaaagtttggaagacgagatatctaaagatcacccagaaaaaagatataggagcatgctgttttcattaggtttcttcaaaaatcagtggtatgatttcacagtattttgtttcatggaatatattcacgatatttgtttcatggaataaattcatgatatttgtttcatggaatatactggatatctgtttcatggaatatattcacgatatttgtttcacacaatatattcatgatatttgtttcatggaatatattcacgatacttgtttcatggaatatattaggtatttgtttcactgaatatattgactgttactcagaatcctaacatgcaatgtctttcttcaaa

SEQ ID NO: 84950 - DNA, 1086 bp, Homo sapiens
gtgttataagaagccaagaatgggtgccccccaccccccaaccaagagccagttctgttaacacagcagagagccctccccaggtctcaaagtctccctgcctttgctgccacaggtaagagggggtggttttgctcactgcaaaccacataacagaaacaacacctgcttgggcacttaaccctggaacgggaaagctgaaagtggtttctgtttattttgatctcgagcgtaaaatgaagagcaatcatgtccctggagtctcggcagaggacaaacaaagctgatggaggaagacaaagtctgctttttcaggatgcttcatgggaggctggggtgttaagcgctcctcagcctgcctgtgtgatctgagaaacggggcgggggcaggtggggcgggggcagtggcatcaggtgcctgcctcccgccgagggtattcaccattcaaagcacaggcgcgaagagcaaacagctaccagacagaatcctttaggtctaggctattcctttcctttgaaccagagacaggaacagaacaccttagcccagcctccctgcaacattccaacacttgaattgtaggatgggagtcccaatttcccagacatcagggcaatattctcccatttccttacaacactgggtcaatgtaaaggttaaaaatttaaataaatataaataaataggagatcaacatcctcctttcttgggaaaattcagacaatgctacacaaaagtttggaagacgagatatctaaagatcacccagaaaaaagatataggagcatgctgttttcattaggtttcttcaaaaatcastggtatgatttcacagtattttgtttcatggaatatattcacgatatttgtttcatggaataaattcatgatatttgtttcatggaatatactggatatctgtttcatggaatatattcacgatatttgtttcacacaatatattcatgatatttgtttcatggaatatattcacgatacttgtttcatggaatatattaggtatttgtttcactgaatatattgactgttactcagaatcctaacatgcaatgtctttcttcaaa

SEQ ID NO: 84951 - DNA, 718 bp, Homo sapiens
ttataacgatgacttagtaccccaaagcaaaaacattctcttacctccacttaccactactttgtatgataacagcagcattaattttaaagtcatcatgaatcaatcatgaaatctgactcatgtttttactggcaacaaaacaccctaattagcaccttgaatacgagccactttctggatgggctttggtgagagcgatcttctgctgttaattctttgctaattactcatagtacaggaggttggactatcactagactgggttagaatacccatgtagggcgggtgtggtggctcatgtctgtaatcccagcactttgtgaggccgaggtgggcggattacgagatcagcagaccgagaccatcctggctaacacggtgaaaccctgtctcgactaaaaatgcaaaaaaaaaaaaaaaaaaaaaattagccaggtgtggtggcrggcacctgtagtcccagctactcgggaggctgaggcaggagaatggcacgaacccaggaggcagaacttgcagtgagccgagattacgccactgcactccagcctgggcgacagagcaagactccgtctcaaaaaaaaaaaaaaaaaaaaaaaaaggacatgtaccagtcctgtgacatagccaccttgaatctttgcacaatggcacagagcttcccaacctgggcactgctgatattttgtggtgggcatggtcctttgcactgcag

SEQ ID NO: 84952 - DNA, 718 bp, Homo sapiens
ttataacgatgacttagtaccccaaagcaaaaacattctcttacctccacttaccactactttgtatgataacagcagcattaattttaaagtcatcatgaatcaatcatgaaatctgactcatgtttttactggcaacaaaacaccctaattagcaccttgaatacgagccactttctggatgggctttggtgagagcgatcttctgctgttaattctttgctaattactcatagtacaggaggttggactatcactagactgggttagaatacccatgtagggcgggtgtggtggctcatgtctgtaatcccagcactttgtgaggccgaggtgggcggattacgagatcagcagaccgagaccatcctggctaacacggtgaaaccctgtctcgactaaaaatgcaaaaaaaaaaaaaaaaaaaaaattagccaggtgtggtggcgggcacctgtagtcccagctactcgggaggctgaggcaggagaatggcacgaacccaggaggcagaacttgcagtgagccgagattacgccactgcactccagcctgggcgacagagcaagactccgtctcaaaaaaaaaaaaaaaaaaaaaaaaaggacatgtaccagtcctgtgacatagccaccttgaatctttgcacaatggcacagagcttcccaacctgggcactgctgatattttgtggtgggcatgstcctttgcactgcag

SEQ ID NO: 84953 - DNA, 693 bp, Homo sapiens
tgttgatctatgaccttacccccaaccctgtgctctctgaaacatgtgctgtgtccactcagggttaaatggattaagggcggtgcaagatgtgctttgttaaacagatgcttgaaggcagcatgctcgttaagagtcatcaccaatccctaatctcaagtacccagggacacaaacactgcggaaggccgcagggtcctctgcctaggaaaaccagagacctttgttcacttgtttatctgctgaccttccctccactattgtcctatgaccctgccaaatccccctytgcgagaaacacccaagaatgatcaataaaaaaaataaaaaaataaaaataaaaacattacctggggaaaaaaaaaaaaaaaaaaaagccaaacacatagaaacataatagaatggtagttgccaggggccagaatagagaggaggaaatgaaatgctggtcaaagggtacaagcttaaaaagaatacattctgctgagctaatgtgtagcatggtaataatatttaatagcactatatcatatacttgaaatttgctatgagagtaagtcataggtgttctcatcccccacacacaaaatggtaacaataggtgatgtatgtgctaaagtacttcattgtggtaatcactttacaatgtgtacatttatcaaatcatcacattgcatactttcaatataaaca

SEQ ID NO: 84954 - DNA, 1102 bp, Homo sapiens
cattttaggagttaaacaattaatgtctcacaaaagaatttaacgatttcagaagttaatagaaaacctaaaataaaattattccctaactatcagggcaagaaataccaagacaaggattataaagaaatcttcacagcatggtagaaagatgtaagggctctgaatctgtgagytgtaatattctagaaaaatattctatcaaaatttattattctgccaaatgagaagtttggactagatgatctctctggcccttttcagatctaaaaatcattatatgaagtggacatatttaaatccagacaggattgccaggttttggaggtcctataatgaacaggatatgggccctatctttgcaggttcacataatgtggcatgaaggtctcattttgtgcagatgtgcaaattgagtagtattcttgctatttgtttctgaaacatattaatgtgtttcatacaaaggctttccagtgaaacacaagtaaatgctaatctatatggcccgttggtggatttttcatgcttttgaatttataagggtctcttcagcctgtgttgatgtacaactgggggtagacttttagagtaacctcatagatactatagctcatggaggtttgtttgtatgtgtttgcacaaacatgtacaaatttactctttaatttggcgctaagtctcccaatgctgaattatactcacaaccactcattctacccacacacatactttcagcacaaaaattctttgaactcaactctaaatggtcaagggcctgaccagatgattccgtaagagaaattttatctactttcctcctggacctcaagagaagaagcactgacacaagcagggaagagcattctaatctgaattctgagagctttgcctgttagtttcctgccaggcacaagtttgagtagacagtgctgtccagcacatgcgttgtctaggtctgccggccgtggctgtcagtgggttctatggttctaaggtgagcctcctagaatggcacatttcaatgtccacacgacaataatttgtaatactaatcaaagtcttttattctatctttatagttttagaatgttctgactct

SEQ ID NO: 84955 - DNA, 1102 bp, Homo sapiens
cattttaggagttaaacaattaatgtctcacaaaagaatttaacgatttcagaagttaatagaaaacctaaaataaaattattccctaactatcagggcaagaaataccaagacaaggattataaagaaatcttcacagcatggtagaaagatgtaagggctctgaatctgtgagttgtaatattytagaaaaatattctatcaaaatttattattctgccaaatgagaagtttggactagatgatctctctggcccttttcagatctaaaaatcattatatgaagtggacatatttaaatccagacaggattgccaggttttggaggtcctataatgaacaggatatgggccctatctttgcaggttcacataatgtggcatgaaggtctcattttgtgcagatgtgcaaattgagtagtattcttgctatttgtttctgaaacatattaatgtgtttcatacaaaggctttccagtgaaacacaagtaaatgctaatctatatggcccgttggtggatttttcatgcttttgaatttataagggtctcttcagcctgtgttgatgtacaactgggggtagacttttagagtaacctcatagatactatagctcatggaggtttgtttgtatgtgtttgcacaaacatgtacaaatttactctttaatttggcgctaagtctcccaatgctgaattatactcacaaccactcattctacccacacacatactttcagcacaaaaattctttgaactcaactctaaatggtcaagggcctgaccagatgattccgtaagagaaattttatctactttcctcctggacctcaagagaagaagcactgacacaagcagggaagagcattctaatctgaattctgagagctttgcctgttagtttcctgccaggcacaagtttgagtagacagtgctgtccagcacatgcgttgtctaggtctgccggccgtggctgtcagtgggttctatggttctaaggtgagcctcctagaatggcacatttcaatgtccacacgacaataatttgtaatactaatcaaagtcttttattctatctttatagttttagaatgttctgactct

SEQ ID NO: 84956 - DNA, 1064 bp, Homo sapiens
taagtccaaaaagccactcttttgttcacaaaatgagcattgattgccttcaacctgacctatgtaagcatgtcttctgatgatctatggcacaacaaagaaaatcccatatatataatgtgtatgygttactagatgtatttggctctttgagtcttagaaactatgcaggtagcatttggaaactaataaaaatcattgagaggcagataatggggcaaactctattctccaaagagagccaatagtctgtgctggtatagattagagataatgctctataaagcagcatttggtaaaatatgctgcaggcagaagatggtcaataaatgtggttggctattaagctgtgaaagggtcctcctacggaatatacataaactctattctgcaaagtcttcaaagatgttttctgatagcacaaaacgtcctctttttttacaaaagggcaataactagatggattttgcctgttttcaggaaactcagggtccagagatcactgcatttctcagggaatttacctggtggaactactggtgggcgaaataataaagctaggtcataggacaagtataacaataaattttacactgaattgagggtctccctgtaaattaaaaaatgtgtggcaagttctttcttatttaaaaaatgacaatagaatggcaatgaatataaaaatagtgatgacattagaacattttctatagatactaaaactacagagtgaaaatctaagtattttgccacatcaccaatattatatcagactaatatcatgtgtcttctgagaaagacacatcatcatcttgttggtattcctgcctaaatactgtataaacggaatataatcatgaggaaatcagaccaacccaaactgagggatattctacacagtagcaggcctatacttttcaaaaatattaaggacaagaaacacagagaaagtatagaaattattctagattaaagaagacaaaaagcaatgatgtgacatatgtgatcttgggatacattctagaccaggagaaaaaaaaaagctatcaaggatattcgtgaga

SEQ ID NO: 84957 - DNA, 1064 bp, Homo sapiens
taagtccaaaaagccactcttttgttcacaaaatgagcattgattgccttcaacctgacctatgtaagcatgtcttctgatgatctatggcacaacaaagaaaatcccatatatataatgtgtatgtgttactagatgtatttggctctttgagtcttagaaactatgcaggtagcatttggaaactaataaaaatcattgagaggcagataatggggcaaactctattctccaaagagagccaatagtctgtgctggtatagattagagataatgctctataaagcagcatttggtaaaatatgctgcaggcagaagatggtcaataaatgtggttggctattaagctgtgaaagggtcctcctacggaatatacataaactctattctgcaaagtcttcaaagatgttttctgatagcacaaaacgtcctctttttttacaaaagggcaataactagatggattttgcctgttttcaggaractcagggtccagagatcactgcatttctcagggaatttacctggtggaactactggtgggcgaaataataaagctaggtcataggacaagtataacaataaattttacactgaattgagggtctccctgtaaattaaaaaatgtgtggcaagttctttcttatttaaaaaatgacaatagaatggcaatgaatataaaaatagtgatgacattagaacattttctatagatactaaaactacagagtgaaaatctaagtattttgccacatcaccaatattatatcagactaatatcatgtgtcttctgagaaagacacatcatcatcttgttggtattcctgcctaaatactgtataaacggaatataatcatgaggaaatcagaccaacccaaactgagggatattctacacagtagcaggcctatacttttcaaaaatattaaggacaagaaacacagagaaagtatagaaattattctagattaaagaagacaaaaagcaatgatgtgacatatgtgatcttgggatacattctagaccaggagaaaaaaaaaagctatcaaggatattcgtgaga

SEQ ID NO: 84958 - DNA, 1760 bp, Homo sapiens
atccgtagttttggcagattctataaacttacggtagatatcctgcgcaattagtgaaactggcaaatccctgaagtgcagtttcggagttccagtgataatgttggtatcttcatatgtgttcacagaaatagctgctttctcaccatctgtcaaaagctgtcttgacatcagttaagtcactaaatcctgatacatggtatagtccttcagaactggaactttcagactcaatctccctgttgcacatgtctgccacccttggctgcttagcagtgtgtgcttttgacaagcattgtaaggtcacagctggacacgttggcatgcctcaagcctggcttccagtcatttgggaccatgttgggtcactgcttgtgaacactgaaatcaatccacacagttcactccctgagcaatgagaccatacatgaggatggcacggtattcatgccagcgtgggcctctcgatgcatggaccttgaaattgtgaaccttttcatattttggaatttgcttgttttctttcagagttgctctcctaacgagtgatgtcacccttttctccgacacctcatcctggcctatagaatctcaccacgtgtctttttcaggactggcatatattttttgcaaacagactctctgtttaaggttgtgcatcctatgtgctcataaactgggtttatcatcatcttggcaatgtattctgctgccttgtttcaatatagagagtaatcaagccatcagttaccagattgtggatggacacacagtgtttcttcccagcaaagtgatttccatcgcactagaacctgaagtttcttgtttgacttcccaatctgaaagctaaagtgtagggccctgccttttgctgcctctccccatgatgtatctccctcagccacactcaagagctggtcagctgcttctccagagatcatgccgtgaaactctcttccatgatactttgggctgttttctcccttgaaagtacagataatccttcgaggattagggtcttcctgttgtagttgatataagtaagatttccaaataggaaatcgattttcatctgtatcaaacagggtcagggccgatctttttttttttccccatagactcaagaacatggatagcatcacagcattatttgcaaaaagactctactagaaaacaagactattgccccaaattttttccgtttttgttttttaaatattgagttggtcttgaactcctggcctcaagcaatcctcctcctttagccttccaaagtgctaggattataggcytgagccactgcacccagccatagccaggtatttttttttaaatgattgcccaacttattttgttatttacttatttatttaggatgtaagcaacaaacatttattttgcgcagttttggaggctgggcaccagcagactggtgtctggtgagagtatcctcctggtttgcagatggccatcttctcaccacatcctcacacagcctccgtgaagcctatttgctccttctggaagcttcccaggggtctgatgagaaaatcactagcatgtgtgctatcgtcatcttctcttcctctacctttttgagcaattcaacaaattccttgaaggattcagtgatgttaatatcatcatcaagtcagagtatctccaatgaaatcaaactgaaatgaccgcagcatctgggaacatttctgacctgcagaagagtaatgctcaccagctcattataaaggatattacaaagg

SEQ ID NO: 84959 - DNA, 1760 bp, Homo sapiens
atccgtagttttggcagattctataaacttacggtagatatcctgcgcaattagtgaaactggcaaatccctgaagtgcagtttcggagttccagtgataatgttggtatcttcatatgtgttcacagaaatagctgctttctcaccatctgtcaaaagctgtcttgacatcagttaagtcactaaatcctgatacatggtatagtccttcagaactggaactttcagactcaatctccctgttgcacatgtctgccacccttggctgcttagcagtgtgtgcttttgacaagcattgtaaggtcacagctggacacgttggcatgcctcaagcctggcttccagtcatttgggaccatgttgggtcactgcttgtgaacactgaaatcaatccacacagttcactccctgagcaatgagaccatacatgaggatggcacggtattcatgccagcgtgggcctctcgatgcatggaccttgaaattgtgaaccttttcatattttggaatttgcttgttttctttcagagttgctctcctaacgagtgatgtcacccttttctccgacacctcatcctggcctatagaatctcaccacgtgtctttttcaggactggcatatattttttgcaaacagactctctgtttaaggttgtgcatcctatgtgctcataaactgggtttatcatcatcttggcaatgtattctgctgccttgtttcaatatagagagtaatcaagccatcagttaccagattgtggatggacacacagtgtttcttcccagcaaagtgatttccatcgcactagaacctgaagtttcttgtttgacttcccaatctgaaagctaaagtgtagggccctgccttttgctgcctctccccatgatgtatctccctcagccacactcaagagctggtcagctgcttctccagagatcatgccgtgaaactctcttccatgatactttgggctgttttctcccttgaaagtacagataatccttcgaggattagggtcttcctgttgtagttgatataagtaagatttccaaataggaaatcgattttcatctgtatcaaacagggtcagggccgatctttttttttttccccatagactcaagaacatggatagcatcacagcattatttgcaaaaagactctactagaaaacaagactattgccccaaattttttccgtttttgttttttaaatattgagttggtcttgaactcctggcctcaagcaatcctcctcctttagccttccaaagtgctaggattataggcctgagccactgcacccagccatagccaggtatttttttttaaatgattgcccaacttattttgttatttacttatttatttaggatgtaarcaacaaacatttattttgcgcagttttggaggctgggcaccagcagactggtgtctggtgagagtatcctcctggtttgcagatggccatcttctcaccacatcctcacacagcctccgtgaagcctatttgctccttctggaagcttcccaggggtctgatgagaaaatcactagcatgtgtgctatcgtcatcttctcttcctctacctttttgagcaattcaacaaattccttgaaggattcagtgatgttaatatcatcatcaagtcagagtatctccaatgaaatcaaactgaaatgaccgcagcatctgggaacatttctgacctgcagaagagtaatgctcaccagctcattataaaggatattacaaagg

SEQ ID NO: 84960 - DNA, 1760 bp, Homo sapiens
atccgtagttttggcagattctataaacttacggtagatatcctgcgcaattagtgaaactggcaaatccctgaagtgcagtttcggagttccagtgataatgttggtatcttcatatgtgttcacagaaatagctgctttctcaccatctgtcaaaagctgtcttgacatcagttaagtcactaaatcctgatacatggtatagtccttcagaactggaactttcagactcaatctccctgttgcacatgtctgccacccttggctgcttagcagtgtgtgcttttgacaagcattgtaaggtcacagctggacacgttggcatgcctcaagcctggcttccagtcatttgggaccatgttgggtcactgcttgtgaacactgaaatcaatccacacagttcactccctgagcaatgagaccatacatgaggatggcacggtattcatgccagcgtgggcctctcgatgcatggaccttgaaattgtgaaccttttcatattttggaatttgcttgttttctttcagagttgctctcctaacgagtgatgtcacccttttctccgacacctcatcctggcctatagaatctcaccacgtgtctttttcaggactggcatatattttttgcaaacagactctctgtttaaggttgtgcatcctatgtgctcataaactgggtttatcatcatcttggcaatgtattctgctgccttgtttcaatatagagagtaatcaagccatcagttaccagattgtggatggacacacagtgtttcttcccagcaaagtgatttccatcgcactagaacctgaagtttcttgtttgacttcccaatctgaaagctaaagtgtagggccctgccttttgctgcctctccccatgatgtatctccctcagccacactcaagagctggtcagctgcttctccagagatcatgccgtgaaactctcttccatgatactttgggctgttttctcccttgaaagtacagataatccttcgaggattagggtcttcctgttgtagttgatataagtaagatttccaaataggaaatcgattttcatctgtatcaaacagggtcagggccgatctttttttttttccccatagactcaagaacatggatagcatcacagcattatttgcaaaaagactctactagaaaacaagactattgccccaaattttttccgtttttgttttttaaatattgagttggtcttgaactcctggcctcaagcaatcctcctcctttagccttccaaagtgctaggattataggcctgagccactgcacccagccatagccaggtatttttttttaaatgattgcccaacttattttgttatttacttatttatttaggatgtaagcaacaaacatttattttgcgcagttttggaggctgggcaccagcagactggtgtctggtgagagtatcctcctggtttgcagatggccatcttctcaccrcatcctcacacagcctccgtgaagcctatttgctccttctggaagcttcccaggggtctgatgagaaaatcactagcatgtgtgctatcgtcatcttctcttcctctacctttttgagcaattcaacaaattccttgaaggattcagtgatgttaatatcatcatcaagtcagagtatctccaatgaaatcaaactgaaatgaccgcagcatctgggaacatttctgacctgcagaagagtaatgctcaccagctcattataaaggatattacaaagg

SEQ ID NO: 84961 - DNA, 1760 bp, Homo sapiens
atccgtagttttggcagattctataaacttacggtagatatcctgcgcaattagtgaaactggcaaatccctgaagtgcagtttcggagttccagtgataatgttggtatcttcatatgtgttcacagaaatagctgctttctcaccatctgtcaaaagctgtcttgacatcagttaagtcactaaatcctgatacatggtatagtccttcagaactggaactttcagactcaatctccctgttgcacatgtctgccacccttggctgcttagcagtgtgtgcttttgacaagcattgtaaggtcacagctggacacgttggcatgcctcaagcctggcttccagtcatttgggaccatgttgggtcactgcttgtgaacactgaaatcaatccacacagttcactccctgagcaatgagaccatacatgaggatggcacggtattcatgccagcgtgggcctctcgatgcatggaccttgaaattgtgaaccttttcatattttggaatttgcttgttttctttcagagttgctctcctaacgagtgatgtcacccttttctccgacacctcatcctggcctatagaatctcaccacgtgtctttttcaggactggcatatattttttgcaaacagactctctgtttaaggttgtgcatcctatgtgctcataaactgggtttatcatcatcttggcaatgtattctgctgccttgtttcaatatagagagtaatcaagccatcagttaccagattgtggatggacacacagtgtttcttcccagcaaagtgatttccatcgcactagaacctgaagtttcttgtttgacttcccaatctgaaagctaaagtgtagggccctgccttttgctgcctctccccatgatgtatctccctcagccacactcaagagctggtcagctgcttctccagagatcatgccgtgaaactctcttccatgatactttgggctgttttctcccttgaaagtacagataatccttcgaggattagggtcttcctgttgtagttgatataagtaagatttccaaataggaaatcgattttcatctgtatcaaacagggtcagggccgatctttttttttttccccatagactcaagaacatggatagcatcacagcattatttgcaaaaagactctactagaaaacaagactattgccccaaattttttccgtttttgttttttaaatattgagttggtcttgaactcctggcctcaagcaatcctcctcctttagccttccaaagtgctaggattataggcctgagccactgcacccagccatagccaggtatttttttttaaatgattgcccaacttattttgttatttacttatttatttaggatgtaagcaacaaacatttattttgcgcagttttggaggctgggcaccagcagactggtgtctggtgagagtatcctcctggtttgcagatggccatcttctcaccacatcctcacacagcctccgtgaagcctatttgctccttctggaagcttcccaggggtctgatgagaaaatcactagcatgtgtgctatcrtcatcttctcttcctctacctttttgagcaattcaacaaattccttgaaggattcagtgatgttaatatcatcatcaagtcagagtatctccaatgaaatcaaactgaaatgaccgcagcatctgggaacatttctgacctgcagaagagtaatgctcaccagctcattataaaggatattacaaagg

SEQ ID NO: 84962 - DNA, 1202 bp, Homo sapiens
ttccatgtgacttggagggaacagggtagaggttagtgtaacattccctacttttgagaggagacttgttttacagataagggagggacctgcatttgttatctatatgacttgctttgtgccttcaggagcatacattgcagtgttaggattctgacagcaaagtccacagtctcctggtcatgtgtacatgtgatgttccctgtcacctgggctggagtgcagcggtgtgatcatagctcactgcaacctcaaactcctgggctcaagggatcctcctgcctcagcctctcgagtagctgcacaccaccacacccagctactattttttttttttttaagatggagtctctctctgtcaaccaggctggagtacagtggcacaatcttggctcactgcaaccaaggtgctgggttcaagcgatactcctgtctcagcctccttaatagttgggattacaagcatgtgccaccacacctggctaatttttgtatttttagtagagatggggtttcaccacattggccaggctggtctcaaactcctgatctcaggtgatytccctgccttagcctcccaaagtgctaggattacaggcgtgagccactgcaaccagccccagctttttatttttagtagagacctggtctcggtatgttgcccaggctggtctcaaactcctggccgcaagtaaatgtctcttcttgacctcccacagtgttgggattacaggtgtgagtcatcacacctggcctgtacgtgtgattggaatcctgtgtagctgagagtgcaggccaccctgcgatacatctttgctcaagagaaggaaaaatattctaatgattaattaaacaaggcagcaaatgctccctcactagagttggttgagcattattatagatgtttatctgacaggagttttgcatcttgagtgcatgtatctcataggtgattttaatactgattcttgatcttgcattcatggtcttgttcacttaatcacaataggtgttggagaagctgaaacaattgaatatttccactttttctcattcttcttgcttttccctggagaaaaaaatggtaataagtaggaatccattatatgccagacatcatatgctgtgcacatgcacacatatttttctcgcttttcctccttatgacagttccacaaggcagacagtgtttgtgatagttt

SEQ ID NO: 84963 - DNA, 529 bp, Homo sapiens
tgtggccgaggctccacagcatctttggtcgctgttcctgtctccaccgtgaagatggagccacgtccctcgcggcccctggctgggccccacctcccggagactcaggaagggcttggaatcggtgccagtttcgccggctgtgggccccacggcgatgatgaataacttgtttatctgctggagcttctcccacygctctctcggtgcctggcaggcagaggtctggaaggggcgggcagggacagggaggactggctcaccaggcagccgccgcccctcctccctcctccctctgccccactccccaattcagcatcaacctccacctaaacatgcttcctgcacttttctactcctcatctttccccaaatcctgttttagaagcagcaggttgaagtgtttgaaaacacagactctgaaatcagactggattcgagtcccagctttgtcacttgtcagccatgtgactttggacacgacttaaactctcagagccatcactccccctgtaaagtaaagtatttt

SEQ ID NO: 84964 - DNA, 865 bp, Homo sapiens
tgcatatatgcaaatgccctatctgaagggacttgtaggtcatgagattctagagtmagaagggatcttaaaggtcatttagtttggcttctttctcttccttttccccatggcctctccttttaaggctagtccttctgccagtacttcagaccctatctgtatattcacctgctccttcttaacataatcaagcttctctatcttaaacccttcccccacccccacagctgtcaccttttcccgtcccagtttacagcaggaaatttgatagagttgtctatatttattgtcttccatttgcttaccacctactcacccttcaacctactgcagtctgatttctgccccatcatcccactgaaacctgtccctcaacttaattgatacctttcaatccttatcttatttgatatctcagcagcgtttgacgttgttgaccatggcttccttgacggaaagcactcttcacatgtgttctggaatgcctcgctcctggtttgactcagacctctcttttgcggcctcaccctcctctactttgttattcattgctggtattcctcaaaggccgtcttctcactctcaatttcccgctcaggcaatttcttctaagcccatagctacaactgtctatatgccagtgattctcaatattttacccccagtccagacctgccctttaagtttcaggttaatatgtccaactgcttatttaaaatcaaggtcccgaaacgcagctttttcaactccgaacccaggatcttagcccacctaacttgtgtagatactcctcgacttaacgatggggctaccttccgataaacccattgtaagctgaaagtatcagaagttgaaaatgcat

SEQ ID NO: 84965 - DNA, 651 bp, Homo sapiens
actgagctagagggtgaggaatggtctaaggcaagttaacacaaatctcactgttcttacagaaattttttttgaataaatgctccttgggttgctgcaagactttggttacatttctagagttctgaaaaagtttattgtggtcaatttttttttttttttttttttttttttttgctattttttttgggatttgttgcttttatgaagggatgaatttttggaaggcyctttttttttttttttttttttttttgagacagagtctcactctgttgtccaggctggagtgtagtggcataatctcatctcactgcaagctccacctcccgggttcacacaattctcctgcctcagcctcccgagtagctgggactacaggcgcctgccaccacgcccagctaatttttgtatatttagtacagacggggtttcactttgttagccaggatggtctcgatcccctgacctcgtgatccgcctgcctcagcctcccaaagtgctgggattacaggtgtgagccactgcgcccagcctgcatgtctttattccaccattttcactgatgtcacttacgacatgattttaaatctctgaaggctcactgggcacatgcctgtagtcccagatactcgggaggcaaaggaagaa

SEQ ID NO: 84966 - DNA, 651 bp, Homo sapiens
actgagctagagggtgaggaatggtctaaggcaagttaacacaaatctcactgttcttacagaaattttttttgaataaatgctccttgggttgctgcaagactttggttacatttctagagttctgaaaaagtttattgtggtcaatttttttttttttttttttttttttttttgctattttttttgggatttgttgcttttatgaagggatgaatttttggaaggccctttttttttttttttttttttttttgagacagagtctcactctgttgtccaggctggagtgtagtggcataatctcatctcactgcaagctccacctcccgggttcacacaattctcctgcctcagcctcccgagtagctgggactacaggcgcctgccaccacgcccagctaatttttgtatatttagtacagacggggtttcrctttgttagccaggatggtctcgatcccctgacctcgtgatccgcctgcctcagcctcccaaagtgctgggattacaggtgtgagccactgcgcccagcctgcatgtctttattccaccattttcactgatgtcacttacgacatgattttaaatctctgaaggctcactgggcacatgcctgtagtcccagatactcgggaggcaaaggaagaa

SEQ ID NO: 84967 - DNA, 780 bp, Homo sapiens
atcccttcctctctggatgaagtccccttcatcgaccagctttctcacttagttctctaagatagtgaggatctgtctgcttttttcttgaccattattggataggaaaaatgctctcatcctctgtaatgatttgtcaccaaggccataaagacattgaactaamtgtcttatgggagttcattattggaagtcttcaggagtttacacatttatgtacaaagtaagtaggccagctcatttgagtcttggctcatgtgtaatgatctttcatgtgtattgaaaaattattctcaagtatacctcaggtcatttacagtctcaaagatttgtcagtatactttaaaacaatcctgggaacagttctagattgaaggagactaaagaatcatgtactaagtgtaatgtctgatgtttgattggattgtgaattttttaagccatgttatgattgggacaattgtgaaaatgtgtatacggaccgcatagtagacaatgataatatgaagttccattgagtgatgatagtcctctggttatgtcagagaatgccttggttcttaggggctgcacactgaagtcttcaatggtgaagggtcattatgtctgcaactgactctcaaatggttttgtccagaaaatgtatagacatacacacacggaaagctaatgtggcaaagtattagcaactactgattccagatgaaagttatacaggtgttcattataccatttgaaaatgtttcccagccatcctaaggcttaaaggaaaaaaagaaa

SEQ ID NO: 84968 - DNA, 669 bp, Homo sapiens
tttacttcagttacagggattgtttttatctctctgaaagtgcccccaataagccacaacaataaattaatcaattgtctcggtcacctcttttgcccaaatttacgtattggaaaaaattcaaacaagccagaaagatgaaagaatagtacagaatccaatcaaagatcaggcactgcatgtcatgtcttcatttcctttaatctaaaacatgcctctactttctttgatctttcatgacaytggcattttttaagagtcaaagatagttgtcttgtaaattgtcccacaatccagatttgtctgtttcctcatgatgaaattcaagttaagcatttttgggaaaaatactgcataggtgatgtatccttcctgcctcgtaaccgcagatggcctgtaatactaagtttgatcacttgactaaggtgatcttccaggtctctccattgtaattattttgctggctacagtggctcccacttgtaatcccagcactttggaaggccgaggtgggaggattgcttgagcccaggagttctacaccagcctgagcaacatggggaaactctgtcactactgaaaatacaaaagtacaaaaaaaaaaaaaaaattagctgggcatggtggtgcaagcctatactcccagctactcaggaggctgaatttgga

SEQ ID NO: 84969 - DNA, 748 bp, Homo sapiens
caagaccccgggtatgtggtctgtggtggtggttctccctgtgattatggactgagatactcatttagtcctaataagaccagagaagtacattgtgagatacgtgggaaacggctgcatcactcactgtcttgtgcatgtgtctccccaggggcattttcagatttctgccayggaggggatgctcttcgcgaagggagagtcaggtacattggaggattcattgctgtggccagggaaagcagaggacatgcaaaattaatatttccctttctatcttctaggatggactttcctcatttggacagccgctctggtttaaagatatgtacaaacctctcagtgccacaagaataaataatcatgcatggaagctgcacaagaagtcatctaatgaggacaagatcctcaacagggaccctgggtaaatgatggggccctcacagttcccatctaaaatgaggagggggtgagaagcttaattgctcctttcaagaatgaaaaccttggcattgttattcttatcccagggacagcgaagccccaacggaggaggaggagagtgaagccctgccataggaggagaacacagcccacctcaggcctcctgcaaaaatacatagaataaacaacaacagttactaaatgaatgaaaattgtgattccgatgaagcctgccagagaaacaaagcattttttaaaagaggaaataaggtgatatctgattagggcaaacatgatgcagaca

SEQ ID NO: 84970 - DNA, 748 bp, Homo sapiens
caagaccccgggtatgtggtctgtggtggtggttctccctgtgattatggactgagatactcatttagtcctaataagaccagagaagtacattgtgagatacgtgggaaacggctgcatcactcactgtcttgtgcatgtgtctccccaggggcattttcagatttctgccatggaggggatgctcttcgcgaagggagagtcaggtacattggaggattcattgctgtggccagggaaagcagaggacatgcaaaattaatatttccctttctatcttctaggatggactttcctcatttggacagccgctctggtttaaagatatgtacaaacctctcagtgccacaagaataaataatcatgcrtggaagctgcacaagaagtcatctaatgaggacaagatcctcaacagggaccctgggtaaatgatggggccctcacagttcccatctaaaatgaggagggggtgagaagcttaattgctcctttcaagaatgaaaaccttggcattgttattcttatcccagggacagcgaagccccaacggaggaggaggagagtgaagccctgccataggaggagaacacagcccacctcaggcctcctgcaaaaatacatagaataaacaacaacagttactaaatgaatgaaaattgtgattccgatgaagcctgccagagaaacaaagcattttttaaaagaggaaataaggtgatatctgattagggcaaacatgatgcagaca

SEQ ID NO: 84971 - DNA, 589 bp, Homo sapiens
tagaagagtgcctaacatatacgaagcactatcagtatttgttgctgctgtggctgttagagttcttggctggcaaggaaaatctaaaaatgagagaaagtgaatggctgtacagtaagcagagttcatgtttcttctctttataaagcacagcaatgaactgaccgaaagaacggaagaaatcagaagtctcatccataaaacttactagccatttgactttgttcaaatctttcgccattctcggtatcatctatgtatttactccgtagatttttattgactaactactacccaagatactaggggtagcatgggaaacattacatacataaagtttacagaccagcgaactcaattcttttcactctccaatgaaagcaaaggttgagaaagtcaaaataagagtgtcatctccttaggactttttcagactgcttccaaaaaccacgcccgcttctttcctctgttggaacctgctgkattgagccactactgctgatgtgaatgtggtatattctctgaatgtactgtgacagaaaggagagaattgctagattagatgttatgtgtaattcatcccgcagtt

SEQ ID NO: 84972 - DNA, 820 bp, Homo sapiens
gtatttatatgtatgtatctttgcccacatatctatttcctttagatacatttcttaragtggaattgtttggtcaaaggatgtaactattttaaaagacatatatgtatgtatgtttgcatatttattttgctactttggcagagaatgtcatgcctctcatctgcagtggagatttgttgctaggaagcaggtgctcccagctcccctcagtgggcctgtgtgcctgattctctcccagggactcagagcagtaagtatgtcacttcccagacaaggttgttaaaatgtaggtgtgccttttcaatggcctccctcttctctggtctctcagctgagtgtcgaattatggggtagcactggaagccacactcaaggtagtgtaggctgtcagtcaggctctaccatcctctctgtcaatgagaggatgagggactcctaccaccagtcaggattgtccacctcagcccctaggtaactgagaaataacttactgtgtgaagctcctgacattaggggttcatctgttacagcagccagtgcttctgatcaactataactagcttgtcctccaagagggttgctcctccaccaacagcttaagaagatcctatccttgttcccttcagtctcaccaatacttttgtggcacttaaaaattggcagcttcatagctagtgagtggtacatctcaatgttgttttatcttataattcttccgagtcctagtaaatttcatgtgtttattgactacttgtatttcttcttagcccagacacctataactttaaaaattcctggaaggccaaaaaaaaaaaaa

SEQ ID NO: 84973 - DNA, 820 bp, Homo sapiens
gtatttatatgtatgtatctttgcccacatatctatttcctttagatacatttcttaaagtggaattgtttggtcaaaggatgtaactattttaaaagacatatatgtatgtatgtttgcatatttattttgctactttggcagagaatgtcatgcctctcatctgcagtggagatttgttgctaggaagcaggtgctcccagctcccctcagtgggcctgtgtgcctgattctcwcccagggactcagagcagtaagtatgtcacttcccagacaaggttgttaaaatgtaggtgtgccttttcaatggcctccctcttctctggtctctcagctgagtgtcgaattatggggtagcactggaagccacactcaaggtagtgtaggctgtcagtcaggctctaccatcctctctgtcaatgagaggatgagggactcctaccaccagtcaggattgtccacctcagcccctaggtaactgagaaataacttactgtgtgaagctcctgacattaggggttcatctgttacagcagccagtgcttctgatcaactataactagcttgtcctccaagagggttgctcctccaccaacagcttaagaagatcctatccttgttcccttcagtctcaccaatacttttgtggcacttaaaaattggcagcttcatagctagtgagtggtacatctcaatgttgttttatcttataattcttccgagtcctagtaaatttcatgtgtttattgactacttgtatttcttcttagcccagacacctataactttaaaaattcctggaaggccaaaaaaaaaaaaa

SEQ ID NO: 84974 - DNA, 717 bp, Homo sapiens
ggttctgggtaaagtaaaatgtggctcaaggaggcagccagaacttagtgtttacatgccttcttaggctagacaaagaaaaagaggtttggggcttgctgagggggtaagttatgcaaggtgaccaagggctgtgtggaaacaagagttgtttatcaaggtttgttatgcagatttcaggtggtgccttctccattgataggagttgcagcagccatcctcctccttcctggtttgggagagggagacacttttgcaaatgtaaatttcttttataaaatgtaagcttcctttaagaaagggaaatttatgytctgcttcagagctttttctgggtatgatgttcctcaattgccttcagctcagaataatccttatgccaaaaaggcctattttggggtggcatattctggtctccttcactattatagttcattctacatcaggatagattttgaaaagtagttgtgcttccctatacacaatcagcacactttggaagcaataatactcatttctataggtctctggggttgctagggtgcttcactgggcagagtccaataacctcaattatggaagccttactctatgtcttagagtaaaatcattttcaccctttcatgatgggcaagcaataggctcaggctccattgcatgtatctcagtatgcgggatagcacaaacaggaaagagaacacggcaagttagaggaat

SEQ ID NO: 84975 - DNA, 668 bp, Homo sapiens
tgacctctctgttcttatatcaaaaatatatcacaatttaactcactgttttttcattagtccttagggcaagccatgtgcagtatcattaagtatctttcaaatacaaatctctgcttctggcacaaaggaacccctgccctccttagcaaattatttgttacccttaggcctatttcagctatgccagggaaagcgaatctcttcttctgaaatattcattactgtgaagcagcgattctgtacttcagggcctagaaggggagagatttctttgcattctcacctctgccgcccagactccctttgacacatccacctcccagactgcagarcggagggttgctaggagaccagggtggcagacaggcaggatccagaggggctcagctagttgggaaagctgcaagggtgaacacaacagttgagtgaaaaaggaaacaaatacttcctggactcttgatctagttttaaaagactaaggtaaatacacatgggggtgggctggggatggaaagggaggaagtttcggggaagagcatatagatgagaggtggggatgcaacatgaagtgctacaggaggtgagcactgcaggaggctgtgtagatggcagacaccaaaggcttattgctcagaggagataaaaacaaaagtcattttgattga

SEQ ID NO: 84976 - DNA, 662 bp, Homo sapiens
ggatccaaataatttctacaactagattttatttctttagcagttttaggacatttgtaaaagctccttgatttaaacaactgcctctaaaagactgacattttcccaaggtatgtctgaaggaatataatttataaacacatatattaaattatagaaaaataactctcagataattaaagttgtytactgcaatataaaaatatatggaaggcacctaaacaaaacttttgaagaatttattaagaataagttgggaatactaaggaaaggaaaagataacaacagggaagttttcagaagtttgctaagtaatgatctctcctcctcttcctcctcctcctcctcctcttccccatcttcttatttttgtttaaactaatatttacattgttgcatggagtggggaggagtagtcttatacttacagtgtcttaaaaacattgtggtagaatttgacttcctcttattaataagttccaggattatttttcaggaccggaaaacaggagctggagagggaaatggggaggaggaggagagggatagctaaaaagagaaggaaaataaaggaaaaagaaaagaaaaatagtcagacggctgaattctctagacaatgaatttctggttcaatagaatatatatgtcttaacagcttgagt

SEQ ID NO: 84977 - DNA, 662 bp, Homo sapiens
ggatccaaataatttctacaactagattttatttctttagcagttttaggacatttgtaaaagctccttgatttaaacaactgcctctaaaagactgacattttcccaaggtatgtctgaaggaatataatttataaacacatatattaaattatagaaaaataactctcagataattaaagttgtttactgcaatataaaaatatatggaaggcacctaaacaaaacttttgaagaatttattaagaataagttgggaatactaaggaaaggaaaagataacaacagggaagttttcagaagtttgctaagtaatgatctctcytcctcttcctcctcctcctcctcctcttccccatcttcttatttttgtttaaactaatatttacattgttgcatggagtggggaggagtagtcttatacttacagtgtcttaaaaacattgtggtagaatttgacttcctcttattaataagttccaggattatttttcaggaccggaaaacaggagctggagagggaaatggggaggaggaggagagggatagctaaaaagagaaggaaaataaaggaaaaagaaaagaaaaatagtcagacggctgaattctctagacaatgaatttctggttcaatagaatatatatgtcttaacagcttgagt

SEQ ID NO: 84978 - DNA, 488 bp, Homo sapiens
tgcctactgaatatagttattgaataaaatctatttgaaactgtatgttcaaaataattttatctatatatctatatattaaatattatctatagttagatatggtggtataatgtatttgactgatagcttggcatgaaagctcaatatatatatatatttatatatatgtttctgagtaatataaaggatctagtaatgtgattatatattacatgaagaaactgttctattttgaaactgcttcttttacaaacttagctgtttttacaagtatgcctatttaatttcatgggataacaagaaaacatgtatatagktcataggaggataatgcttaatgaaataacagatatagtggaattaagatttgtatatagaaataataattctattataaactaattggtgatttgaaactattaaatatcattatgtgtgtatgtgttcattttattatttctatctcatgatcatttattcactaa

SEQ ID NO: 84979 - DNA, 675 bp, Homo sapiens
aaggaatgcttgacaaaatgaacttgaaattatttccttgcaactacattgtctctctttaatgttgtaagaaatatattttaatcgctattgtttttcaatgtctcatacagaaagaggagatgtttcataaaatttgatgaatgagtaaagttgctaaccaacaaagacttgagatttattcattaattaatttagtaatttataccaaggatatatccaggtcatttagaaaatggctcctctttcttgtgwtttagatccactagttaattggtttctctgcctggctgattgtcagtcgagacgcctacgttgcttataactagcatgtccataaacagagcaaagttattaatttaatctgcttcagttggtaggcaatgtgggggaaccagcctgtgtgtacatagttctcttgggtttgtttactggattaccacttcagaaacagccagactgtgtctgtctatacaacacctacaccactgagctgttagcttatgtacccaaacaattcattgactcagtggcaagtgtcaattgcttggctgaatttctggttgtttaatgaaattgaatagttgattaatttcaattggttaatccaataatgctctggagaccaactgttttttaaagaaaaaatagtatttctttacttgaaaacactaa

SEQ ID NO: 84980 - DNA, 675 bp, Homo sapiens
aaggaatgcttgacaaaatgaacttgaaattatttccttgcaactacattgtctctctttaatgttgtaagaaatatattttaatcgctattgtttttcaatgtctcatacagaaagaggagatgtttcataaaatttgatgaatgagtaaagttgctaaccaacaaagacttgagatttattcattaattaatttagtaatttataccaaggatatatccaggtcatttagaaaatggctcctctttcttgtgttttagatccactagttaattggtttctctgcctggctgattgtcagtcgagacgcctacgttgcttataactagcatgtccataaacagagcaaagttattaatttaatctgcttcagttggtaggcaatgtgggggaaccagcctgtgtgtacatagttctcttgggtttgtttactggattaccacttcagaaacagccagactgtgtctgtctatacaacacctacaccactgagctgttagcttrtgtacccaaacaattcattgactcagtggcaagtgtcaattgcttggctgaatttctggttgtttaatgaaattgaatagttgattaatttcaattggttaatccaataatgctctggagaccaactgttttttaaagaaaaaatagtatttctttacttgaaaacactaa

SEQ ID NO: 84981 - DNA, 646 bp, Homo sapiens
ttgcttctgctccattactgggcatagctttgctgcgggaaatgatgctacctcctctgcattggagttcactgctctccagacttctcctggcctaagagtcttgaattcattttagcctttattcagctgaggtgagattggccttttacaacctggggcagtttgatcattgatgatctggctggcagagatgctcacacatacaggtgtgtttctacttttcacccttttgggtccattgggtctgaagcacactcaccagttgaccagttgctatggctactcgtagtttcctccccggattgcatcatcaagtcaggaactcatatattttttgccacacttgttggaagacctctttctgattttatttctgcctctgctatgtgagaaactcctcactggattcccagttccttctagggaattccctatatttcccaacatcgcgagtcctctccaacattcttccaggtgtaatctcttgataagtgtctttctagaattctgcttcaggttcwtatagacagtgtcacaaaatcatttactagaactaagaacagggttattctctgatactactatttaccttagggctagaaacttaggcagccagaacgtttaaacatgaaccaaattgcta

SEQ ID NO: 84982 - DNA, 579 bp, Homo sapiens
gactatcactgtgtgcctggaatccaagctacgtaaaacaggaaatgagtttaagaggggcctgatagagaaaaagtggtaggtacatgggaaagagggtgtcagattggttttgtattgtttacagttgcagtggaagtactttgaaagtgagctgcagagatagaaagtgagctgcatggtcagagggtgttctggacattgcaattctgaaagagtacaaagcaacggtaaggtgagagtaggcagcgggtggagattgagaggtgagataaagaaaccgtggtagaagcagagaactcaagatgaaagggcacatctgtcctcagagcttgatctgttgctctaaagcattcatcagtctgcccgtyctgaacgagacctccctgtctttccagcattttgggtctattcaacctggctgtgaatccctctcagtctctggcttgggcagccagccctgagcatctcagtgctaagactactttgtcgatgctgggtggtcccctctggccagttccataaatcctcagcgaactttggataattcaagaacttctgaactctaagtaccccttg

SEQ ID NO: 84983 - DNA, 1568 bp, Homo sapiens
aggttattctttctgtaaataattacagtgaatctggaaggcaggaggcaggacctggagagtgggaggggagagttaagagtcaacaatcaaccactctgagtcataaaatcagaaaggcattgaacatttagaaggagaactggccccataaagaaaacaatgcctcttagtaagcatattatctgcaacaaagcaaaacaaatttgcaagcatcttattgaaactgctagggagggaaatcatgaatagtttctgtggagcaagagatggagaatgaaaattaataatacagtgcctgttattactaatttgagatgtgtaaaatgccaygtatatgacctttatttattgcattgttgcatttttcttggttttggtcaacataacctgattgagaaggtgaggaacatggcagttgaaggcctgggctttgcagcaagatagccagggtttaattctcagctctgtcactcattatctgcctgggctctggcaagattctgaatcactgtatacctcaattttctcgtttaagagtaaagacttctattattatttctcagagtattacatcgagcttactatatggttcatgtatgttctaaggcttttacaaattttaacacatttcatcttcacagcagtcctagcagatgggtactatttcacagaaaattgaggcacaacaggtgaatgacttacacaaggtcacccagctagaggatggcagtgtcaggtttccaaccctggcagtgtgactccactgcttttatacaggatgccctccctccacctcttttcctacaaagtattggaggtaagggatgatagatgagctcacaatattggcccattgcaatcaggcatcaccaccccacaccacacctccccctccccactaccccttgtcatttgaaggtcttcagggaagctgggcagtgacagtgagatcagcagccttgtcttgtaatgctctttttcgaagtgtattggggaatgaagggggtaaaaggaggcaggtgtggtgtaagtcatggtattatttcttatgcagtaaatcataaacatagttttcattgagaataaggagcaagaggaaattaaaggacttcacagccaaaagactaagagagtaattaatggagaaaggtcccagaggaagcaaagaaaaaaaaaactcaacaacatagatttaagaatatacaaaatataaggttcaccctgcaaaggtctgagaacaccagggatgtgaaaaaatatacataagtttggagaacaatggaaggtaaattgaattatttcagtcgaattgacctttcattactcaataaatatttgttgagccaatgaataatgtgtttgtgatcctatacggaaaaactatgcctttttaacttcggtagtatccttaacatagttctctagaatttgacacttaattagtacctttggataaggctgctgctgcttctataaatgatctcagcctagacaattaattcagttgattcccttcaaaaacatactgatctacaatctttaaatacaaaatgatagaaccagaa

SEQ ID NO: 84984 - DNA, 1568 bp, Homo sapiens
aggttattctttctgtaaataattacagtgaatctggaaggcaggaggcaggacctggagagtgggaggggagagttaagagtcaacaatcaaccactctgagtcataaaatcagaaaggcattgaacatttagaaggagaactggccccataaagaaaacaatgcctcttagtaagcatattatctgcaacaaagcaaaacaaatttgcaagcatcttattgaaactgctagggagggaaatcatgaatagtttctgtggagcaagagatggagaatgaaaattaataatacagtgcctgttattactaatttgagatgtgtaaaatgccatgtatatgacctttatttattgcattgttgcatttttcttggttttggtcaacataacctgattgagaaggtgaggaacatggcagttgaaggcctgggctttgcagcaagatagccagggtttaattctcagctctgtcactcattatctgcctgggctctggcaagattctgaatcactgtatacctcaattttctcgtttaagagtaaagacttctattattatttctcagagtattacatcgagcttactatatggttcatgtatgttctaaggcttttacaaattttaacacatttcatcttcacagcagtcctagcagatgggtactatttcacagaaaattgaggcacaacaggtgaatgacttacacaaggtcacccagctagaggatggcagtgtcaggtttccaaccctggcagtgtgactccactgcttttatacaggatgccctccctccacctcttttcctacaaagtattggaggtaagggatgatagatgagctcacaatattggcccattgcaatcaggcatcaccaccccacaccacacctccccctccccactaccccttgtcatttgaaggtcttcagggaagctgggcagtgacagtgagatcagcagccttgtcttgtaatgctctttttcgaagtgtattggggaatgaagggggtaaaaggaggcaggtgtggtgtaagtcatggtattatttcttatgcagtaaatcataaacatagttttcattgagaataaggagcaagaggaaattaaaggacttcacagccaaaagactaagagagtaattaatggagaaaggtcccagaggaagcaaagaaaaaaaaaactcaacaacatagatttaagaatatacaaaatataaggttcaccctgcaaaggtctgagaacaccagggatgtgaaaaaatatacataagtttggagaacaatggaaggtaaattgaattatttcagtcgaattgacctttcattactcaataaatatttgttgagccaatgaataatgtgtttgtgatcctatacggaaaaactatgcctttttaacttckgtagtatccttaacatagttctctagaatttgacacttaattagtacctttggataaggctgctgctgcttctataaatgatctcagcctagacaattaattcagttgattcccttcaaaaacatactgatctacaatctttaaatacaaaatgatagaaccagaa

SEQ ID NO: 84985 - DNA, 823 bp, Homo sapiens
aaaaatgataaaaggattagaggatatgacctacagagaaagattattaaaagaactcatacatccagcctggagcaacgatgacagtgggtggggaatgtgataactgaacataaatactaggaataggtaagaaataaggaaaaaaactattttgagttattagagggtggacaaacaagaatcaatggccttaaaccagaaaagcaagcacttgtgtgaagtattccaagaagaattattttcaacagagaggtcaattaacaccttgattatttcatctgagaggtgatcctatgcagttctttagatagtacctccaaaggctgattatgcagaaggaatatgtatcctggctgccaacactgcatctgtgcccaagtccttaggcaatatatacattttgaaatggagacaaatatcatgtattttttttctctatgtttttctcctttgcctagtgtggttaagtgcactggtgaccttcaaaacaatatgtccttttctacaaccacagaatctttgaatatgactttatttcaaaaaggcrtctttgaagagataatttaaggaccttgagataagggcaccatcctggactattcggtaggtccttaattcaacaacaaatgtccttataagatactgaagagaatacagagacacatgaagaggaagaggcaatgtgaccacagagacagaaattggagaaaggtatccaaggaagccaggatggcttggaaccaccagaagctagaaggagcaagaaaggctctttgcttggagtcttcagaaggtgattggctctgccaacaccttgatt

SEQ ID NO: 84986 - DNA, 851 bp, Homo sapiens
ctagccatagaagcttgctaaggaaataatcacagagtctggaattcggctgagagctaggatatgaagaacaagtttatctaaatgaataaatggaccaggaacctaagattgatggtggctgaatctcttgtgaaggagactctaagagctctgaggtaagttctataggctcagctggtattcagaatcagggctccagcccatgcaagggggactgcaaatgcaagaatgggttckactatgaggaagagcccagaatacttggcatctcagaactaggacatttcaaagggtagaatagcaacaacagtagcttaatgagagccttccaagtagagagcaatgagcagcactcaactttatatgtactttttccttagcaggaatcttccctgacaaactgatctagagttcagacttcaggttgtaattcaatgaaatctaagaaatgggagtgaaaagtaggctggacctaaaaagctctctccacatgtagcaacaggtacaggaccttagaccagaaactctagcactataggagccagtatactgatattcattcaacatttaactagcatatataaagacagaaaaaaaaagttactaagctatttaacaaatataaatatcaaggcaatattacaaatatttgacaaatacatatgcaagtagaaatttttaataataccagtgatgatagtgccttcatgttgccaaaaaatagatgatctaacaacagtcatttattctgatatgctaagatgtttcctatcacttccaaggtatttgattcaaagtggctttggaagaaggtatgattacttcaaagggatacttaacacatggta

SEQ ID NO: 84987 - DNA, 1050 bp, Homo sapiens
caatatttatagccaccaaaaatggaaacaactcacgtgtccttcaataagtgaacgcattagcaaactggaatatcactcaaaaagaataaactatgtatgcaccagcttggacacatctcaaagtcatcatgctgaatgaaataagccagtattaaaaggtttcatactgtataattccatttatgtgacattctaaaatgaaaaagactataatgacagaaaatagagtggtggctacagggggttacagatttggggaaaaggtgactagaaaaaagatagcatgaggtagtgttcttggagtgatataactattttgtgtcctgattgyagtgatggttacattaatctattcactgttagaagtcatagaaattgaatacacaaaaggtcaaattatagtatcctaatttgaaaaaaaaatgttttaaaaaatcagcaaaattattgggatacgtatgtgtgtatgtactgcaagtaagagataaagcatacgcataaaatatttggaaccattggccatgtattcagtcacaaaaaggctcaacatcttttaaaaaatcaataatatacaagttacaacctccatccaaaaggcaatgtaattataaataaacaaaaagtgcactttggacaaagtatgtatttggatacttaagaatgaaatactaaataacttagataaaaagaaaatgaaaattacaaaatgcttaggactgaatgacagtgtaagttcaacatgtcatctaaatgagagagtgtaaataaatctcttaagcatttagcttatttaaggacataaagaaggcaaacctaagtgagctagatagaaaaaaaattaaatgggaattaagaaatgatcaagagtatcaataaaatgcaaagcttttgccttacaaaattaaaagtaaaaatacacaaacctttagcaagagtggtcaagtgggtaaaaaggagaacaaaggtacaagtaaacaatattgaccaggaattgggtcataattacatagaacatataaaacaaaaaaaaattaagaggatttttgg

SEQ ID NO: 84988 - DNA, 1050 bp, Homo sapiens
caatatttatagccaccaaaaatggaaacaactcacgtgtccttcaataagtgaacgcattagcaaactggaatatcactcaaaaagaataaactatgtatgcaccagcttggacacatctcaaagtcatcatgctgaatgaaataagccagtattaaaaggtttcatactgtataattccatttatgtgacattctaaaatgaaaaagactataatgacagaaaatagagtggtggctacagggggttacagatttggggaaaaggtgactagaaaaaagatagcatgaggtagtgttcttggagtgatataactattttgtgtcctgattgcagtgatggttacattaatctattcactgttagaagtcatagaaattgaatacacaaaaggtcaaattatagtatcctaatttgaaaaaaaaatgttttaaaaaatcagcaaaattattgggatacgtatgtgtgtatgtactgcaagtaagagataaagyatacgcataaaatatttggaaccattggccatgtattcagtcacaaaaaggctcaacatcttttaaaaaatcaataatatacaagttacaacctccatccaaaaggcaatgtaattataaataaacaaaaagtgcactttggacaaagtatgtatttggatacttaagaatgaaatactaaataacttagataaaaagaaaatgaaaattacaaaatgcttaggactgaatgacagtgtaagttcaacatgtcatctaaatgagagagtgtaaataaatctcttaagcatttagcttatttaaggacataaagaaggcaaacctaagtgagctagatagaaaaaaaattaaatgggaattaagaaatgatcaagagtatcaataaaatgcaaagcttttgccttacaaaattaaaagtaaaaatacacaaacctttagcaagagtggtcaagtgggtaaaaaggagaacaaaggtacaagtaaacaatattgaccaggaattgggtcataattacatagaacatataaaacaaaaaaaaattaagaggatttttgg

SEQ ID NO: 84989 - DNA, 1184 bp, Homo sapiens
tgcatacaagacagcatgcttttatcaaaaattctctcctgttatttttgcaaaacactccccacacactctcactttacttaaggcttgtctgtttttctgtttagatatcactgtggctgctagagacagaggaaatacaaggatgtcaagtttcaaaacactgtctttcttccttcttccacaaagctttattgagcacctattttctaccagacaccaggtatacaaggtcagtaaagaggtctcgtctctttaaaggtttgtttgaaagtttatggcaatttttttaaaaaagaaagaaaagaaagtttatgggaattcagacacataaacaaagagcacttatgttgttctcattgccaagataaaggcatatacaggctatcaataatttgttgaagaaatacgtgggtgagttcaaggaatgaatgaagarcaggtgcagcatccaggcctctatgcctaatgaggtggtagttgttagcatagctcagagccggacagcaagggtttcaaccctggatttcagcactttgacaagttacccaatttcccgtggccttgtttctatcgcctgtaaaatgggtttatgatagcacctatcccacagaattgctatagtaaaagctctaggatggggctggaggcaaatgctatgggagcatttgctattatgagaattactgatcttgggcaggtctcctggaaagtgtctggcaactctctccctcttttgtaccccatccagctgcctcacacccagaaagttggactcaggcctgcagggagaagcagtcatgccatgagcaagccaggcctggagaatcagctaactggtgggtcttatctcctacccactatttcccctctcccttcaccctaccttctcctcccaacccacccaccccactccccaaagcttataggtggcccaaggcagcacagactgttagggctgagctagtctggccacaaccagaccaaatgcatttaagccccaaacctgaaactcacaagtaaaagaaatcttaagtttgggctgggcacggtggctcacgcctgtaatctcagcacttcgggaggcctaggtgggtggatggcttgagctcaggaattagagacctgcctgggcaacatggcaaaaccccatttctacaaaacacacacacacacataaaaat

SEQ ID NO: 84990 - DNA, 1184 bp, Homo sapiens
tgcatacaagacagcatgcttttatcaaaaattctctcctgttatttttgcaaaacactccccacacactctcactttacttaaggcttgtctgtttttctgtttagatatcactgtggctgctagagacagaggaaatacaaggatgtcaagtttcaaaacactgtctttcttccttcttccacaaagctttattgagcacctattttctaccagacaccaggtatacaaggtcagtaaagaggtctcgtctctttaaaggtttgtttgaaagtttatggcaatttttttaaaaaagaaagaaaagaaagtttatgggaattcagacacataaacaaagagcacttatgttgttctcattgccaagataaaggcatatacaggctatcaataatttgttgaagaaatacgtgggtgagttcaaggaatgaatgaagagcaggtgyagcatccaggcctctatgcctaatgaggtggtagttgttagcatagctcagagccggacagcaagggtttcaaccctggatttcagcactttgacaagttacccaatttcccgtggccttgtttctatcgcctgtaaaatgggtttatgatagcacctatcccacagaattgctatagtaaaagctctaggatggggctggaggcaaatgctatgggagcatttgctattatgagaattactgatcttgggcaggtctcctggaaagtgtctggcaactctctccctcttttgtaccccatccagctgcctcacacccagaaagttggactcaggcctgcagggagaagcagtcatgccatgagcaagccaggcctggagaatcagctaactggtgggtcttatctcctacccactatttcccctctcccttcaccctaccttctcctcccaacccacccaccccactccccaaagcttataggtggcccaaggcagcacagactgttagggctgagctagtctggccacaaccagaccaaatgcatttaagccccaaacctgaaactcacaagtaaaagaaatcttaagtttgggctgggcacggtggctcacgcctgtaatctcagcacttcgggaggcctaggtgggtggatggcttgagctcaggaattagagacctgcctgggcaacatggcaaaaccccatttctacaaaacacacacacacacataaaaat

SEQ ID NO: 84991 - DNA, 1184 bp, Homo sapiens
tgcatacaagacagcatgcttttatcaaaaattctctcctgttatttttgcaaaacactccccacacactctcactttacttaaggcttgtctgtttttctgtttagatatcactgtggctgctagagacagaggaaatacaaggatgtcaagtttcaaaacactgtctttcttccttcttccacaaagctttattgagcacctattttctaccagacaccaggtatacaaggtcagtaaagaggtctcgtctctttaaaggtttgtttgaaagtttatggcaatttttttaaaaaagaaagaaaagaaagtttatgggaattcagacacataaacaaagagcacttatgttgttctcattgccaagataaaggcatatacaggctatcaataatttgttgaagaaatacgtgggtgagttcaaggaatgaatgaagagcaggtgcagcatccaggcctctatgcctaatgaggtggtagttgttagcatagctcagagccggacagcaagggtttcaaccctggatttcagcactttgacaagttacccaatttcccgtggccttgtttctatcgcctgtaaaatgggtttatgatagcacctatcccayagaattgctatagtaaaagctctaggatggggctggaggcaaatgctatgggagcatttgctattatgagaattactgatcttgggcaggtctcctggaaagtgtctggcaactctctccctcttttgtaccccatccagctgcctcacacccagaaagttggactcaggcctgcagggagaagcagtcatgccatgagcaagccaggcctggagaatcagctaactggtgggtcttatctcctacccactatttcccctctcccttcaccctaccttctcctcccaacccacccaccccactccccaaagcttataggtggcccaaggcagcacagactgttagggctgagctagtctggccacaaccagaccaaatgcatttaagccccaaacctgaaactcacaagtaaaagaaatcttaagtttgggctgggcacggtggctcacgcctgtaatctcagcacttcgggaggcctaggtgggtggatggcttgagctcaggaattagagacctgcctgggcaacatggcaaaaccccatttctacaaaacacacacacacacataaaaat

SEQ ID NO: 84992 - DNA, 1184 bp, Homo sapiens
tgcatacaagacagcatgcttttatcaaaaattctctcctgttatttttgcaaaacactccccacacactctcactttacttaaggcttgtctgtttttctgtttagatatcactgtggctgctagagacagaggaaatacaaggatgtcaagtttcaaaacactgtctttcttccttcttccacaaagctttattgagcacctattttctaccagacaccaggtatacaaggtcagtaaagaggtctcgtctctttaaaggtttgtttgaaagtttatggcaatttttttaaaaaagaaagaaaagaaagtttatgggaattcagacacataaacaaagagcacttatgttgttctcattgccaagataaaggcatatacaggctatcaataatttgttgaagaaatacgtgggtgagttcaaggaatgaatgaagagcaggtgcagcatccaggcctctatgcctaatgaggtggtagttgttagcatagctcagagccggacagcaagggtttcaaccctggatttcagcactttgacaagttacccaatttcccgtggccttgtttctatcgcctgtaaaatgggtttatgatagcacctatcccacagaattgctatagtaaaagctctaggatggggctggaggcaaatgctatgggagcatttgctattatgagaattactgatcttgggcaggtctcctggaaagtgtctggcaactctctccctcttttgtaccccatccagctgcctcacacccagaaagttggactcaggcctgcagggagaagcagtcatgccatgagcaagccaggcctggagaatcagctaactggtgggtcttatctcctacccmctatttcccctctcccttcaccctaccttctcctcccaacccacccaccccactccccaaagcttataggtggcccaaggcagcacagactgttagggctgagctagtctggccacaaccagaccaaatgcatttaagccccaaacctgaaactcacaagtaaaagaaatcttaagtttgggctgggcacggtggctcacgcctgtaatctcagcacttcgggaggcctaggtgggtggatggcttgagctcaggaattagagacctgcctgggcaacatggcaaaaccccatttctacaaaacacacacacacacataaaaat

SEQ ID NO: 84993 - DNA, 1977 bp, Homo sapiens
ccctggacctgcaaagacaggtgatatttattgacctcatagcagaagaggtgagacctaattaacaataaatgacagggtgcagtggctcacgcctgtaatcccagcactttgggaggccgaggcgggcagaccacctgaggtcaggagtttgagatcagcctgggcaacatggtgaaaccccgtctctactaaaaatacaaaattagccgggcgtggtgacacatgatttaatcccagctactcgggaggctgaggcagcagaatcgcttgaacctgggaggcggagcatgcggtgagccgagatcgcgccattgcactccagcctgggcaacaagagtaaatctccatctcaccaaacaaaacaaaacaaaacaaaaaacagtaaatggttcggcagggcacggtggctcctgcctgtaatcccagcactttgggaggccgaggcgggcagatcacctgaggtcaggagtttgagaccagtctggccaacatggtgaaaccccatctctactacaaatacaaaattagccgggcatggtggcatgtgcctgaatcccagctactcaggaggctgaggcaggagaatcacttgaacccgggagacagaggttgcagtgagctgagatcgcaccattgcactccagcctgggtgacagagtgaaactccatctaaaaaaaacaaaacaaaacaaaataaaaaaaacaaaacaaaacaaaataaatggtcctaagtagcctttggaaaagtcactgtgtatgtgtatagtatggaggaaggcaatgaaacccagtatgctattgcacatccttattccatgggagagacaagaagataaactattactttttttaattcgctctaaaggtagtataccccattatatggtggaaatgttgatagaggagtgaagtttctcagtaagagaaaaacatctaatagcttgagtttgactccatgctaatcctccagtatttcccctaaggggaacacagatttcttcccacagttacttcaacgtgcaaggtaaatgaaaaatcaagagagaaccaatagcaacattagagggatccagcatagtcaaaagtattttagatacattttgtggtcggttggaccctggttggatccaagcatggcttgagtttctagaagcttggactgcctgtcttggagactgaagaacttagtgkaggaatgtcaaagctctgctgaccagtggaaggaggaattttccagaaacaaggcaagtttacactcaccatcccctcagccatccccaaaacaccaactaatactaattcaataaacatgcatgtactaaatgttattgggaatgtgtccttgattatgttgaaacaactccaaatcgaaaagtccctttcgaaccatgctttgggcaaagtcaggatagctccaattccaagattaaaaacaaaaccttagccaggcacagtggttcacgcctataatctcagcactttgggaggctgaggagggcagatcacttgagctcaggagtttaggaccagcttgggcaagatagtgaaacctcatctctacagaaaatacaaaaaaatttgtcaggcatgatggctcgcgcctgtagtcccagctactcaggaggctgaggtgggaagatgacctgagcccataaggtcggggctacaataaactatgattgtgtcactgcattccagcctggacgacagagcgagaccctgtctcagaaaaaaggaaatttaaaaaaaaaaaaaaaccttgaaacatttaaaaagttttgactctgtggaccacattttatttgtagcaaattaatcaaccattctttggcttgaattatttggttatagttgatcttgagtgacatattgtcagattatattcagaccaattgggcaacaaatgagaccaaaaaacaccagtacaaatgttttaaaattctgcatttttaggccgggcacggtggctcatgc

SEQ ID NO: 84994 - DNA, 1977 bp, Homo sapiens
ccctggacctgcaaagacaggtgatatttattgacctcatagcagaagaggtgagacctaattaacaataaatgacagggtgcagtggctcacgcctgtaatcccagcactttgggaggccgaggcgggcagaccacctgaggtcaggagtttgagatcagcctgggcaacatggtgaaaccccgtctctactaaaaatacaaaattagccgggcgtggtgacacatgatttaatcccagctactcgggaggctgaggcagcagaatcgcttgaacctgggaggcggagcatgcggtgagccgagatcgcgccattgcactccagcctgggcaacaagagtaaatctccatctcaccaaacaaaacaaaacaaaacaaaaaacagtaaatggttcggcagggcacggtggctcctgcctgtaatcccagcactttgggaggccgaggcgggcagatcacctgaggtcaggagtttgagaccagtctggccaacatggtgaaaccccatctctactacaaatacaaaattagccgggcatggtggcatgtgcctgaatcccagctactcaggaggctgaggcaggagaatcacttgaacccgggagacagaggttgcagtgagctgagatcgcaccattgcactccagcctgggtgacagagtgaaactccatctaaaaaaaacaaaacaaaacaaaataaaaaaaacaaaacaaaacaaaataaatggtcctaagtagcctttggaaaagtcactgtgtatgtgtatagtatggaggaaggcaatgaaacccagtatgctattgcacatccttattccatgggagagacaagaagataaactattactttttttaattcgctctaaaggtagtataccccattatatggtggaaatgttgatagaggagtgaagtttctcagtaagagaaaaacatctaatagcttgagtttgactccatgctaatcctccagtatttcccctaaggggaacacagatttcttcccacagttacttcaacgtgcaaggtaaatgaaaaatcaagagagaaccaatagcaacattagagggatccagcatagtcaaaagtattttagatacattttgtggtcggttggaccctggttggatccaagcatggcttgagtttctagaagcttggactgcctgtcttggagactgaagaacttagtgtaggaatgtcaaagctctgctgaccagtggaaggaggaattttccagaaacaaggcaagtttacactcaccatcccctcagccatccccaaaacaccaactaatactaattcaataaacatgcatgtactaaatgttattgggaatgtgtccttgattatgttgaaacaactccaaatcgaaaagtccctttcgaaccatgctttgggcaaagtcaggatagctccaattccaagattaaaaacaaaaccttagccaggcacagtggttcacgcctataatctcagcactttgggaggcygaggagggcagatcacttgagctcaggagtttaggaccagcttgggcaagatagtgaaacctcatctctacagaaaatacaaaaaaatttgtcaggcatgatggctcgcgcctgtagtcccagctactcaggaggctgaggtgggaagatgacctgagcccataaggtcggggctacaataaactatgattgtgtcactgcattccagcctggacgacagagcgagaccctgtctcagaaaaaaggaaatttaaaaaaaaaaaaaaaccttgaaacatttaaaaagttttgactctgtggaccacattttatttgtagcaaattaatcaaccattctttggcttgaattatttggttatagttgatcttgagtgacatattgtcagattatattcagaccaattgggcaacaaatgagaccaaaaaacaccagtacaaatgttttaaaattctgcatttttaggccgggcacggtggctcatgc

SEQ ID NO: 84995 - DNA, 728 bp, Homo sapiens
gagcacggtccactcattggatctctgcacccgccccttaagtctctgaatctgtagccaccttaacttcattttctccacaaagcccagcccagacatctcactttcccacctacaaggtattgctcatgctgtactcagtacccaaaatgtcctcagcccgcatgcccaaacatcactcaaaatccaactcaaatactgtcccctccctaaaatctttcgtgattgccagcagtcctcctcctaagcacagccatggggtctcctataggrattcctatatgattttatctccacttcacctgggtcatttactcttgtctataatcagcttgagagttacatatctccccttcaatctcctggaagggtaaattccacctgatttatatgtatagtcctcacgaacttagcacgatgccctgtacttggcagttgctcagtaaatcagtttgtaaggtgctgtatttaaaaataatgcaaacggagaaatgaaggatggcaagagtatctcacatgtcttcaacctccctcctcttctccctcatccattcccttgggagatatttgttgcataactgctgtatgttggacactctgaaagtgcctaatggcccaaaagtcatattatctggcacaaaaataaaagtggctgttttatcagcatcaaaatacttgcaactcttagatgcaaaattactccttcgaagattaacattaacatcatg

SEQ ID NO: 84996 - DNA, 1166 bp, Homo sapiens
ctaaaaaaagtgtaaaatgaccagaaacagagaaaaaagcatgttatgaaataagttgcttaagggcttagtcctttaaaagaatgtttggtagatatactctcctaacagactacgaagatccatttctctataagaagagaacttaaatagtgcacattataacccaaacctccaccgctctgccagtgagatgcaattcattctgctgggtgaggaaaccccacataacataggcattcatgaattccatccactgagcaatcaaactgttctttaaaagatatggctgatgggtttacaaaatacactattacagagttatctgtttggaatacctgtacaacattcgaaatataatttgacatttttcaccaaatgttctagtaacgtaaaacctttagtgctcaagctaggataaagtgctggttattttacaacgataaaatagcactttagggggttttgacactggggcagtggtaagaataagaaaaactgatgacagaaggttgggctgcttcataagacctattgaagtaataaactttttaatgcaataaaatttcttaaagaaatgtccttttttttkggggaggttgaagctgacggatcacctgaggtcaggggtttgagaccagcttggccaacatggtgaaacccggtctctactaaaaatacaaaaattagtcaggtgtggtggcgcatgcctgtaatcccagctactcaggaagctggggcaggagaatcacttgaacccaggaggtggaggttgcaatgagacgagatcattttacttcactccagcctgggcaacagagtgagactccattttaaaaaaaaaaaaaaaaaaaaaaaaagtcagtttttagccatagtggttggtgggtgggttctccccctggggcaggaaaaatctaagtgtaagagcacatatttaagaaacattatttaccagatttaaaaattatatttaattcactctcctccaaatatttaataatcttaatgttctattctataataccaagacataaataatataaccaaaaacagcatccatctactaaattgacacatttgtcccccataaaatatgactctatcacatttgttaagcagccaccttcagaagcaaaagctaatatggtgaaaaaacacaatca

SEQ ID NO: 84997 - DNA, 570 bp, Homo sapiens
tggcccctacttttcatattgaaggctttggtaatacacctgatgaaccctgactgcctgatcctatttaagaatgaaggaccaaagcagattggtggctctgcaagtgtggagaagactattagttggtgagtgtcaattaatgtgaaagaaaaaagtattccactgaagaacccakacatttcagttatctgggggcattttttttctggagttgttcaatttctcaaggaaagtcttccacttcattgctggggctgcacacgcctggctgctgccatcatggacagagcagaagagtgaccaagctcccagctgtcatcagtctctctttttagtcacccccaccaacaccccaacaccattccagttccatttctccagagaacagacctccaggctgctgctggggtggggaagggagacagggacagggtgtagggtctaattatgctggttttaataactccctatatttggccaatctctctggcctactatggtaacaatgccttcccacttctgagcctctctgtggttctgcaggcaaagcacctcatttcagcaatg

SEQ ID NO: 84998 - DNA, 836 bp, Homo sapiens
ccctaatgactgcagagccatgatcccagccctggactgcttgcctccacacttctgtcttattggttaagccaaaattattttgggttttccgttacatgctgcagaacctaacctaacgaatacccctgctctctgttggtttyacagtgtgtctccaacaccatcttgaaggtgcagtgacttgcatatagtaggtgcttggtaagtgtttgacaagttaagtacccaatggcattgaggtaaagagttcaaaggcttcagctgctctgacctgtccccttttctgctttagattaagttattcatggggaccttttgttttttgccatctcaccccccaggaaggtatttcccagccctcagtgcagggctttagggctacaggcttgaatcattttgacaagacagcaggcagaagacattggagattctaactgcacatatgcgtaattccaaatgaaaatataaggggtgggcacttttctgaatctcctagagaaactggaggtggtggttcaaatgatgtcagaaaaggccaccattgaatcctttgctatcatttggaggctgtactttccacaatgcttgccaggacttgatgtcagggaagactttcaaggagccttgattgccagctattgacgaaggggtctgtctgctcagtggcaacctccatggtggtcttggccagaccagcctgcccctgactcatgctgagctttgtcagccaggttgaaacgcccctctttggggcccaggacaacatgctggtttcccggaagcatctgggccaagactctgctgctaagaaaatgatattgtttttgcaagca

SEQ ID NO: 84999 - DNA, 766 bp, Homo sapiens
tgcattccatgataagtttaataactgatcaaaaacagaaaaataataatgtgatggagacagattttcagtgaacactcaaatacatgaagaatgttgttgtttcttaattatgatggcagacttaattaaatatcagtataatctctcctatcttcacctccactagcaattgtgggttaattcacctttgcattctcttctgctagggtctgaatgtttgtgtccccctaaaattcatatgttgacatcctaaccactaaggtgctggtattagaaggtgaatcgttgcgggaggtgatgagttcatggagaaaaarcctgtttaaaagggattaatgctttaaaaaaaaaatcctgagggaactcccccattcttccatgtgagaacatagcaatgagactgccatctatgaaccagaaagcaggtcctcatcagacaacagtctacgttgcttgatcttagatggaagtataatctgctggaaagcctcctcaattgtgaaaaataaattgctgttgtatataagctatccagtgtatgatgttttgttatggcagtctgaatggactaaaatattttctaattccttagactttgttaaatagacttagctctggtgaaaatttactcagtgtcctttttggctagacaaaaaacaacaaccacacacaaaaaacttatcattattattttcatagaagagaaaacgattttttttccaaatgtgacaatacatgcaaaacaaagatcacaaagaagtga

SEQ ID NO: 85000 - DNA, 643 bp, Homo sapiens
gttgctttctgtttatttaggttttttttcttccctttcttcttttctccctcctttcttccctcttcccttttctctctctctctttcttattagaagrctaaatacagaaatcaatgttccaatcaggtattcatttgaattatcaacaatttttggacattcttaataataaaatttgctcaagtcaagagggacaatccattagctagaatattccagccatgcccttttctcgcctacttaggaacatatatatcacacgggcagcaagatcttctgtttcagacattgtgctagatgctagagagataaaaatataaagcatgaaccttggcctcacagacacctagcaaatccatagcattggttcaccatagaacctagactagactcagagttctttctgacccaggactcctgacagtcattgctaatctatcactgcattggcataagaggtaatatatatttgtcatccctggtgggaaatcaaatgttctctggtacattgattataccagattctgtaccaaatgattgtctcattttgacaatcataatcatggctatttcatgtctataatgtaagacccatttcatttctatcttgctgaagtttgatttttcaaatgccactctc

SEQ ID NO: 85001 - DNA, 643 bp, Homo sapiens
gttgctttctgtttatttaggttttttttcttccctttcttcttttctccctcctttcttccctcttcccttttctctctctctctttcttattagaagactaaatacagaaatcaatgttccaatcaggtattcatttgaattatcaacratttttggacattcttaataataaaatttgctcaagtcaagagggacaatccattagctagaatattccagccatgcccttttctcgcctacttaggaacatatatatcacacgggcagcaagatcttctgtttcagacattgtgctagatgctagagagataaaaatataaagcatgaaccttggcctcacagacacctagcaaatccatagcattggttcaccatagaacctagactagactcagagttctttctgacccaggactcctgacagtcattgctaatctatcactgcattggcataagaggtaatatatatttgtcatccctggtgggaaatcaaatgttctctggtacattgattataccagattctgtaccaaatgattgtctcattttgacaatcataatcatggctatttcatgtctataatgtaagacccatttcatttctatcttgctgaagtttgatttttcaaatgccactctc

SEQ ID NO: 85002 - DNA, 643 bp, Homo sapiens
gttgctttctgtttatttaggttttttttcttccctttcttcttttctccctcctttcttccctcttcccttttctctctctctctttcttattagaagactaaatacagaaatcaatgttccaatcaggtattcatttgaattatcaacaatttttggacattcttaataataaaatttgctcaagtcaagagggacaatccattagctagaatattccagccatgcccttttctcgcctacttaggaacatatatatcacacgggcagcaagatcttctgtttcagacattgtgctagatgctagagagataaaaatataargcatgaaccttggcctcacagacacctagcaaatccatagcattggttcaccatagaacctagactagactcagagttctttctgacccaggactcctgacagtcattgctaatctatcactgcattggcataagaggtaatatatatttgtcatccctggtgggaaatcaaatgttctctggtacattgattataccagattctgtaccaaatgattgtctcattttgacaatcataatcatggctatttcatgtctataatgtaagacccatttcatttctatcttgctgaagtttgatttttcaaatgccactctc

SEQ ID NO: 85003 - DNA, 712 bp, Homo sapiens
cacacaccctctctgctcatcaccagacaaaataagactctccattgtaagtttcaaatttcrgaatgaggcaatgattggctcgtcctgggtcaggtgctcatacctggatcaagcagctgtggccaggagggcaagatcatgtaccacagacatggctcctggaggtccaagccagggcatggaggtggggccatagagaaaggataaccctgatctacacaccccacctcagaacaattctgtgaagtagatattatcattcccactttacaaatagagaaaaccaagacttagtaccatcaggtagcttgccctatggaaggagaagaaccttgaaagtacaagcaaagaagataagcaaatctgtgtttgggaatttccagattctcagtaaaacaggaagcaagttcatctgaaaaaagatgggcaacttaatctcttaaccagagatttttttttttccagtgattctttaagagactggagacattttggaataggtttttttaaaaaaaatatattaccagccctagtttaaatggttctttgcaaagctgtatacttaacagagaacaattcatttgcatttttggcatctttttttctgaaacatatggatggtctgatgcaactcaccaacagctggaactgggaagggtttgcaaatacactgggatgggaatgaggagaagagattcagaaggacaga

SEQ ID NO: 85004 - DNA, 712 bp, Homo sapiens
cacacaccctctctgctcatcaccagacaaaataagactctccattgtaagtttcaaatttcagaatgaggcaatgattggctcgtcctgggtcaggtgctcatacctggatcaagcagctgtggccaggagggcaagatcatgtaccacagacatggctcctggaggtccaagccagggcatggaggtggggccatagagaaaggataaccctgatctacacaccccacctcagaacaattctgtgaagtagatattatcattcccactttacaaatagagaaaaccaagacttagtaccatcaggtagcttgccctatggaaggagaagaaccttgaaagtacaagcaaagaagataagcaaatctgtgtttgggaatttccagattctcagtaaaacaggaagcaagttcatctgaaaaaagatggscaacttaatctcttaaccagagatttttttttttccagtgattctttaagagactggagacattttggaataggtttttttaaaaaaaatatattaccagccctagtttaaatggttctttgcaaagctgtatacttaacagagaacaattcatttgcatttttggcatctttttttctgaaacatatggatggtctgatgcaactcaccaacagctggaactgggaagggtttgcaaatacactgggatgggaatgaggagaagagattcagaaggacaga

SEQ ID NO: 85005 - DNA, 712 bp, Homo sapiens
cacacaccctctctgctcatcaccagacaaaataagactctccattgtaagtttcaaatttcagaatgaggcaatgattggctcgtcctgggtcaggtgctcatacctggatcaagcagctgtggccaggagggcaagatcatgtaccacagacatggctcctggaggtccaagccagggcatggaggtggggccatagagaaaggataaccctgatctacacaccccacctcagaacaattctgtgaagtagatattatcattcccactttacaaatagagaaaaccaagacttagtaccatcaggtagcttgccctatggaaggagaagaaccttgaaagtacaagcaaagaagataagcaaatctgtgtttgggaatttccagattctcagtaaaacaggaagcaagttcatctgaaaaaagatgggcaacttaatctcttaaccagagatttttttttttccagtgattctttaagagactggagacattttggaataggtttttttwaaaaaaatatattaccagccctagtttaaatggttctttgcaaagctgtatacttaacagagaacaattcatttgcatttttggcatctttttttctgaaacatatggatggtctgatgcaactcaccaacagctggaactgggaagggtttgcaaatacactgggatgggaatgaggagaagagattcagaaggacaga

SEQ ID NO: 85006 - DNA, 633 bp, Homo sapiens
agcctgtaggcaaatttacttttgctttgacctgtaaaaccggatctgcccagccttcattctytccctggagaacgcctgcggccccaaagccaggcctactgatttccagtgaggccacaaatcccctccctggttagcaattcagttttcaccgccttgggggagagggcctgcccttccttgaggggaagaacctggaaggctcggctcagtgtcttctcttggaagagaagagtgtgcatgcagaagggtgtagaaaatgctagacgtgtttcatcttcttgacaaaatgacattgtaagatgtgtgtatatgtttttaaaaatattacataggggctgaacatggtggcccactcctgtagtccagcacagggaggcggaggtaggaagattgcttgaggtcaggagttcaagaccagcctgggcaatgtaggaagacttcatgtctacaaaaaaaaaaaaaaaaaatttcattagccaggcatggtgatgcatgcctatagttccagctacttgagaggctgaggtgggagaaccccctgagcctgggaggtcgaggctacaagaagctgtgttcgtgcaactgtactccagcctgggcaacagagcaagaccctgtctcaaaaat

SEQ ID NO: 85007 - DNA, 633 bp, Homo sapiens
agcctgtaggcaaatttacttttgctttgacctgtaaaaccggatctgcccagccttcattctttccctggagaacgcctgcrgccccaaagccaggcctactgatttccagtgaggccacaaatcccctccctggttagcaattcagttttcaccgccttgggggagagggcctgcccttccttgaggggaagaacctggaaggctcggctcagtgtcttctcttggaagagaagagtgtgcatgcagaagggtgtagaaaatgctagacgtgtttcatcttcttgacaaaatgacattgtaagatgtgtgtatatgtttttaaaaatattacataggggctgaacatggtggcccactcctgtagtccagcacagggaggcggaggtaggaagattgcttgaggtcaggagttcaagaccagcctgggcaatgtaggaagacttcatgtctacaaaaaaaaaaaaaaaaaatttcattagccaggcatggtgatgcatgcctatagttccagctacttgagaggctgaggtgggagaaccccctgagcctgggaggtcgaggctacaagaagctgtgttcgtgcaactgtactccagcctgggcaacagagcaagaccctgtctcaaaaat

SEQ ID NO: 85008 - DNA, 633 bp, Homo sapiens
agcctgtaggcaaatttacttttgctttgacctgtaaaaccggatctgcccagccttcattctttccctggagaacgcctgcggccccaaagccaggcctactgatttccagtgaggccacaaatcccctccctggttagcaattcagttttcaccgccttgggggagagggcctgcccttccttgaggggaagaacctggaaggctcggctcagtgtcttctcttggaagagaagagtgtgcatgcagaagggtgtagaaaatgctagacgtgtttcatcttcttgacaaaatgacattgtaagatgtgtgtatatgtttttaaaaatattacataggggctgaacatggtggcccactcctgtagtccagcacagggaggcggaggtaggaagattgcttgaggtcaggagttcaagaccagcctgggcaatgtaggaagacttcatgtctacaaaaaaaaaaaaaaaaaatttcattagccaggcatggtgatgcatgcctatagttccagctacttgagaggctgaggtgggagaaccccctgagcctgggaggtcgaggctacaagaagctgtgttcrtgcaactgtactccagcctgggcaacagagcaagaccctgtctcaaaaat

SEQ ID NO: 85009 - DNA, 589 bp, Homo sapiens
tcaattccctcctcatttaaccttttccccatttaaccagacgatcaattcttatacccttaaaccactcatcatcacatcattatgaaattattgactcctttttttccccccaccaaatgctctatcaggagaaaagccagttagctgtcaccccgacagttctgagttttggggtcacaaatgtctctacttttcattcaacccactctgctatcagggaggagacaagcccctcaatcaacaaatctaagtcacagatagcaggagaccccagaccccttctattagctttggatttaggccctgtctccctgctagggtgaagctgccatcagctgagaggcgctttgggcaggctggcttttcaggtgtgcaaactgtgcagggctgtgggctcagaagggccctatattggtttaaggctctgccgttgcygtttgaaattattttatgttttttttttttgagacagggtctcattgtgtcaccccaggctggagtgcagtggtgcgatctcagcttactgcaacctccgcctcctgggttcaagcggttctcctgcctcagcctcccacgtagctgggat

SEQ ID NO: 85010 - DNA, 589 bp, Homo sapiens
tcaattccctcctcatttaaccttttccccatttaaccagacgatcaattcttatacccttaaaccactcatcatcacatcattatgaaattattgactcctttttttccccccaccaaatgctctatcaggagaaaagccagttagctgtcaccccgacagttctgagttttggggtcacaaatgtctctacttttcattcaacccactctgctatcagggaggagacaagcccctcaatcaacaaatctaagtcacagatagcaggagaccccagaccccttctattagctttggatttaggccctgtctccctgctagggtgaagctgccatcagctgagaggcgctttgggcaggctggcttttcaggtgtgcaaactgtgcagggctgtgggctcagaagggccctatattggtttaaggctctgccgttgccgtttgaaattattttatgttttttttttttgagacagggtctcaytgtgtcaccccaggctggagtgcagtggtgcgatctcagcttactgcaacctccgcctcctgggttcaagcggttctcctgcctcagcctcccacgtagctgggat

SEQ ID NO: 85011 - DNA, 916 bp, Homo sapiens
gcattgtagtgttgaatacagctggtggaaacgtgcttcttgacagcagagcaatcagaggggtgtactcagggtgacgtggrccggagggggcctctggccaaaccagactcttctctggtttgttcttcagaccacgaggtggaaccatctcttcaaaggagccctgccaccatcaccaaagctcacaccagaaaaaaccgccatttacacaacaaactgaacctgaaaaaggaacggaacatggtgcttccgccgtgaacaaaatcagcaagtgaatccgttttcctttcccgggctgttcgaaaaagattcggctagagaaaagggggcactgtgggcagcccgtaggggatggcctggagctgtggggcccgggctgagccctccctgccttttaactgcaggatgtaaactctatggaaatgtatagaacttcagtttctcccaaccctccacaacctcaactcttgagaccaccaaataactgttaggaaacgcagaagagagtccttcaaatgagctacacccaggttcagagcgcagaaccaacagtgtgactggggcatggaggtaaattctgacacgattggaggggaatttcacaaaacaaaattccatgaagtcaacacgcacacgcgcgcgtgcacacacacacacacacacgcatacacacaaagtcaacattcaacgtgaagagttcccttttctttctcgaaggttggtttttgcaagccctgacaagcaaagagtcccttgcggtggccaggggggccaagacctcagaatgaaaagcccacagctgctctgtcctcacccgctctggaggccagccctggtacaggcatgggggtgggggtcctaaaacccttcgtcagcgttcctggagcccttgccaagcttaccatgtgcccca

SEQ ID NO: 85012 - DNA, 758 bp, Homo sapiens
tcccacctcccagctcagctcactgtccccacacgccgtccacatagacacagttgccacgtttgattcaacttctctatggtgacttggttactcagagccccttttgtggtgggacccactgtgaccttagctgcccattatgttcctagggcttcgggtctcacctgtgaattgatggcatcctttaaccggtgctttgcaatctctctctttagtccgcaaccatccctctgttcatgcgaaacaaagatgtcgctgcagaagcggtgagtgcctcgggtatgtgcagcctgtcctcgtgttctccctcagatgaactctgaggaagaaagggaaaccaaaactctgtttgcaggtcacaggtagtggcaaaacactcgcttttgtcatccccatcctggaaattcttctgagaagagaagagaagttaaaaaagagtcaggtgaggacaacaaaagtgatttattttcacctagtcatcagagagttcacattggattaagaagctggctacaaatgtgaaaaaataggccagaakccgtggctcacacctgtaatcccagcactttgggagactgagtctggaggatcactggagtccaggagtttgagaccagcctgggcaacacagtgagacttcatctctacaaataatgaatgaatgaaacttgaaaaaaaaagacagttaatcctcattatttgtggattctgtatttgtgaatttgcctgctcgttaaaatttagaacaccccagt

SEQ ID NO: 85013 - DNA, 1526 bp, Homo sapiens
aggtacattttacagatgaggaaactgaggcacagagctaagttgctcaaggttacataactcgtaagaggagaaagtgggatatgaatccaggcagcgtaacttcagagtgtgtggtgcttactaaggtgctaaactgccaaatgtggaatgacccccccttactcccattttgcaggtgagcaaattgaggcctagaggtattaggtggtttgctcagcttctgacacagcttgcacacagctgatgcaaatgtgtcagaataaggactagaatccaggtttctgactttttgttggggttctttctaatacagtgtgccagtcagcttttctttaggataattagacatgatcattcagtttcgagcttcggtgtacatttaagcaggggccctctgtccaccaggactggtgtcttgacgatcctatagggtcaagaggatggaatgaagcattttaggactgctgaggccgtcccttttctagtccccagtctgaccctgtagaccattgctcaaattaaactgatgcttcacacttctcactaagagcttgtgtcatttgggggtgggggttctggggaagatcccaaaaggaccagttcttagaaaaattgcctgctctcattagaggagcaccacgccggcactcagtggtgtgtctgctgcaggaggaagtgtgggagaggatgtcagctctgggaaggcttgtctcataattaaggatgagtctgttgcctcttaatggggatccttttttttcccaccctcatgctttcacggagactgtggagcagcttggcaggctcaaattgttttgaggacaaaaggttattgtcaccaggaccttcataatgcagttggcctcttccctggctcccccacctccccttccccctctcctcagatagtttgcacagtggctagatttacaaagccattctcttcgcagtgcccccagtgctgagttcattcctgatggagtcttcccttgctctccctatcacccccttggctctcacctcctgcgcatggtgtcattggtcccggtgccagaatccccaagctggggcccatcctccccatccctttgtgttgagctgctgttgcaggatgcacactgtagctggcattgtgttgccttgaragcagtgtatcccgacccgcagccctctgagatgtctcaggccataatttactggcaagtgtctatgttaccgagttgaaacagcagtttctcacagctcgctttgtggcaccaagtctctgctcctgtgaccactggctattccgctttctcaagtaggatcagcgtacttcgtgccatgtccagccacatggggtggcaagcaagccagggacccagagggacatgtgtgtgggagggggctgaaacttcacccctggcgccaggccagattctccagcagctgttcctgggctgatgggatttgtagagagagcaagggccaaagaagaaaagtccatcttgtgaatgctagattgcttccagatggttctggtc

SEQ ID NO: 85014 - DNA, 1195 bp, Homo sapiens
cccccttgtgtggttagcttggccagtaggaaggtctctaatgattccacttagcaattttttcagtgatctggatgaagatggcagggctgcttatcaaatttaacatgatatagcatagacagctgatattttggatggaaggatctgagttcaggaagttgtcagtgagttggaacaatggactaaaactaacaagataaaattaataagggcaatggagtcctcccttcagggtaaaatatctattgtgtgtgtcattataaactagaggagaccatgagccaaaaaaaaattctcaggtcttttttcttgtggactagggtttttcatttgttttcattcagagtctccatatgtaaccctaaaaaaaaatacacataatggaaatagctttgttaattttttaaaaatgcaaggcccaaatcaaaagaagtaataattttttttcttatttggaccacatcttaagtgttttcagttccgggtaccattttttgaggacactggccaaccagaaagaccctagagggccaccaccacagtattcagtgctcagttactgtttgttggatgcatggggactagagtggttaggatcctccaggtcctgtgaagaacagttgaaagaactaaggaaaaggaaactttgagatagttctctttaaacaattgaagagctctcaagcagaaaatagtctggatttatttcatgtttttccagatgggccarcgggtttgggtcagtttaagaaagaatttcccagagctgttctccaatggaatgggctgacattaagtaccgttaaactcctaggacagtgactttctgtggcagtccattcaggagaggccaggaaccaaggttaggtgtattgtagaagggattcctacacttggggtacagctgtcttggtggcatttcagtcttattgctgaactgctccttccaggaagtccaaaccaacagtggcttttttttttacagctttgcacaatcaacattacaaaggaaactattactttaaaaaagtatttaatggaaacttctgagaataatgcctctcagtttgggaaagccaagaatttagcaacccttttaagccttgcattttttttctcatctaaaaaaatgattcagttggcctcataaatactcattaaggaattggcccaaaatattaataagagtttg

SEQ ID NO: 85015 - DNA, 823 bp, Homo sapiens
cttccttacaccacacacaaaaattactccaaatgatccacagacctcaatttaaagagttaaaattgtaatattcttagatgaaagtataggattaattttttgttgcctgggttaggcaaagctgtcttagagacaacactaaaagtacaaacaaacaaaatattttgttactacctgtcttcctgatgtgcgtctagtctaggctgtttttcttgttattgttactgagacgagaagtcttcttcccaccgaaggttcttctcaatcgaagggttcgtggtctcacgggcttcaaggaatgaagcygtggacggcagtggcgaatgttacagctcgattagagagtgtgctgcggcaagatttattaaagcgaaagtgaaaggaaagcttccacgtgggggaaggggacctggaagggttgctgtttctggcttgggtatcttatgcttacatccccttatgacccctgccctcttcctttttctgtcctatagaatcagcttattttctatctgcttgtgggttggcgggcctagttggttaaaaacatcaggctgaagctagagcttaaactccctatatgactggttcaagtttcaaccacttagcttgcagctatgagtcattttgtcttaggggaaagtcccctttgattggttgaagtttccatcccttagctttcagctatgactcattttggcttaggggaaagtccccttagggaagtccctattgacccaggaagtccagccaacttagccacttagtccctcattacaactcttcccatttaactgaatgaaccactcctttttaaaaa

SEQ ID NO: 85016 - DNA, 823 bp, Homo sapiens
cttccttacaccacacacaaaaattactccaaatgatccacagacctcaatttaaagagttaaaattgtaatattcttagatgaaagtataggattaattttttgttgcctgggttaggcaaagctgtcttagagacaacactaaaagtacaaacaaacaaaatattttgttactacctgtcttcctgatgtgcgtctagtctaggctgtttttcttgttattgttactgagacgagaagtcttcttcccaccgaaggttcttctcaatcgaagggttcgtggtctcacgggcttcaaggaatgaagccgtggacsgcagtggcgaatgttacagctcgattagagagtgtgctgcggcaagatttattaaagcgaaagtgaaaggaaagcttccacgtgggggaaggggacctggaagggttgctgtttctggcttgggtatcttatgcttacatccccttatgacccctgccctcttcctttttctgtcctatagaatcagcttattttctatctgcttgtgggttggcgggcctagttggttaaaaacatcaggctgaagctagagcttaaactccctatatgactggttcaagtttcaaccacttagcttgcagctatgagtcattttgtcttaggggaaagtcccctttgattggttgaagtttccatcccttagctttcagctatgactcattttggcttaggggaaagtccccttagggaagtccctattgacccaggaagtccagccaacttagccacttagtccctcattacaactcttcccatttaactgaatgaaccactcctttttaaaaa

SEQ ID NO: 85017 - DNA, 823 bp, Homo sapiens
cttccttacaccacacacaaaaattactccaaatgatccacagacctcaatttaaagagttaaaattgtaatattcttagatgaaagtataggattaattttttgttgcctgggttaggcaaagctgtcttagagacaacactaaaagtacaaacaaacaaaatattttgttactacctgtcttcctgatgtgcgtctagtctaggctgtttttcttgttattgttactgagacgagaagtcttcttcccaccgaaggttcttctcaatcgaagggttcgtggtctcacgggcttcaaggaatgaagccgtggacggcagtggcgartgttacagctcgattagagagtgtgctgcggcaagatttattaaagcgaaagtgaaaggaaagcttccacgtgggggaaggggacctggaagggttgctgtttctggcttgggtatcttatgcttacatccccttatgacccctgccctcttcctttttctgtcctatagaatcagcttattttctatctgcttgtgggttggcgggcctagttggttaaaaacatcaggctgaagctagagcttaaactccctatatgactggttcaagtttcaaccacttagcttgcagctatgagtcattttgtcttaggggaaagtcccctttgattggttgaagtttccatcccttagctttcagctatgactcattttggcttaggggaaagtccccttagggaagtccctattgacccaggaagtccagccaacttagccacttagtccctcattacaactcttcccatttaactgaatgaaccactcctttttaaaaa

SEQ ID NO: 85018 - DNA, 1166 bp, Homo sapiens
cagcagaggactaaattagaagaaacaatctggaagggtgcaggcactggtttggctgccattagtctgaaatccatacaggaattcagaggggagacacatgttgctagagagaccaattcagggctagagagaggcagaagtgaatcttcaaagacaagagctaaattttcagctgtaaggaaggaaagagatattataccaaggtgccttgattctgatggtcatggtaagtcattcattcattcattcattcattcattcatctgttcgttcatgcagattgtggtggtggcacacaggagtttagtttcagacatattaatttaaagatgcatagtagatatctaactggagacaggtattggtagttggatggaggaatcttgaagtaggaagaaatattcaggctgaagatatgaactctgtgatttttattcttatgtttttaaactattaatatatacctttttctgaaatcaatgaatttccccaagcaactccagacagatgtctggggcctcatttatttattggtttcataaatctgagccctctttgatttagcgttatacagccagcccatcccgggcctgatctttgccatcctaatcatgaactaagcccctgccatgtaattgtgtgtctactcctctgcctccggggattgtaagtacagtgttcttctttatgcatcaagatgttattgctgagatgtgaatcatgcaattgccaggagggtctctgatcccagctgcaacttctccattgaagactagcacgccctacagggggttcagaataaagggaacctcttgaccacccctgagagcccagccarccagcaaccccaatgcatgaatatatggccatgacctcagtagtgattgctctctcttggataggccaatctgtcttctagaaagttaaaattcttcagttaaaaaggctcatgtggtgcaaacttgtaaagacaagaggggggaatgtttcacattctaatgatctgtttttgaaagtaatttgagggtccttatataactctgctttttttatgttcccactggatgtgcaactatgtcatgcacgaggctggggacaccgaatgaatgaatggaaagtcagtgaataaatgactgggttctacgtagactctgccccacctg

SEQ ID NO: 85019 - DNA, 865 bp, Homo sapiens
actgaaacctattaatccaaaattagaagacttgctgttcagaagttatcctatgaaaaagatacttgctcatgaatgtttatagcagtacaattcacaattgcaaaaattgaaaccaacccaaatgcccatcagtcaacaagtgaataaagaaactgttatatgaatatatatatatatatatatatatatatacacacacatatacatatatacagatatatgatggaatactactcagccacaaaaaaagaatgaattaatggcatttgcagcaacctggatgagattggagactatcattctaagtgaagtaactcaaaaatgtaaaaccaaacatcatttgttctcacttataattggtagctaagctaggagtatgcaaaagcataagaatgacatgatggactctggggactcagagggaaagggtgggaagggggtgagggataaaagatgacaaattgggttcagtgtatastgctcgggagatgggtgcaccaaaatctcacaaatcaccactaaagagcttactcatgtaccaaataacacctgttcccaaaaaaaactatggaaatatttctttttaaaaaaaatataagattttgagtagcaggaggcaatagggtggctttgttcttttctgcagttttagtcctcaccctgatctgtcaggccagaaagtgcctctgccatgactgaaccctctggtcccttcaggaagcaagaaggtgtccagaaagcactacaggcagaaatctcagccccagccctacctggcaatgataggagctaggccagtgacacctatgatagctaaaaatccagaagagacactcccagtgctggagaaagctcagggggg

SEQ ID NO: 85020 - DNA, 865 bp, Homo sapiens
actgaaacctattaatccaaaattagaagacttgctgttcagaagttatcctatgaaaaagatacttgctcatgaatgtttatagcagtacaattcacaattgcaaaaattgaaaccaacccaaatgcccatcagtcaacaagtgaataaagaaactgttatatgaatatatatatatatatatatatatatatacacacacatatacatatatacagatatatgatggaatactactcagccacaaaaaaagaatgaattaatggcatttgcagcaacctggatgagattggagactatcattctaagtgaagtaactcaaaaatgtaaaaccaaacatcatttgttctcacttataattggtagctaagctaggagtatgcaaaagcataagaatgacatgatggactctggggactcagagggaaagggtgggaagggggtgagggataaaagatgacaaattgggttcagtgtatagtgctcgggagatgggtgcaccaaaatctcacaaatcaccactaaagagcttactcatgtaccaaataacacctgttcccaaaaaaaactatggaaatatttctttttaaaaaaaatataagattttgagtagcaggaggcaatagggtggctttgttcttttctgcagttttagtcctcaccctgatctgtcaggccagaaagygcctctgccatgactgaaccctctggtcccttcaggaagcaagaaggtgtccagaaagcactacaggcagaaatctcagccccagccctacctggcaatgataggagctaggccagtgacacctatgatagctaaaaatccagaagagacactcccagtgctggagaaagctcagggggg

SEQ ID NO: 85021 - DNA, 865 bp, Homo sapiens
actgaaacctattaatccaaaattagaagacttgctgttcagaagttatcctatgaaaaagatacttgctcatgaatgtttatagcagtacaattcacaattgcaaaaattgaaaccaacccaaatgcccatcagtcaacaagtgaataaagaaactgttatatgaatatatatatatatatatatatatatatacacacacatatacatatatacagatatatgatggaatactactcagccacaaaaaaagaatgaattaatggcatttgcagcaacctggatgagattggagactatcattctaagtgaagtaactcaaaaatgtaaaaccaaacatcatttgttctcacttataattggtagctaagctaggagtatgcaaaagcataagaatgacatgatggactctggggactcagagggaaagggtgggaagggggtgagggataaaagatgacaaattgggttcagtgtatagtgctcgggagatgggtgcaccaaaatctcacaaatcaccactaaagagcttactcatgtaccaaataacacctgttcccaaaaaaaactatggaaatatttctttttaaaaaaaatataagattttgagtagcaggaggcaatagggtggctttgttcttttctgcagttttagtcctcaccctgatctgtcaggccagaaagtgyctctgccatgactgaaccctctggtcccttcaggaagcaagaaggtgtccagaaagcactacaggcagaaatctcagccccagccctacctggcaatgataggagctaggccagtgacacctatgatagctaaaaatccagaagagacactcccagtgctggagaaagctcagggggg

SEQ ID NO: 85022 - DNA, 865 bp, Homo sapiens
actgaaacctattaatccaaaattagaagacttgctgttcagaagttatcctatgaaaaagatacttgctcatgaatgtttatagcagtacaattcacaattgcaaaaattgaaaccaacccaaatgcccatcagtcaacaagtgaataaagaaactgttatatgaatatatatatatatatatatatatatatacacacacatatacatatatacagatatatgatggaatactactcagccacaaaaaaagaatgaattaatggcatttgcagcaacctggatgagattggagactatcattctaagtgaagtaactcaaaaatgtaaaaccaaacatcatttgttctcacttataattggtagctaagctaggagtatgcaaaagcataagaatgacatgatggactctggggactcagagggaaagggtgggaagggggtgagggataaaagatgacaaattgggttcagtgtatagtgctcgggagatgggtgcaccaaaatctcacaaatcaccactaaagagcttactcatgtaccaaataacacctgttcccaaaaaaaactatggaaatatttctttttaaaaaaaatataagattttgagtagcaggaggcaatagggtggctttgttcttttctgcagttttagtcctcaccctgatctgtcaggccagaaagtgcctctgccatgactgaaccctctggtcccttcaggaagcaagaaggtgtccagaaarcactacaggcagaaatctcagccccagccctacctggcaatgataggagctaggccagtgacacctatgatagctaaaaatccagaagagacactcccagtgctggagaaagctcagggggg

SEQ ID NO: 85023 - DNA, 1907 bp, Homo sapiens
agcccaggggcagaagtccctgtgcataaaacctgtccctgaagtgattaataaccatggtcgcagacagtcattaggagaccttagtcatttgctgcatgatggagacgccaagtctaagaaaactgcctttgaatgttttgctaaactccattgaattgaggaaaaaatctgacatgcataatcagttcttacagacccaagagcaagaagaattcagtgacaaatgtattgagtgtgcctgaggaaacatctatttcacatccacaagaaaccattcattcttatactgcacagcttaggctagacaggagagagattgatgttgattatttttgtagtgggagaaggtcacatgttaggcaagttatgcccaccaaagtcacctatcccctggatacagagtctcgatattcatccctagacagaagggctttgccacatcagttttttccacttcagatccctgatgaaagaatcatggtgggagacaatacttgtgctcctttcaaataggtaacaaatcatgacaaatgtgcacaacgaagaactcttgactggcagacgtcaaagagcatgctaagagataaaattatcatcatgtctcacctccttgctaactccaatctaactcctttaaaatattctgagtttacgacatgtgggacactggacttccaaatcacacgttgtccacgtgattcctttcagggatccgctagtggtgggtggagagtttcataggttttggctttgctaatagctctctgatcacacttccccttgcctggtttgccactttggaggggtcttcaatgaggcttgcgtggttctagtttcacatgcagaaagtgcatttggtcatcaactcaaatgtgtatttcttttgttagataattcactcagtaactagagatgatcaagaagtttaaaactggaagataatcaattgctgacaatgacactcttcagggcaggtgaaccagtgtacagatgacccaggctggctcagtgtacctgtagtgatatagtgatggccaaggacacgcaagtgtgtgacagtaaagccatctctattgttcatgaattgcatcaaagcacagatcatcatatcttattaatgagggccactttactactcaaatgtaagtacaagaaccctaataattctctctgtgcttttacccacagttcttccacttctggatcccacctcgactgaaccttacacaatctactgctggactttccaatggcatgagttggtaaatcatctcatttttgcaaaagcaagtgtaacttgagtttccatcacttgcagctgagagaacacttgttcttgaattttatccacaatgaggtgctggatgttttctgtttgccccatgaactcactctctgccttccctgtcttgctgtctacccttaytggttcttttttcctttctgctttggtttccagttggctctggccaatgatagaagacgataaaagagcgagggagaataaagtcatgtgtttatttcttcagcgttctccaagcagggttgccaactgcctgggcgtgttttgtcacagatctcatagcttctctcaaggcagcctgctccatctgattctccccttctgaattataaccagttttcactgagtactttctatactcaggaacagtgagagctatcttgtatacattagttccctaagtccacttctacaggaaatgtttgttagaattattgctttgttataaataaggaacttgagagggacagagaactctagtaactcgtcaaaagtcctgtgcacctctgtgatccccttacaggctaaaaatctgactccaccaacaccgactctggcttcgagcttcatatttccccagtccccctcacccttccccttc

SEQ ID NO: 85024 - DNA, 1269 bp, Homo sapiens
tgggtttacaggcatacaccaccacgccaggctaatttctcgtatttttagtagagacagggtttctccatattggtcaggttggtctcaaactcccgacctcaggtgatctacccgcctcggcctcccaaagtgatgggattacatatatatatatacacgtatatatatatgtgtatatatatattatatacgtatatatatacacgtatatatacacatatatatacatatatacacatatacatatatacacatatatacatatatatacatatatacatatatacatatatatacacatatatatacatatatacatatatatacatatatacatatatatacacatatatatatatagcgaaaaacaatctttaaaaaatcaccagaaaatgtagtgcttatagacagacgacttatcttttgttaatcacacctcatcctcctttttcacacatacatacagtctaagtaccagatttgcacattcagtttcagcaagaagaattcatttaattcccccactctctgctcacaagacctattctcaggatccatttctaacgctgaagcagctgaggctccaagacaagggctccgtgccactgtgcagttggcttgaagttacagaagttctccttttagggctctggaagttggctgactcatggcagggccaggagcacttgctgtgtgcagggctctcatgtgctttgctgctttctgattagttactgttaatatttcattgggtttcctttgtttctgtttagcaaaagaggtggccttacagcttgaattacgtgaatatcatgtatcatgttatgttttcattgtgagttggcttaaatgattactctaaagtgcttgatatggtttggctgtgtccccacccaaatctcatctagaattgtaactcccataatccccatgtgtcatgggagggrcctggtgggagagaattgaatcatgggggcaggtttttcctgtgctgttctcatgataatgaataagtctcacaagatctgacggttttataaaggacagttcccctgcacacacttccctgtctgccaccatgtaagatgtgtctttgctcctccttcatcttccatcatgattgagagcctccccagccatgctgaactacgagtcaattaactctctttcctttgtaaatcacccagtctcaggttatatctttattggcagcatgagaacagactaatacagtgcttaaagagaaaatatggacaatcagattat

SEQ ID NO: 85025 - DNA, 1015 bp, Homo sapiens
tgagcaatgtggacagggtgggctgggggataactcatatcacaacataaccaactaatttttaaaaatcactttttcacctcaggaccagagattctattactcacccccaagacaaaactgaagaaatcctggcccctcttaattgtttacatgaatgtgatgggccaaattctgatgagataagtgagtgaggctggctccatctcgcatgtggctaaggcaagactgatgcatttattacccatcttgttacgtggaaaatattctccgtgatatacctgttccacccttcagctctggctgagtatagacaggtagaggtgcactcaaagccacttccttccataagaccaggcgtatgagctcagaaggactcctcacagaaaacaagggaggtgggcagaagaaactcgggtcaccaggaaggtgtcggtgtcaagctacacttactttgaccttttgccctaaagagaatgctctcttagcaacctttccaaatatatatacagcctaggacaatggatgccgagtgatggctccattattaatccaccaaaccatgtttaaagctatttacttcataatattaggtccaaaccatacttggctcttctggatggaggctgaaaatgaacattgtaggtgcaaacaatctctctctctctctttttttttttttagggggagtctcactcttcttgcccaggctggagtgcaatggcatggtctcggcgcactacaacctccacctcctggattcaagcatttctccttcctcagcttcccaagtagctgggattacaggyatgcaccaccacacctggctaattttgtatctttagtagagatggggtttcaccatgttcgtcaggctgatctcgaactcctgacctcagatgatccgcccaccttggcctcccaaagtgctgggattacaggtgtgagccacagcgcccggccaggtgcaaacaatctctaatggaacatgtttgagaccaaagggaatgatttt

SEQ ID NO: 85026 - DNA, 858 bp, Homo sapiens
ggcttaacagagtcccagcccctgtaatatcctgagtacatcttggcatcacagcacttgccaattacattataatagttatctatgcctatgtctgcttttcttcccaggctgtgagatctttgaaattagggacaaattgaagtcaccactgcaactctgctggatcacagagtgtcaggcccaggaaaagtgctcagccagctctggctaaatcaatcagtctatggacaaagccccaaggtcagagaaccagtgagyaactgtgagtcaggtgcagccctagatccacttccagtccactgttctctcctttcctcagtagtgctgatatttttccttcacttcctcaaacttctgagcctacagcttcttcaccaggcagaagctgggaatttcgcctgtgcagtcaaacgtggaacccaggctgctgatgggggctccagtagaaagaaatgtgatgtcacccattaggtactagagggagtggttgtcttctataaagctgctgatgctttgcagcccaggctgcccctctttcctcacagtactctgccatgcaccctaaaccaggtctcaagcactcggacacctcacccactgtgcaataacatggaaaccttgtaaccagcaaaacaaaacacactataacaagttttaaaatgagagttactgaagtttaacttacataccaaaagtcagccattttaagtgtacaattttattagttttgacaaattgaatataatcttttaaccaccaccacagtcaagatatagaatatttgcattactcccaaaacattccctttggcctctatcccaactttctttcttcaggcaaccactgatctggatc

SEQ ID NO: 85027 - DNA, 750 bp, Homo sapiens
caatatttcacagatgctgcaaagactttatacagatgagagtggaaagaggagagtgcagcagaaatacgctgtgatgtccttctcccccaccaccacttccaagcctggctgttgagatgtgcccagtgtcaaaagaattggggattaaaacaccaaagcctaaatatcagacttgccaattattttacttatatttactttgaaaccctgccagtctaaagaccgtcttcaccagaagacttctgtggctgggaaaaatctctcaaggcaatgaccagtgtagtccagtcgaaaatgaaatgggaaattgaaagctaggcctgaagctgaataatacagtgcaaaattttcaattcagggtcagtacacagtaatattttatgcctcaggacagggcttaagtattaaggacagaaaaagagtcactaatgtttaatacatacagagacagcagcacgctaggccctatggccaggacccctacatcacagaaccgtggaggaccctattcacattatcagctatgaatagtgtccctcctccagggtyacacaacacacatgacctgcagagcccaaaacaggcttttctcagggagataccaaacacaaaacaaaaaccagggaaaacacagtctcaagtcaattaccaagcaagggaaagagaaaggtccacatgcaaatgacaactaggggagggggtagttataattgctctgcatgaattgagaatggaaccactgcccag

SEQ ID NO: 85028 - DNA, 979 bp, Homo sapiens
gggtgattgaatacagcatgagtcctgtgacacagacctgaaccttcaaatatcactctttttcatgcaacctcagcattcattttctttcctgaagactgagtatttttcaaatactctgtaaaaagaattagtctatacagatgcctttagtaccatttgaaattctctgtatgtgtctgttacactttttctctttagacttttaaagacagttaaactttggttacatttgcacaaaaaaatcagcaaagcttatcgagatgtttatagatggagactgtcacagaggwtgcaaagcagcagtcctgtgatttgaacatggcctctagatgtgctttatttagattattaaaaaaaaatttcaatcagttgctaacatttaaaaatcaaaaattttacataaaactctagatattcactacaacctaaaacttcaaaacttctggcacattaaacatggcttcctgcttgggacaggaagttttccatggctgagtggcaggtgttctctagttctccatagtcaaatcagaccacctttacacatgtgccttacctacctggctcctagaagcctgtgagtctgagatctttgctctaccctctctctggttccttctcccattattgcatctatctttagccaagatgttacttgttttttttccaacaaaattatctgttgcttgtttacaaggaggaagaaaatgatgattatggagggtcaccaacaggcaaaaaaaaaaaaaatgaaattcacaggtttattaacactagaatacatacaccagctacttgctccaaaaatcatgactcctcagcccctcctcttttggtacaaataggaaattaaaaacggaagtgtttgggaccttgtgatggtcattctcttaacattgtagtttttacaattggcaagttatttgctttgactgaccattatggtaattcatgttcattgtagaaactttgaaca

SEQ ID NO: 85029 - DNA, 1813 bp, Homo sapiens
  misc_feature (1)...(1813): n = A,T,C or G
aaaaccttcagaaggaaaggagaatgttctgtggaccactttggttttcttttttgcgtgtggcagttttaagttactagcttttaaaatcagccctttttaatggaaacaacttgaccaaaaatttgtcacagaattttgagacccatttaaaaagtttaatgaggaaaaaaaaggttgaaaaattgtcatgaccccaaatgtttttgcttaaagtcacccagnnnnnnnnnnnnnnnnnnnnnnnnnnnnnnnnnnnnnnnnnnnnnnnnnnnnnnnnnnnnnnnnnnnnnnnnnnnnnnnnnnnnnnnnnnnnnnnnnnnntgaaagcagtccagaaaattcaaattcagttcaccatggaaaatacttgcagctccatgtgtgttatgcacacacctgtgcatgtatacacatttaatacgtattaaaattcacctagtctttaatcctagctataagtagccacattaaggtggaaaaatagtaaatcatctgaagaggagaataaaatggcttctgaaatatctataagttatgtagatcttaaagtctagtaaagatgtaagagcaaatcagaaggagtgaggtgctctctaatgaaaattactttaagtgtacaaatgattaatgatgggccaatgtgttttctgctcatgttaactcagataatctattagttacaataaaaagctgcctgagatgcagcagattcatataaaggcatgatgaaattctgagttgctccctctagggtaagtcttcttcaagtgggtaccagcagaagctgcctcctcctagcttccctcttctttctaatcatagacaaaatgaataatttgatttggttattatttttgtgcattttaaggtaggattttttggctgtaggatacaattaacctatcaataagtcttcacatatttttattaaattgcttccagattatagtagttggtgcacatcaaatgatatgattgagtcttctcaggaaacctgatttattctgtggagctggagctcaagaaagtaaggaaattcctctgcttttgctttcagctgctttcgtcaactgtgatgattgttacagttggcctttgcttctttaagaggagctcttcaatagttctttcatgtgacactttcctctcgtttaccaagtcttgaaagccttaacctttgcatcattcagtaagatgaacttgactttgagccattaactcccttgagctatcctcttggagttgacattgttgtttgtttgctgtttttcagtgtttataaaatcaatgaggtgaktggctatgtgatacaatagtagagggtagtgaagagggaggacgtggaggaaagaggagaagtttggctaaaacaaatttctctttggacacgaatgttcaatattcctaatgattagaatttgggtctaaaaagaagaagaaaaacccaatgtaagaattgcttctacaatatatgtatgtgaaacaacaccaaatggatcctacaggatggggctacatttcaattaatctatacaaacctccaaatagcccagagtgtgtgtgtgcgtgtgtgtttgtgtgtgtgtgtgtgtgtgtgtatcttccttttggaatccttttcattgcaaagtaagttttcttaaggtcatttccttttggaggaaagaactaaaaacattttcagaatatgtgctagggtttgaaatgaacagttatggtggttcttacataccagagaaaatatgcaggtagatattctcttgaatgactaggagaaatggtgatgatattccctttgaaaacacaaaat

SEQ ID NO: 85030 - DNA, 717 bp, Homo sapiens
agattgagaccatcctggctatggtgaaagcccatctctactaaaaatacaaaaaattagccaggcgtagtggcgggcacctgtgatcccagctactcgggaggctgaggcaggagaatggcatgaacccaagaggcggagcttgcagtgagccgagatggcaccattgcactccagcctgggcaacagagactccatctcacaaaaaaaaaaaaaaaaaaaaaaaggaatcttggaatatgcagaagkaagaaagaaaaataaaaagtaaaaatattgatgaatatttttcctcttgagttttctaaactatgtttgagagataaagcaaaaattataacactgtttgacgtggttctcaatgtgttgggaaaggcagtcatgcacagctcctcagcccttgaatggctacctgagagtagacttaggcctggaacattccttacaaagaggtaaagagccctcataactaatgctgggtttatcgccttgtgagagagtatcttccctgttctggccttgatgtagttactcctttgttatgcctaagcatgtgtatgtgtcagtgtcctcaagcatgtccctggctttctatatttcaggtccccatgggagaaggagaaggtgcttctactgcaggacaaactagagcgtgtgtagccacactgccaacatcgtatgtgcagtggatctgctggccacatgggggccaatgca

SEQ ID NO: 85031 - DNA, 658 bp, Homo sapiens
aacatcattaggaaaattaattaaaaaaagagaaaatggtttacaatactgtactatattttttgataccataagtttaccttgtctgtttacaagatgcaacttccgtctgaaatggtaggcaaccacagccgcagacctcaatctatgtcacgtatcagacaatttagctttttcttgtaatgtcgtgacttttctctggttcttgggatcacttccagcatcactagtggcacttcctatgggtctcacggtgttattcaaggttcgcggtattgtaccaaacatgatgaaaaatacacaagaactgcgagagattactttttactgtgatacacaatttactggagagacgagctgctaacgtagagatgattagagacacactgcatttaaagtggatactcacaacacgagctcaccgcagtagcaataggaggtggctatgaaattattacggtagtatagcatgtactatagtcaattttatacagttatgatttaatactgcatcrttgcatccacttaacttgactgcaaatggcaacatgtaatgtctgtgtttgtgtttaataacacttaactttttacaatagatttgtacgtattttacagcagaaaatgataaaatagactaatatttaatatatcatgcatt

SEQ ID NO: 85032 - DNA, 529 bp, Homo sapiens
tgatctgttttttcataagtgtttctccatgttcactattaacattttgacttggacaattcttcaccgcataggactgtatgtggcaggttaatttgcatctctggccccagaatgctaaaaaccaaaataaaaccctagttattatgatgatcaaactatttcctcacagattcccaaatactcctttggataaacatttatttctcctttattmtgaatactcagcccactttaagatgaaatttatgagtctgtaagtgatgctatttaatatttattgagcacttactctatgtcaacactatgctaagacctataccgacatcatttcatttatttttctcaggaaactatgaatttcatgctattattttcttcatcttacaattgggaaaactaagtttagagatattaaattgcttaaatccacagagctggctggctaagtgttctgtgtttatatctgattacagaatgtcagagtcttgacctgtagggtgatctttaaagtgcagtttgttcacga

SEQ ID NO: 85033 - DNA, 1215 bp, Homo sapiens
cttttaccacactgcaagggacagaggcaatttttctcccaggattcaggactaaagtagatgatcttctggacttctctgtgacatttcactgaaattgcatttcaccgaaaacaaacaagcaaacaaaaatcttccttttgagaagataatccccagaagttaaaagaaagagtagtagtccagttggaagttgcaaaaaaatgtaagtacacatgtcatttgaaggggtgcttgtgtatgtgtgtgtgtgtgtgtgtgtgtgtggactctttcagttgcaagatagagcaactcaactacaagtggcttaaacaaaatgggggttttatttgtattatagaaaagtccaagatagatcagtcttcagtcatggctggatccaggtgctcagatgatgtcatatgagttcttatccctctccctcactcatctctggttcaacatgaccaccagcagccccagacttacattctgccagctagacacatccctgggggaatgtgtgcttctttcccagaagtctttttaaaagttccaggtttgcatctcaatagcccaaattggatttagtgtccatccctacaccaatatgggtgcctccaattggccaggccttgatcacacactcctgaagcagggtgggktaaggcagactccaaccaaactacatggactttaaaaaaaaaaaaaaaggatgatattaccagaaaggaaaatggtttggcaacagcaaaggatgcctgttacagtggaatgtgtatgtaatggtgaaataaataagaagaagaaaagaaaggcagctggtaggatgctggcagagggcaatgagcaggtctgtcctaagtgaactcgggtcggcaggcttagttctcaaaccggttgccttgattaatggtaaaaacaataacatttcaagacctgaaacacatctccttaaatttcatcaaagtgtccagtaagtgctgatgtttacggatgtcaccgtcacccagggttgctgtttcccctggacagccgggtaagcaggcagctgtctatcaggactaaatgaaagaggttcgaaagccaatgcagaaaagtcgagaacttggcttgtgcagtgcatcataaaggaaggagggaagagggagaagccttggcaatttgtttttaatatttttgcttgttttggatgccacgaaagcctcatatattggctcttgactaataaaa

SEQ ID NO: 85034 - DNA, 1215 bp, Homo sapiens
cttttaccacactgcaagggacagaggcaatttttctcccaggattcaggactaaagtagatgatcttctggacttctctgtgacatttcactgaaattgcatttcaccgaaaacaaacaagcaaacaaaaatcttccttttgagaagataatccccagaagttaaaagaaagagtagtagtccagttggaagttgcaaaaaaatgtaagtacacatgtcatttgaaggggtgcttgtgtatgtgtgtgtgtgtgtgtgtgtgtgtggactctttcagttgcaagatagagcaactcaactacaagtggcttaaacaaaatgggggttttatttgtattatagaaaagtccaagatagatcagtcttcagtcatggctggatccaggtgctcagatgatgtcatatgagttcttatccctctccctcactcatctctggttcaacatgaccaccagcagccccagacttacattctgccagctagacacatccctgggggaatgtgtgcttctttcccagaagtctttttaaaagttccaggtttgcatctcaatagcccaaattggatttagtgtccatccctacaccaatatgggtgcctccaattggccaggccttgatcacacactcctgaagcagggtgggttaaggcagactccaaccaaactacatggactttaaaaaaaaaaaaaaaggatgatattaccagaaaggaaaatggtttggcaacagcaaaggatgcctgttacagtggaatgtgtatgtaatggtgaaataaataagargaagaaaagaaaggcagctggtaggatgctggcagagggcaatgagcaggtctgtcctaagtgaactcgggtcggcaggcttagttctcaaaccggttgccttgattaatggtaaaaacaataacatttcaagacctgaaacacatctccttaaatttcatcaaagtgtccagtaagtgctgatgtttacggatgtcaccgtcacccagggttgctgtttcccctggacagccgggtaagcaggcagctgtctatcaggactaaatgaaagaggttcgaaagccaatgcagaaaagtcgagaacttggcttgtgcagtgcatcataaaggaaggagggaagagggagaagccttggcaatttgtttttaatatttttgcttgttttggatgccacgaaagcctcatatattggctcttgactaataaaa

SEQ ID NO: 85035 - DNA, 758 bp, Homo sapiens
tccattcttgactgagagagtttacccctcacagacatcagtgaaaagccactaaaagggggatcttcagaaagaagttgaacctaaaaagaaracgggggatacaagaaacaatgaaataaatattaactgaataataatcaaaagcatacctcattgccctggctatgcaacatagtatggccttctagatcctacgatctcacctttgctcaccgccagctttaaccgtcaccatccctactcgccacttactagcaagcagcccaggaatatttgctaaataaatcaatagacaacaaactgagagttgaactcaaaccttttgctttctagccctgttgtttcaactagtgcagtccacttccctgcctcagcaggcacggtggagtaaggactgcacagtctttttctgatgactggtcctttccttatgtcatcttagggtatagaagactccatagacatggctggtgcccttcccaaatcccctcagcctaccctggaagtggcctctggaaagttctacatctcttctgcctgaagatgttccctgattggcagtgtacttggaagtgcccaggagttaagatgccaagataaaccctcaaccattaagagccagcttccttgtccctcagtgggacaatcacgggcatattccactgttcctcctcttagagggtccccagcaggattgaggtccagtcgctcagggtcatctccccactgagttgcttcctgggctcgccgctcga

SEQ ID NO: 85036 - DNA, 758 bp, Homo sapiens
tccattcttgactgagagagtttacccctcacagacatcagtgaaaagccactaaaagggggatcttcagaaagaagttgaacctaaaaagaagacgggggatacaagaaacaatgaaataaatattaactgaataataatcaaaagcatacctcattgccctggctatgcaacatagtatggccttctagatcctaygatctcacctttgctcaccgccagctttaaccgtcaccatccctactcgccacttactagcaagcagcccaggaatatttgctaaataaatcaatagacaacaaactgagagttgaactcaaaccttttgctttctagccctgttgtttcaactagtgcagtccacttccctgcctcagcaggcacggtggagtaaggactgcacagtctttttctgatgactggtcctttccttatgtcatcttagggtatagaagactccatagacatggctggtgcccttcccaaatcccctcagcctaccctggaagtggcctctggaaagttctacatctcttctgcctgaagatgttccctgattggcagtgtacttggaagtgcccaggagttaagatgccaagataaaccctcaaccattaagagccagcttccttgtccctcagtgggacaatcacgggcatattccactgttcctcctcttagagggtccccagcaggattgaggtccagtcgctcagggtcatctccccactgagttgcttcctgggctcgccgctcga

SEQ ID NO: 85037 - DNA, 758 bp, Homo sapiens
tccattcttgactgagagagtttacccctcacagacatcagtgaaaagccactaaaagggggatcttcagaaagaagttgaacctaaaaagaagacgggggatacaagaaacaatgaaataaatattaactgaataataatcaaaagcatacctcattgccctggctatgcaacatagtatggccttctagatcctacgatctcacctttgctcaccgccagctttaaccgtcaccatccctactcgccacttactagcaagcagcccaggaatatttgctaaataaatcaatagacaacaaactgagagttgaactcaaaccttttgctttctagccctgttgtttcaactagtgcagtccacttccctgcctcagcaggcacggtggagtaaggactgcacagtcyttttctgatgactggtcctttccttatgtcatcttagggtatagaagactccatagacatggctggtgcccttcccaaatcccctcagcctaccctggaagtggcctctggaaagttctacatctcttctgcctgaagatgttccctgattggcagtgtacttggaagtgcccaggagttaagatgccaagataaaccctcaaccattaagagccagcttccttgtccctcagtgggacaatcacgggcatattccactgttcctcctcttagagggtccccagcaggattgaggtccagtcgctcagggtcatctccccactgagttgcttcctgggctcgccgctcga

SEQ ID NO: 85038 - DNA, 758 bp, Homo sapiens
tccattcttgactgagagagtttacccctcacagacatcagtgaaaagccactaaaagggggatcttcagaaagaagttgaacctaaaaagaagacgggggatacaagaaacaatgaaataaatattaactgaataataatcaaaagcatacctcattgccctggctatgcaacatagtatggccttctagatcctacgatctcacctttgctcaccgccagctttaaccgtcaccatccctactcgccacttactagcaagcagcccaggaatatttgctaaataaatcaatagacaacaaactgagagttgaactcaaaccttttgctttctagccctgttgtttcaactagtgcagtccacttccctgcctcagcaggcacggtggagtaaggactgcacagtctttttctgatgactggtcctttccttatgtcatcttagggtatagaagactccatagacatggctggtgcccttcccaaatcccctcagcctaccctggaagtggcctctggaaagttctacatctcttctgcctgaagatgttccctgaytggcagtgtacttggaagtgcccaggagttaagatgccaagataaaccctcaaccattaagagccagcttccttgtccctcagtgggacaatcacgggcatattccactgttcctcctcttagagggtccccagcaggattgaggtccagtcgctcagggtcatctccccactgagttgcttcctgggctcgccgctcga

SEQ ID NO: 85039 - DNA, 519 bp, Homo sapiens
tccctccccccaagaaaatcttaaaggcaatcagagagaagaattagattatctaacaatgaagcacagttagactgatggtaattttctcatgagccacaatgaagtcagagatagtaataacaacagctaacacttaaatggtactatgtcccaagcrtaatgcaaagtacttcatgcatattaactaatttaatcttcacaacaattctgtgagatgggattcttattatcccctttttacagttgaggaaactgagccaaaaggaagtttaatggttcttgtccaaggtcttgcatctagtaagtagagaagctgggactcaaactgagctgatctggctccaaatgctcatacttactgctctgtaatgcttctcactgtagagaaatatgttcaaagtaatgagggaaaataaatgacaacctaagattttatttccagctaaattaagaaatgttttggtgcacgaaaattaaaagacatatattacccatagacattcattttaaaaatta

SEQ ID NO: 85040 - DNA, 719 bp, Homo sapiens
agattcaaatgctaatctcttccaggaacaccctctcagacacagccagaagtaatgttttaccagctctctaagcatcctttagcctagtcaagttgatacatgaaattaaccgtcacacccatgataccccgatatttggtaaaacattattctattaggttggtgaaaaagcaattgtggcttttgccaataaaaataatggcaaaagccagtggctggcaagatggctgaaaaagaacagttccagtctgcaactcccagtgagatcaactcagaaggtgggtgatttatgcatttccaactgaggtacccagatcatctcamtgggactaattagacagtgggtgcagcccacggagggcaaactgaagcagcgtggggtgtcacctcatccaggaagttcaaggggtagggtaaacccctcccctagccaagggaagctgtgagggactgtgctgtgagggacggtgcactctggcccagatactatgcttttcccatggtcttcacaacccacagaccaggagattccctctggtgcctacgccaccagggccctgggtttcaagcacaaaactgagcacaaaattgagcagacactgagctagctgcagtttttttcataccccagtggcacctggaaagccagcaagacagaaccattcactcccctggaaagaggactgaagccagggaaccaagtagtctagctcagg

SEQ ID NO: 85041 - DNA, 719 bp, Homo sapiens
agattcaaatgctaatctcttccaggaacaccctctcagacacagccagaagtaatgttttaccagctctctaagcatcctttagcctagtcaagttgatacatgaaattaaccgtcacacccatgataccccgatatttggtaaaacattattctattaggttggtgaaaaagcaattgtggcttttgccaataaaaataatggcaaaagccagtggctggcaagatggctgaaaaagaacagttccagtctgcaactcccagtgagatcaactcagaaggtgggtgatttatgcatttccaactgaggtacccagatcatctcaatgggactaattagacagtgggtgcagcccacggagggcaaactgaagcagcgtggggtgtcamctcatccaggaagttcaaggggtagggtaaacccctcccctagccaagggaagctgtgagggactgtgctgtgagggacggtgcactctggcccagatactatgcttttcccatggtcttcacaacccacagaccaggagattccctctggtgcctacgccaccagggccctgggtttcaagcacaaaactgagcacaaaattgagcagacactgagctagctgcagtttttttcataccccagtggcacctggaaagccagcaagacagaaccattcactcccctggaaagaggactgaagccagggaaccaagtagtctagctcagg

SEQ ID NO: 85042 - DNA, 861 bp, Homo sapiens
ggtcgttttgtgatcttttgtgagacctggccctaggttacattctttgcttctttgaagcgagtcattcctcttgccttgtgaacccttcagcaaactgttcacctgtgtgtctctgtcaagtgtaacaatcagctgaagcaacaatcaattctgaccttgggtgaagtttagtggcacacctgggaagagtttgtaattctactgttttgtcattgtagctggctggccaccaggtcaggtaaaaggaaaatatcaagatccaaaaaagtagttggtagcagagctgcatccaaaccacagttttgatattcttaggtttctaaaattaacagtgacaaggtcataattaaggtgaggcaagtgagacactcaccttcaggtgcaaaatttaaggtgcaraaaaattcagtaatcctaatgtgaatgcaatatttaaaaaaatgcaaaatgaatgcaaacaatccatgatgaacaaaagatcaaaatgtattcaaataaagacaagatcagtaagctaaagttatttagaaattgtttaagatcatcacttagttaagagaaatgatcaaacatggcaatttcctcaatcaaaaacaagatgcgtgatatggtttggctgcgtccccacccaaatctcatcttgtattgtagcttccataatccccacatgttgtgggagggacgcaaggggaggtaattgaatcatgggggcgggtttttcccatgctattcttgcgatagtgagtaagtctcatgagatatgttggttttataaagggcggttcccctgcacatgttctctcgcctgccaccatgttagacatgtttttgctcctccttcaccttccgccatgattg

SEQ ID NO: 85043 - DNA, 861 bp, Homo sapiens
ggtcgttttgtgatcttttgtgagacctggccctaggttacattctttgcttctttgaagcgagtcattcctcttgccttgtgaacccttcagcaaactgttcacctgtgtgtctctgtcaagtgtaacaatcagctgaagcaacaatcaattctgaccttgggtgaagtttagtggcacacctgggaagagtttgtaattctactgttttgtcattgtagctggctggccaccaggtcaggtaaaaggaaaatatcaagatccaaaaaagtagttggtagcagagctgcatccaaaccacagttttgatattcttaggtttctaaaattaacagtgacaaggtcataattaaggtgaggcaagtgagacactcaccttcaggtgcaaaatttaaggtgcagaaaaattcagtaatcctaatgtgaatgcaatatttaaaaaaatgcaaaatgaatgcaaacaatccatgatgaacaaaagatcaaaatgtattcaaataaagacaagatcagtaagctaaagttatttagaaattgtttaagatcatcacttagttaagagaaatgatcaaacatggcaatttcctcaatcaaaaacaagatgmgtgatatggtttggctgcgtccccacccaaatctcatcttgtattgtagcttccataatccccacatgttgtgggagggacgcaaggggaggtaattgaatcatgggggcgggtttttcccatgctattcttgcgatagtgagtaagtctcatgagatatgttggttttataaagggcggttcccctgcacatgttctctcgcctgccaccatgttagacatgtttttgctcctccttcaccttccgccatgattg

SEQ ID NO: 85044 - DNA, 590 bp, Homo sapiens
ttgatctgcaccagcattgaggaggacaacacaaacaggtgttcacgtttttgaggaaataactaggagagaaaagaaagaaggccttagcagaggattaagtcctataaagcagtaagagttatttaagggtagggattgtatcctattcatccttgtatctgtggtactaagaacagtgtctggtaatgaatagctcagtatagatgacaaatattaaattgatgaatgaatgaatgaatagatggatggataaatagataccatagatgtatgcagaataataatgatcattagaaatatttgcatcttgtatctagatttttggccactttggaaaaactagaagattggcaataattgayggagtatgtgcgttccaggtcattgcagtttgccaaccttaccccatgtactcctgctctctcagacctgaccttgccactcctctcatccttggaacactgctattactacatgaagattcacattccagcccatcttccctcatctagcacagtcctgagagacctggcccgtcttgatcccttccttttctaatgcgttcctgggaaaccaggttagttctg

SEQ ID NO: 85045 - DNA, 1497 bp, Homo sapiens
tctgctgccttgcagattttggatttaagactgcaatatcaacttttacttgaattcccaggctgccagcctgccctacagatctcagacttgccagctctcacaatcacatgagccaatttctccaaatctctttctctctctctctcatggttctgtttctctggagaccctgactaatccaggctccctgaggccaggagccaagagtgatttgcctttgactacacagtatacagtgtccaagcaaaagactgggaaccacccaaacatccagaaatagggggtggatgaataaagcatggtatagccatactatagaatattatatacccaggaaaaaaataaggaggatcactatgtgctggcatggaagacactgatggaatattctcttagatgaaaaaagcaaggtacaaaatagcattttcagaatggcacctttgatataagaaagaataagaatatattccttgtcatgcatgaagaaacactgaaaggggaaacaaaatatttttaaaagtgctacctggccgagtgtggtggctcacgcctgtaatcccaacactttgggaggccgaggagggtggatcacgaggtcaggggtttgagaccagcctgaccaacacggtgaaacccccatctctaccaaaaatacaaaaattagccgggcgtggtggcgcctgcctgtaatcccagctactcaggaggctgaggcaggagaattgcttgaacctgggaggcagaggttgcagtgagccagtatcataccactgcactccagcctgggcaaacaaacaaacaaacaaacaaacaaaaayaaacccaaactgttacctccaggagggcataaggcaagacggaagggggtaggtggggacagggtgaaaacaatacttccatactttgcagatcatatctttctttttaattattaaagtgaaattcatgtaacatgaaattaactactttaggcatcttaaagtatacaatccactggcatttagtacattcgcactgttgtgcagccagcacctctatccagctccagaacattttcaacacaccaaaagaaaatcctgggacaaggtctggatccctcatctccacacatgtggccttctcactctggtccccgctccactctccagccctgtccctcacctccctccaccctcctcaaagtctgggtccctataacctgagtcacccctaccccctgcactcactctctcacctccaggcctctgcatataaagttccgtctgccttaagcacgcctctcccacctcttggccacagtaactccccttcgacttttgattttgttctcaacttactcaatcatcacttccctaagaaacctttcctgattccccaggcaccactgctccccccaccccccagggactccccagtgccctgtgattctctttttctggcagcctcagtgtgtgcgtggatgtctgtctcctccgttagcctgtgcgtcacgcc

SEQ ID NO: 85046 - DNA, 621 bp, Homo sapiens
ccttctcacattggcttcctgtacctatgagatagcaaaaagtaggggagaaatctcatattcctgtgagtacatgacattatcgaaacaccagaggaccagggaggatggtcagtgagctcacaagcattgatgtctgccatttgcatttaatcctcccagcagccccatgaggtggggaaacattgggaatcggagatgaacagctgcggcccccacccaaggtcacttagctrgttggtgagacagggccctgacaggcactccttctgtagtagtgtgcctgggctgccatgacaaaatcccacaaactgggtggcttaaacaatgaacatttattttctcataattctggaagttggatgtccaagatcaaggtgtcagcagggttggtgtaatagtccatttttatatcactatgaagaaaaacctgagactgggcaatttgtaaaaaaaaaaaaaaaaaaaaaaaaaaaaaaaaaaagaggtttaatggactcacagttccacatgtctggggaggcctcacaatcgtggcagaaggcaaaggatgagcaaaggcacatcttacatggcggcaggcaaaagagtgtgtgcagaggaactgccctttataaaacc

SEQ ID NO: 85047 - DNA, 692 bp, Homo sapiens
ggctccaatcagccagtcatcactgagggctgctgtactccaggttgggcactgggcactgggatggtgaggaacatagccatggtggctgtttgcatggagggtagagtggagagaacagatgctgaagctgcagtgagaagatgtctgggacatgacacagtggtccttcgggcctgggtcacatgcccaggagcactagaagtgtgcgctgtgattccccttaacattcctcccagaaacaaacatggcacaacctctgtgctcaccagcgtgtatgtctgtcttycagaaaatgccatctgtcctcatcctcaaagtgccttctggctccagctcacttggaggaacaggatgccacacttactaaacaatgctgacaactagctcctatagggagaaccatcagcagccatgcattgggtgcttgctgtatacattctgagccacatggcctggtctctgcactcagggaagctggaatctgcttagggaaataagctattctggaggagatggcagcatgtgagtatggggaggagtaggctggtgtccgcacagggccttgcattgtagcaggagaggtgagacatacaggcaaagtgggagccgccatgatgtcgcggaagcagcattgcacctgggtttaggagatgtgctttcagcctgggctgtgcttccaacttactatt

SEQ ID NO: 85048 - DNA, 692 bp, Homo sapiens
ggctccaatcagccagtcatcactgagggctgctgtactccaggttgggcactgggcactgggatggtgaggaacatagccatggtggctgtttgcatggagggtagagtggagagaacagatgctgaagctgcagtgagaagatgtctgggacatgacacagtggtccttcgggcctgggtcacatgcccaggagcactagaagtgtgcgctgtgattccccttaacattcctcccagaaacaaacatggcacaacctctgtgctcaccagcgtgtatgtctgtctttcagaaaatgccatctgtcctyatcctcaaagtgccttctggctccagctcacttggaggaacaggatgccacacttactaaacaatgctgacaactagctcctatagggagaaccatcagcagccatgcattgggtgcttgctgtatacattctgagccacatggcctggtctctgcactcagggaagctggaatctgcttagggaaataagctattctggaggagatggcagcatgtgagtatggggaggagtaggctggtgtccgcacagggccttgcattgtagcaggagaggtgagacatacaggcaaagtgggagccgccatgatgtcgcggaagcagcattgcacctgggtttaggagatgtgctttcagcctgggctgtgcttccaacttactatt

SEQ ID NO: 85049 - DNA, 1195 bp, Homo sapiens
tgcatggatatgatgccagaggcagagacaagggggtgggggctgtttctaaataccttccaataacaataaaaaaacggaagttatttgtgatcttagaagatggctaaggaaaaactgaaacctgaaactraggaaacaaaagtttagacaagataatcccaacatcagagaaagcatttgtcattgtcagaactccaaagagcaagaaagctttaatccatttcatggaccctaggactcatggtctagtaattcttatgtcaccaaaccatcttaggatctgtatgaaattacagtgtgtcaccactctacatctgcaatcttaatgtttccgtcctttgattgtatgacaaggaaactcttgaaccagagcactgcacttcacaggagtctgaaagaaccagctgctcataattttggagttttatagggctttttagtctcagaatccctgtctgacctatgtccatatccagaattcattttttttcatttccagaattcttcagaaaaaactcttgctgtcttttaacgtcttaaaacatttttcaaaaaatatatagagagaattagaaagccactcatagacttaccctctttctccgttgcttcttcagttgtgtaatagtcatgaaatctggaatgaccattttaaattatattcactgagtttgaaacaaaacgtttttagatggttttgttcccttaaaaatgaatattattgtctagcattaacattcacccaaattgatagcatattgaattatgtgtgtagattcttaaacgttttgttgtgaaacatcaaaagaaatcactgactttttatttaacataaataaattaagggaagtttagaaatctaattgttggaaaaataaacttctaaacataactcttcaaaagtctacgtgctcacattttctattcccgaacaaaaacttttgcaaagctctctgaaagccttgtaaaaggccaatgaatttcatttagcattaatttccctactcaccacatagcaaatatatgacacaacttatagttctgttaaaaaaaagccagaactgttacctgagcaactgcttataaaagagcgaggcagcttacgttttatctattttttgtgtgctttctactaagttttacaatctaagtgtgttagaaataaaatcaaattcattaggaatctctatgc

SEQ ID NO: 85050 - DNA, 1195 bp, Homo sapiens
tgcatggatatgatgccagaggcagagacaagggggtgggggctgtttctaaataccttccaataacaataaaaaaacggaagttatttgtgatcttagaagatggctaaggaaaaactgaaacctgaaactgaggaaacaaaagtttagacaagataatcccaacatcagagaaagcatttgtcattgtcagaactccaaagagcaagaaagctttaawccatttcatggaccctaggactcatggtctagtaattcttatgtcaccaaaccatcttaggatctgtatgaaattacagtgtgtcaccactctacatctgcaatcttaatgtttccgtcctttgattgtatgacaaggaaactcttgaaccagagcactgcacttcacaggagtctgaaagaaccagctgctcataattttggagttttatagggctttttagtctcagaatccctgtctgacctatgtccatatccagaattcattttttttcatttccagaattcttcagaaaaaactcttgctgtcttttaacgtcttaaaacatttttcaaaaaatatatagagagaattagaaagccactcatagacttaccctctttctccgttgcttcttcagttgtgtaatagtcatgaaatctggaatgaccattttaaattatattcactgagtttgaaacaaaacgtttttagatggttttgttcccttaaaaatgaatattattgtctagcattaacattcacccaaattgatagcatattgaattatgtgtgtagattcttaaacgttttgttgtgaaacatcaaaagaaatcactgactttttatttaacataaataaattaagggaagtttagaaatctaattgttggaaaaataaacttctaaacataactcttcaaaagtctacgtgctcacattttctattcccgaacaaaaacttttgcaaagctctctgaaagccttgtaaaaggccaatgaatttcatttagcattaatttccctactcaccacatagcaaatatatgacacaacttatagttctgttaaaaaaaagccagaactgttacctgagcaactgcttataaaagagcgaggcagcttacgttttatctattttttgtgtgctttctactaagttttacaatctaagtgtgttagaaataaaatcaaattcattaggaatctctatgc

SEQ ID NO: 85051 - DNA, 698 bp, Homo sapiens
tgcataaaaataaactgttactggaagtccttggctctaaatatggctatggctactaaaggaaataaagaagtttcaaagcaaaggaactaaaatgatcaaaggaaaaaagttaaagagtgaagaaaatgtgaattctccattttgaagaagaaaaaaaaatggtgggttgagaatcaccaaagaaaaacaaccatgaaggcgatttttagaagaaaatsgattgtttatataatgccaaatatatagacatatagaagcagatgatgaatttaatattaaataaaagaaactcattactcttcagtgtagtaggatgtatgtttctgcttcataaagcatcagtagcatttagcacaggctgctccacatataaagaagagcttatttacattttaagtgctacatttatagagaaaagttgtaagtatacattctttcatttttttgaggttatcatcatggattataactgtgcttctcagaaattattttttggtgccagcactacatatagaatatgagagagataaaccaatgttttatttaggatgacatttcttaagttctaaatttttttatggctactatagtttgcatcctatttacaactacatacatatatttgagtatatacacacacagccatgcctacatatgtatgtccacacccacatacataaacacaagtttatata

SEQ ID NO: 85052 - DNA, 698 bp, Homo sapiens
tgcataaaaataaactgttactggaagtccttggctctaaatatggctatggctactaaaggaaataaagaagtttcaaagcaaaggaactaaaatgatcaaaggaaaaaagttaaagagtgaagaaaatgtgaattctccattttgaagaagaaaaaaaaatggtgggttgagaatcaccaaagaaaaacaaccatgaaggcgatttttagaagaaaatcgattgtttatataatgccaaatatatagacatatagaagcagatgatgaatttaatattaaataaaagaaactcattactcttcagtgtagtaggatgtatgtttctgcttcataaagcatcagtagcatttagcacaggctgctccacatataaagragagcttatttacattttaagtgctacatttatagagaaaagttgtaagtatacattctttcatttttttgaggttatcatcatggattataactgtgcttctcagaaattattttttggtgccagcactacatatagaatatgagagagataaaccaatgttttatttaggatgacatttcttaagttctaaatttttttatggctactatagtttgcatcctatttacaactacatacatatatttgagtatatacacacacagccatgcctacatatgtatgtccacacccacatacataaacacaagtttatata

SEQ ID NO: 85053 - DNA, 698 bp, Homo sapiens
tgcataaaaataaactgttactggaagtccttggctctaaatatggctatggctactaaaggaaataaagaagtttcaaagcaaaggaactaaaatgatcaaaggaaaaaagttaaagagtgaagaaaatgtgaattctccattttgaagaagaaaaaaaaatggtgggttgagaatcaccaaagaaaaacaaccatgaaggcgatttttagaagaaaatcgattgtttatataatgccaaatatatagacatatagaagcagatgatgaatttaatattaaataaaagaaactcattactcttcagtgtagtaggatgtatgtttctgcttcataaagcatcagtagcatttagcacaggctgctccacatataaagaagagcttatttacattttaagtgctacatttatagagaaaagttgtaagtatacattctttcatttttttgaggttatcatcatggattataactgtgcttctcagaaattattttttggtgccagcaytacatatagaatatgagagagataaaccaatgttttatttaggatgacatttcttaagttctaaatttttttatggctactatagtttgcatcctatttacaactacatacatatatttgagtatatacacacacagccatgcctacatatgtatgtccacacccacatacataaacacaagtttatata

SEQ ID NO: 85054 - DNA, 1933 bp, Homo sapiens
attattcttttgaaaacttacatattttgctgattttgtgttgtattagggtttcctatctaatttaatataatttatgtttcatgtgagtaaaagtttttctttacatgatcactggtaaattagcactgcctcgagtagtgagtaacatatataatatacacacttgttttataaagaaattattttaagacattatgactacgccatagaaatgtatatgaaggagccttagtggggacacgttaatgcttagagagggtaaaagatttgaaaattatttctactcatttataatttatgcactagcagaaataatggtaattgtaatagaaatttatggatgtatggttcagtgtatgcgttacttttcaaaggcttcttaaatctatgatattactaaggaatcaacaaaaatgttagaaggtaacacacccttcaaacaaagaaaaacggtactccctacattttgctactttcactgtggtgggctgccttccccttctgaatacctctcatgaccagttgtttaatggtaaagatttgttccattctaactttgaaaggacattttttgtttgcttagtttatttgcaatatttattaaggttgttataaacayaaccaaaaattaagcacgtagatttgatttttttttttataatctcaggactgcaggttagggtataaatataatattgtttaactagacacaattattaagaatattagcataaaaatactctttgacttgggaaaattttgcaatgtgctagaaactatggtttctaactttcatatgattattctgtaattatgaaagcatttttatgcatattgaaaaacacttttcaagaagttttaaagtaatttattgcttaatattaggtaactatttgtaccactatatccaactgatattctaaataattgaaacaaatatttagctcatattgtccatataatgaataaaaacaaaaatattaggaactgataataaccctctacaatgtaatacatttatgggactctacatgaatgtgtgcattggtgtagagcatctctttgaagtttgtgacatatattagttcctatttttgtatgatttcaaaaatcttaagcagtactcagttctatgtgggatataaatgaacaaatattttaatttatctgactctgttccagatattcttcattgtattgtgttcagactaccaacatatttgttagcgttccacagttgctcatattaccagccttatgcacttgctcttgccactgtgtgcctttctgttaattaagggtggaatacaggtttttttttttgccctgttttggaattgtatttacagcacaacattatgacaatggtttaacatttctgaaagcctatattcatcagaagtatgcttcatcactttatgttaacaaagcgcaaggaaggtaaacgtttgatctggtacagataaatgatagaacagagagtctatctataaatgagagtccaaacgtttctattttctaaaacttaaatggcataagccatttttaatagtaatgccataagagatacaatgcgtgaagtcatatttttatttatccttggacattaaaaattgtgctggctgtatacttctcattttaatactcttatattttcatttagctatctgataccagcactctctgaaacaatgctaataccaaattaatgtaatagtctctagaattgtagaaaaataacaccatgagatagggacagtgcctatcttgctcattgttgattttctattccctaagccagtacatggtactgtggaaaagacagataaattttgattaacaagtaaataccaccaacctgtatgttaaaagatgtgagagagataaatgtcagtcaaaaacacagaaaaagttagaaagcaaattatca

SEQ ID NO: 85055 - DNA, 1141 bp, Homo sapiens
ataatgtaatgactgcagctgacctgtagaagtatgaactgtctctggggacgctcccaaataaaagcgaagcttttctgtttgaatagttttaattatagaagcaactagtttcaaataattataatgtgccttatttcatattgaaacacaaccaaagattataagtattaatcatagatacaataatcatattctgaatcaaaagaccttgggtacgtctcttctgtgtttcctcgaaatttaagaaatctcttttaccccatttgtaacttattcttagagagtaagataartaatttgtaaagtacaataaatctttcacactacctgaattaaatagtagtcaagcaatcagaaacttttattaccagagtaaattttattttgacagatttacattgttatagctattctctatttcaataacgggcaccattaaaatgacatttactttctatgacttgataatccatacacagagacattcaataaatatgactatgactgtctcttctttcttttctcatttttttcttttacaaaataaataagctatttgtgaaggtgtaagatgaagacattgatagaaaagacgacagaggtattaaatcagttatgtaatgtaacaatattttcagatatcaatttatagtataaagagataaaatagttgagtaagcaagaattgagaatggaaaacatacagttaagcaaaagcaaaaagagtagaaaaaaatctgctgtcaattttaaggtagaagaagaagcagatttggtgtgaatcaaaaccagtgaaaatatgtttccttcttgatattttttgattgtcttgtatatatctttaaaactcaatttctctctttcaagataaattgatagaccaaacacaaactatcatacaataattatagtatttgcagccatacacaataataatataatcctgttacttacggattctgaggtacagatggatatctaatttcctgcagtccagcaatccccagagcgaattaaatataactatttgtagatttaagcagcccttggtagaccaaggatttgtggtcttgtaatttgtttgtattaaaactgaattttacatacatcaaaaatgaaataatctgaattataaaag

SEQ ID NO: 85056 - DNA, 868 bp, Homo sapiens
caagattccatgcagtttccagaagcataacataatgacttcaggatactcaactcataaatattttgatgaattactttaaaacatttgtcattaaaatttctcatactcttatctaaatctccacacatcaccagataaagtaagacataaccatttttttgttattcatatattgatttctttatttctttttaaataattcttacttctctcactacttgccagaacaaaacattaacttcttaattaaaatttctggcctatgtatgaactataaagmatctgaaatttgttctgttaaatcatcataagtgtagttactgtcaataaaagtttaatatcaaagaaagagattactgttctagcagatatcagactatgaaaggctgggcatggtggctcacgcctgtaatcccagcacttttggaggccgaggtgggcggatcacttgaggtctggagttcaagaccagactggccaaaatggcgaaaccccatctctactaaaaatacaaaaattagccaggcgtggtggtgcacacctgcagtcccagctactagggaggctgaggcaggagaatcacttgaacgcaggaggcagaggttgcagtaagctgagatttcaccaccactaatggagtgtcggaaatagaaaagtttactgtgaatcacaggtgttacagaaggttttagagtaaaagttgatctttatcttatttgagtatgcaaagaatttatgactaagacctcaaaagcaaatgcagcaaaaacaaatctagacaaatgggactggattaaacttaaaagcttttgcacagcaaaatcaatcatcaagagtcaacagacaatctacagaaaaggagaag

SEQ ID NO: 85057 - DNA, 1318 bp, Homo sapiens
cagaggatctgggctctaaaccagtagcgttccaatctgattgagtctgagttggggtaaaggacctatccagggtcattctactggtttagagccgcccagatcacattagaatcacctctgggggtttaaaaccatatccgtggccataatggaatttcccaagggctggaaatagttcatattttgatctggcgggtggttaaatgggtgtgaacctatgtaaaatccattgaactttactaatatttatgaacttggctgcagaaaagataacctgaattttttaaaaagttagaaaaaaagccctacatccaggcccactcttacagattctgctatggatggtgctggcttcagtatgttgcaaaagctccccaggtgacmctaatgtgcgaccagggctgagaaacagtctgcaggcaattaagttctaatggcctggagaaggggctggagggagcatgcaggcctctgtggtgaagggtcgaaacagctgctatgatgcagtgctgttgcccctgaaagaccacccaagcccatccaatggggaccaggatttttcttgacagctctatagctcagagagagggtcagctcttttgggtttgggtcagctcttttgtacttggaagagcagatggtgggatggaagtggcagggaagggaagtggtcagtgttctgggttcaaggggaggtttgggaatcaagttgcagcctgggaggagcaggtaacaggtggcattgcgttgcattccaggagcgtcacctgccgattctgtgaccctggattggtcatttacccgcactcagcctcactttgttcatttcccagtactttgcctgagacgtctctggcttaacacttaaagtcctgtgtcctgggaaatgcctcagtccggacaaacttggggtggttcctcactctatgtataaattgacagcaattatacctacttcttagaattcctgtgaggataaactgttaggtaaaatgcttagcacattgcttggtagcatgtcggtgtccaactaatggcagctattattaccagtagatttggcattagggaaacttttctgttgtttaatgggattagttcatgaggtgcctggcacacagtaggcacacgataaatattaataaaataaatgttcatctgagccacagatttcattacccaaattagaaaacttctcctttcttaattatgagggcgtgccttcaaactgtttaacgacatcttgttttgcagcctgcttaataaatctttgctgccaatggcaagttccccatgtcggcaaatcatttaaata

SEQ ID NO: 85058 - DNA, 612 bp, Homo sapiens
tgagaacattccgctgtatgtcttggaaccttctaaccctaggaatttgcaaacccctcccagtccctcatctgggggctcagagactggaggtgccttttttatttttttcttcttcaytttatgaacacagaaaaatcgtttgtccctctccgggccctgcacccgccagcgtcgtgtgcaggcgtccccgggctgtggataattagacacgttcttccctcattgcccaaggctcgttagaattcgccctagagctgtatcatgtattttctttcaaattaactttgcttgcaattaagcttagggaaccagcaacaaaagcaaacttggcccgaggtcgttcaccgcgaaaatggattagagaaacttcttccccgatttaaggggaaagattcctgcggccagcgctttggggaaagtgccccgaccgcagaggcgacgacaggggagcaggaagctgctcacggtagtcggcgttggcggcagcggtggccttcctcatctgggcgatgtgggctcctagaagagtaaggataacatcctggaaatgacttctgtacggtttgagcccaactgcacactcatgacttggagctgccctgtggagtt

SEQ ID NO: 85059 - DNA, 2060 bp, Homo sapiens
  misc_feature (1)...(2060): n = A,T,C or G
agccattaaaaccaatcattatgaaagcatggctgtggcgctcttagtcccatctgcaaaacccctgtgagtcctgttggtctcaggaaagatccaagctctcagaatagaaccttgctcaagtgtttaagcaggtcaaggccaagttctccaaggtggccccagtgaatatgttcagcttaaacaagagcccatgagatactatgtggcagtgggttggcaggagttggtaatgggcactccagcattgcaggagcttggtaacctactgttggccctgctcacaatgaggctgtacacattctgctgaccacgaaggggactgtgcacacctggagcatggatgtgtcttctgcaacaactcccagccaaaattaagaggatggtcagaggcatagcggggagaaggggtcgagtacaatcagagaagctaggaagacttctgactctatgctccaggtagctgtaagagggtctcaataaactatgcctcccagtgttcacgtgtatrtgtactacccttcccttggacctggaccaatcctggaactctcacttgtaataaaaagaatatggcagaagtgatgttgtatgacttctgaggctaagtcagaaaaagccttgctgctttgacctgagtctcttggaacattctctaaggagccgtgaactactatataagaagtctgccatactggggaagccaagtgtaggcactccggttaacagtccccgcacagctccgccttccagccattcccactaagacatcacacatacaagggaagttgtctcggatcctccagatcagcccatccacaagctgaatactcccaagtgacttcagccagtaccacacagagcagaagaatctctcagctgatcctggcccaaattcctgacccacaaaattataatacaaaataaaatggttgctattttaagccactaagtgagggggcaattaatatgcagcaatacataaccagcatatcacctttgggagatgcttgagaataaactcattattccaaaagcagataaattaaagataaagaatcaagcatttgtcctgcctttcctttatgaactatttcagagtaaccagatagttgatgagaccaagctcttctttatagaagaattacagctaataaaggaagaaggaatatcagaattagaatatcatgtgaaacctctgatgaaatcacagtgttagacaataatcatcaatgactgctaatatcattaggcaaaaggccagcaaggaatattagaatggatggatcaggctgcaaacacctgaatccactgatcaatatcttctcaataacccaagactggagaaaactagcgagcatgtgccttctgatgtgaggcaacaaggaatacacagtaccgcctctaaaactttcttgccctcaaattctgttcccctgaatctgatagaaattctagacttcactaccaggaaccagatgaacatgttaaatgatcccctggggatgcagtcagcaaaatccagaacatggaaaattctacaggacaaccaagtttcttcaatatgtaattgctttttaataaaggaagaacgggagcatattaattaaaagaggcaaatggctgggcgcggtggctcctgcctgtaatctcancactttgggaggccgaggtgggctggatcacttgatgccaagagttccagaccatcactgccaacatggtgaaaccctgtctactaaaaatannnnnnnnnnnnnnnnnnnnnnnnnnnnnnnnnnnnnnnnnnnnnnnnnnnnnnnnnnnnnnnnnnnnnnnnnnnnnnnnnnnnnnnnnnnnnnnnnnnntttccagctggtcttgaactcctgggctcaagcgagcctccccgcaccggcctttgggagccgacaaggaatccctgtcttctagtagtcttcaaagccagatccagcttgtctaggttaaggattcgatgcctccaatgaggggcagagaaaatgaacatgcccgttcccccaaggccttcaagagcctccaggctcacagagattaacttg

SEQ ID NO: 85060 - DNA, 2060 bp, Homo sapiens
  misc_feature (1)...(2060): n = A,T,C or G
agccattaaaaccaatcattatgaaagcatggctgtggcgctcttagtcccatctgcaaaacccctgtgagtcctgttggtctcaggaaagatccaagctctcagaatagaaccttgctcaagtgtttaagcaggtcaaggccaagttctccaaggtggccccagtgaatatgttcagcttaaacaagagcccatgagatactatgtggcagtgggttggcaggagttggtaatgggcactccagcattgcaggagcttggtaacctactgttggccctgctcacaatgaggctgtacacattctgctgaccacgaaggggactgtgcacacctggagcatggatgtgtcttctgcaacaactcccagccaaaattaagaggatggtcagaggcatagcggggagaaggggtcgagtacaatcagagaagctaggaagacttctgactctatgctccaggtagctgtaagagggtctcaataaactatgcctcccagtgttcacgtgtatgtgtactacccttcccttggacctggaccaatcctggaactctcacttgtaataaaaagaatatggcagaagtgatgttgtatgacttctgaggctawgtcagaaaaagccttgctgctttgacctgagtctcttggaacattctctaaggagccgtgaactactatataagaagtctgccatactggggaagccaagtgtaggcactccggttaacagtccccgcacagctccgccttccagccattcccactaagacatcacacatacaagggaagttgtctcggatcctccagatcagcccatccacaagctgaatactcccaagtgacttcagccagtaccacacagagcagaagaatctctcagctgatcctggcccaaattcctgacccacaaaattataatacaaaataaaatggttgctattttaagccactaagtgagggggcaattaatatgcagcaatacataaccagcatatcacctttgggagatgcttgagaataaactcattattccaaaagcagataaattaaagataaagaatcaagcatttgtcctgcctttcctttatgaactatttcagagtaaccagatagttgatgagaccaagctcttctttatagaagaattacagctaataaaggaagaaggaatatcagaattagaatatcatgtgaaacctctgatgaaatcacagtgttagacaataatcatcaatgactgctaatatcattaggcaaaaggccagcaaggaatattagaatggatggatcaggctgcaaacacctgaatccactgatcaatatcttctcaataacccaagactggagaaaactagcgagcatgtgccttctgatgtgaggcaacaaggaatacacagtaccgcctctaaaactttcttgccctcaaattctgttcccctgaatctgatagaaattctagacttcactaccaggaaccagatgaacatgttaaatgatcccctggggatgcagtcagcaaaatccagaacatggaaaattctacaggacaaccaagtttcttcaatatgtaattgctttttaataaaggaagaacgggagcatattaattaaaagaggcaaatggctgggcgcggtggctcctgcctgtaatctcancactttgggaggccgaggtgggctggatcacttgatgccaagagttccagaccatcactgccaacatggtgaaaccctgtctactaaaaatannnnnnnnnnnnnnnnnnnnnnnnnnnnnnnnnnnnnnnnnnnnnnnnnnnnnnnnnnnnnnnnnnnnnnnnnnnnnnnnnnnnnnnnnnnnnnnnnnnntttccagctggtcttgaactcctgggctcaagcgagcctccccgcaccggcctttgggagccgacaaggaatccctgtcttctagtagtcttcaaagccagatccagcttgtctaggttaaggattcgatgcctccaatgaggggcagagaaaatgaacatgcccgttcccccaaggccttcaagagcctccaggctcacagagattaacttg

SEQ ID NO: 85061 - DNA, 2060 bp, Homo sapiens
  misc_feature (1)...(2060): n = A,T,C or G
agccattaaaaccaatcattatgaaagcatggctgtggcgctcttagtcccatctgcaaaacccctgtgagtcctgttggtctcaggaaagatccaagctctcagaatagaaccttgctcaagtgtttaagcaggtcaaggccaagttctccaaggtggccccagtgaatatgttcagcttaaacaagagcccatgagatactatgtggcagtgggttggcaggagttggtaatgggcactccagcattgcaggagcttggtaacctactgttggccctgctcacaatgaggctgtacacattctgctgaccacgaaggggactgtgcacacctggagcatggatgtgtcttctgcaacaactcccagccaaaattaagaggatggtcagaggcatagcggggagaaggggtcgagtacaatcagagaagctaggaagacttctgactctatgctccaggtagctgtaagagggtctcaataaactatgcctcccagtgttcacgtgtatgtgtactacccttcccttggacctggaccaatcctggaactctcacttgtaataaaaagaatatggcagaagtgatgttgtatgacttctgaggctaagtcagaaaaagccttgctgctttgacctgagtctcttggaacattctctaaggagccgtgaactactatataagaagtctgccatactggggaagccaagtgtaggcactcyggttaacagtccccgcacagctccgccttccagccattcccactaagacatcacacatacaagggaagttgtctcggatcctccagatcagcccatccacaagctgaatactcccaagtgacttcagccagtaccacacagagcagaagaatctctcagctgatcctggcccaaattcctgacccacaaaattataatacaaaataaaatggttgctattttaagccactaagtgagggggcaattaatatgcagcaatacataaccagcatatcacctttgggagatgcttgagaataaactcattattccaaaagcagataaattaaagataaagaatcaagcatttgtcctgcctttcctttatgaactatttcagagtaaccagatagttgatgagaccaagctcttctttatagaagaattacagctaataaaggaagaaggaatatcagaattagaatatcatgtgaaacctctgatgaaatcacagtgttagacaataatcatcaatgactgctaatatcattaggcaaaaggccagcaaggaatattagaatggatggatcaggctgcaaacacctgaatccactgatcaatatcttctcaataacccaagactggagaaaactagcgagcatgtgccttctgatgtgaggcaacaaggaatacacagtaccgcctctaaaactttcttgccctcaaattctgttcccctgaatctgatagaaattctagacttcactaccaggaaccagatgaacatgttaaatgatcccctggggatgcagtcagcaaaatccagaacatggaaaattctacaggacaaccaagtttcttcaatatgtaattgctttttaataaaggaagaacgggagcatattaattaaaagaggcaaatggctgggcgcggtggctcctgcctgtaatctcancactttgggaggccgaggtgggctggatcacttgatgccaagagttccagaccatcactgccaacatggtgaaaccctgtctactaaaaatannnnnnnnnnnnnnnnnnnnnnnnnnnnnnnnnnnnnnnnnnnnnnnnnnnnnnnnnnnnnnnnnnnnnnnnnnnnnnnnnnnnnnnnnnnnnnnnnnnntttccagctggtcttgaactcctgggctcaagcgagcctccccgcaccggcctttgggagccgacaaggaatccctgtcttctagtagtcttcaaagccagatccagcttgtctaggttaaggattcgatgcctccaatgaggggcagagaaaatgaacatgcccgttcccccaaggccttcaagagcctccaggctcacagagattaacttg

SEQ ID NO: 85062 - DNA, 2300 bp, Homo sapiens
  misc_feature (1)...(2300): n = A,T,C or G
aacatagcgagaccccataggtacaaaaaataaaaacattagcttggtatagtggtatgcgccagtggtctcagcttcttgggaggctgaggtgggggaattgcttgagcctgggaggtcgaggctgtagtgagctatgattggaccaccgcactccagcctgggcaacagagcaagaccctgtctcaaaaaaaaaaaaaaaaaaatgagattactctcccctgcctcacatttccctrttgcccattgctgctttgtttttctccccagcagttgttacttcgtaacacacaccatcgtttatttatattgtttacatattttacttatatttatagtattatttgtattgtttatggtctctcttccctcatcagaatgtaggccccaagtgggcagggatgtatgctcttctgttcaccactgtattcccattgccagaaacacagtaggtgctcagtaagtatttgatggaggagcttctgcagttcattctgcacgtcagccatggctggtcctgctcttcagcctccaagcccagcagcttcctggtgggctgcagttttctcatcggaaatagagaagagtagcagtgccgattctgcctcccttgcaggtcgttttagtgcatctagttggaaaatacaggcaggtttgcagggaacacagttttcaaagtgtaaagctcagtgcaggtgctaggtcatggtgttttttgtcacactgggatcctgcgggagaggtaagtttagctgattggagtggaagatccagcccattcttcgtggtgcctgccgcagagcctgcaagcctgcagaaagacagggagtagccacgtctttctgtagttcacacctgtgtgtctccccacctgataatccctcagcacttctgtttgccttgcatgtaaagcccgacctttgcatggcaggcacacagactgaaactctttcctcctccagcctttcttggactcatccacagaatgacaaagaagtattctgtgaatattggttgaatgaaggaaggcacggctttttaaaaaagatgaaaaaaaaaaaagttatgaaaagctttaaaacttgctattggctgggcgtggtggctcacacctataatcccagcactttgggaggccgaggcgggcagatcacctgaggtcaggagtttgagaccagcctggccaacatggcaaaaccccgtctctactaaaaatacaaaaattagctgggcgtggtggtgggtgcctgtaatcccagctacttgggaggctgaggaaggagaatcacttgaacctgggaggcggaggttgcagtgagccgagatcgcgccattgcactccagcccggacaacagagcgagacttcatctcanaaaaaaaaaaaaaaaaaaaaaaaaccggaaaaaaaaacttgccattaaacaaattccagttttgatttttgttttgcattggttttgaatccatgcatgttatggccacaaaaaaaactttcttggctccgttgtttgtcgtgtgtgtgtgtgtgtgtgtgtgtttgtgtgtgtgtgtagaacccagcaagcagcagctataccccgatgaggcaatgtcttcatttggccactcatgtcattccacgtttcctgagtgccctcttggctaggcactgtgctagacactgggctacaaaaataagaatgcctggtccccgttctcaaagtaagcgtgcttcctataattagaccctgagctaaggcgacagaaccagctccctttcaagacaagagtcgcctgtcttgacggactttcagatgggctggaagaacaaggtctggcgtgtatggactctgaactgctcaagctgctgccgtcttgcaggtctagagcctacagggtagcgtcattctagtttctttgctgggcactctggaatttgttctttctcctgcgagagacagtggtcctcagttgtgttccctccccaccatcctcaccctccctcccacggtggttagtcattctggaggctcaagttggctcacagaaggtgctcttgaaaacatcccccaccctcctcgtaaccccagacagtcaggaagggccgttgtcgggtactaagaggtgttatggtttcacattcatgctttctctctgaagagaaaacaaaacatgttgaaatagggagaaatcccagcagcagcttgcttgaagcaagggttgcataacaggtctaggaaacgtctggccgtgtgggtcaagttgagggactgcagccttgtgtcactgagggaacttcttccgggtccaccgagcctct

SEQ ID NO: 85063 - DNA, 1388 bp, Homo sapiens
aggagactagaagctaggtcttgggcaggaactgaaacctggacaggaaaagaaatttgtgaaattctctgtctccggttgtgtgtgtgtgtgtgcgtgtgtgtgcgcgcgcgcgtgtgtgtgtttatttttaatctctgccctgtctctgcatcctgattcattcatttcctttttcctcctctccaccctcacttccttttcttgtatttttaaaaattgtagtaaaatatacataacaaaatttctcatcttacccatttttaagcatacagtccagcggcattaagtacattcatactattacacaaccatcagtgtcatgcatccacagaactctcctcatcttgcaaaactcaaactcctgtacccataaaacaagaactctccgtcctgttccctcctcaccccagcccctggctacccccattccactttttgtctacaaatttgactactctaggcacctcatatcagtggaatcatacagtatttgtctttttgtgactggctcctttcacttagcatgctgttgtcaagaactatctatgttgtagcctgtgtcagaattttctttccttttttaaggctgaataatattccactgtatggatatattacatcgtgtttatcccttcatctggtgatggacacttgagttgcttccactcactcccagatgttttttcccctctctgatcctcaaggaatagaaaatgcccagccttcatttttacattttacaggtagtggagctttaaaaaagagagtactttgggaggcacagataggagcatcacttgagcccaagagtttgagaccagcctgagcaacatagtaagacccagtctctacaaaaatcagctgggtgtggtggtgcgcacctgtagtctgagctactcaggaggctgaggtgggaggattgcttgagcccaggaggctcaggctgcagtgagctatgatcgtgccactgcactctagcctaggtgataggtgagaccctgtcttaaaaaaataaaaataaaaaataaaaaagagactaaattgattattgtctctctggctgtggccacttctgcctgccttcctagccgcctgccttctgcctctcttgcctctcctgaggctgctgcagggttgatccctycttgcctcttccttacactccttcgaggcaccctggtggttcgtttcctcctcctgttatcatacactttccttgtttttccccattgttttttctcctctgtatcctggtgccaacctcagtgggtgctccctgcaggcaggtggaagaaatgatggtgctgcaggatgaatgaggctctggccccaaacttggctgctgtgactgcagtggtcccagcgggggcctgaccaggcccatc

SEQ ID NO: 85064 - DNA, 1388 bp, Homo sapiens
aggagactagaagctaggtcttgggcaggaactgaaacctggacaggaaaagaaatttgtgaaattctctgtctccggttgtgtgtgtgtgtgtgcgtgtgtgtgcgcgcgcgcgtgtgtgtgtttatttttaatctctgccctgtctctgcatcctgattcattcatttcctttttcctcctctccaccctcacttccttttcttgtatttttaaaaattgtagtaaaatatacataacaaaatttctcatcttacccatttttaagcatacagtccagcggcattaagtacattcatactattacacaaccatcagtgtcatgcatccacagaactctcctcatcttgcaaaactcaaactcctgtacccataaaacaagaactctccgtcctgttccctcctcaccccagcccctggctacccccattccactttttgtctacaaatttgactactctaggcacctcatatcagtggaatcatacagtatttgtctttttgtgactggctcctttcacttagcatgctgttgtcaagaactatctatgttgtagcctgtgtcagaattttctttccttttttaaggctgaataatattccactgtatggatatattacatcgtgtttatcccttcatctggtgatggacacttgagttgcttccactcactcccagatgttttttcccctctctgatcctcaaggaatagaaaatgcccagccttcatttttacattttacaggtagtggagctttaaaaaagagagtactttgggaggcacagataggagcatcacttgagcccaagagtttgagaccagcctgagcaacatagtaagacccagtctctacaaaaatcagctgggtgtggtggtgcgcacctgtagtctgagctactcaggaggctgaggtgggaggattgcttgagcccaggaggctcaggctgcagtgagctatgatcgtgccactgcactctagcctaggtgataggtgagaccctgtcttaaaaaaataaaaataaaaaataaaaaagagactaaattgattattgtctctctggctgtggccacttctgcctgccttcctagccgcctgccttctgcctctcttgcctctcctgaggctgctgcagggttgatccctccttgcctcttccttacactccttcgaggcaccctggtggttcgtttcctcctcctgttatcatacactttccttgtttttccccattgttttttctcctctgtatcctggtgccaacctcagtgggtgctccctgcaggcaggtggaagaaatgatggtgctgcaggatgaatgaggctctggccccaaacttggctgctgtgrctgcagtggtcccagcgggggcctgaccaggcccatc

SEQ ID NO: 85065 - DNA, 532 bp, Homo sapiens
tcaggtgacaaccattatgatcaaaaactgccttccccagggtgtctctatgaaaagcacaaggggccaaggtcagggagcaagaggtgtgcacaccaaagctattggagatttgcgtggaaatctcagattcttcactggtgagacaatgaaacaacagagacagtgaaagttttaatacctaagtcattccyccagtgcatactgtaggtcattttttttgcttctggctacctgtttgaaggggagagagggaaaatcaagtggtattttccagcactttgtatgattttggatgagttgtacacccaaggattctgttctgcaactccatcctcctgtgtcactgaatatcaactctgaaagagcaaacctaacaggagaaaggacaaccaggatgaggatgtcaccaactgaattaaacttaagtccagaagcctcctgttggccttggaatatggccaaggctctctctgtccctgtaaaagagaggggcaaatagagagtctccaagagaacgccctcatgctca

SEQ ID NO: 85066 - DNA, 651 bp, Homo sapiens
tctgctctgctctggctgtggtcactctctttaagcaagccccctccctctggattttcttccaataatcctcccgaaaaggcttcccattgttccaagagactcggttacaccagcacttgtctcctgtctcctgcagaggagctatgttgctaggtttttaaacttatgcggaggtccagatggagggttgtcaatttcttcaggacactgccaggccagaggttgtccaagttcgaaggacacccaggaacttctgcaaatgggtaaaccggagcgcagtaagggtgaggttcttgttcagggtcacacagtgagctagtcatagaactaggcattggctgtcagaacttcctgggacccattcctgcccattcctctggccacatagtagctggattcaccttatgtcctggtactgaaccaacccttccctttggacctcatcttctggtctcgacctttcctgtccactcctcctctccccgaccaagctctctccctcccgytccttcccagtcccctttttttcctctcccaggcagcctgacgatcgcttccccactctgttttgccctcagagccctttgctcaccttctctggtctcggaccttggtgttggtttttgctttctgcccatctgtctgaag

SEQ ID NO: 85067 - DNA, 691 bp, Homo sapiens
tgtgacatcagaatttctaggagggctggagaatcagtctcagtgagctcaggacaattcaaccagaaacgatacccaaaattcccacaccagaattggtccagtgaaggcagcactgctacgggaatttgatcttcscgtgatgttggtgacgtttgagagctcctatcagtcctcttgtgtctaactctgattcagagaattgaaagattgtatttgttgggggggggggggtcctagatcatgtactctaactataagaaaggctaggagagagagtatatgccattttcagcttctagagtgggaggcacactttaaggtggggagttcttccaatatcaaaaagaaaacagatgctagatggaacagaatttggcaatattcaccagagtttacttctttgctatgcaaacccaacactaacataaacccctgttctcgtaagaaagaaaaattattgccaattatcgtgatgctactattccttataaaagcacaatgtgctcatcccttccctaaaagggtgataacctcattggcagctacatccagtttgtacagaatctctgagtgatactcagtcctcttctggttccattatgatcctatctcagtattctgtaacacataaacgaaattgtaaaattaaccaccagctgcatgccatgaagaaaagggacagaaaaag

SEQ ID NO: 85068 - DNA, 802 bp, Homo sapiens
tcttgggccgtgctatctcctcaggctttccaggccccaggacccccagagagcgagtgccgcgccgcccggcccccattgtcaggccgcccctgccaggcctcgcccggccgcccccctttgtcccgggacaaagcccgcggcagccgcggtgcgaggcccggccctcccagcaccggcctggccgcctcacctggacgcccagcagcgcctcgcggtcgtagtcgctgcggcgctcgcccagcgggtagtgcagctcctcggccttgccggcgccrgccgcggcggcgcacagcagcagcagccccaacgccgcggtcctcgggcccagccgcatcgcgccggcccgcggaggacaccgagggacgcgaggagggaggctggcgggggcccgggccggctgcgatgctccgcgggcggctacagagaggcggtgcgacgtacgttgagggcggagggaacgggaggcggaacctgcggtggcggccacaacgcccatggacgggctgggggccggtccaccaatgcggtgcggaggcgcgccaggaggaggcctatatggccggcgcggagtggcggggcaccaggccgcgccgctgattgggcagcgcggcgctgggggcgggccgccgcgatgtcggggtcagcggccgcccagagagctccaggagccatgctgggactgcagagagggtagacctctacgacccgcgccttgtcgttcccccgaaacgcttctaaaagcacgcccccaccccactcctgcccactcctggtccactccatgtgcccctcctaccgt

SEQ ID NO: 85069 - DNA, 1671 bp, Homo sapiens
gaggtctctgttaaaatattttgcctctttttaaattcagttgtttccttattgttcaattttgtcttttttttgtatattttggatatgagagtcatttgtatattttggatagatgtcctttattagatatgtatttttaaaatatttcctctcagtctgttacttgttttattattctcctaagtgtcttctgcagaacagactttgtaaatttaaaagactaacatcaagtttttctttcatgcttttggtgtatataaaaactcatcaccaagcctaaggccatgtgggttttctcctatgttttcctctcaaaggtttgtagttttgcattttacatttaaatctattaccaattttgagttaatttttgtttaaagtgtagacttgtaagttttttacttgagtaacaacacagaataataacatttataaaatggggaaaaagcagtttggggattggaggtgggaatacagtttagatatggacatgttaatatttgaagcccctacttgacaaacatatggttaagtaggaagttggatacaaagagtttaattctgatatttccacataccaacactatcaggaagtccaggagtctgatttataacttcaccagcaccttgaactctgtatttccccacctccctttccttcccctacaggcttccaatccccattttatgttttcgggcgttcgttattacttacaataatcttcaaagtatgtgtagggttggaatccattatgactaagtcctattttggtgcttagtctgtgacagagaagctttggctggttgaagaaatttgaccttggtgtgtcctattcaaagtataaaataaggctgggcagtggttcacatctgtaattctagcacattgggaggctgaggtgggaggattgtttgatgccaggagttggaggytgcagtgagctaaaattgcactactgcatttgccaggtgacttggagctaaaattttttcgactccagtgagacttgctgacataaaaagagaaaatatgctttaagcacctagtgcttatgcatggcacatagtagacactcattaaatgaatggttctttctctttccccatagatgggacagtgtgcaccaaacatctgaagaccagttgcttaagtgaaaaagaatgacctgatgtatttcagatcaatattatgcatataataaaaactatgaaatgctaaaagcttagctgcaaagataaaatgcaagaagcttgctggtgaggttgtggtagcaactgaatatatgagaatagattggtacaatcactggatttctataactcagttaagagttggaagtaaagtgtaattctgtttctgtttatgtattaaagtagaaggataatatgtttaattaataaattaacaatagatattggtatacttatagaaatggattgtcacagtttctatctttgagggattaattggaacaaaaatgtactttaactatgaattacctagctccagagatatctattagtagaaaaagattgacaatgaaaagataaatttctatttactacacagcgaaataaatgttttatgttaagagctcatctcatgcatccctgtggcttcagttttcttcaatatctgccactctcagttttatttccagctggaat

SEQ ID NO: 85070 - DNA, 1238 bp, Homo sapiens
agatggcagcatgttgacagacattgcttctgtgactccccagagtcccagagagaaagatggagatgacattatgcatcgggggttccagaagcagagtgtgggaactatgaagtatcttctctgtttctctgaaagttctcacctgggttagaagctgattttgcttagagcccggtttgcttcctggtatgcagtgagcttagttgggctgatgttgtctgtaggtgaggcctcccactggtggggtaagtttatttcagaggaatgatagcatttcctcttgccacaaacctaggtcacaccctcattctggttttttgcagcattcaagttgttatctccatcaggctgggttctgtgtctgtatctcagctgaactcaaattctagaagaaagcatattctggagcaagctgtgtatctatcccctctaaagtatcaacaggtgtggggctttgctggtttcacagaacacgtgcaactgaagactggactcttgaatgctctccctctctgtcagctcagtactttctcaccatcggtcacctgaagaccaagttccaaacactctgggctctgcacaaggctccatgtgacctgtttgtgccgcagtcagctatgaggcctgcaagggcggatccctttgtgtatccgtgttgccagtacctggcacttgcaatgtgctcaataaacatggatttagtgaatgagtgtaagggttagcttcacttctcagagcaaaaggggaatctcctatttgggtgtaatttttgcaagtgacctggcagcagtagtgaatgagaaagtgtttctgcttctcctttagaacacaagcaaaacatgtggtttctgagcccatggatcttataattttattcatacayagaaaaaaagcaataatgattcatgaatgtgtaggacaaatgccaaataaattggacaaacaggaaaggccacagataatccaaagaagagtaatcactgtgaaggagagttttgaaataagtgggttttgaaagacagctggggtttaaaaagggaacaaacagtgaaggtaagactgaaatgcgcaaagctgtggttggtaggggaatgagccgggtgggtttacaaatacagaggccagcaggctggtcagagaaaggttttaattaagaagcaataaggaataaggttcagaaagtgaataaaggctgggttagatagagctctgaacagttcttaggagtctaaact

SEQ ID NO: 85071 - DNA, 742 bp, Homo sapiens
cgagctgtggctccatttctccatgagggagagggcgagaggcgtgagaaccatcctcttgaaggtctgcgggcaccctcctgcgggtggacaatgagcgcctgggaggccgttgtccttgcttggggagcggtcgtctggatctagcctagcaaagaggctgctccggatggggaggggacgaaaacccctgcggttccgaagcagatgccggcattgcccaggccctcacagacccccaaaccggaaccgccgggaaaccgactrctaaccggctacacgaccgaggcagagacgcggggagaggctgaccagaagaaaggccgacctgcaagaaacccaccctccggcacacggggcacatgtgtcccgaggcacaagcacacacagacggacagagatagaaagagagggcgacggaaagagcgaggggggggagagagagagagagacgtaagagatagacagaagtgggcacacggacgccacgcacgcacgcacacagacacacacacacacacacacacacacacacacacacacacaaccaagacgcacacagacatacagcaggtaacacccacccccaggctgcccctgaagctgccgggttctgctctccgcgactacgaggccaccggtgagacagcagcccacggacaccctggcagacctgtcctccacatcacaagggcgctactttggggagactcacccgcacaccgtccgtgcacgcctgagg

SEQ ID NO: 85072 - DNA, 742 bp, Homo sapiens
cgagctgtggctccatttctccatgagggagagggcgagaggcgtgagaaccatcctcttgaaggtctgcgggcaccctcctgcgggtggacaatgagcgcctgggaggccgttgtccttgcttggggagcggtcgtctggatctagcctagcaaagaggctgctccggatggggaggggacgaaaacccctgcggttccgaagcagatgccggcattgcccaggccctcacagacccccaaaccggaaccgccgggaaaccgactactaaccrgctacacgaccgaggcagagacgcggggagaggctgaccagaagaaaggccgacctgcaagaaacccaccctccggcacacggggcacatgtgtcccgaggcacaagcacacacagacggacagagatagaaagagagggcgacggaaagagcgaggggggggagagagagagagagacgtaagagatagacagaagtgggcacacggacgccacgcacgcacgcacacagacacacacacacacacacacacacacacacacacacacacaaccaagacgcacacagacatacagcaggtaacacccacccccaggctgcccctgaagctgccgggttctgctctccgcgactacgaggccaccggtgagacagcagcccacggacaccctggcagacctgtcctccacatcacaagggcgctactttggggagactcacccgcacaccgtccgtgcacgcctgagg

SEQ ID NO: 85073 - DNA, 742 bp, Homo sapiens
cgagctgtggctccatttctccatgagggagagggcgagaggcgtgagaaccatcctcttgaaggtctgcgggcaccctcctgcgggtggacaatgagcgcctgggaggccgttgtccttgcttggggagcggtcgtctggatctagcctagcaaagaggctgctccggatggggaggggacgaaaacccctgcggttccgaagcagatgccggcattgcccaggccctcacagacccccaaaccggaaccgccgggaaaccgactactaaccggctacacgaccgaggcagagacgcggggagaggctgaccagaagaaaggccgacctgcaagaaacccaccctccggcacacggggcacatgtgtcccgaggcacaagcacacacagacggacagagatagaaagagagggcgacggaaagagcgagggsggggagagagagagagagacgtaagagatagacagaagtgggcacacggacgccacgcacgcacgcacacagacacacacacacacacacacacacacacacacacacacacaaccaagacgcacacagacatacagcaggtaacacccacccccaggctgcccctgaagctgccgggttctgctctccgcgactacgaggccaccggtgagacagcagcccacggacaccctggcagacctgtcctccacatcacaagggcgctactttggggagactcacccgcacaccgtccgtgcacgcctgagg

SEQ ID NO: 85074 - DNA, 838 bp, Homo sapiens
tgtcagacgggtgactcggccaggaaggccagcctttgagtgacagagatgcttgccccatccccttgccggcttccttctccgtccctgcgtcgagctgtggctccatttctccatgagggagagggcgagaggcgtgagaaccatcttcttgaaggtctgcgggcaccctcctgcgggtggacaatgagcgcctgggaggccgttgtccttgcttggggagcggtcgtctggatctagcctagcaaagaggctgctccggatggggaggggacgaaaaccctgcggttccgaagcagatgccggcattgcccaggccctcacagacccccaaaccggaaccgccgggaaaccgactgctaaccggctacacgaccgaggcagagacgcgggragaggctgaccagaagaaaggccgacctgcaagaaacccaccctccggcacacggggcacatgtgtcccgaggcacaagcacacacagacggacagagatagaaagagagggcgacggaaagagcgagggcggggagagagagagagagacgtaagagatagacagaagtgggcacacggacgccacgcacgcacgcacacagacacacacacacacacacacacacacacacacaaccaagacgcacacagacatacagcaggtaacacccacccccaggctgcccctgaagctgccgggttctgctctccgcgactacgaggccaccggtgagacagcagcccacggacaccctggcagacctgtcctccacatcacaagggcgctacttttggggagactcacccgcacaccgtccgtgcacgcctgaggctgggatcccg

SEQ ID NO: 85075 - DNA, 838 bp, Homo sapiens
tgtcagacgggtgactcggccaggaaggccagcctttgagtgacagagatgcttgccccatccccttgccggcttccttctccgtccctgcgtcgagctgtggctccatttctccatgagggagagggcgagaggcgtgagaaccatcttcttgaaggtctgcgggcaccctcctgcgggtggacaatgagcgcctgggaggccgttgtccttgcttggggagcggtcgtctggatctagcctagcaaagaggctgctccggatggggaggggacgaaaaccctgcggttccgaagcagatgccggcattgcccaggccctcacagacccccaaaccggaaccgccgggaaaccgactgctaaccggctacacgaccgaggcagagacgcggggagaggctgaccagaagaaaggccgacctgcaagaaacccaccctccggcacacggggcacatgtgtcccgaggcacaagcacacacagacggacagagatagaaagagagggcracggaaagagcgagggcggggagagagagagagagacgtaagagatagacagaagtgggcacacggacgccacgcacgcacgcacacagacacacacacacacacacacacacacacacacaaccaagacgcacacagacatacagcaggtaacacccacccccaggctgcccctgaagctgccgggttctgctctccgcgactacgaggccaccggtgagacagcagcccacggacaccctggcagacctgtcctccacatcacaagggcgctacttttggggagactcacccgcacaccgtccgtgcacgcctgaggctgggatcccg

SEQ ID NO: 85076 - DNA, 838 bp, Homo sapiens
tgtcagacgggtgactcggccaggaaggccagcctttgagtgacagagatgcttgccccatccccttgccggcttccttctccgtccctgcgtcgagctgtggctccatttctccatgagggagagggcgagaggcgtgagaaccatcttcttgaaggtctgcgggcaccctcctgcgggtggacaatgagcgcctgggaggccgttgtccttgcttggggagcggtcgtctggatctagcctagcaaagaggctgctccggatggggaggggacgaaaaccctgcggttccgaagcagatgccggcattgcccaggccctcacagacccccaaaccggaaccgccgggaaaccgactgctaaccggctacacgaccgaggcagagacgcggggagaggctgaccagaagaaaggccgacctgcaagaaacccaccctccggcacacggggcacatgtgtcccgaggcacaagcacacacagacggacagagatagaaagagagggcgacggaaagagcgagggcggggagagagagagagagacgtaagagatagacagaagtgggcacacggacgccacgcacgcacgcacacagacacacacacacacacacacacacacacacacaaccaagacgcacacagacatacagcaggtaacacccacccccaggctgcccctgaagctgccgggttctgctctccgcgactacgargccaccggtgagacagcagcccacggacaccctggcagacctgtcctccacatcacaagggcgctacttttggggagactcacccgcacaccgtccgtgcacgcctgaggctgggatcccg

SEQ ID NO: 85077 - DNA, 810 bp, Homo sapiens
gggtgactcggccaggaaggccagcctttgagtgacagagatgcttgccccatccccttgccggcttccttctccatccctgcgtcgagctgtggctccatttctccatgagggagagggcgagaggcgtgagaaccatcttcttgaaggtctgcgggcaccctcctgcgggtggacaatgagcgcctgggaggccgttgtccttgcatggggagcggtcgtctgggtctagcctagcaaagaggctgctccggatggggaggggacgaaaacccctgcggttccgacgcagatgcccgcgttgcggaggccttcacagacccccaaaccggaactgccgggaaaccgactgccaaccggccacacgacccaggcagtgacgcggggagaggctgaccagaagaaaggccgacttgcaagaaacccaccctccggcgcacggggcacatgtgtcccgaggcacaagcacacacagacggacagagatagaaagagagggcggcggaaagagcgagrggggggagagagagagagagacgtaagagatagaaggcacacagacgcgcgcacgcacacacacaaacacacacacacacacacacacacacaaccaagacgcacacagacatacagcaggtaacacccacccccaggctgcccctgaagctgccgggttctgctctccgcgactacgaaggccaccggtgagacagcagcccacggacaccctggcagacctgtcctccacatcacaagggcgccacttttggggagactcacccgcacaccgtccgcgcacgcctgaggctg

SEQ ID NO: 85078 - DNA, 673 bp, Homo sapiens
ctgcgggtggacaatgagcgcctgggaggccgttgtccttgcttggggagcggtcgtctggatctagcctagcaaagaggctgctccggatggggagtggacgaaaacccctgaggttccgaagcagatgccggcgttgcccaggccctcacagacccccaaaccggaaccgccgggaaaccgactgctaaccggccacacgaccgaggcagagacgcggggagaggctgaccagaagaaagaccgaccttcaagaaacccaccctccggcgcacggggcacatgtgtcccaaggcacacscacacacagacagacagagatagaaagagagggcgacggaaagagcgagaggggggagagagagagagagacgtaagagatagacagaagtgggcacacagacgcgcacacgcacgcacacagacacaaacacacacacacacacacacacacacacacacacacacacacaaccaagacgcacacagacatacagcaggtaacacccacccccaggctgcccctgaagctgccgggttctgctctccgcgactaagaggccaccggtgagacagcagcccacggacaccctggcagacctgtcctccacatcacaagggcgccacttttggggagactcacccgcacaccgtccgtgcacgcctgaggctg

SEQ ID NO: 85079 - DNA, 673 bp, Homo sapiens
ctgcgggtggacaatgagcgcctgggaggccgttgtccttgcttggggagcggtcgtctggatctagcctagcaaagaggctgctccggatggggagtggacgaaaacccctgaggttccgaagcagatgccggcgttgcccaggccctcacagacccccaaaccggaaccgccgggaaaccgactgctaaccggccacacgaccgaggcagagacgcggggagaggctgaccagaagaaagaccgaccttcaagaaacccaccctccggcgcacggggcacatgtgtcccaaggcacacgcacacacagacagacagagatagaaagagagggcgacggaaagagcgagaggggggagagagagagagagacgtaagagatagacagaagtgggcacacagacgcgcacacgcacgcacacagacacaaacacacacacacacacacacacacacacacacacacacacacaaccaagamgcacacagacatacagcaggtaacacccacccccaggctgcccctgaagctgccgggttctgctctccgcgactaagaggccaccggtgagacagcagcccacggacaccctggcagacctgtcctccacatcacaagggcgccacttttggggagactcacccgcacaccgtccgtgcacgcctgaggctg

SEQ ID NO: 85080 - DNA, 673 bp, Homo sapiens
ctgcgggtggacaatgagcgcctgggaggccgttgtccttgcttggggagcggtcgtctggatctagcctagcaaagaggctgctccggatggggagtggacgaaaacccctgaggttccgaagcagatgccggcgttgcccaggccctcacagacccccaaaccggaaccgccgggaaaccgactgctaaccggccacacgaccgaggcagagacgcggggagaggctgaccagaagaaagaccgaccttcaagaaacccaccctccggcgcacggggcacatgtgtcccaaggcacacgcacacacagacagacagagatagaaagagagggcgacggaaagagcgagaggggggagagagagagagagacgtaagagatagacagaagtgggcacacagacgcgcacacgcacgcacacagacacaaacacacacacacacacacacacacacacacacacacacacacaaccaagacgcamacagacatacagcaggtaacacccacccccaggctgcccctgaagctgccgggttctgctctccgcgactaagaggccaccggtgagacagcagcccacggacaccctggcagacctgtcctccacatcacaagggcgccacttttggggagactcacccgcacaccgtccgtgcacgcctgaggctg

SEQ ID NO: 85081 - DNA, 740 bp, Homo sapiens
tggttgagttggaggtaacccaccaacaaccctcctcatggaaatttctcttgaatgaaaatatgggaggagtaaattcttcactgccaaatactatttcaaattctttcaagcataaggtacattcattatttaacctaaaagtcaatcaagaggtaaaaagaggtcacagtttgcttacgtattttctggcacttctttgctattggctgtgtcacttttacccttgacattgctgcaaaaatgtctgcagacatttagggtcatcatattcagatacaaccctacccagaagaccaagaaagagacaccaagagaaacatttattttaaaaactcttaaggtaatttgccctgatttgcctttgtgctgaattgggtcatatgtttatttttgttcttatttttggcaaagaatcaggctatacttagagtaatcacatcatacctgaatctgaagaygagacagtaaacttagagaagtactgaagccttggaagccttggatatattgaatatgttctatcttagaaagaaaaggtgagataatgtatgctggcagtcaaccaacagcatattctcctaatgaacaactggagagtcatttaagttcaatgttggggattttattagaaactgtaagatgaagacacaattcattttctctttccctgtaaatttggacaatatttgctatattcgcctatattttggcatagaaatttaggttctaagtatata

SEQ ID NO: 85082 - DNA, 737 bp, Homo sapiens
ccatttctccatgagggagagggcgagaggcgtgagaaccatcctcttgaaggtctgcgggcaccctcctgcgggtggacaatgagcgcctgggaggccgttgtccttgcttggggagcggtcgtctggatctagcctagcaaagaggctgctccggatggggaggggacgaaaacccctgcggttccgaagcagatgccggcattgcccaggccctcacagacccccaaaccggaaccgccgggaaaccgactrctaaccggctacacgaccgaggcagagacgcggggagaggctgaccagaagaaaggccgacctgcaagaaacccaccctccggcacacggggcacatgtgtcccgaggcacaagcacacacagacggacagagatagaaagagagggcgacggaaagagcgaggggggggagagagagagagagacgtaagagatagacagaagtgggcacacggacgccacgcacgcacgcacacagacacacacacacacacacacacacacacacacacacacaaccaagacgcacacagacatacagcaggtaacacccacccccaggctgcccctgaagctgccgggttctgctctccgcgactacgaggccaccggtgagacagcagcccacggacaccctggcagacctgtcctccacatcacaagggcgctacttttggggagactcacccgcacaccgtccgtgcacgcctgaggctgggatc

SEQ ID NO: 85083 - DNA, 737 bp, Homo sapiens
ccatttctccatgagggagagggcgagaggcgtgagaaccatcctcttgaaggtctgcgggcaccctcctgcgggtggacaatgagcgcctgggaggccgttgtccttgcttggggagcggtcgtctggatctagcctagcaaagaggctgctccggatggggaggggacgaaaacccctgcggttccgaagcagatgccggcattgcccaggccctcacagacccccaaaccggaaccgccgggaaaccgactactaaccggctacacgaccgaggcagagacgcggggagaggctgaccagaagaaaggccgacctgcaagaaacccaccctccggcacacggggcacatgtgtcccgaggcacaagcacacacagacggacagagatagaaagagagggcgacggaaagagcgagggsggggagagagagagagagacgtaagagatagacagaagtgggcacacggacgccacgcacgcacgcacacagacacacacacacacacacacacacacacacacacacacaaccaagacgcacacagacatacagcaggtaacacccacccccaggctgcccctgaagctgccgggttctgctctccgcgactacgaggccaccggtgagacagcagcccacggacaccctggcagacctgtcctccacatcacaagggcgctacttttggggagactcacccgcacaccgtccgtgcacgcctgaggctgggatc

SEQ ID NO: 85084 - DNA, 599 bp, Homo sapiens
ggagccagaccaaaataattctaatcactgtcaccatttcctgaatattcttctgtgattcatgtaaccaactctgaaatttttcttaacttgtagcaaagtagacacatttaatggctcttaaaggacaattatctgagtatctmctattgtttcctgctttttggaatggtttagacacacatgtgcccatcattgcacagtaacacaaataaaaaataaggaataataattgatccttgtcctagtttattatatatagtattttatgttgttttctgtaaggagttattcccttacaggaagaaaccactctttggaaatgccataaatgacatagcatagcatatatggtaccattccattaattttcctctgaattctgaaggtcaaaatttaataccatgagatagttatgtcacttaacaaaggtcccaaaataccactaggacacattgaccacctagaaaatatgtattcatagaaaaacaaaaatactatgagatgattaggttattatttaattatttcaaaacaagatttataacccagttcaaatgatgtgttataatttaataaatttatatctgtatttattg

SEQ ID NO: 85085 - DNA, 599 bp, Homo sapiens
ggagccagaccaaaataattctaatcactgtcaccatttcctgaatattcttctgtgattcatgtaaccaactctgaaatttttcttaacttgtagcaaagtagacacatttaatggctcttaaaggacaattatctgagtatctcctattgtttcctgctttttggaatggtttagacacacatgtgcccatcattgcacagtaacacaaataaaaaataaggaataataattgatccttgtcctagtttattatatatagtmttttatgttgttttctgtaaggagttattcccttacaggaagaaaccactctttggaaatgccataaatgacatagcatagcatatatggtaccattccattaattttcctctgaattctgaaggtcaaaatttaataccatgagatagttatgtcacttaacaaaggtcccaaaataccactaggacacattgaccacctagaaaatatgtattcatagaaaaacaaaaatactatgagatgattaggttattatttaattatttcaaaacaagatttataacccagttcaaatgatgtgttataatttaataaatttatatctgtatttattg

SEQ ID NO: 85086 - DNA, 599 bp, Homo sapiens
ggagccagaccaaaataattctaatcactgtcaccatttcctgaatattcttctgtgattcatgtaaccaactctgaaatttttcttaacttgtagcaaagtagacacatttaatggctcttaaaggacaattatctgagtatctcctattgtttcctgctttttggaatggtttagacacacatgtgcccatcattgcacagtaacacaaataaaaaataaggaataataattgatccttgtcctagtttattatatatagtattttatgttgttttctgtaaggagttattcccttacaggaagaaaccactctttggaaatgccataaatgacatagcatagcatatatggtaccattccattaattttcctctgaattctgaaggtcaaaatttaataccatgagatagttatgtcacttaacaaaggtcccaaaataccactaggacacattgaccacctagaaaatatgtattcatakaaaaacaaaaatactatgagatgattaggttattatttaattatttcaaaacaagatttataacccagttcaaatgatgtgttataatttaataaatttatatctgtatttattg

SEQ ID NO: 85087 - DNA, 856 bp, Homo sapiens
tctttggaaacccctatcttattccagtctatgtggtagctactccaatctcactctgctggcaagcagttaaaacctataaggacctagcccaccacctgctgtttgctgaaagctcaccatctcctcattctctccccactttgcccctgcaattctccagtctgggtttcataacatgagtgctgctgacacgtgtcaccagagaattcttcattgtcaggggctctcttcattgtaggatgttaatgagcttctatggcctttacccactagacacaagtaacatttaccaaaagkgcagacaaaatgcagacccaaaaagtccagggtatattgccaaatataccctgggggacaaatcgcccctgattaagaaccatagttctaagtaatctgtgccttctttgggtttctggatctatccttttctgtaacctgtcccatttattttcccacatcctatatttataactcccacatcctccaagcaaaacaaacaaaaataaataatcagaacacatcctatttagaaggtcatcaatgaaagtttatttttctccttttccatgtggagtcaaatggaaatcaagacaagacttccagtgtgaataccaggggagcagtatatttggatttccaaaacaaggggccaggagaagaacatcaggtgtaaagcaggagttaaggagtccaggaaattaggaaaagtggaagcagagagcaagatagaatgaaacagacgattcaggtctaagatctgaaacaaaaaatgaatcatggcaactgcttattctttgtgaatgctccccacaagcagtaggggcactggctcattctggaggggactagggtg

SEQ ID NO: 85088 - DNA, 856 bp, Homo sapiens
tctttggaaacccctatcttattccagtctatgtggtagctactccaatctcactctgctggcaagcagttaaaacctataaggacctagcccaccacctgctgtttgctgaaagctcaccatctcctcattctctccccactttgcccctgcaattctccagtctgggtttcataacatgagtgctgctgacacgtgtcaccagagaattcttcattgtcaggggctctcttcattgtaggatgttaatgagcttctatggcctttacccactagacacaagtaacatttaccaaaagtgcagacaaaatgcagacccaaaaagtccagggtatattgccaaatataccctgggggacaaatcgcccctgattaagaaccatagttctaagtaatctgtgccttctttgggtttctggatctatccttttctgtaacctgtcccatttattttcccacatcctatatttataactcccacatcctccaagcaaaacaaacaaaaataaataatcagaacacatcctatttagaaggtcatcaatgaaagtttatttttctccttttccatgtrgagtcaaatggaaatcaagacaagacttccagtgtgaataccaggggagcagtatatttggatttccaaaacaaggggccaggagaagaacatcaggtgtaaagcaggagttaaggagtccaggaaattaggaaaagtggaagcagagagcaagatagaatgaaacagacgattcaggtctaagatctgaaacaaaaaatgaatcatggcaactgcttattctttgtgaatgctccccacaagcagtaggggcactggctcattctggaggggactagggtg

SEQ ID NO: 85089 - DNA, 1074 bp, Homo sapiens
gagcatatattttgttatatctttctagataatagagaatacaattattattaaggtatcctgcttacctcttaatgtaagatacctcagtcacttttgtatttactgacccagccagactttcctttaacatttcgattatatatatatagttcaatatttttattttcaatagtcctgtattcctgagttataaatatttctcataaatattgtatagttttaattcattattctaaacttttaaattaaatatttagcctttttaaagctaatttcaattactgattatacttttgttttcaatcttgtctttatatctgttttctccttttgaaacttctgtagaactggttaatttttatcactctaacttctgtcagtttgaaagttaaacactctgttttcttcatttagaaggatttattggccctttttgtatatcctcttgtgtaaagtgtctgttcaaatattttactcatttttttattggtatgtagaatttctttatatgtaccgaatacataccctttgtaggaaatatatgtggcaatatttcctgcttttctgaagttgcttcttcactttcttttagtagtatcttttgatgatcaaagtttttaatgttagtattgttcactatcatttttgcctattttaaggatatgcaaaaaaagtaaaaacttcaatgtctttgaagatatgttcttctaaatctttatggcttccctgtcacatgtagacctgcactatatctgaagttaatttttgtaaatagtttaaaaagtaaggatgcaaactggttttgtgtatagaaaatccagggagcccagcaccacttactgaaaaggccccctagtaagtatgatctctgtcattactygggttcatgtatgtgtatgggtctatttctggatacatttcacgttccactgtgaaacgttcatcttgtttgccaaagcacactgtaatgatttctattacctttataggtcccaatatgtgacattgtaagtcctccagctttgttattcaatattatcttagctcttcttagcaattcgcatggccata

SEQ ID NO: 85090 - DNA, 743 bp, Homo sapiens
ctccggaaggcatgctaagtatggggggtctctgagatgcctggggagccagtggagacctcctcttcctccttcccacctgccattgaacacaaatgccagcgcggcttccgctctgcctgcctctcctgagatcaatggtctgcacggggttgaggctgccagataaatacaggcccagttaaatctgaagttcagataaacaactaataaattgtcattttatttttatttgtttatttatttgagacagagtctcactctcactctgtcgccaggctggagtgcagtggcgcratcttggctcactgcaatctctgcctcccgggttcaagcaattctcctgcctcagcctcctgagtagctgggattacaggcgtgcgccaccatacccggctaatttttgtatttttaatagagacagggtttcaccatgttagccaggatggtctccatctcctgacctcgtgatccgcccactttggcctcccaaaatgctgggattataggcgtgagccactatgcctggcccttattttattttattgtattttattttttattttttgagacagggtcacgtgtagcccaggctggagtgcaatggcacagtcttggctcactgcagcctccacctcgtaggttcaagcagttcccctgactcggcctcccgagtagctgggattacaggtgcgggcccccacgcccaactgattttgtatttttaataaggatggggtttc

SEQ ID NO: 85091 - DNA, 1095 bp, Homo sapiens
tgaaccatccaatgtgtaatatttgtgagaaaatttacatagtagaggactataatatgctttggtatgttccataagagaccttttatcaattgaaaaatctcctttaatgttttgtaagctaaaaactactaataaaatattattgtaagttttgcaaaatgctaaaatctttttaaatctgaggacaatcctatgaggtagatattatcggtcgtgctttaaaaattaaagaaaactgaacttcagtgatatactcaagaacacaattagtaaggtgggaaaatgggtcccagcttttgactctgaattctctaccactccattaactgctgaattctcaaaggtttttcagatatcattttataaactttatttgcttagaagtttgctttaaccttacttactacagcctggctttcttcctgctgtatgtcttctgtcttgcaaagatggtgaacacacccccaggcaattctcttgctaagttcaacagtattataaaactaagatccctaaatcccacagcaagcttttcttgctagcataaacttgtgagttttattataatggttaatataacctatgcrttacatcttttcaagggggaaggtaagtgatggaagggtctcatttatagaagctgtaaatactctaacttcgattcgaaagaggaggtgtattttatcattagaacagtacatggcactacaattccacatgtgactaaggaatcacaaactctatggagggcaagtaagattggactcagttaaaagaaaccacaaaaggactatattggggggaaagatcttcaaaagctatatgatcgcatactttgaggtagaaatgaaagagatgagcaagtatgacaagagggagagaaagcacccacctttccttacctcaccagaaatccacagttgctgatgcaagttatgctatttttagtacagtattaaacttggccattttctggttctgtgaaaaacattattatttttttagatatataactatgcttaaaatattagaactctttgcatttgagagctttattatcagtcatcggaaaggtgctgtgcatttgctatg

SEQ ID NO: 85092 - DNA, 1256 bp, Homo sapiens
agcattttaacctgtgctcctgtgatacccaggaatctagcccaagagcactttttctcatagcagaagggaaaagagaaaaatctggaagcccagaagtgaataaaaatcatttatatgaatagttttcccaaggaaatatataaactgtgctcgaattacaagctcatattttyaagaaaatcgcgtgtatttcaatctttatctttcataaaagaaaaatgacatgttttaaaattgagaggtagagagaggtaattaaaagtcacagttgaatattaaagatacaagaaaaaatttgaatatccctacctcgggattactggaaaggtcactgtgataaatttagaataacagaacaagaaattataaaaattattttgggtcaattccctgcctttaagcaataattaaactattgtataaagagaattatctattatggtcttaaaattttcaagagaaaattatcaatattcattaacaatatgatctataattttacaactattagtccagatctgcgaaacatcaagtgaaaaacaataactcagataattatttttttagtaaaacataatccagaagtgccatctgcagaattctggtttaactgaattactattatatttgccattacaagtgaaaaatttttttgatgtgttccttaaaacaataactcactaaacaagacctcggggacctggaaaaatgtgagcttcccaaactttcctttggcagaaagtcactaaacacattgggtagaggatgaattttcattaaggaaaagaagtgtatctggaggaatctagtcaaaatgtgaaagtatgagtctattgttggaatcttgaaatggaactaaaatacaataatagtaacaaaaataacaaaacgctatcatttgttaagcactaactacatggcaggccctgttgtaagctctcacttgattacaacattataacctttaaaggcatcctcatattataggactctctgaaagtgtctgagttcatatcaagctctatctgacatcaaaacctattcttaaccactcgacaccatgaaatagggccactaagttgaagcagtaattaatatctagaactgaattttcatccacatgttgactagcaagagggtttagactaacaaatagtcatcagcagagaaaaatatgctcacctctatggtttgcaaatgaaaatcaaacttctggcttaaaaggtatacacaattagagagctggaatttga

SEQ ID NO: 85093 - DNA, 1504 bp, Homo sapiens
gattcttccacctcccagctgtttatctattgaaggcaaagcttctttttcctatgccctgtttccttattcatacattaaggaagctaagctgtgtgatatataagctaattcccagaacttccacattttatacctgtatacttgtcattcctattgccttgtataccttgtggtgcctacccaccaccagataatgtccatggtcttcatatctaatgtcgttgccatataacctgcttacctccccaaagtcatcattcaccatgtaaccctagggtgaccaactcaatgcagtttgcctgggactttcatggtcttagccctgaaagtcttacattatgggaaacccccttcagtcctgacaaaatccatacagaatctacccaaaattttgttacttcacatataaggcatgcctttttatgcttttccaaattgtgttccctctacacaaaactagcagatgtcacctgtacaggctgaattgtgtccccttcaaagagatatgctcaagtcctaactcctagtacctcagaatgtggcattatttggaaacagggtctttatagagtctaagaaagcccaatagagttaaaacaaggccattagggtggtccctgatccaatctgactggtgtccttataaaaggggaagtttggacacagaggctgatgtgcagagggaagatcctgtgaagagacaggtagaacactatgtgaaggtgaaggcagaaactgtagtaatgcactgaaaagccaaggcacatcagagattaacagaaaagacaccagaagccaggataaaggcatggaacggatcctcgcagtcctgagaaagaagaaatgccacttacaccttgatttcagacctctagacccaacaactgtgacacaacacatttctgttgcttcatacrcccagttttggatactttgtaacagcaaccctagaaaaccaagacaccacaaattcctacatgcttagggcagatcttttttttttttttttttttttttaagatggaatctcactctgttgctcaggctggagcgcagtggtacaatctcacctcatggcaacttctgcctcccaggttcaagcaattctcctgcctcagtcttcccagtagctgggactacaggcatgtgctaccatgcccagctaatttttgtatttttagtacagaaagggtttcaccatgttgaccagattggtcttgaactcctcacctcaggtgatctgtccgcctcggcctcccaaagtgctgggattacaggtgtaagccactacgttcgaccagattatttttttattaactaagtacttttctgactgatcctgtatggaaccttggaaacactgacataatgctctgtgcataatactctaggtctagaaggggccacatgaaggctgactgattacagacattgggaaaccattggcacccagacagtgtttaaacccatgaaacagtttcacccaggcaatgaagctttg

SEQ ID NO: 85094 - DNA, 1504 bp, Homo sapiens
gattcttccacctcccagctgtttatctattgaaggcaaagcttctttttcctatgccctgtttccttattcatacattaaggaagctaagctgtgtgatatataagctaattcccagaacttccacattttatacctgtatacttgtcattcctattgccttgtataccttgtggtgcctacccaccaccagataatgtccatggtcttcatatctaatgtcgttgccatataacctgcttacctccccaaagtcatcattcaccatgtaaccctagggtgaccaactcaatgcagtttgcctgggactttcatggtcttagccctgaaagtcttacattatgggaaacccccttcagtcctgacaaaatccatacagaatctacccaaaattttgttacttcacatataaggcatgcctttttatgcttttccaaattgtgttccctctacacaaaactagcagatgtcacctgtacaggctgaattgtgtccccttcaaagagatatgctcaagtcctaactcctagtacctcagaatgtggcattatttggaaacagggtctttatagagtctaagaaagcccaatagagttaaaacaaggccattagggtggtccctgatccaatctgactggtgtccttataaaaggggaagtttggacacagaggctgatgtgcagagggaagatcctgtgaagagacaggtagaacactatgtgaaggtgaaggcagaaactgtagtaatgcactgaaaagccaaggcacatcagagattaacagaaaagacaccagaagccaggataaaggcatggaacggatcctcgcagtcctgagaaagaagaaatgccacttacaccttgatttcagacctctagacccaacaactgtgacacaacacatttctgttgcttcatacacccagttttggatactttgtaacagcaaccctagaaaaccaagacaccacaaattcctacatgcttagggcagatcttttttttttttttttttttttttaagatggaatctcactctgttgctcaggctggagckcagtggtacaatctcacctcatggcaacttctgcctcccaggttcaagcaattctcctgcctcagtcttcccagtagctgggactacaggcatgtgctaccatgcccagctaatttttgtatttttagtacagaaagggtttcaccatgttgaccagattggtcttgaactcctcacctcaggtgatctgtccgcctcggcctcccaaagtgctgggattacaggtgtaagccactacgttcgaccagattatttttttattaactaagtacttttctgactgatcctgtatggaaccttggaaacactgacataatgctctgtgcataatactctaggtctagaaggggccacatgaaggctgactgattacagacattgggaaaccattggcacccagacagtgtttaaacccatgaaacagtttcacccaggcaatgaagctttg

SEQ ID NO: 85095 - DNA, 631 bp, Homo sapiens
gtacattggttccattccattactgtttcttatggttctatagctccctaattcatgggaagagagaaatcagtagtgagacttaagttttatataaacctaaccccaacatctcagaaactactcatcaataggatttggagtgcagtaggaactttgtcacactgctcagtacatgtctccttcatcaatagccagctaacataagacacctcatccaataaatgtgaattaaaatatgtgagtgccaactatgttctaggcaggcaatgcctctccctgctacaatctgctcttcacacttcagccaaatgatgttctgacccatatccgatcacatcactcccctacttgaaacattccacactcacaccttctgtaccattcctaggagagaaagtccaaactcctatgcatgcttttctacctcctctaggaagccttctctgtctccgaccatattgagtagtaaaaccgggtttatatgtcagctcccccaagcacatggtgagattttcctctcaggatcagttctcatccatatttgcacacaaggctctctggctgctgctctcatcatatagacaaattattttkgcaaaggctattcttgactcctgagctgatatca

SEQ ID NO: 85096 - DNA, 1098 bp, Homo sapiens
taaatccactgcttctgtggtgtgtccaaatcatacccacctaccattcatcatggtggacactctaccttcacaaatgcaccattgtcaaagctgtcgtaatgttaaacttgaaggttcacctgcatgctgactgcccagctctctaacagttgtttcttagtcaagcaaagctgaacactcaatgcagctctcaaatatttataattcccactcactttcaaaagtgtgggaatgaatgaaaaggatctcaacatattttaataagagaagtggggaaaaaagattgtttctgacagaaccagacaaatcaattaatcactggcaagcaaagataattgtatttctgagtctattaaggcacattagggctagttagctaacttcacaggggagctggatgtcgctgggcattaggcagtgatgggacacatcaggtagaaacacaagatgacattgtctttcaggaagcacttgactttcaactcaaccatttccactttggtagagaaaaggcaggtgagtacgttcaaaggagatttcaatcctaacatttctatgagccttcacacttttacatcagctctgataatactgattataggtcctttttgtgagactgttctgtggatgagaacagaatttctcagtaaaatcatctaaagccactggggagaaaatctcctaaatgatatgtaaagaaggagaggaagaaagacaggggatgaatctcaacatcaaacaatgaaaaatcttactcggaaagaaaatcagtttgatttagagttttgtctgaattaatatttaaaaccaaatttgaattcattgtcaaggacaaatgttagctccatttcagctaacaatattagaaatgcaggttcatgctctygtaaatagatacaaatgagttatggatatactgatgattaacaaatatctatgtaatgagttttataattaattgttcacttagaaagtatttccttgggggaaaagtattgcatatgaaaataagaccattcctcctgctttctcaccactagcaccaagctggaaagctaacacaaagtctctggaatttccacagcagaagaatgc

SEQ ID NO: 85097 - DNA, 1135 bp, Homo sapiens
aaggtttttggtaaagtgaatgaatgaatgaagacttgggccactgcaagaatcccctggaatcgtctctctactgtaagcctctcctaactccaatccattgccctcacacataattagatgcctgtcccctgcaatcacccttttctttcccaaaagcataaagacaaatgtcttartccagcacacaaggaccctctcagcagggggaacactgacctccccatgaaaggaaaggaatgcttagtcaacctcctcatctccccagaagttcactaataagcctttaacacgtttatactacacactactctatatactattttaggtgcagggagtaaaagtcacttaagtcctggaccaagttttggtgctctcaagccagcagatacgaaaagcactctgccaatcatttaaccctgtcattaattactgctagaaacacctactaggcgtcaagcactctgctaagatctccacatctcttcacccattttatccccacaaaacaccatgaaataggttttcttataatatagggaaatacaggcagactgagctcaaagagattaaaccaacccttcagctagagtgagacagaaccatgattcaattctagagcactctcaagggagtaatccaggcatgagtgacagatagagaaaatgaaccagagaggtggaatgacccttctgatgacacaaagtaattaaggactcatcccagaacctcctcatctccccagcagtcaggaagtttcattgctgctttggcctcaaaatcagcaaaggcagctgcaaaggcagaaggcacagcctcctttcagaccagagaaaagggaaggtgctttaaactgtgcttgcgaccaagagcccttcaggtgattttaaagggcctttggcactcaaatggttcttagaacatatccatgtagacccctgggagagaggaggatacctgagttgaccattgagcaagagattatgacactcagtagaaacttcacgtatggcataatgaggtggataattcaagtttcacttgggagaagggacatgaagaagaaagatgccacaggccccctccaatgtccaaggccttcagtgctgtacaaccgagttcagatattcctgct

SEQ ID NO: 85098 - DNA, 1135 bp, Homo sapiens
aaggtttttggtaaagtgaatgaatgaatgaagacttgggccactgcaagaatcccctggaatcgtctctctactgtaagcctctcctaactccaatccattgccctcacacataattagatgcctgtcccctgcaatcacccttttctttcccaaaagcataaagacaaatgtcttaatccagcacacaaggaccctctcagcagggggaacactgacctccccatgaaaggaaaggaatgcttagtcaacctcctcatctccccagaagttcrctaataagcctttaacacgtttatactacacactactctatatactattttaggtgcagggagtaaaagtcacttaagtcctggaccaagttttggtgctctcaagccagcagatacgaaaagcactctgccaatcatttaaccctgtcattaattactgctagaaacacctactaggcgtcaagcactctgctaagatctccacatctcttcacccattttatccccacaaaacaccatgaaataggttttcttataatatagggaaatacaggcagactgagctcaaagagattaaaccaacccttcagctagagtgagacagaaccatgattcaattctagagcactctcaagggagtaatccaggcatgagtgacagatagagaaaatgaaccagagaggtggaatgacccttctgatgacacaaagtaattaaggactcatcccagaacctcctcatctccccagcagtcaggaagtttcattgctgctttggcctcaaaatcagcaaaggcagctgcaaaggcagaaggcacagcctcctttcagaccagagaaaagggaaggtgctttaaactgtgcttgcgaccaagagcccttcaggtgattttaaagggcctttggcactcaaatggttcttagaacatatccatgtagacccctgggagagaggaggatacctgagttgaccattgagcaagagattatgacactcagtagaaacttcacgtatggcataatgaggtggataattcaagtttcacttgggagaagggacatgaagaagaaagatgccacaggccccctccaatgtccaaggccttcagtgctgtacaaccgagttcagatattcctgct

SEQ ID NO: 85099 - DNA, 1459 bp, Homo sapiens
ccattttcttccctggcagtagctttcctagactcccaactatattaacacatcttcttctggtaaggacactaatgactgcccacaacaacccttttcattgaggacaattcattagaaaacagtttctggtagtgaacctttaaaatctaccttcttttcactttcagtcttagttctggacttaagagaaactaagagtgaatccaattgatcttcctgggaaaccatttgtgatcacaaaattgtgcttgcacagctctgactcatctccaattcatttaattacttcttttaggacatggttggggcataattggccaggcttagagtgcccaggtttgtcaacacgtgcccagtgtcctggactttaaacatggatggggaagcccagagatctgtctggagcagagagttgtggccagggcccaggcccctctggcaccagactagatgaggccagccaaaatgggcaggcaggaggtcatccaaaagtcatcattcaccatgtaaccctagggtgaccaactcattgcagtttgcctgggactttcgtggtcttagcactgaaagtcttacattccaggaaacccccttcagttcacctgggctaatgccccttgtgaagtagcagcaacaaaagcaaaggatgtacctctgtgcctcctcacttcttcactgttcaataaggttgggagctgtttgggaatagggacccagaacatgtgttttggaagggaaactccatgcctttggagaaagaatgtagacttggaagtgagacagacttggaacaggatcctgcacccttcacagagtaccctgcatggcttcaagtaagttattttgctttactctgttgaaggctgtttactcatgtgtaaaacagaacagatagtatctgcttctccaggataattaaacgaaatgatgtagataaaatgtctagcacaatccctaggatatagcaggatatagtagggattaaggaaggctggttctttctttttcastttttctttctttcttaaattccccaacatttgacatacggctggccacaaatgacatatttgatatgtgtatgatgagagataaaatagatgaatgaatgaatgagtgaatgagtgaatgaatgaatacttatgtgtgaggatagatggatggacagacaaactctcaatagaggtagttttgtggctcatacaggcccacttttctgcaggctgagatgagcaaagcagagccagaaatggaaagcatgttcaagaatccataagttctgcagtgagccagattcaggtttcaatcccggacataccattcacctgccatagtgttccctcagacaaattatgggataaacatcttcatgatgatgatcaagaatatccacatagctaaaatttattgagaacaatacacacaattttttgtccacaaaagacctgtgaggtgg

SEQ ID NO: 85100 - DNA, 1148 bp, Homo sapiens
ttagaaattataaataaaaaggacactttctatttcacagaggttctaaatatacatatgtcagaacaagaaccagcacaaggtaagtagccagttagtcctacctgtggtcatgtcatcaggggtttgaggaacctgctctcagggtcaaggtaaaagcctcggagaggagacctagaagtgaagcagaaataacaccacagccaacctgatgaaagccatgcccaggctcccgtcaaggactctgcttcttccttgtgactgtggacaacaggagcttgggtcctgtcaccggatgagccatcttttggagctggcaggcgccagctgtgaggaccagagggctgcaggatgctcagtggttggcagagcccagcgagtaatgggggaagagaagggcttgagatagtgctgcacagagacaaagaaaataaaaaaaaaactattttcttttctagtatagtttaacagaagaataattatgatgaagttggtatgccttgagctttacagtagcacactgtttagaacagaatattaacacagtggccagcaataatttacaatgagattgtgccccaggtgagggatgtgcagaatttgtatttcttcttcaaggtgaattttccaattatactatttttggttagagaccgctgcattatgaagcactccaaaacttgtgacttttaacaatggcttattcttttataatgttttgagttagccagcctaggctggggacatttatgcactaccttcagctgagatctcagctgaggatggagcagccaagatggcttcactcatctgtgtctgaccccttggttggagtggctgcaccagatgagcgacacgtgggcttctgtctccagttgggtggtcagacttcttacatgatagctgagttcctcagagagaaaatgaagaggattccaggccacttaagggctagatggagactggcccagggttgcttcctccacagttcattgttcagggcaggtgacaaggccagccccaggggaacggaaatagactctcgccrttcattggaagcactgtctgcatgtacagtgatgggaggaaactctggcagtcctatttctggccaactatccaaacatattttccattatctgtatgca

SEQ ID NO: 85101 - DNA, 2200 bp, Homo sapiens
gcatgcttcaggggccctccacttgtccctcatccctagatttgtttgcttaaaactcattgtactgggtgaagtttcccatgcagcagctgttaatgccactgcctgagcaagaagaaggtagtcaagctaaccaggggaccctggagccttatcccctagggaacgaatgcagggcagggctgttgactccaagtgagccaaagtcataaagatctgctggggggacccttctcatttctgagcagatgaagatttgccttgatgacctgcaccagaaatcaggacaccacaagtcagttgtgcctcacaaaagagggcaccttgccaaggaggccctcctgagccctgagtccctggggcctcccccctcccaagcccacatcgctcacgttgtaattgccacacaatctctctgtccacaccctggtctttgggccccatgaaagtagcgccagccaccaagctcgctgtcaacagcgcctcatacacagcaaactgtcaaaagtagaattttatgctgggtaagtatcttaacagaaatcacaacacgtgccagttagaatggggattattaaaaagtcaggaaacaacagatgctggagaggttgtggacaaataggaacgcttttacactgttggtaggagtgtaaattagttcaaccattgtggaagacagtgtggcaattcctcaaggatctagaaccagaaataccatttgccctagcaatcccattactgggtgtatatccaaaggattataaatcattctactataaagactcatgcacatgtgtgtttatcgcagcactatttacaatagcaaagacttggaaccaacccaaatgcccatcaatgatagactggataaagaaaatgaggcacatatacaccatggagtattatgcagccataaaaaagaatgaattcatgtcctttgcaggatcatggatgaagctggaagccatcattctcaggaaactaacacaaaaacagaaaaccaaacactgcatgctctcactcataagtgggagttgaacaatgagaacacatggacacagggaggggagcatcacacaccagggcctgtcagggggcagggggcaaggggagggagagcattaggataaatacctaatgtatgcggggcttaaaacctggagatgggttggtaggtgcggcaaaccaccatggcccatgcatgcctatgtaacaaacctgcacgttctgcacatgtatcccagaacttaaagtaaaataaaaaaataaagaagtagccactatgctaatccgcaatttaaaaagaaaagaaatcacaacaaatgtgatttctaagagattattcctgccagatgtggcagggggtggtgcaaggctgtggtgtcctggtgcgtgcacctgtgcatgagaatccatgcgtatgtgggctcccaacaggacaggaaatctatcgagtacccacatatgttacctgcactgatccttcaaacatttctacagggtcattcctatcaytgctattcccatttatagagagctgaagagtggcacagaagctactggttcagggctacaagaacctgggtggactcaggtttggccaacttcaaaccctacttcctaattgctatactatttttagcagcttttggacacagatgctaaggcagcagaaaacgatgtattgttaaataacttatgatgggtgtgctgtcagtgagacccagatggggaatggagaaccagggtagggaaagagaggaagacaggcctgggtacatttcagaggtcctgagaagggcacttcagcccatcaggcaacttgggagtgagccttacctcccatcctgagacaagggagctgggtttccatgaccctgtgttagtagccatttgttcgcagcaagggttggggtgaggatgggggatgatgggattcaaactcccaggaaagtttaattattggacaaaatgcttcctgttgtctgggagtggtcctccacagggaagccccaggttctggggactggaaacacattaaaatagtgtagaagaagcacagaaatgcaggtggggtgtggaaggggctacgtgctgcatgcctatagtttgtgcgaaggacgttcagttgagtaactattaattctgacaggggcaggagactgcccttagaccacctggtcgttgaaggctgcatgca

SEQ ID NO: 85102 - DNA, 2200 bp, Homo sapiens
gcatgcttcaggggccctccacttgtccctcatccctagatttgtttgcttaaaactcattgtactgggtgaagtttcccatgcagcagctgttaatgccactgcctgagcaagaagaaggtagtcaagctaaccaggggaccctggagccttatcccctagggaacgaatgcagggcagggctgttgactccaagtgagccaaagtcataaagatctgctggggggacccttctcatttctgagcagatgaagatttgccttgatgacctgcaccagaaatcaggacaccacaagtcagttgtgcctcacaaaagagggcaccttgccaaggaggccctcctgagccctgagtccctggggcctcccccctcccaagcccacatcgctcacgttgtaattgccacacaatctctctgtccacaccctggtctttgggccccatgaaagtagcgccagccaccaagctcgctgtcaacagcgcctcatacacagcaaactgtcaaaagtagaattttatgctgggtaagtatcttaacagaaatcacaacacgtgccagttagaatggggattattaaaaagtcaggaaacaacagatgctggagaggttgtggacaaataggaacgcttttacactgttggtaggagtgtaaattagttcaaccattgtggaagacagtgtggcaattcctcaaggatctagaaccagaaataccatttgccctagcaatcccattactgggtgtatatccaaaggattataaatcattctactataaagactcatgcacatgtgtgtttatcgcagcactatttacaatagcaaagacttggaaccaacccaaatgcccatcaatgatagactggataaagaaaatgaggcacatatacaccatggagtattatgcagccataaaaaagaatgaattcatgtcctttgcaggatcatggatgaagctggaagccatcattctcaggaaactaacacaaaaacagaaaaccaaacactgcatgctctcactcataagtgggagttgaacaatgagaacacatggacacagggaggggagcatcacacaccagggcctgtcagggggcagggggcaaggggagggagagcattaggataaatacctaatgtatgcggggcttaaaacctggagatgggttggtaggtgcggcaaaccaccatggcccatgcatgcctatgtaacaaacctgcacgttctgcacatgtatcccagaacttaaagtaaaataaaaaaataaagaagtagccactatgctaatccgcaatttaaaaagaaaagaaatcacaacaaatgtgatttctaagagattattcctgccagatgtggcagggggtggtgcaaggctgtggtgtcctggtgcgtgcacctgtgcatgagaatccatgcgtatgtgggctcccaacaggacaggaaatctatcgagtacccacatatgttacctgcactgatccttcaaacatttctacagggtcattcctatcattgctattcccatttatagagagctgaagagtggcacagaagctactggttcagggctacaagaacctgggtggactcaggtttggccaacttcaaaccctacttcctaattgctatactatttytagcagcttttggacacagatgctaaggcagcagaaaacgatgtattgttaaataacttatgatgggtgtgctgtcagtgagacccagatggggaatggagaaccagggtagggaaagagaggaagacaggcctgggtacatttcagaggtcctgagaagggcacttcagcccatcaggcaacttgggagtgagccttacctcccatcctgagacaagggagctgggtttccatgaccctgtgttagtagccatttgttcgcagcaagggttggggtgaggatgggggatgatgggattcaaactcccaggaaagtttaattattggacaaaatgcttcctgttgtctgggagtggtcctccacagggaagccccaggttctggggactggaaacacattaaaatagtgtagaagaagcacagaaatgcaggtggggtgtggaaggggctacgtgctgcatgcctatagtttgtgcgaaggacgttcagttgagtaactattaattctgacaggggcaggagactgcccttagaccacctggtcgttgaaggctgcatgca

SEQ ID NO: 85103 - DNA, 2200 bp, Homo sapiens
gcatgcttcaggggccctccacttgtccctcatccctagatttgtttgcttaaaactcattgtactgggtgaagtttcccatgcagcagctgttaatgccactgcctgagcaagaagaaggtagtcaagctaaccaggggaccctggagccttatcccctagggaacgaatgcagggcagggctgttgactccaagtgagccaaagtcataaagatctgctggggggacccttctcatttctgagcagatgaagatttgccttgatgacctgcaccagaaatcaggacaccacaagtcagttgtgcctcacaaaagagggcaccttgccaaggaggccctcctgagccctgagtccctggggcctcccccctcccaagcccacatcgctcacgttgtaattgccacacaatctctctgtccacaccctggtctttgggccccatgaaagtagcgccagccaccaagctcgctgtcaacagcgcctcatacacagcaaactgtcaaaagtagaattttatgctgggtaagtatcttaacagaaatcacaacacgtgccagttagaatggggattattaaaaagtcaggaaacaacagatgctggagaggttgtggacaaataggaacgcttttacactgttggtaggagtgtaaattagttcaaccattgtggaagacagtgtggcaattcctcaaggatctagaaccagaaataccatttgccctagcaatcccattactgggtgtatatccaaaggattataaatcattctactataaagactcatgcacatgtgtgtttatcgcagcactatttacaatagcaaagacttggaaccaacccaaatgcccatcaatgatagactggataaagaaaatgaggcacatatacaccatggagtattatgcagccataaaaaagaatgaattcatgtcctttgcaggatcatggatgaagctggaagccatcattctcaggaaactaacacaaaaacagaaaaccaaacactgcatgctctcactcataagtgggagttgaacaatgagaacacatggacacagggaggggagcatcacacaccagggcctgtcagggggcagggggcaaggggagggagagcattaggataaatacctaatgtatgcggggcttaaaacctggagatgggttggtaggtgcggcaaaccaccatggcccatgcatgcctatgtaacaaacctgcacgttctgcacatgtatcccagaacttaaagtaaaataaaaaaataaagaagtagccactatgctaatccgcaatttaaaaagaaaagaaatcacaacaaatgtgatttctaagagattattcctgccagatgtggcagggggtggtgcaaggctgtggtgtcctggtgcgtgcacctgtgcatgagaatccatgcgtatgtgggctcccaacaggacaggaaatctatcgagtacccacatatgttacctgcactgatccttcaaacatttctacagggtcattcctatcattgctattcccatttatagagagctgaagagtggcacagaagctactggttcagggctacaagaacctgggtggactcaggtttggccaacttcaaaccctacttcctaattgctatactatttttagcagcttttggacacagatgctaaggcagcagaaaacgatgtattgttaaataacttatgatgggtgtgctgtcagtgagacccagatggggaatggagaaccagggtagggaaagagaggaagacaggcctgggtacatttcagaggtcctgagaagggcacttcagcccrtcaggcaacttgggagtgagccttacctcccatcctgagacaagggagctgggtttccatgaccctgtgttagtagccatttgttcgcagcaagggttggggtgaggatgggggatgatgggattcaaactcccaggaaagtttaattattggacaaaatgcttcctgttgtctgggagtggtcctccacagggaagccccaggttctggggactggaaacacattaaaatagtgtagaagaagcacagaaatgcaggtggggtgtggaaggggctacgtgctgcatgcctatagtttgtgcgaaggacgttcagttgagtaactattaattctgacaggggcaggagactgcccttagaccacctggtcgttgaaggctgcatgca

SEQ ID NO: 85104 - DNA, 1242 bp, Homo sapiens
ctatgcagcagacactatttctggagcaagggatcaagaatgaattaaaactagtctctctcttaatcatataaggattactggggacactacacaagaaaatagccaggggcttttagctgcaggccaaatgcgtgtcagtgaatactgtgaatggtggtagacgggacagcaattacctgatctgaacagtttccaaatgagtttctaaatgccagcccagcactcccaagtccagggttttgttttgttttgttttgttttatttttttttttattttttattttttgtagaagctgaaaacccgtaatacaaatatgaaattgcctgaattgtaaatgtttgcaatttgttcaaaacattttcaaaaatactatggggtctaaayaagacacatcagcagacaatacttggctcacaggcttccaggttgtaacactgcctccaaaattgtaataggcaccgttaaataccaagatagacaagacatgggctttgtggttacggatgaaaagggcttcatcctgcctgtgaatgaggaggagaccaagtcctatcacaggtgtgcagaactgacgctgggttgacctctgagtagaggtggtggcgagatctggtatttagcaagtaatgcccccttgagttgggggtgatgtgagaaaaagagaactaggggtaccatcttccaggtgtatatgagaaactgacacgaagaataaagattcctgtgtttaaaaagcatgttttttttttcttaaagcaaaggacaaaagcagccatgagtaggacataaaatgccagtgtcttaaagtgacaatggttaaatacaatggatttcaagacaaaaatgaagaagctgctttcttatgaagctgggacgcctgaagaagtgaccactttcccaaacatgagcttcctcctctggacacgtgggcaatggtgcctgccctgagaggatgcctgagggttagagatgacattgctctgacttaatcccattgctagccaagtgggatttcactgcgagttcactgctccatccttcccagagcaggtgctacagaacactttactcttgccccagatgggattctagatcaaatccaaatgagattctcaaaagccctgcaaaaaggaaacttgtttagcattttttttgcaaactgacttctcccaaactgggtatgtatatcccttctatttttctttttgtgtaatactctcagatatcctgttcaccc

SEQ ID NO: 85105 - DNA, 1091 bp, Homo sapiens
aacctcataaaactccttaaatgactgctcttagtaatgaagacagccagaaactgaccaaacagcattgtgctgacagcattgccgatttccatgtgagtgtggkgtacacacgcacacacacacacacacacgtgtgagtgttcatatagggaaacacgggcgcttcgcaggagggataaagcagtcaatgcaaaagcggctgtgctctgtttggaacccaatcagcagactaacaggttacttcatacctatttactggatacccctgcttctctgtccccagtctgaaattgtagctggcccaggaagaacagatgctgcagccggatggctggagagaatcctgggaaccagggggcatcagggccttgcactgcattgcaggcagcgcttgcaagccttgctgtcctcttcctgtcttcctccttttcctaagtcccatgctggcctgatgatactgcttgaggtttaagaggaagaaaagtcaattccgaagagcaaccagaagttgtggggtatatgacatacactcccagtaagccggctcaggggaatctgtcattcagctcagcctgtgaaacctaccttgtcaaacacaggtccgctccccaccaacatatgtctctcaagctccacaccctcaaagatctccttgtattctttaacataggaataaacatcagaagtgcaacaaatttgcacttcttagcagctcagtagtggtaaacaaccttgaatatggtgtcagggaataggcagaaaacacccgctcctgcagctgggggtgatgcaatagttattaaccaggagtgcacatcacaatcctctggggagtctcttaaattatgcaaacctcagccctacacctaaagattccgattcagcccagcgagagtgaagtttggatagcagtaaaaaaaaatattaccccatgattctgatgtctacctccaactgaggtctcttggaatggtccaaaagggatagacttgggagtcaaacacataggtccaaatttagtcctagtcaccctagtccttgatttcatcatttaacctctttgagctacagacaatgcacacataaag

SEQ ID NO: 85106 - DNA, 1091 bp, Homo sapiens
aacctcataaaactccttaaatgactgctcttagtaatgaagacagccagaaactgaccaaacagcattgtgctgacagcattgccgatttccatgtgagtgtggtgtacacaygcacacacacacacacacacgtgtgagtgttcatatagggaaacacgggcgcttcgcaggagggataaagcagtcaatgcaaaagcggctgtgctctgtttggaacccaatcagcagactaacaggttacttcatacctatttactggatacccctgcttctctgtccccagtctgaaattgtagctggcccaggaagaacagatgctgcagccggatggctggagagaatcctgggaaccagggggcatcagggccttgcactgcattgcaggcagcgcttgcaagccttgctgtcctcttcctgtcttcctccttttcctaagtcccatgctggcctgatgatactgcttgaggtttaagaggaagaaaagtcaattccgaagagcaaccagaagttgtggggtatatgacatacactcccagtaagccggctcaggggaatctgtcattcagctcagcctgtgaaacctaccttgtcaaacacaggtccgctccccaccaacatatgtctctcaagctccacaccctcaaagatctccttgtattctttaacataggaataaacatcagaagtgcaacaaatttgcacttcttagcagctcagtagtggtaaacaaccttgaatatggtgtcagggaataggcagaaaacacccgctcctgcagctgggggtgatgcaatagttattaaccaggagtgcacatcacaatcctctggggagtctcttaaattatgcaaacctcagccctacacctaaagattccgattcagcccagcgagagtgaagtttggatagcagtaaaaaaaaatattaccccatgattctgatgtctacctccaactgaggtctcttggaatggtccaaaagggatagacttgggagtcaaacacataggtccaaatttagtcctagtcaccctagtccttgatttcatcatttaacctctttgagctacagacaatgcacacataaag

SEQ ID NO: 85107 - DNA, 1091 bp, Homo sapiens
aacctcataaaactccttaaatgactgctcttagtaatgaagacagccagaaactgaccaaacagcattgtgctgacagcattgccgatttccatgtgagtgtggtgtacacacgcacacacacacacacacacgtgtgagtgttcatatagggaaacacgggcgcttcgcaggagggataaagcagtcaatgcaaaagcggctgtgctctgtttggaacccaatcagcagactaacaggttacttcatacctatttactggatacccctgcttctctgtccccagtctgaarttgtagctggcccaggaagaacagatgctgcagccggatggctggagagaatcctgggaaccagggggcatcagggccttgcactgcattgcaggcagcgcttgcaagccttgctgtcctcttcctgtcttcctccttttcctaagtcccatgctggcctgatgatactgcttgaggtttaagaggaagaaaagtcaattccgaagagcaaccagaagttgtggggtatatgacatacactcccagtaagccggctcaggggaatctgtcattcagctcagcctgtgaaacctaccttgtcaaacacaggtccgctccccaccaacatatgtctctcaagctccacaccctcaaagatctccttgtattctttaacataggaataaacatcagaagtgcaacaaatttgcacttcttagcagctcagtagtggtaaacaaccttgaatatggtgtcagggaataggcagaaaacacccgctcctgcagctgggggtgatgcaatagttattaaccaggagtgcacatcacaatcctctggggagtctcttaaattatgcaaacctcagccctacacctaaagattccgattcagcccagcgagagtgaagtttggatagcagtaaaaaaaaatattaccccatgattctgatgtctacctccaactgaggtctcttggaatggtccaaaagggatagacttgggagtcaaacacataggtccaaatttagtcctagtcaccctagtccttgatttcatcatttaacctctttgagctacagacaatgcacacataaag

SEQ ID NO: 85108 - DNA, 1091 bp, Homo sapiens
aacctcataaaactccttaaatgactgctcttagtaatgaagacagccagaaactgaccaaacagcattgtgctgacagcattgccgatttccatgtgagtgtggtgtacacacgcacacacacacacacacacgtgtgagtgttcatatagggaaacacgggcgcttcgcaggagggataaagcagtcaatgcaaaagcggctgtgctctgtttggaacccaatcagcagactaacaggttacttcatacctatttactggatacccctgcttctctgtccccagtctgaaattgtagctggcccaggaagaacagatgctgcagccggatggctggagagaatcctgggaaccagggggcatcagggccttgcactgcattgcaggcagcgcttgcaagccttgctgtcctcttcctgtcttcctccttttcctaagtcccatgctggcctgatgatactgcttgaggtttaagaggaagaaaagtcaattccgaagagcaaccagaagttgtggggtatatgacatacactcccagtaagcyggctcaggggaatctgtcattcagctcagcctgtgaaacctaccttgtcaaacacaggtccgctccccaccaacatatgtctctcaagctccacaccctcaaagatctccttgtattctttaacataggaataaacatcagaagtgcaacaaatttgcacttcttagcagctcagtagtggtaaacaaccttgaatatggtgtcagggaataggcagaaaacacccgctcctgcagctgggggtgatgcaatagttattaaccaggagtgcacatcacaatcctctggggagtctcttaaattatgcaaacctcagccctacacctaaagattccgattcagcccagcgagagtgaagtttggatagcagtaaaaaaaaatattaccccatgattctgatgtctacctccaactgaggtctcttggaatggtccaaaagggatagacttgggagtcaaacacataggtccaaatttagtcctagtcaccctagtccttgatttcatcatttaacctctttgagctacagacaatgcacacataaag

SEQ ID NO: 85109 - DNA, 745 bp, Homo sapiens
gtggtcccagctactcgggaggctgaggtgggggaactgcttgagctgcgatggtgccactgcactccagcctgggcaacaaagcaagaaaaaaaaaaaaagactctgggattctctcagatctagcttctttttagaaagttcccaagtagttctgatacacactcacatttaagaacccctaaggccgggcacagtggctcacgcctgtaatcccagcactttggaaggcagaggtgggagaattgattgagcccaggaggtcaatactggcctggacaacgtagtgagacccgccccctattattgaaaaaaaaaggacagactcagcagagcttaagtgactgatggaatgtgctgagtgaagggttaggtggaaatgtggaggataactctcagggttctcttttcctttttttttgagactgggttttgctcttcatccaggctggagtrcagtggtgctatctttggctcactccaaccttgacctcccctcccacctcagcctcctgagctgctctcccagggttctgacttggacaaaagtgcagctgtgcacaaaggtgaagagctcatgaagacagggaacgatctggagttcagattaggacacagagttggaatggaggaaaaagagaaaaagactttcttcatcaaagtggcccttgaaacattacttatgaagggctgttggaggaaggttggaatggaaaaactcactggtttacttgttctttgccag

SEQ ID NO: 85110 - DNA, 496 bp, Homo sapiens
  misc_feature (1)...(496): n = A,T,C or G
tcccttaaatggttccccatctcagaatattttgcacagtcttttccagtaattttctatgtgcattaaaatgatagtcaatattttagacatcacagaaatgtattccaagtttcatttaaaattaggctgatttcaaactatcgttgtttactttttaacttttaaaaatatataaacattcaaacattttgctattcatatttcatctataacttcccacttttttcctgccaaaaatgccatgtattcacagagttgtacaaccatctccataatcaattttagaacatttcgtcaccccagaaataaaccatatatccattagtaatcactcttccaacatccttccactgcaaccttaggcaaccactatttkggctgtttctatagatnnnnnnnnnnnnnnnnnnnnnnnnnnnnnnnnnnnnnnnnnnnnnnnnnnnnnnnnnnnnnnnnnnnnnnnnnnnnnnnnnnnnnnnnnnnnnnnnnnnnc

SEQ ID NO: 85111 - DNA, 496 bp, Homo sapiens
  misc_feature (1)...(496): n = A,T,C or G
tcccttaaatggttccccatctcagaatattttgcacagtcttttccagtaattttctatgtgcattaaaatgatagtcaatattttagacatcacagaaatgtattccaagtttcatttaaaattaggctgatttcaaactatcgttgtttactttttaacttttaaaaatatataaacattcaaacattttgctattcatatttcatctataacttcccacttttttcctgccaaaaatgccatgtattcacagagttgtacaaccatctccataatcaattttagaacatttcgtcaccccagaaataaaccatatatccattagtaatcactcttccaacatccttccactgcaaccttaggcaaccactatttgkgctgtttctatagatnnnnnnnnnnnnnnnnnnnnnnnnnnnnnnnnnnnnnnnnnnnnnnnnnnnnnnnnnnnnnnnnnnnnnnnnnnnnnnnnnnnnnnnnnnnnnnnnnnnnc

SEQ ID NO: 85112 - DNA, 496 bp, Homo sapiens
  misc_feature (1)...(496): n = A,T,C or G
tcccttaaatggttccccatctcagaatattttgcacagtcttttccagtaattttctatgtgcattaaaatgatagtcaatattttagacatcacagaaatgtattccaagtttcatttaaaattaggctgatttcaaactatcgttgtttactttttaacttttaaaaatatataaacattcaaacattttgctattcatatttcatctataacttcccacttttttcctgccaaaaatgccatgtattcacagagttgtacaaccatctccataatcaattttagaacatttcgtcaccccagaaataaaccatatatccattagtaatcactcttccaacatccttccactgcaaccttaggcaaccactatttggkctgtttctatagatnnnnnnnnnnnnnnnnnnnnnnnnnnnnnnnnnnnnnnnnnnnnnnnnnnnnnnnnnnnnnnnnnnnnnnnnnnnnnnnnnnnnnnnnnnnnnnnnnnnnc

SEQ ID NO: 85113 - DNA, 564 bp, Homo sapiens
tcccctccagaacccagcactattgcagagcaagtgcccagccaacagctgctgaattggcttggaggtcagaagccactgtgacctctaggcagcagaacaaggaacttgaggggatagggtgagggattagaacccttgggtgtctagccgggcgtggtggctcatgcatgtaatcctagctacttgggaggctaaggcaggagaattgcttgaacctgggaggtggaggttgtggttagccgagatcgcactgagccgagatcgcactgagccgagatcgccattgcactccagcctgggcaacaagagcaacaagagcgaaactccgtctcaaaaaaaaacaaaaaaacaaaaaaaacctcgggtgtcaaccttctggaaaatcagccttttaattggcaagtcccagaagaggaagcctaggcagttagaccccaggccacggtgatagggtgctgataccaygcagggcagggctcttggtgcctcgaggcttttgcatctttacttcctgctgaagttagagagagctgactggacttagtacaagcataggagtgg

SEQ ID NO: 85114 - DNA, 2305 bp, Homo sapiens
gggataaattatttgtttcaaagagtggcatccctcttagaattttttttttttgcttttatcttatattttctagatgctaggccaagccctagattctactgctacattttcctatctcaaaaaattactcctcattgtctccttttctttctgtctctgttctgtgcataaacttatgtgcgttctaaggcatattttactttagaaactttgcaaattttctgctacttattaaatataatcctacctacttttcgctatttatttgcatcaaactaaaatgtaattattttgcttcatatgtgttatttgaaaaagaaactgcacttctatggttagctgtatctataggattcgtatcaacacaagaaattaatattttaccaactaaacaaccatttttcatttgccactgattcgttttcttcttacctgtttgtgtcctccaaaatcattatgagaggagtcgtagaaacaaaagtgaactgcaaactgtgtatttcagagcttcacaaacccacctttctattttgtcttgtactgttatgtaaaatttgctccagcattttgctcagcaagatggcaattattaacaatatatttctctaaactgttgctgcaaagctattattcatgcagggctacaaccgagttaattttggaagagagctgttcaaagaggcccagagctgtagcgcttatgaacactgccttttctcttatttctaattagtgtgaaatggttccaaacaggagtcagccccacagaagtctgtgtagcacaaagccaggcttgttaacggacacaggaaacagttttgttttgctgaataaacaactgcgtcataaaagcttttcaaaaggaacacaatctgatttaccacactctttaaatgttgaatgttgtttatatgcctctgagtcctttttattaaaattcgaaaggcctactcttatgagtcaatatagatgatatgtttgtgatgtttccccgcagtagagcagtagacttacctagtaatacattttcccttcgcttttcattttataatttaacttttatcttttgttttgtgtgtttttgatgcatgactgcatcaaaatttcacactataccattaaaacaattttgttatcaataattacaatattgtaagaaaatctgttaattactttacaggatttagcttgttttatcagtgttttcttccaatataaattccccacccatgttgctgataattggtttgtgtaaatacttaaaatggtgtaaagtatagtttactgcaggagatcttctgatatctgcattagatgaataaattggacaatttcatctaatctaaattgtagctcaaatttctcacttagttttcactattgtcaaacccagagatctaactagtcaaatttgacttaatcaaatcacacaaatcctggtcttgaatttgcccaagatcactcagtaatgatgtgtaaaattatgctaaatttctgtctcgtcttaagaaattaaatatgtcttaagttgtttgcacccttccaaaatgcctattatattttaagtgcccagagtgggtccttaaataatgttatctgagcaatactgctttcttcatgcaaagtaatatgaaaagttaaatctcctttaaatgaaagtctttgaaacatatttacatgaagttataaccatattattatatgacgtttaacttcatcatatggcatatcatttattgtgctctcagatacggatctgatagtaatggcatataatttattgttgtactatcagatacaaggacatttcagatgcagagattagagaatacttgaaagattataaaatcataatccctattgccttgatgttgcaattttgcatttatatttaagcaggaatgatgaaatttaactctaaatgtgttttttattctgaaatctgtgaaagaaattacttaccccatgaaacactaactgctgtggagagtaaggctcactgaagtggtgtagataaaagaaaaaaaatacccaagaaaacgttaatttctatggccagatgaaaatgaacattcagaaactcatgagcaggtttaatacgttttgctctactctgctttaacttatgtgatccttaactctaaaatatgttctttttctgtctgctagcattaccatarccttttcctttctgcatagtcacaaaaactagagaaatgttttaaggagataggtagatagaagataggcaggtagactgctataaataattagagatacattttaagaatatatacacaca

SEQ ID NO: 85115 - DNA, 603 bp, Homo sapiens
tctttatttctttcgtagctattttttactttgataaacactttgtataaatataatttgatcaaatgttcagcatgatcaagtggaaacattttgtcattgggaagaactaaaatttgatatcaattctgtcccagcttactgcatctaccaagtcaaaccatttaagtagtctggcctccaatttccttatatttacattgaataagtttggattagcagctgaataatttttttaaataagatcttctgtagaarcttactacattcagtttggatagtgcttaagatgatggaccagatacatgtatctactttctctctctctctcaaaatcccagaaaagaatataaaaatgtaagtatacatgaaaagtaatggaaaatataaaagcaacatcaacacactagaaatttagagaaattcttataagatagaaaacatagagggacaataatcagatcagagaataacatagctaaaaacatgcagaagccaactgtaccaataagaacagaaagctcatggtaaataagtacaatgaacagaatgttcaacaacaaattttgcagaaattcattggaaaccccattttaaacaaat

SEQ ID NO: 85116 - DNA, 545 bp, Homo sapiens
tccccactctcagcttatgaaggtaattcctattttcttctagtacttttacggcttcatttatcacatataaagtttgatccatttagaattcacctttgtgttcactccacatatatgttcttagctaaagcctagttctcctctatttgggaaggttgtcttttcattcgggattggcaaagttatgaccaataacaaacaacttttaaatctcagtggcttttaacagcatggtttatttctggctcattctatgtgcccatcatggtttggcataagctcagttccatatgaaccttcctccaggccccaggccagtggaccacttccatctagtcttccrttaccagtctcgcccagagggagagaaagcacaaccaagcatgcactgcctctcacagcctcctcttggagatagcccatgtccctcccattcatatttcattggctaaagcaagttacatgaccaatcctgctgtcaacagggtagcaaagtacaatcctcccgagaccttagggacagcaaatattgggaacatttc

SEQ ID NO: 85117 - DNA, 633 bp, Homo sapiens
agcactttgggaggctaaggcgggcagatcacctgaggtcgggagttcaagaccagcctgatcaacatggagaaaccccgtctctactaaaaaaaaaaaaaaaaaaaaaacaaattagccaggtgtggtggcacatgcctgtaatcccagctacttgggaggctgaagcaggagaatcgcttgaacctgggaggtggaggttgcagtgagccgagatcgtgccactgcactccagcctgggcaacaagagcaagactccatctcaaaaaaaaaagaaaaagaaaaagaaaattctatccaagcatgcagatttgaaccatgtagtcattattgtggattaaggatggaaagcctgtagcagattcaatttcttggaatgataaaatgctaactttgtcatgcaaaattgttactcagagcttaagagtttgaaattaatcatgggggccagaggctgcttcaccataaartgattaggcaattgcacacaatctaacatatataagacagtcttgatagctactgaactagactacataactagacaaacataagctttccactaaagaatgtgagtgacatagcccttgcaaatggacacatgatttttgctgtcctggaggggcagtgaat

SEQ ID NO: 85118 - DNA, 633 bp, Homo sapiens
agcactttgggaggctaaggcgggcagatcacctgaggtcgggagttcaagaccagcctgatcaacatggagaaaccccgtctctactaaaaaaaaaaaaaaaaaaaaaacaaattagccaggtgtggtggcacatgcctgtaatcccagctacttgggaggctgaagcaggagaatcgcttgaacctgggaggtggaggttgcagtgagccgagatcgtgccactgcactccagcctgggcaacaagagcaagactccatctcaaaaaaaaaagaaaaagaaaaagaaaattctatccaagcatgcagatttgaaccatgtagtcattattgtggattaaggatggaaagcctgtagcagattcaatttcttggaatgataaaatgctaactttgtcatgcaaaattgttactcagagcttaagagtttgaaattaatcatgggggccagaggctgcttcaccataaagtgattaggcaattgcacacaatctaacatatataagacagtcttgatagctactgaactagactacataactagacaaacataagctttccactaaagaatgtgaktgacatagcccttgcaaatggacacatgatttttgctgtcctggaggggcagtgaat

SEQ ID NO: 85119 - DNA, 608 bp, Homo sapiens
tttcatttcctgttaaaattccatatttcaaatataattctattataaatcaatagccagggattttctctgtgtgaatctgacacaaaaagtagcaactgagaattgagttttatgtgtagcaccagttattgctctgtttcctcttctccaaaagtgtgatagcaaacactgattttaaatcattaatacactaaatacttttgagcacctgagacatgccaggcactctgcatgtagttattagaatatcatggaattaaaagacaggtattttgtagtwgggaaaatggagagtgatcaagtaaacacataaactaaaaagatctgaggaattcttagtgcaatgaaggaaaggaacaggatgataaaatagtaacaccccaggagaggccatttttgatggagtggtcagggacgtcctctctgaggaggatgagaataagctagccatgagaagaccgggggaaggaaagaacagcatgtgcaaagcttagaggtgagaaagggtctggtgtgttaagaaacaaaaaggagctagtgtggatggagtataatgagcaaagagaagatggtatgagacagggagagtccagatagtgtcaggc

SEQ ID NO: 85120 - DNA, 608 bp, Homo sapiens
tttcatttcctgttaaaattccatatttcaaatataattctattataaatcaatagccagggattttctctgtgtgaatctgacacaaaaagtagcaactgagaattgagttttatgtgtagcaccagttattgctctgtttcctcttctccaaaagtgtgatagcaaacactgattttaaatcattaatacactaaatacttttgagcacctgagacatgccaggcactctgcatgtagttattagaatatcatggaattaaaagacaggtattttgtagtagggaaaatggagagtgatcaagtaaacacataaactaaaaagatctgaggaattcttagtgcaatgaaggaaaggaacaggatgataaaatagtaacrccccaggagaggccatttttgatggagtggtcagggacgtcctctctgaggaggatgagaataagctagccatgagaagaccgggggaaggaaagaacagcatgtgcaaagcttagaggtgagaaagggtctggtgtgttaagaaacaaaaaggagctagtgtggatggagtataatgagcaaagagaagatggtatgagacagggagagtccagatagtgtcaggc

SEQ ID NO: 85121 - DNA, 608 bp, Homo sapiens
tttcatttcctgttaaaattccatatttcaaatataattctattataaatcaatagccagggattttctctgtgtgaatctgacacaaaaagtagcaactgagaattgagttttatgtgtagcaccagttattgctctgtttcctcttctccaaaagtgtgatagcaaacactgattttaaatcattaatacactaaatacttttgagcacctgagacatgccaggcactctgcatgtagttattagaatatcatggaattaaaagacaggtattttgtagtagggaaaatggagagtgatcaagtaaacacataaactaaaaagatctgaggaattcttagtgcaatgaaggaaaggaacaggatgataaaatagtaacaccccaggagaggccatttttgatggagtggtcagggacgtcctctctgaggaggatgagaataagctagccatgrgaagaccgggggaaggaaagaacagcatgtgcaaagcttagaggtgagaaagggtctggtgtgttaagaaacaaaaaggagctagtgtggatggagtataatgagcaaagagaagatggtatgagacagggagagtccagatagtgtcaggc

SEQ ID NO: 85122 - DNA, 535 bp, Homo sapiens
gcgtgagccaccgcgcccgggcccttaacttggttatgaagctgttgttaacttgatktctttgcaggaggtggggcagtgatcagtgggacttcttatttagcagttttgctctacctcccctcccactcatttttgatgccattcttattatatctgtgttcaaatagttttattgctgtgttttctgttttatcttattggttaacttgtttccttctgaatcaatactagacggcctaaataaagctttagcattagtcttgctatctagaaagttgtttctacataataatcttagctagtctgtttcttttatacattaatgtaagatgtagaatcagcttaagtttcatttaaaaagagcaagcaaataaattaacataaaaccctgttaaagttagaataattgcatagattaatttgtggagaatttatatttttactatatcaactcttgctttttataaatatttattaaggctttctttactgtttcctaatgcagtttataatttttgccataaaaatcttg

SEQ ID NO: 85123 - DNA, 651 bp, Homo sapiens
tctactaaaaatacaaaaattagccaggcatggtggcacatgcctgtaacccttgctaatctccaatctcatgactttaaatagcatctgtaccccgataattgtcaaatttacatacccccagcccagatatctcttctgaactatatataatctcacatatccaattgtttttgcacagtgtccgtgtgggcctaataggaatctccagtgtaatgtcttaatctgaactccttgttccccaaacctattccacccacattcttgatcatatggaggctacttggaaggctgaagcaygagaatcacttgaatccaggaggctgaagttgcagtgagccaagatcacgccactgtactccagcctgggcaacagagcaaaactctgtctcaaaaaataaaacaaaacaaaacaaaaaaccaattagctctctggaagaaaaaaaaaatgccctgatttgtagtgtttgccagtctcagtggtgtaaatacttgcaggcctgtctcaagcttcctgtctgatgtctctgaatgtggaacaggaaagagacgggggtgggaggggaggggaggggggctggctctggcacaacacggcaaatacgacccacagctaataaatgcaggagccaggatgtgagcccggtgtgt

SEQ ID NO: 85124 - DNA, 651 bp, Homo sapiens
tctactaaaaatacaaaaattagccaggcatggtggcacatgcctgtaacccttgctaatctccaatctcatgactttaaatagcatctgtaccccgataattgtcaaatttacatacccccagcccagatatctcttctgaactatatataatctcacatatccaattgtttttgcacagtgtccgtgtgggcctaataggaatctccagtgtaatgtcttaatctgaactccttgttccccaaacctattccacccacattcttgatcatatggaggctacttggaaggctgaagcacgagaatcacttgaatccaggaggctgaagttgcagtgagccaagatcacgccactgtactccagcctgggcaacagagcaaaactctgtctcaaaaaataaaacaaaacaaaacaaaaaaccaattagctctctggaagaaaaaaaaaatgccctgatttgtagtgtttgccartctcagtggtgtaaatacttgcaggcctgtctcaagcttcctgtctgatgtctctgaatgtggaacaggaaagagacgggggtgggaggggaggggaggggggctggctctggcacaacacggcaaatacgacccacagctaataaatgcaggagccaggatgtgagcccggtgtgt

SEQ ID NO: 85125 - DNA, 922 bp, Homo sapiens
ccctcggtatttgttccaggctttcccctccgtagtgtgcctggcccccacacgacccactgcagggagtcaggttacccctgggctcaatcccatttcccttcctccctcatctcagamccctcatccctgcccggcttcgctgggaggggaagaagaggaacggtcctggtgagatgcctgagaggtggatggggaggcaggcccaagtggaggtgagcagacagctccgaagagggaccatggcctcccccagcgcctccattacagctggcgaacagtaagaccaggagcctgggagtcaggtggattggggcctccactgcgccctgcccttacttgctgggtgacaccaaacctctctcaacctccaagtcctcatctgtaagaatgggtggtggaatagggttgcaataggcagaaaagagtgggcaggacattccaggcagagggaacggcatgaacaaaatgagcctgatgaaaacaaaggcgtcctgggaattagagaggtttggagggattgaagcgtagtgggtggggtgagtggaagaagggaggtggggcctggagaaggctttgtttgctaaggctttggtttctctaccctgaaagcagggggcgccactacacagctttaagcggcagaaaaaacacggtgggagctgtgtcttaggaggatcctcttggcggccacaaagtggaggatggatagaaatgacggccagttcaagtaaaggccagattcccagcctccttgccccacactggttcagcagctgagctgggaggaatctgcacatttaacaaatgactcaactgattctgatgtgcctaagtgttgcacgttgagaaacatcaagagtccagatgagacctttgtgatagaacagttctgtatcttggctgggcgcggtggctaaca

SEQ ID NO: 85126 - DNA, 994 bp, Homo sapiens
taatattgaaatatgcattatgggtgagctctaaatagtaagtattctgtatttatagagtttgggttgtgcctgtctcccaaattttcattgaaattgaactgtacttgcaggccacctacacgggtggggttttgagcagcatttctcaaatgtgaattatatataaagcatcattaatctggttctagtgcatgttctaatcagtaggtctgagaaggctctgcattttcttgaaacctcttaggtgatgtggatgctactgaaaaaaaaaatcacaaggaaaaaaagatcgtttccctttatcaccatatgaattaattcttctgccatttgacactgttactatctgcaacagttcttgcagtagaggatgcacttcaaagtgcactgctttactgtctcactggaattctaaaaatctaagctttatctttttaacattaagctgtgtgggaatgtagcaacctcctgggtggtggggtggggggcatcttcarttatttaggtctcactggaaagtttgagatcagagtttggtaggtggtgtaaggggacaatgagtaagggagagaaaatacaggactgacttggggcaaaaaacgcctgataataatttgtgaagcacattttcaaactcatttattccttacaaggatcctaagaggcgggtattatgtccaggttatacctggaggcttaaatgaagaaacatctacaagggcacacagtttaatgaatggctgaggtagaattggaattaaggtgttccgcacccacagccctcagtcgttatacacctgaggatgtaaattcctgtgctgggtgatgttagatttgtgtgttttatctactaaaatgttatttatttatttatttatttgagacatcaaatcgttttgctctgtcgccgaggctggagtgcagtggcgtgatctcagctcacttcaccctccaccttccaggttcaagtgattctcctacctcagcctcc

SEQ ID NO: 85127 - DNA, 724 bp, Homo sapiens
ccaccacaaactactaagctcagcttggaatcccaattaggcacttaaaaaaaaaaaaaaaaaagcacaaaacctgcagtgggtagggcctattcatttaggcatccaacagtcttccagcttttcaaagacagacacaggattattcctggattggtcaaacataacgaagtattcagaatgaatattctcyaataattgcatataactataaacagaaaaatgacagaccagaaaaacacgattctaattcttcacaaacctttcctaaaaaattagccaaataaaagttcgaaggttttctcttgcctagagacatctaaaagtgttattttgggatgttacctgtaaaaaaaaaaaaaaaaattggtttgaccctgagagattataataaatttcaaaaaatttgaagtggaagtctacattaaatgactcaggaatttgaagtcagagtacataggatacacaagatttacatcagtattcatcttaattatgatcaagcagcccaaagttagaatttcaaatttccccaaaaattgatagttaaaatggttttctccaaagtgaattcttttgcaagatgaacatttaaaaaaaaaaaaaaaagaacagaaaaagtacaaactacagaacctgcctgcgttatctacagattacctaaagttcccttagaaacagataaccaggaaaatcaatataccatgatattaggtacaccttg

SEQ ID NO: 85128 - DNA, 724 bp, Homo sapiens
ccaccacaaactactaagctcagcttggaatcccaattaggcacttaaaaaaaaaaaaaaaaaagcacaaaacctgcagtgggtagggcctattcatttaggcatccaacagtcttccagcttttcaaagacagacacaggattattcctggattggtcaaacataacgaagtattcagaatgaatattctctaataattgcatataactataaacagaaaaatgacagaccagaaaaacacsattctaattcttcacaaacctttcctaaaaaattagccaaataaaagttcgaaggttttctcttgcctagagacatctaaaagtgttattttgggatgttacctgtaaaaaaaaaaaaaaaaattggtttgaccctgagagattataataaatttcaaaaaatttgaagtggaagtctacattaaatgactcaggaatttgaagtcagagtacataggatacacaagatttacatcagtattcatcttaattatgatcaagcagcccaaagttagaatttcaaatttccccaaaaattgatagttaaaatggttttctccaaagtgaattcttttgcaagatgaacatttaaaaaaaaaaaaaaaagaacagaaaaagtacaaactacagaacctgcctgcgttatctacagattacctaaagttcccttagaaacagataaccaggaaaatcaatataccatgatattaggtacaccttg

SEQ ID NO: 85129 - DNA, 603 bp, Homo sapiens
aaccttttgcaaaccaaaaagtatctgagacaggtctcaatcaatttagaagtttattttgccaaggttaaggacatacctgagagacaggtctgtgtctctctccaaagatgattttgagggcttcaatatttaaaggggaaaagagggctggagtgaagaggaggaggctatggtcacattactgaatccacattgcaggataaaaggagcaggggggggattaggcaatgatacattaaatatctctttccactcagtaaattggcactttacataagataaggtgaatataaagtagctacctgtggaaatatttaaccctttatctgtagctatctgctyaggaacaaaaggaaaggcagctttctgcatgactcagctttcagcttaattttttttcttttggcagagtgagttgggggtcttaagtttttattttcctttcacactttaaacacagactctaacatatattaggcaccttttctaaaacagtcgactgctaaaagtgaattttcatctttttttccctaatttattcttttttttttttttgtagagacaaggtctcactatgttgtccagactgatcacaaactc

SEQ ID NO: 85130 - DNA, 755 bp, Homo sapiens
atgctagttggcagtatttgattgtaagaaatcaataaattgtgatttaaaamaaatcagcaaacaacaaaaggaaaaactaaaaggacccactttaacaaggtgtaaaatccagtctccacaaatgcaagatgaacagtcaataaaaaaatgtaactgcctactcaaaccaaaaccaacttttcagaggaagaatccggcatctcaacaaactatcaattcatgtgtccagtatacaatccaacattactagacatgggaagaaacagaaaactgtgatccaaagaaaacagaaaaacaaacaacagaaacagatgcccaaatgttaaaatacgcagtttaaaagcagctattataaatacgttcaaggatattatatgttcaagaatatgttccagaacaaatatccttgttcaaagatacatattcaaggataaatatgttgttataaatgtactcaaaacagtcaagtaaatagagaatatcacaaaaatgaaaactataggccgggaacggtgactcatgcctgtaaagcagcagtttgggaggctgaggcgggcggatcacaaggtcaggagatgagaccatcctggccaacatggtgaaacccatctctactaaaaatacaaaaatcacccgagtgtggtggcatgtgctgtaatcccagctacttgggaggctgaggcaggagaatcgcttgaacatgcgaggcagaggttgcagtgagccgagatagcgtgactgcactccagcct

SEQ ID NO: 85131 - DNA, 656 bp, Homo sapiens
atgtagagccactgagctgcgggagcaccgggctggggctgctggaggcagctcactagctggacttgaaggcagggggctgtagcctggggctgctgaggttgccatgggcaactggagaaaaaggttagagccaagaggctctatatcaagctgggtggcagccacactttctgcagagttttcagctatatgaaccggcaaatcyccactttttgttaagccattttctactgttttttctaacgagccaaagagtcctaggggctacacatctatttggtctttatatacatatttttatacatgtgtttccctacagttttatgaactccttgggagtgggtatcctattttgctcatcttaccatcctcagtagttgagatattattaaaatatccttttactttttaaataaatataactgtaatagtagatggcaaaacaataattgacaaccctgcaattatcctcagtttttgttgtgaaacttaaccagtctttagaatcggaatggctgtgagcccctgcacatgtattcagttcaatacatgctaagtccaggtggccaggcaatcagccaatgggttaattctgctcacaggtgctggcaacactctcttctttcccctgacctgtaggcctgtaaggggcc

SEQ ID NO: 85132 - DNA, 656 bp, Homo sapiens
atgtagagccactgagctgcgggagcaccgggctggggctgctggaggcagctcactagctggacttgaaggcagggggctgtagcctggggctgctgaggttgccatgggcaactggagaaaaaggttagagccaagaggctctatatcaagctgggtggcagccacactttctgcagagttttcagctatatgaaccggcaaatccccactttttgttaagccattttctactgttttttctaacgagccaaagagtcctaggggctacacatctatttggtctttatatacatatttttatacatgtgtttccctacagttttatgaactccttgggagtgggtatcctattttgctcatcttaccatcctcagtrgttgagatattattaaaatatccttttactttttaaataaatataactgtaatagtagatggcaaaacaataattgacaaccctgcaattatcctcagtttttgttgtgaaacttaaccagtctttagaatcggaatggctgtgagcccctgcacatgtattcagttcaatacatgctaagtccaggtggccaggcaatcagccaatgggttaattctgctcacaggtgctggcaacactctcttctttcccctgacctgtaggcctgtaaggggcc

SEQ ID NO: 85133 - DNA, 599 bp, Homo sapiens
tggagaagtccttgattgttgagttctttgaccacattccaagaacccagcagtgcctgcttggagggtgaccactggaagccaagactcgtctaggatatgttgcaaattgcccaagagttaatagcaactttggcggcatgacatgttacacaagagctcaaaatcttgaaaatctatctaggtgctgagctgtgtaaataaaaccaagtacttctgcagctcctcatgttaattcaagtagaagtttcctaagtgcttacccataggtccgacttgccatcagtgggcaggcttgggtgaccatccatcaaacttatctcctgggaggataacattgatcctttgtgcaccagcagcagaggaagaaaggctcctgtcggccatgaggtggggagacctgctcttacccattcctcttcctgctycccgcaccattaagaactgaatttggtctgggctgtcttagaaactttgctcagtctgggatatacgttgagcacttgagacatcaggggtcccaagggactcttggtgaatttcattctctctaaggcacagtgtaggagcagtatgatccagcatgccactgcagctcc

SEQ ID NO: 85134 - DNA, 798 bp, Homo sapiens
ccctccccggcctcagacttccctctcccacctcctgtggaggctgccagcaagctctgggcatgcccagcccgtggagagaaggaatcccagcaacctctgccctgcctccctctcagaacgatgcccccaggaacgtgagtctctggaaagccacgggtcggcttgtcaagcctctctccagaaaacagagacatgaagtgaatgccaatgatccccacacccrtgaggagggggatgcaattatagaaaattctgcttacagttcagattcaatatttggaagggataatcctgaaataagagattgcctgatttctttcccaagcctgtgaatggttcattagctcctatttgacatttgatggttccatctgattggctttattgtggagttggactttaagaaaatccccaagacagagcaatcaagtttcacaatgatccctaactgcaaatttgaaaacacaaatggcagctgcgtcttggacatcaatcccatgaatgcggtgggggatttgtatttcatccccacttaatgaaactcaatcctgcttggcaaatcggggcccctgactcagcagttaggatctcctctgcagctcagcccgggtgctgcaaacaaagaacccccagacttgaacatcagcagagatgcggtgcatcctgatcttgggcagggccacttaggcactggggccctggaggaaggagaggtctctgaggaatgtgcaattgaggctgtactctctagaggatgcagtctaactgtggaggtgggtcccttgcaccaaaaac

SEQ ID NO: 85135 - DNA, 775 bp, Homo sapiens
cactataacattaaatgttcatgcctaaaatctagcatttcacatttcctagattgcgggccaatcatatttgctgagtttgataaatccaaagagtgtgctatatcttctggagtggtatgaggtatagtctgtcttcttacccccactaattaaaaatacatttctgaataattggtgaacttaaaccaatcatccgtgttctttaatcagcagagggtcacacacgaggctttctgcaaacctaataggtgcagcatgattaatcattttaatttttttgagtaaaaaaagatcaccaaatgctagcatttcaaggggagatttaacaaggaatacttgcaaatggaattttaatacaagagtacagatcaaaatcagatctccgaatagacataaggatttttactttaaaaaagatgaatcatgatttatttatttatttattttttggtgctagagagggaaagagctgttgtttgaatgaagcactttacacgtgttgcctctctcttttatgagaactatgaaagtaggtgttgtgattttcagaagaggacataagcttggatggtaagcaacttacttgtggccacagctgattaagtagtggaaaaacatccaaacttgtatccacctcactgcaaagctggtgagatcaacatctcaaacaaaatgcaayatctcacttattacagactcactgttgagctttaaaatatttttttgactgtttctctttccttcgatttacttatttttctcctactctttt

SEQ ID NO: 85136 - DNA, 1112 bp, Homo sapiens
gacatgaaaatgctcagtttaagaaaaatgtttcagtcacataaatctttgctatatagtattgagggcatttaaatactaagaacataaattattatgttaaatgttgtcagccaagtgtggtggctcatgcatgtaatcctagcactttgggaggcctacgcgggcagatcacttgagtccaggagtttaagaccagcctaggcaaattagccatgcgtggtggcaggtgcctgtaatcccagctatttgggaggctgaggcaggagaatcgcttgaacccaggaggcagagtttgcagtgagccaagataatgccactgcactccagtctgggtgacagagtgagactccatctcaaaaaaaaaaaaaaaaacatcctaggcaacatatggagaaactgtctctacaaaaaatacagcaatcagccgggtatggtggtgtgtgcctgtagtcccagctgtttaggaggctgaggtgggaggatcacctgagcccaggatgtcgaggctacagtgagccaagattgcaccactgcactccagactgggcaacagagtgagaccctgtctcaaaaaaaaaaaaagtgtcgaagatgaacgatgttatcaaagacacaaaacaaacctaaaatattccatcagatattaaattctgactatctgttaaagaaccaagaaacaagaaaaaaatcccaaagatatctatttgtgataactagatattataaaaggttcaaaatacaaaataaaacaaaataatgtgataatatatacttcctaaaattcacaaatctattttattttagaggaacaaaaaatgaagtgaattagaactatcttggatgttaggatataatcttagatgcagaataatgcttaggaaaaaaagactaatcaagctaaccaaggggaaaacatttattttaattaaatcttcagctttttgaaagcctaaaaataaaattatggaaacaggaaaagagaaaaaagacaaaaaacatttcatctttctaaaagggaaaaaactgacagcttttaccaagttcattttaaaagacaatgattaaacaaaatwtcccccacagcatcagtgactgccacatccaaatcc

SEQ ID NO: 85137 - DNA, 1844 bp, Homo sapiens
tggtatatatataaaacaataaaaaataaagtagaattttttcgaatagctattattgaataccagggatgagttaaaacttctccacatatcatattatttaatcctcacagcaaaaccattaagcaggtattttttatctccatttaataaatgatataaaaacagtttatgaagatacagtaacattcttaattgtacagctgtgatacttatagcaagtaagtagaggcaggattgaagctgaggatggctgacttcaaagaccstacattttactactaatttatgtagtttcccaagagctgtttttaaaatccatttaatatgtctaatagctttagccctacctattacaaataatgggttacatatctaacacactagctgaaaagttcgtttctgaaaaagtctcttttctgtgtcatgtggtcaaagagttttatatgagtaatggatatggtcttgtagacttttggataaatccttaaggaaaaagccaactgtgtattttcaatacactgaaaagcagtgtattagatatatagctgaaattattataatgataatgccttagatttataagcactctacagaatccaaatccttttgtatttgttttctcattctaatccttccaacaaactagaaagtaggcaaataaggcatctggatccacgactggggaaaactgaggcttcatgaaattaagagatttttccaaagtcatgaaacgaaaataaatccagaagaaacggcaaatggaatgttttacctatgtaaattgctctttgcaaatcaacacttcaaaattccactctgcggtcaccttttaatatcttatgttattttctcagtcgcttcttttcaattacgctcacttttctccacagtacttttgcatatttcagctttttatatatactgtgctcctgttagaaagtgttctgcactaactgataaaatccaaactacttttgcaaagcctgaaaaggtctagacacatgataccaatgctattcttgggctacccatttaagttatgtatcaagtctaaatttaatcaaggccacattttatttatacatttcatgcattaaactcatttaaacttttagtcagatttcattagaagaaatactaccgtgtacatcatgcagtagtaaagctaatgtgcttcaagaatttgaaaggagttggagatcgggggtctgatttcaaaatttctttttctttctctccttagtgcttgcagcaggtctgtgagcagcacacagtttgtttcctaggacactaatacagtcagcatgctctgtacaaatgtgtaaacacagacattccctgtaatcagggaggttggtgtcttaaggcaagattatgtttttttaggaaatgcaatttatgttcaggattaaatttctcttgcagactgataacgtctgaggttcagggagatgataataagtgttgtgtcctaaactgcctgccctgaatctgaagccttgaattagtcttcctgtatagccctcattcttatgaccccaaattaggtagttcttcatgtcttagaaagatgagagaagtaaataatataaaaagacaaaatacactttaaaaaatgtaaagcatctataaacctcatggtggttacaaggaaatacagagacataaggaaaaaatacagatgacaccatggctaatatccttcttcacaattcaggaaatttaaatttgtgtctggtactttggtattcgtgaaattgagatggagatgggcagaaagttagacaatattcttataatcgctttagtcttctcatggaatgatcctaacactataaaac

SEQ ID NO: 85138 - DNA, 565 bp, Homo sapiens
tagagacagggtttcaccatattggccaggctggtctcgaactcctggcctcaagtaatccgcccgcatcagcctcccaaagtactggaattataggcgtgagctactgctsccagcctcaacttatttaaaatatttaaaactattagttttcttaaaattttcataaaaataaatacaagacattaaaagattacctctgcatcagtgccatacccctaatgtaagtaagctattttgcttctgtcacattattatcattgtggaccaataaagctatcgcagtggttctgaagtaaaagattggaattcattcactgataaagtcaggttaacaattttagagaaaaattcataatcattttcttaaatacaactaatttaaaatgaacctcttcagatacaatggtttctttatgatttttaaaaacggttaattcaaacaataaacaataatgtagtatgtacaaataatttgaccacagattcttatggaatgtcaaaatgaaaaaaaaaaaaacccacaataacgtactacaggagttttttttaaaaaagcattaag

SEQ ID NO: 85139 - DNA, 835 bp, Homo sapiens
gaccacttctaccatttctgccatagctattacttgaaacattactatttaacatttgtttttaaatcaacacatttttaaaaacacttaaataggcactatttactttagccttatcctaagcaacagtatctgtaatatcatgggttttgtgtgccccatagaatgaactgctagacgtatcacaccaggagaagcactagcaaaaacggtagcccaatacctgatacataatagtatatctctctctactcccatgttaaaccagatactttggggggaaactgagtctttacaatctatacctagggaagataagtcattttttaagttaagcgaatgtaattggcaattaaaaacagaagaaatttcctgaggcatcgcattattaataggcaattctttgggtagtaactgcaaaaggagctcaaggaaagaggagaggacatcatcctggaaattaggaacagtgtcttacccagctgtgatccctagagctcaggcaacgtctggtaactggtgaccccacaaaagcctttctcaaaggattgaatgccgcaatggttaggaaagacttcagagataagttagaagttatgctcggccttgaacratgggtacaatgagtagacagaaaaaagggcatctcatgctgggagaaaaatgagagcaaaagcatctgggatttgaactgttcttgaaagagcatggtggagcatggcagagtacaggctaaggaatggaatcacatgaacaaaagcacaggggtgggaagcacccagctgtgtggcaggaagcaccacggggctgtgtggcaggcatgtggtgggcaatg

SEQ ID NO: 85140 - DNA, 520 bp, Homo sapiens
ttcatttctcttcatagctgaatgatatgccactgtacagatagaccacagtgaactccttttttttggggtgacagagcaagactctgtcacccaggctggagtgcagcgatctcaactcactgcaacctctgcctcctgggttcaagcgattctcctgtctcacccttccgagtagctgggactaaagacatactccaccatgcctggctaatttttgcatttttagtagagacagggtttcaccatgttggccaggctggtcttgaactcctgacctcaaatgatctgcctgcctcggcctcccaaagtactgggattacaggcgtgagccaccgygccaggtaatgaactccttcttaactagtacagtacaaggcctttccagcagccgtttaacagatacttgttggatggaggtggggcagacaggactggcatttcccatgagaaatggcccctctctcccctacacctcatcatgccaaacaacacagaagcaggagaggctccgggtccc

SEQ ID NO: 85141 - DNA, 925 bp, Homo sapiens
cgtataataagagattaatccaagccaaatgattgctaatagattgagttggtggtttttctaggttctcctgcaactcaccacagtgctgttagatcttttacatatagaacttcctttgctagaattggaaggggaaaaagaatcccagacttcagtcaccagagttcactactctttatttcaccacctcttcttatcaacatcatatctcaaagtgaagtataccacacttgtccatttccaccttggacatgataaatgagattaacatttgtacgtggatatacagagagagatactaactaggggataaaatagcactgagagcctcagatataagtccttgagcagaagagaacagatactgttggcactctagttgcaagggtcctgtgtctctgagttgggcatgcaayggatataggtaacaatctactttttatctgccgttctttcttggggatttggttttcagaaatttcacttggtgcttcatagattttcatagttattgtactttttaaaaatctcttcccttgggttaatgtatatggagggatgagaattatgcacaacaattagccaccatcctaacctgcagattccttaatgggatctttaaaatttcttttcagatatcaaactaaatgttcaagacatcaagggtattgcaattaatagttttcaatttcaataaatatctttttatactcccttaacagggtggaaagaagctctacactgtagaataacacccattggttttacattttccatcattttgttacttgaaagaggaatgaatcagcaagctcatcacttgtaactttctacatggtacctcatagatctactaaagtgtctccctgggagcgacagaatatgtagggctaagagatgtgaagaattatattcatacatc

SEQ ID NO: 85142 - DNA, 925 bp, Homo sapiens
cgtataataagagattaatccaagccaaatgattgctaatagattgagttggtggtttttctaggttctcctgcaactcaccacagtgctgttagatcttttacatatagaacttcctttgctagaattggaaggggaaaaagaatcccagacttcagtcaccagagttcactactctttatttcaccacctcttcttatcaacatcatatctcaaagtgaagtataccacacttgtccatttccaccttggacatgataaatgagattaacatttgtacgtggatatacagagagagatactaactaggggataaaatagcactgagagcctcagatataagtccttgagcagaagagaacagatactgttggcactctagttgcaagggtcctgtgtctctgagttgggcatgcaatggatataggtaacaatctactttttatctgccgttctttcttggggatttggttttcagaaatttcacttggtgcttcatagattttcatagttattgtactttttaaaaatctcttcccttgggttaatgtatatggagggatgagaattatgcacaacaattagccaccatcctaacctgcagattccttaatgggatctttaaaatttcttttcagatatcaaactaaatgttcaagacatcaagggtattgcaattaatagttttcaatttyaataaatatctttttatactcccttaacagggtggaaagaagctctacactgtagaataacacccattggttttacattttccatcattttgttacttgaaagaggaatgaatcagcaagctcatcacttgtaactttctacatggtacctcatagatctactaaagtgtctccctgggagcgacagaatatgtagggctaagagatgtgaagaattatattcatacatc

SEQ ID NO: 85143 - DNA, 925 bp, Homo sapiens
cgtataataagagattaatccaagccaaatgattgctaatagattgagttggtggtttttctaggttctcctgcaactcaccacagtgctgttagatcttttacatatagaacttcctttgctagaattggaaggggaaaaagaatcccagacttcagtcaccagagttcactactctttatttcaccacctcttcttatcaacatcatatctcaaagtgaagtataccacacttgtccatttccaccttggacatgataaatgagattaacatttgtacgtggatatacagagagagatactaactaggggataaaatagcactgagagcctcagatataagtccttgagcagaagagaacagatactgttggcactctagttgcaagggtcctgtgtctctgagttgggcatgcaatggatataggtaacaatctactttttatctgccgttctttcttggggatttggttttcagaaatttcacttggtgcttcatagattttcatagttattgtactttttaaaaatctcttcccttgggttaatgtatatggagggatgagaattatgcacaacaattagccaccatcctaacctgcagattccttaatgggatctttaaaatttcttttcagatatcaaactaaatgttcaagacatcaagggtattgcaattaatagttttcaatttcaataaatatctttttatactcccttaacagggtggaaagaagctctacactgtagaataacacccattggttttacattttccatcattttgttacttgaaagaggaatgaatcagcaagctcatcacttgtaactttcyacatggtacctcatagatctactaaagtgtctccctgggagcgacagaatatgtagggctaagagatgtgaagaattatattcatacatc

SEQ ID NO: 85144 - DNA, 641 bp, Homo sapiens
tgtggaaaaatacatgtcttgttatactgcttgttttctgaatgagaaggttgataactgaaagagttacactgagatatgatactagactgaaaagaatcatctacacctggacctgatttagataccaaaatcttcaagcctctaggctaatccaatgttgtcacaggataagactttgatgggtttgggaacaatggtgagggtattttgcaaataagagaaatttttttgtttgtttgtttgttttttgtttttttttttttttttttttggkgaggccagaagacaatgtgactgatatggtgtgaatgtgttctccaaagtttgtgcattgggaacttaatctccaatgcaacagtggtggaaggtgggcctaataaaaggtaattaagtaatgagggacctgctctcattagtgggttaatgtcattattgcagaagttggtttgttatcatgagagtgggtttgttaaaaaagtgagtttggctgcctctcgcttgcttgtgttctcttgcccttccttctgttttccaccattggatgttgtagcaagatggtcctcaccagacggaccttggacttccagccctccagaagtataagaaataaacttttttttttttttatgaattaccta

SEQ ID NO: 85145 - DNA, 915 bp, Homo sapiens
tatgcatacagagattggtattcagccaaaggctcaaggaaatgcctatcctgatttatggaactttttctccatgtagttcccttctctcaagcactctaccctgaaatttattgcctccctgaactgtcattttttttttttttgtctcctcaactcaaagagatcccaaagttttgttttcattgtccctccttatgtagtaatcttggggttacttcccagtagcaagcttaggtgactttagggttcacatcttatgtttctgttttctaagtgattatttgtttgtgctctatttgggtggaaaatagttattttctatattttctccagttttctagttttttacagtgaaaaaaagttattctggacttactacctcgttgacagaagaaattacactcatgaatagaagcagaagtaagagtaaccttcatttttgggggaacaaattctagtttggtacttgttttaacacttcaaatatgtcattaaattgtgaggcatgttgttgctattttgtaggttaattgttaatgtgtcttctttcttgctgctttaaaaatgtatctctttgtctttcatttttatttgttttactagaatatttctaggtggcattctttgaatttgccctgcttggcattcatagagtttcatgattctggaacttcctgactttcatcagttctggaaaaaggtagccagatctcttaaaacattttttctgtcctgttctctttctcctccttgtcagattccaattacacacatgctagatcgttttactataycacaagttccatgctcttttatatatatatccatcctattttccctccattttctcatttaatggacctatcttctgctttactaatcttctcttctgttgtgtctaatgtgctttta

SEQ ID NO: 85146 - DNA, 1090 bp, Homo sapiens
tgcatagaaaaaaatagaacatatataaatagaaaaaacatatgtctaaaggtttacagtgattatctctggatgggattatggttattttctataattgtatgattttctacagtgtcacaagtctttttattattctgaaataggctgagtgcattggcacgtgcctgtaatcccagcattttaagagtctgaggctggtggattgctcgaggccaggagttcaagatcagcctgggcaacatggtgaaacctcattgatacggttaggctttgtgtccctacccaaatctcatcttgaattgtaatccccgggtgtttagggagagacctggtgggaagtaattagattatagggcagtttcccacatgctgttctcctaatagtgaactctcatgagatctgatggttttataaatggtagtttttcctgcactgacacaggcattctctctcacctgccaccatgcctcttcccccaccaccatgattgtaagtttcttgaggcctctccagccattcagaactgtgagtcaattaaacctctttctttataaattatccagtctcgggtatgtctttatagcagttgaaaatggactaatacatttgtctctgcaaaaaattagctgggtgtggtggcttgcacttgtggtcccagctatttgggaggctggggtgggaggattgcttgagcccaggtggcagaagatgcagtaagctgtgattatgccactcaactccagcctgggtgacagggtgagaccttccttgtcttaaaaagataataataaaataaaataaaayaaaaataaaaccacaatttagtgggcatttattacactgtatgctctcataaattattctatttcattatcacttccctttttacagctgaggaaactggattttaagaacactttattttcccaaggtcagcccactaatatgtggcagagtcagaacttgaaacttggtccatctgacatgaaagcctgagccatgatgctagttttcatctttgttgttttggtttttcagggcatgctcagatgttaagtgtaaagtctgacaagttctaacagatgc

SEQ ID NO: 85147 - DNA, 739 bp, Homo sapiens
  misc_feature (1)...(739): n = A,T,C or G
taatttaagaaaatagtttattatttaaaatatcttagaaaaatcatgtaaaatcatcaattttatgacaaaattaattttttttttttgagatagagtctcgctctgtcgcccaggctggagtgcagtggccgantctcggctcaccgcaagctccgcatcccaggttcacgccgttcttctgcctcagcctcctgagtagctgggactacaggtgcgcgctaccactcccggctactttatttttgtatttttagtagaaacggggtttcacagtgttagccatgatggtctcaatctcctgatctcgtgatccacccgcttcagcctcctgaagtgctgggattacaagcatgagccaccgtgctcggccaacaaaatttaaaattttttaaattgacagataacattttagctgttgtattgtgtacaacatgattagaattgctttttatgtatgacgtaagggtagggatcaagattttattttttttcccttaagatttattattgctcctgagcaagttattaaaaaaaaaacttgttttccatcttatcgtaagttaaatgatcacgtatgtgtgtatcagtttctggtctctagttctatgtctctggtytatttttatactcttgtaataattccacatttgtaaatcttgcattgtaataagcattgtacctgatagtgtcagtcctacagctctgttcttgaatattattttgtctgtgcttaatc

SEQ ID NO: 85148 - DNA, 852 bp, Homo sapiens
gaaataaaaaatacttgcacgttaaattccgttttaaaggtatttgtacctgaatttccttttcctggaacawagccatgaccatcttattatcaaatgatctttatcttcatctccaatgatattattactgagctttgcctgaaaacactacccaattgtgctgcaataaacaaagtgaccagagctgaaatgaaaagctaaaaacaaaagatagtaagaataagaaatgtagataatacagaaaacatgcaggtaaagaccacggctttggggactttaaaaggaaagaaaagcaaagctgagagataatggagaaacagtcctcagatttagggagatcttggaagcagtaacagcatcagagaaagaagaaggtgctgatgagagagggctcaacccagacagaagagagcaagccacatggggggaaaagatggggggaggagaatcagactggtgtcattttctggtcattactgggaaaaaatgtttcacagaaaaacatacatctacactcactgcatttttttcagcatcatggtgcaattctctcttgcttaaagactgaaaatatatgcaacacacctaagaatgcatcccgtgagaagatgcaatttatgatctggggaagaaacaaaaatcagctggaaaaaaatctttgtgctttgtgagagggtttgaagaatacagcgaaaggaggattgtgtttctattcaaaattgggtctgtttactcaattgcatgtcagccatatgactacagcaattacctcattctctgaaccttagtttcctcagccataaaatcatgaagaattaatttttaatttttgtataaggtgtaaggaag

SEQ ID NO: 85149 - DNA, 604 bp, Homo sapiens
aggttggaattgaacaatgagaacacttcgacatgggaaggggaacatcacacaccggagcctgttgtggggtggggtgagtggggatagcatagcattaggaaatatatacctaatgtaaatgacgagttgatgggtgcagcacaccaacatggcacacgtatgcctatgtaacaaacctgcacgttgtgcacacgtaccctaggactgaaataaaaataaacatgaagaaaatacctttctcacaagactcgttagagactgaactagatgataatgccacaatcaccagcagtgtgggtgatagtttattaaacatmtgtttactgtgaatcaccaacccagtgtccaagaacctcaatcctccatcctcaaatgcaccagataccgtttgcataaaaaccttaaaggtttctaggattatagttagaattcttattcaaattatacctacaattactctaagatagcaacgctaaaaataggacaacatattgagagttgaaagaaaggttccttgggtacataaagtgtaccttaccagaaagataatttagacaccaggctgtgtcaatacttgatattgactataagtattcattag

SEQ ID NO: 85150 - DNA, 604 bp, Homo sapiens
aggttggaattgaacaatgagaacacttcgacatgggaaggggaacatcacacaccggagcctgttgtggggtggggtgagtggggatagcatagcattaggaaatatatacctaatgtaaatgacgagttgatgggtgcagcacaccaacatggcacacgtatgcctatgtaacaaacctgcacgttgtgcacacgtaccctaggactgaaataaaaataaacatgaagaaaatacctttctcacaagactcgttagagactgaactagatgataatgccacaatcaccagcagtgtgggtgatagtttattaaacatctgtttactgtgaatcaccaacccagtgtccaagaacctcaatcctccatcctcaaatgcaccagataccgtttgcataaaaaccttaaaggtttctaggattatagttagaattcttattcaaattatacctacaattactctaagatagcarcgctaaaaataggacaacatattgagagttgaaagaaaggttccttgggtacataaagtgtaccttaccagaaagataatttagacaccaggctgtgtcaatacttgatattgactataagtattcattag

SEQ ID NO: 85151 - DNA, 1829 bp, Homo sapiens
actctgtcagaccacagtttcacctcgtcacaggctgattctgttacctgtttgcatttctgctgatgtggtaaatccaagctactgagtacccattatgattgggaaaggtgttgatgacttacagagttccctgtactacgtataatggagtcctttacaaattataccttgcctgaaccgaattagataggtaaaattctctaaaaagaccttctacacaataagaccacattgttacatgtcacaggaatgaaatgttctgtttcaaataaaagtgctggccacagcaagcaggtgccaggatgtgctgcccacagtggcatcatcccagaggggcaatatacctctgcagaatgaggcatcccagagaggcaatataccctgcagaatgtgttcaggacaacttggacacactacacctgtgaaagcaagggaaggagggcaggctctgcaagayggagaaaaatattcccaggatgcaccactaggattaaaatccaatgcaactcaaagtatccccatgattcagttcaagtttcctgaaagtaggtggtttagaatttgtattatctcaaggaaaccttaaaagagcatcatatctaaaaagataaaatgaattatcaggttaataaagtgcttaaaacaatgcttccgaaacaccctgactacgtggcctatgcccaaaacacagaggccatgagtcccttttcatgttaaagagagagagctgcactcctcactgtgaaaggtgtggacgaagatgcaggagagatgtgtcatcataaggatgtggtgaaaatgccttggaaagtactctctgctgcttttcatcagtacacgaggcatgcgtcatcttagaatgtcctaaatgcatagtgttattttttttaagtcaacatttctgagtgcttattttgtgctaggagttgtagttagtattttacaggtaaaatctcaatccagataagaattttgcagagtacgtactataattcagttttcacagatgagaagaaatgagtcccagaatagttaacaagtaactggacaaatgtaaacagcttgtaaatggaggagctaggaatgtacaaaagtggcgtgcatcatcaagccatgagttcactattagatcccgaaggcgggaccatctcatgccatcaggaaccggatattgccctttcgtatcttagaaggcttgctaacaagatggttcagctttcatgaattctgcatccgagattgctgtatcattgggaaaaagcagacttggcatttctgtaaagagaaggttgatttgaagaggatgatcagtaatccctgggagctcacacattttcctgtatggacaaatgctggattggcttgttttatttggtggcctggtaacctatggtaataggaataggtcaaagcattaagtatttactagggccggaatagtacagcagacttacctcagaagcaatatactgcatggttgaaatacttaataaatatttaaacgctgggttctacgaaacatatatgatatattaataaacatatgtaatgtttagttttagaatctgaatttcttaccacttgcataccaccacagttttttaataaatttccttctctgttatctgagaaaattaggacctgcaaggcaggatcacaaggggccagtttttacttcagtacatttcagaggtgaatgcacacacacccaccccacatacacactttcagaaaaacaaatctaacaaaactagatgtctaatgaaaaagatactgtaaaaattagttatattcaccaaacagtgagtctgatgcctaagaagaaa

SEQ ID NO: 85152 - DNA, 1829 bp, Homo sapiens
actctgtcagaccacagtttcacctcgtcacaggctgattctgttacctgtttgcatttctgctgatgtggtaaatccaagctactgagtacccattatgattgggaaaggtgttgatgacttacagagttccctgtactacgtataatggagtcctttacaaattataccttgcctgaaccgaattagataggtaaaattctctaaaaagaccttctacacaataagaccacattgttacatgtcacaggaatgaaatgttctgtttcaaataaaagtgctggccacagcaagcaggtgccaggatgtgctgcccacagtggcatcatcccagaggggcaatatacctctgcagaatgaggcatcccagagaggcaatataccctgcagaatgtgttcaggacaacttggacacactacacctgtgaaagcaagggaaggagggcaggctctgcaagacggagaaaaatattcccaggatgcaccactwggattaaaatccaatgcaactcaaagtatccccatgattcagttcaagtttcctgaaagtaggtggtttagaatttgtattatctcaaggaaaccttaaaagagcatcatatctaaaaagataaaatgaattatcaggttaataaagtgcttaaaacaatgcttccgaaacaccctgactacgtggcctatgcccaaaacacagaggccatgagtcccttttcatgttaaagagagagagctgcactcctcactgtgaaaggtgtggacgaagatgcaggagagatgtgtcatcataaggatgtggtgaaaatgccttggaaagtactctctgctgcttttcatcagtacacgaggcatgcgtcatcttagaatgtcctaaatgcatagtgttattttttttaagtcaacatttctgagtgcttattttgtgctaggagttgtagttagtattttacaggtaaaatctcaatccagataagaattttgcagagtacgtactataattcagttttcacagatgagaagaaatgagtcccagaatagttaacaagtaactggacaaatgtaaacagcttgtaaatggaggagctaggaatgtacaaaagtggcgtgcatcatcaagccatgagttcactattagatcccgaaggcgggaccatctcatgccatcaggaaccggatattgccctttcgtatcttagaaggcttgctaacaagatggttcagctttcatgaattctgcatccgagattgctgtatcattgggaaaaagcagacttggcatttctgtaaagagaaggttgatttgaagaggatgatcagtaatccctgggagctcacacattttcctgtatggacaaatgctggattggcttgttttatttggtggcctggtaacctatggtaataggaataggtcaaagcattaagtatttactagggccggaatagtacagcagacttacctcagaagcaatatactgcatggttgaaatacttaataaatatttaaacgctgggttctacgaaacatatatgatatattaataaacatatgtaatgtttagttttagaatctgaatttcttaccacttgcataccaccacagttttttaataaatttccttctctgttatctgagaaaattaggacctgcaaggcaggatcacaaggggccagtttttacttcagtacatttcagaggtgaatgcacacacacccaccccacatacacactttcagaaaaacaaatctaacaaaactagatgtctaatgaaaaagatactgtaaaaattagttatattcaccaaacagtgagtctgatgcctaagaagaaa

SEQ ID NO: 85153 - DNA, 1829 bp, Homo sapiens
actctgtcagaccacagtttcacctcgtcacaggctgattctgttacctgtttgcatttctgctgatgtggtaaatccaagctactgagtacccattatgattgggaaaggtgttgatgacttacagagttccctgtactacgtataatggagtcctttacaaattataccttgcctgaaccgaattagataggtaaaattctctaaaaagaccttctacacaataagaccacattgttacatgtcacaggaatgaaatgttctgtttcaaataaaagtgctggccacagcaagcaggtgccaggatgtgctgcccacagtggcatcatcccagaggggcaatatacctctgcagaatgaggcatcccagagaggcaatataccctgcagaatgtgttcaggacaacttggacacactacacctgtgaaagcaagggaaggagggcaggctctgcaagacggagaaaaatattcccaggatgcaccactaggattaaaatccaatgcaactcaaagtatccccatgattcagttcaagtttcctgaaagtaggtggtttagaatttgtattatckcaaggaaaccttaaaagagcatcatatctaaaaagataaaatgaattatcaggttaataaagtgcttaaaacaatgcttccgaaacaccctgactacgtggcctatgcccaaaacacagaggccatgagtcccttttcatgttaaagagagagagctgcactcctcactgtgaaaggtgtggacgaagatgcaggagagatgtgtcatcataaggatgtggtgaaaatgccttggaaagtactctctgctgcttttcatcagtacacgaggcatgcgtcatcttagaatgtcctaaatgcatagtgttattttttttaagtcaacatttctgagtgcttattttgtgctaggagttgtagttagtattttacaggtaaaatctcaatccagataagaattttgcagagtacgtactataattcagttttcacagatgagaagaaatgagtcccagaatagttaacaagtaactggacaaatgtaaacagcttgtaaatggaggagctaggaatgtacaaaagtggcgtgcatcatcaagccatgagttcactattagatcccgaaggcgggaccatctcatgccatcaggaaccggatattgccctttcgtatcttagaaggcttgctaacaagatggttcagctttcatgaattctgcatccgagattgctgtatcattgggaaaaagcagacttggcatttctgtaaagagaaggttgatttgaagaggatgatcagtaatccctgggagctcacacattttcctgtatggacaaatgctggattggcttgttttatttggtggcctggtaacctatggtaataggaataggtcaaagcattaagtatttactagggccggaatagtacagcagacttacctcagaagcaatatactgcatggttgaaatacttaataaatatttaaacgctgggttctacgaaacatatatgatatattaataaacatatgtaatgtttagttttagaatctgaatttcttaccacttgcataccaccacagttttttaataaatttccttctctgttatctgagaaaattaggacctgcaaggcaggatcacaaggggccagtttttacttcagtacatttcagaggtgaatgcacacacacccaccccacatacacactttcagaaaaacaaatctaacaaaactagatgtctaatgaaaaagatactgtaaaaattagttatattcaccaaacagtgagtctgatgcctaagaagaaa

SEQ ID NO: 85154 - DNA, 1110 bp, Homo sapiens
tgtaatataacttaaaagctaattctgcaactcttcactaagtgtatggcttcatttcacaatgagatgcttgagtagatttgattcttgtgagtattctttgaattaagatggattgcagtatctgttctcatcctagtcatttatttgtcttccaaacgtttgacttttttttttttttgagacggagtctcgttctgtcacccaggctggagtgcagtggcatgatctcagctcactgcaacctctgcctcctgggttccagcgattctcctgcctcagcctccccagtagctgggattacaggccaggccaccacgcccagctaaatgttttgtatttttagtagagacagggttttgctatgttggccaggctggtctccaactcctgacctcaagtgatctacccacctcggcctcccaaagtgctgggattacagtcatgagccatcgtgcccagccacttttgactttttcatttggagatgtttctttttatttttcttcgaagaccttaattttgacatttgtattttcttcctcaaaatacacagagatgttttagtggaatcaaaatctggattaagaacaaataaatgtgatttattaggaaacgaaaggagtcagggctttcaagttggattaacggattcaccctttgctttcgtgtggtgcctgactagtagtacttagaytgtcctcaacaaagacacccaaagtgaaaaaaaggaaggaagaaggaagcaagcaaggaggcatgcagaaaagaagaatccatggtgatgatagaaaaacttaaaaagataaatccatctctcaacaaaatcaagctaaaaggccaatttattttactagatagcatctctctttggtaagaaatttccagagaaagaatgtcaataaatagtgttagctttgaggtttacattaaatttttgttcatgtatgagtaaattttgtgcagcttcatctctgtgactctggtatggtgaaataaagtactcagagatgaacttctttctctgaaaattttagagtcttgaaaattatttgtattagaagagagagagaatagagagcttgagccggggtgattggccgacaaaca

SEQ ID NO: 85155 - DNA, 700 bp, Homo sapiens
actgcctgcaaacttagaaattaaaacttattttggataagcttccaatgaagaggttccttgtacactaagcttcttatattyccaaagggaaaacaagccttgaagagccccatgttgctagggagtccagtgcagtgaaggccaggtctggctgagcagtcaggtccctgggcttctccccttattatattatttttcagagaaggagaaaagaaaacaaaaaataaaactaagtgtggtgggatttattaataatgaaatgtgttaataaaagatatttgtcagaggaagaaaatagtaaaatctttccttccttaaaagtttgcatttaaagttgaaatggtttccatgcttaatgaaaactgtcttatctttcttagctatgttttttttttttttgcgacagagtctggctctgtcacccgggctgcagtgcagtgaaacaatctttgttcactgcagcctccaactcctgggcttaagtgatcctccaatctcagcctcctgagtagctgggactacaggcatatgccaccatgcttggctaatttatttatttatttatttatttatattttttgtagagatggggccttgccatgttgtccaggctggtcttaaactcttggactccagcaatctgcctgcctcagcctcccaaagtgctgggattgcaggtgtgagccactgtgcctgg

SEQ ID NO: 85156 - DNA, 700 bp, Homo sapiens
actgcctgcaaacttagaaattaaaacttattttggataagcttccaatgaagaggttccttgtacactaagcttcttatattcccaaagggaaaacaagccttgaagagccccatgttgctagggagtccagtgcagtgaaggccaggtctggctgagcagtcaggtccctgggcttctccccttattatattatttttcagagaaggagaaaagaaaacaaaaaataaaactaagtgtggtgggatttattaataatgaaatgtgttaataaaagatatttgtcagaggaagaaaatagtaaaatctttccttccttaaaagtttgcatttaaagttgaaatggtttccatgcttaatgaaaactgtcttatctttcttagctatgttttttttttttttgmgacagagtctggctctgtcacccgggctgcagtgcagtgaaacaatctttgttcactgcagcctccaactcctgggcttaagtgatcctccaatctcagcctcctgagtagctgggactacaggcatatgccaccatgcttggctaatttatttatttatttatttatttatattttttgtagagatggggccttgccatgttgtccaggctggtcttaaactcttggactccagcaatctgcctgcctcagcctcccaaagtgctgggattgcaggtgtgagccactgtgcctgg

SEQ ID NO: 85157 - DNA, 700 bp, Homo sapiens
actgcctgcaaacttagaaattaaaacttattttggataagcttccaatgaagaggttccttgtacactaagcttcttatattcccaaagggaaaacaagccttgaagagccccatgttgctagggagtccagtgcagtgaaggccaggtctggctgagcagtcaggtccctgggcttctccccttattatattatttttcagagaaggagaaaagaaaacaaaaaataaaactaagtgtggtgggatttattaataatgaaatgtgttaataaaagatatttgtcagaggaagaaaatagtaaaatctttccttccttaaaagtttgcatttaaagttgaaatggtttccatgcttaatgaaaactgtcttatctttcttagctatgttttttttttttttgcgacagagyctggctctgtcacccgggctgcagtgcagtgaaacaatctttgttcactgcagcctccaactcctgggcttaagtgatcctccaatctcagcctcctgagtagctgggactacaggcatatgccaccatgcttggctaatttatttatttatttatttatttatattttttgtagagatggggccttgccatgttgtccaggctggtcttaaactcttggactccagcaatctgcctgcctcagcctcccaaagtgctgggattgcaggtgtgagccactgtgcctgg

SEQ ID NO: 85158 - DNA, 700 bp, Homo sapiens
actgcctgcaaacttagaaattaaaacttattttggataagcttccaatgaagaggttccttgtacactaagcttcttatattcccaaagggaaaacaagccttgaagagccccatgttgctagggagtccagtgcagtgaaggccaggtctggctgagcagtcaggtccctgggcttctccccttattatattatttttcagagaaggagaaaagaaaacaaaaaataaaactaagtgtggtgggatttattaataatgaaatgtgttaataaaagatatttgtcagaggaagaaaatagtaaaatctttccttccttaaaagtttgcatttaaagttgaaatggtttccatgcttaatgaaaactgtcttatctttcttagctatgttttttttttttttgcgacagagtctggctctgtcacccgggctgcagtgcagtgaaacaatctttgttcactgcagcctccaactcctgggcttaartgatcctccaatctcagcctcctgagtagctgggactacaggcatatgccaccatgcttggctaatttatttatttatttatttatttatattttttgtagagatggggccttgccatgttgtccaggctggtcttaaactcttggactccagcaatctgcctgcctcagcctcccaaagtgctgggattgcaggtgtgagccactgtgcctgg

SEQ ID NO: 85159 - DNA, 569 bp, Homo sapiens
gagacacagccccacacacagtcctaccgcggtggccgagcaatgcacgcccccaggcaacccctgtggctgccgggttctgctctggaggggaacaaccctcggctgagagaacagccctcgggcacgcaggcggacctgtcctcgagatcacgggggcacgacttctcgggagactcacccgaacaccgtcctggcaggcctgaggctgggatgccacgctgcttcccccggactccgcctgtggtttcctcatcctgctcggcccyttgtgactcctggcagccggagacgttcctgtggaccccgtggagaggtcaggccggagcctcggaggcccgacacccaagcgctgccacggagggctcccgcgttgccaagcctcggggactggttcctaagacaaccgtgggaagcactgtgaagcaaaaagcggcgcgcgcctcgcatgcgctttggctgggccgactcgcgcttggctcctggcagtcaggcaggctgcgtcccctttaaatacgggcggctgcgcggcggcagggggcgcgcctgctgcagccgcggctgcggct

SEQ ID NO: 85160 - DNA, 644 bp, Homo sapiens
ttgatatgtctcttaagtctattttaacctaccatattctttctccttatttttcatgctatttatttgttgaagaaatgagttaatttgtcctgtagaatttccctcattctggatttggctgattacatcctcagcattgtttaaccatttcctctatcctctgaatttcacaaaaacaaatggtcagatctaggggccggattgcattcaggttcaactactttggtgggctgtgtgctttctattacatcacagcaagaggcccttgtatctgatggtctcacttcttgagatagtaaaacagatctgtgggtttgggtgctgccagcccgatacatccattgataacatggcatttaaarataagtgttcttggtaagagtggcaattcctcagggttctagaactagaaataccatttgacccagccatcccattactgggtatatacccaaaggaatataaatcatgctgctataaagacacatgcacatgtatgtttattgtggcactattcacaatagcaaagacttggaaccaacccaaatgtccaacagtgatagactggattaagaaaatgtggcccatatacaccatggaatactatgcagccataaaaaaatgaagagttcatgtccttt

SEQ ID NO: 85161 - DNA, 438 bp, Homo sapiens
agacataccaaggacaacaaatttttwaaaagaatgtttgactattaatatcaagcatcattggattcaaaaccaagattgttaaatgaggctattaatcaatcaaaatttacttaatgtcttctaccttgtttaggtactggtgaaaagtggtgaacatgattgactttctgtcaaaagattgccaaactatgacaaatgattcaagaatcatgcaaattaatgacttagtttattttactgatatgtggaatacaagtagataggttaacgtgacagggattgcttttactttgtattccaggaaggctgctctgaggaaatctcaaatgagtgcatgcgaacttgcaggcgaacatccaggtgaaactgatccatggacaaggaacaagatggggtaaggccctaaaattgggactactttgatatgctgaaaga

SEQ ID NO: 85162 - DNA, 1047 bp, Homo sapiens
atgagaatggcattatgaaatggaatgattgtgtgtggggggtggggggtggcattttattgtgaaaagagtagaaagaaggaatgggcccaaagatctcttaaggtcttctttaaatttgtatttaattatttactaaaaacatttttttcttgaatgtttagaaattcgacatattactattgacctagggaacataggtttggcctgaaaccaaaaatatttctatttgaagcctatcaaataaatgaattagaataataataacaacagtaaagtagattaatctagctacgcttagtgctctggtgccccaatatgggataggctagtaaaagtactgttagatgtgagcgtgtgtgcctgtgtgggtacatggcaggaagttgaaagtgcaaggcagaaataatagaacatctcatgactttgagaggctaaaactcagaattattccttccctctcccataccctctctacttctcacatgttagacaccataaaaggtgatgtctctcacatttgttaatctcttttccagaggtttctaaataggctcaagatacaactttcctaaacgaagcaaacaaaacaatattctctcctattcccyttctccgtatcaaaatgctgatgtaacaattaagttttcgtcttgaaaatatttgtggaaagagtatcctattctttctctttctactttcttatacccattcattctctaactcctaccaattcaatgaaaccatttggatactgtcaaaaataatctcccagttgctaaatccaaaggctctttttcttcactcagcctacttgatctgctgtgcaacatttgatactttcactactttcttcatctttaaagctttcctaatcctggcttctaagacaccactctctcattttactgtccaacttctagaacacttctcagaatcttcctctgtttgcctcccagatgctgtagttaggaagaagtgatcaatcataatggaaaagtagtctaagaaaagactgaatatcttcctgaatccattgcctttgtc

SEQ ID NO: 85163 - DNA, 2344 bp, Homo sapiens
tggattgagttacatcaacctaccacaagtaattaacttcataatttttcttaacctatatcagtaagcccatcctagctattaggaactgcacgttatcttttgcatcattgtaacaatttgcatactttactgaaggtcaatgtgaaatgagagcaatagcaaagagagcttcaaatcagttaaaattactaacaaaacatacttgtagcctaatggaatcacactgttttaaaataaaatgttatcctgtcagtttatctgttgttcttttctcaaaattgagctcagcatcacctcagcaactgttaatattctagtataaaacgttaagtcagtttggccttcatttattctaagcttttaattttttattgttttaaaatttttgattaaaaaagcaagccaaagcttaaacagaaataaaccaaagattgactttgtgttatttgaacataccaggacagccttcataaagttaatttaaaaaaaaatagctaaacagcaatatttccttgccaagacgttacctttaatgtagcttcctccatggtgaagggcttttaatgttcatttagaaacaccctttctttgctattctgcttcctggcttccagggggaatggcagggctgtgacttgtgtcagtcagtagatgcctaagcctttcttttttaataagaataggattccagacaaaataaatcaagtttctccctgtcttcctgagagagtaacatctgaattagccacagtgtaaaatagccaaggataattaattatatgctttgagtcaaccctcattcccttccaattgaagtacacagacatcttttttaaatgtacttacaaagaaaattgtaaggatgtccgccatcttaaatttcctaaagtttctatcattgatactataacttttataatggaacatttggcaaggtaagcttactttacccactgctcctgatttgttttcactcaccttctgttacatgttttatcctatttcctttctagctctgccttagaaagaatctgatttctattcattcagtttgcttatactctgcaaattgtcttatgctctctgaggaaaaatgcatccaagcataatatgagaagtggtagaaaacattagacaatttcatttttttaatgaaatactatttgaaattttttttaagtcattgactttcagaggttttagccctttcaaggttgaattggtgaatttctatttctgaagaaaattgtatttgaacacrttaaaatgggttttgagaatgttattttgtatttggtatgtgatcatatttttcactgctaatttgtgtgtctactcatttgttattgaattgtttttgtaaatgattattttttaataaaaccaattgtttacagtccgaacagaaatatcagaagaattatagagatcaaaggagaacataaaaatatacagcataaaggataaagaaacataaagaaagcattaaaattaccaatgatgaccgaatatgctacttatgtaagaaaagttatattcttagggttggagaaaaattgagagttaatttataaatatttactttaaaaaaatcagaagacttttagtcaaaatctgtagtaattgaagttcactgatttatgtgttatgctaaaattgaatttaaatcctcaattcaacactgacacactaaaatgtgaaacagaactctttaaagtctaataatgtgaagataaattcagctacctgggaactaagctggcttcaataaaacaatagtttccaatgaacatgatggctgtaaggtgtagtaattaagagtaaggaaccagctgacctggtttcaaatctcatctgtttcacttagtaactgtgtgacctaggactagtgacttgaactgtaggtttcagtttctttatctataaaatgaaatcaatacaaatgcccacttcatagaatttttatgaatattaaatgggttcatactttatgctatttttattattcaatgagtttagagtgtcttggtaggattgcgtctctctggattatcttgaagtccagaagacagagctcagagctaagctaggaatttaattgtgtttatatatcttctggtagtgtccgccagactggaaaatcctgagtaacaacaagttcctaagcaaattttcaatcaaatcctaaaactttttaaagtagaaatgagaaatagaaattaccttgtgtatatcttacagaaattttttcctagtatcacattccccaaaggcagagaaacttgacatggaggaagagggtacaaaaagaaggttgcccaggtatctaaccagtgctcat

SEQ ID NO: 85164 - DNA, 2344 bp, Homo sapiens
tggattgagttacatcaacctaccacaagtaattaacttcataatttttcttaacctatatcagtaagcccatcctagctattaggaactgcacgttatcttttgcatcattgtaacaatttgcatactttactgaaggtcaatgtgaaatgagagcaatagcaaagagagcttcaaatcagttaaaattactaacaaaacatacttgtagcctaatggaatcacactgttttaaaataaaatgttatcctgtcagtttatctgttgttcttttctcaaaattgagctcagcatcacctcagcaactgttaatattctagtataaaacgttaagtcagtttggccttcatttattctaagcttttaattttttattgttttaaaatttttgattaaaaaagcaagccaaagcttaaacagaaataaaccaaagattgactttgtgttatttgaacataccaggacagccttcataaagttaatttaaaaaaaaatagctaaacagcaatatttccttgccaagacgttacctttaatgtagcttcctccatggtgaagggcttttaatgttcatttagaaacaccctttctttgctattctgcttcctggcttccagggggaatggcagggctgtgacttgtgtcagtcagtagatgcctaagcctttcttttttaataagaataggattccagacaaaataaatcaagtttctccctgtcttcctgagagagtaacatctgaattagccacagtgtaaaatagccaaggataattaattatatgctttgagtcaaccctcattcccttccaattgaagtacacagacatcttttttaaatgtacttacaaagaaaattgtaaggatgtccgccatcttaaatttcctaaagtttctatcattgatactataacttttataatggaacatttggcaaggtaagcttactttacccactgctcctgatttgttttcactcaccttctgttacatgttttatcctatttcctttctagctctgccttagaaagaatctgatttctattcattcagtttgcttatactctgcaaattgtcttatgctctctgaggaaaaatgcatccaagcataatatgagaagtggtagaaaacattagacaatttcatttttttaatgaaatactatttgaaattttttttaagtcattgactttcagaggttttagccctttcaaggttgaattggtgaatttctatttctgaagaaaattgtatttgaacacgttaaaatgggttttgagaatgttattttgtatttggtatgtgatcatatttttcactgctaatttgtgtgtctactcatttgttattgaattgtttttgtaaatgattattttttaataaaaccaattgtttayagtccgaacagaaatatcagaagaattatagagatcaaaggagaacataaaaatatacagcataaaggataaagaaacataaagaaagcattaaaattaccaatgatgaccgaatatgctacttatgtaagaaaagttatattcttagggttggagaaaaattgagagttaatttataaatatttactttaaaaaaatcagaagacttttagtcaaaatctgtagtaattgaagttcactgatttatgtgttatgctaaaattgaatttaaatcctcaattcaacactgacacactaaaatgtgaaacagaactctttaaagtctaataatgtgaagataaattcagctacctgggaactaagctggcttcaataaaacaatagtttccaatgaacatgatggctgtaaggtgtagtaattaagagtaaggaaccagctgacctggtttcaaatctcatctgtttcacttagtaactgtgtgacctaggactagtgacttgaactgtaggtttcagtttctttatctataaaatgaaatcaatacaaatgcccacttcatagaatttttatgaatattaaatgggttcatactttatgctatttttattattcaatgagtttagagtgtcttggtaggattgcgtctctctggattatcttgaagtccagaagacagagctcagagctaagctaggaatttaattgtgtttatatatcttctggtagtgtccgccagactggaaaatcctgagtaacaacaagttcctaagcaaattttcaatcaaatcctaaaactttttaaagtagaaatgagaaatagaaattaccttgtgtatatcttacagaaattttttcctagtatcacattccccaaaggcagagaaacttgacatggaggaagagggtacaaaaagaaggttgcccaggtatctaaccagtgctcat

SEQ ID NO: 85165 - DNA, 707 bp, Homo sapiens
ttaattacagaccagataaagaagatgtggtacatatataccagggaatattatgcagccataaaaaataacaagattatgtcctttacagggacatggagggaactggaagccattatcctcagcaaacgaacacaggaacagaaaaccaaacaccgcatattctcacttataagtgggagctgaatgatgagaaggtatggacacatggtgaggaaccacacacactggggccttctggagcatggtaggtgggaggagggagggcatcagaaaaaataactaatggatattagggttaatacctgggtgatgaaataatctgttcaacaaactcccatgatagaagtttacttatgtaacaaacctgcacatgtatccttgaacttaaaataaaaattgaaaagaaaagaaactataacgggtataatgaaaatatcaatataataagaaaaaataatacttataaatatatcaagctaaaaayggaaaaaactgaggcaaaatgcacacaatttaaagaagaaagataagatcagaaaggaataattaaaactgtctttatttcataaaccatgactgtgtatgtagaaaatcttaataaatctacaaaaaaaaaaaaccagaattgcgtaactgcgaatgaactctcacattttaagctttctctaaaaaacgtcttccccaacttcagagttttcttgaaa

SEQ ID NO: 85166 - DNA, 481 bp, Homo sapiens
tgcatagagaacatccatcctctgtgtgtgtgtgtgtgtctctctctcccctctccttggcaaagagctctctgtcatgcttctgcacaggmcagtgaaagctctgaccaggctaaactagtgtgagatggcaaggcatgaccttattagaaaagcctctctctgaagtctcaaacgaccctaataccaacgttgaatttgcctgagcctgtcctttctgatttcccccaacacattacacaggagctctctgtcaaatttggtgctgccgataatgagctagtctctcagacttttgtattaaacgcaagttctccaggaaacttttgaaagtgcacaggaaaaatacagagaaaattgaagactaaagggagtatgtttctgttctacagcaatacatttaccatgcaaagaatgtgtttatctatacttatgctttttgcttctattctatattaacctcatctgatttatgctaatt

SEQ ID NO: 85167 - DNA, 760 bp, Homo sapiens
cctcagactcaaattattcatatttaaattgatgggcaatgtttattatatttattgtcaaattaagatcaaacttgccttcaataattttagcaaagatttattaagtgcattctagtttccagaaatggtttctgcattctggatatgtagcaatgtacaaataaccctgatagataaagacaaagcttatattcaatagaatattaaaaaaaacagacaacaaataaacaaatgtttgatatatcagatgtatatgagggataaacagaaaaataacacatggtaatgtggctgtgcattgtgttatatagggcagcgaggaaagatctctatgagaagatggtttcagagcaaagatcttgctctacttagygatgatcattactcttattgtattttgagtggtatacttttcccggatagtccccttacattgctcatcagtactctttaggtttaaaacaaagaggaagctgtaaataaagataaaatacccaaagaaacaaacaatccacatgcctgagggatgaatccatcccatctgaccgaagagtttcaagtcagttacacaggtattgtgaaactgaaactcactctcctgaatggttggtcatagctcaggtccaatttttctcataggtacaatttaaccagcagttggaaatttcagtgagtatgcatttctttctaagctgttgactttattaagggagatcagatacagttctgtcatagcaaggcttcaaattacaactct

SEQ ID NO: 85168 - DNA, 760 bp, Homo sapiens
cctcagactcaaattattcatatttaaattgatgggcaatgtttattatatttattgtcaaattaagatcaaacttgccttcaataattttagcaaagatttattaagtgcattctagtttccagaaatggtttctgcattctggatatgtagcaatgtacaaataaccctgatagataaagacaaagcttatattcaatagaatattaaaaaaaacagacaacaaataaacaaatgtttgatatatcagatgtatatgagggataaacagaaaaataacacatggtaatgtggctgtgcattgtgttatatagggcagcgaggaaagatctctatgagaagatggtttcagagcaaagatcttgctctacttagtgatgatcattactmttattgtattttgagtggtatacttttcccggatagtccccttacattgctcatcagtactctttaggtttaaaacaaagaggaagctgtaaataaagataaaatacccaaagaaacaaacaatccacatgcctgagggatgaatccatcccatctgaccgaagagtttcaagtcagttacacaggtattgtgaaactgaaactcactctcctgaatggttggtcatagctcaggtccaatttttctcataggtacaatttaaccagcagttggaaatttcagtgagtatgcatttctttctaagctgttgactttattaagggagatcagatacagttctgtcatagcaaggcttcaaattacaactct

SEQ ID NO: 85169 - DNA, 760 bp, Homo sapiens
cctcagactcaaattattcatatttaaattgatgggcaatgtttattatatttattgtcaaattaagatcaaacttgccttcaataattttagcaaagatttattaagtgcattctagtttccagaaatggtttctgcattctggatatgtagcaatgtacaaataaccctgatagataaagacaaagcttatattcaatagaatattaaaaaaaacagacaacaaataaacaaatgtttgatatatcagatgtatatgagggataaacagaaaaataacacatggtaatgtggctgtgcattgtgttatatagggcagcgaggaaagatctctatgagaagatggtttcagagcaaagatcttgctctacttagtgatgatcattactcttattgtattttgagtggtatacttttcccggatagtccccttacattgctcatcagtactctttaggtttaaaacaaagaggaagctgtaaataaagataaaatacccaaagaaacaaacaatccacatgcmtgagggatgaatccatcccatctgaccgaagagtttcaagtcagttacacaggtattgtgaaactgaaactcactctcctgaatggttggtcatagctcaggtccaatttttctcataggtacaatttaaccagcagttggaaatttcagtgagtatgcatttctttctaagctgttgactttattaagggagatcagatacagttctgtcatagcaaggcttcaaattacaactct

SEQ ID NO: 85170 - DNA, 1723 bp, Homo sapiens
ataccagaaggggagagtctctttttttccttcaacttctattttacattccggggtacatgtgcaggatgtgctggattattacaaggtaaacatgtgccatggtggtttgctgcacagatcaacccatcacctaggtattaagcccagcatccattagctattcttcctaatgctctacctcccctcaccccaacccccaacaggccccagtgtgtgttgttcccctccatgtatccatttgttctcgtcattcaactctcacttatgagtgagaacataaggtgtttggttttctgttcctgcattactttgctgaggataacggcttccagcttaatgacagactggataaagaaaatgtggtacacatacaccatagaatactatgcagccataaaaagaaagggaagggtctttaactgctgctacttgcttgctaattccagtaatgtgctgatagagtcaagaactatcactaggtccagaaatagagaaaggctgatttaggctgaagttctagaacgtgactatcttatttctaaccaaaacaaaaaagagacatgtactgccaagatgtgtagttctgataatgcatcagaaatcaggacaaaaaaaacctaaagcagaaaatgaccaattataccaaaggagaaaaccatcttctgctcaggtttcacaaaggttcctagagacaagtgatttttatataattatactcatggaagccaaaccagaagattaatttaatccaagagaataaatattgattgagcatccactcattgaaaaaccccacgcttgacacttgtaagacacaaatgtaaataagctaagagtttaccctcayagagtctgcatttcagagaatacagacatgttcctttaaaaatgcaagataaaataagtaccacaaaagagaatcataagtgctctaggaaccaaaaggaaatgaggtaaaggccagacagtatatagtaagcaaggaaaaatagacattcataaggaatagtaacagtagaaaacttcagttttcaaacgagctaaaagattagagaaggatacaggaaaaagaacttgtttccgggtcaaaagcaacaaaaataatgactgggaaaatggagaagtaaggaaacaaaattctcaaggtaaattctttacccaattgtcttgtcttttaaaaagacaatatttggggaaaaaacaaaaaacatttctaggctgaaaaatgcttcagatgaaattttagtatgccaaagattaaagggtgttcacaataaaatgttatcaacaacagtaaaggccaagttcccatgattctacagatacttactgaggcaaaatcacagtgtggccagaaagaacttgagagtgcatgggaggaacgcttggctaagtaccaaaaactgaatcaaaaccagtgcccagaacatctatcgaaggcatgtcttcatgagaagtgtttaatgttgtcaccacttaaattcttctccaatcttttcaagaaaaagtattttgctagacatttgccttttagaaatgggatttcaggattagtaatgaatgcacttaacaactatatgtaatattttttaaaaaaggagaactgtagaaatacatgaaaaccacagcttctccaaaacttcatttgaaccattgattcaatataattccttaccaaactagttacaagttgcaaatatgcagagaaatagactaaatt

SEQ ID NO: 85171 - DNA, 1723 bp, Homo sapiens
ataccagaaggggagagtctctttttttccttcaacttctattttacattccggggtacatgtgcaggatgtgctggattattacaaggtaaacatgtgccatggtggtttgctgcacagatcaacccatcacctaggtattaagcccagcatccattagctattcttcctaatgctctacctcccctcaccccaacccccaacaggccccagtgtgtgttgttcccctccatgtatccatttgttctcgtcattcaactctcacttatgagtgagaacataaggtgtttggttttctgttcctgcattactttgctgaggataacggcttccagcttaatgacagactggataaagaaaatgtggtacacatacaccatagaatactatgcagccataaaaagaaagggaagggtctttaactgctgctacttgcttgctaattccagtaatgtgctgatagagtcaagaactatcactaggtccagaaatagagaaaggctgatttaggctgaagttctagaacgtgactatcttatttctaaccaaaacaaaaaagagacatgtactgccaagatgtgtagttctgataatgcatcagaaatcaggacaaaaaaaacctaaagcagaaaatgaccaattataccaaaggagaaaaccatcttctgctcaggtttcacaaaggttcctagagacaagtgatttttatataattatactcatggaagccaaaccagaagattaatttaatccaagagaataaatattgattgagcatccactcattgaaaaaccccacgcttgacacttgtaagacacaaatgtaaataagctaagagtttaccctcacagagtctgcatttcagagaatacagacatgttcctttaaaaatgcaagataaaataagtaccacaaaagagaatcataagtgctctaggaaccaaaaggaaatgaggtaaaggccagacagtatatagtaagcaaggaaaaatagacattcataaggaatagtaacagtagaaaacttcagttttcaaacgagctaaaagattagagaaggatacaggaaaaagaacttgtttccgggtcaaaagcaacaaaaataatgactgggaaaatggagmagtaaggaaacaaaattctcaaggtaaattctttacccaattgtcttgtcttttaaaaagacaatatttggggaaaaaacaaaaaacatttctaggctgaaaaatgcttcagatgaaattttagtatgccaaagattaaagggtgttcacaataaaatgttatcaacaacagtaaaggccaagttcccatgattctacagatacttactgaggcaaaatcacagtgtggccagaaagaacttgagagtgcatgggaggaacgcttggctaagtaccaaaaactgaatcaaaaccagtgcccagaacatctatcgaaggcatgtcttcatgagaagtgtttaatgttgtcaccacttaaattcttctccaatcttttcaagaaaaagtattttgctagacatttgccttttagaaatgggatttcaggattagtaatgaatgcacttaacaactatatgtaatattttttaaaaaaggagaactgtagaaatacatgaaaaccacagcttctccaaaacttcatttgaaccattgattcaatataattccttaccaaactagttacaagttgcaaatatgcagagaaatagactaaatt

SEQ ID NO: 85172 - DNA, 851 bp, Homo sapiens
tattatgttaatacatattcttattatgggaacctttcttataatcccatagcatgccagctgctagaatacattaactttccaaagtatgtagtttataatttcatctctttagaagatgcagaggaccctgtaggaccaccttctgtatattttgccaagtcctttgatttacataatcttgtttaagcttccccaaatctttagaagtggatgagaaaatcatggttttttaaaattatttttttaatttccattcttttaagtgacaaatactcaattgcaatgagctgggtaacagaacattctagttttagatcaattagatgttgactcctctcaattttgtattcatataaaaattcagtaggccaatgaccctcttcttaacttgttcctgcctttgttgaagacaatggtattggcaacaagaagccaaaggcctgagaatcatctgagttttctcaatttcagttttatgttaaagttgaatctgtgtattttttcctacatatattatttttattttttatcctggtagttattttaatcctattttgtatgtaataaactttttatatataatatcattctaaaattttataaaatttataggtaaatacatatatatatataaaattttggaattattttagatttacagaaaggtttcaagtagcatagaaagttcctacacacccttcacctggcttcccctaatgttattatcttatataactatgactcatttatcaaaactaaaaatctagcattgatgcaaggctgttaaggaaactatgraccttatttggattttgccagtttttccactaatgtcctttttctgttca

SEQ ID NO: 85173 - DNA, 849 bp, Homo sapiens
taaaaagtcaattaataaaaattaaaacaaggcagggttttcatgcagtggaaaaaacacacaattttagtaagtgactgataattatgcttatgccactttgctagattacatttcattaataaatatagtttcattctttatgttataaagcagaataaaatcagaaatctagagaaattgattttaatgattagagtaaaagcattttcacctcccaagtcagaatgagctctttagaatcagtccattttatagttaaatcaatcatagtttggtttaaaaaaaatattgagaagaacattaacttcactgtttccacaaaactcaatgtcatgacagcattgtgagtcatttcaatgtaggattaaaacctattgctggacccagtggacttactgtgctacattctgaaaatgtaagacattgaagtccagtctttgttggatttgctgtccttggcagttatcaaaaggtcaatttatcctgcttcttttttctcttttccatatrtcttgcacttcagcttaatattagtattaagctaaatttcttattttattttgattgataaaggaaaacagagattgtttcaatacagttgctgagaataagcaaaatgtacttataaagtacacaagggagctatcagataaaaatttgttcaaaaaaagatttggacatttttattgcatgaatgttcaaatggaaaggaaaactttctggatttttttttccaccacacatgagcagcagcactaaggtagtgaataatgccccttcaattagtagttttcatatatttctgatatcagaaatggattgttagtaacttgttttaaaagcaga

SEQ ID NO: 85174 - DNA, 1775 bp, Homo sapiens
actttgggaggctgaggcaggaggatcacctgaggtcaggcacgagccaccgtgcctggcctatatacattcttttaatttctacttgcagaactttgttctcttataattatagtggaaccactttcacttagtatsaaaatatccagatccactcatcaaagtgtaaataatccttcagtaaattacttttgcaaatttatttttatgtaatatttccttaacttcttcttacctacatccagtagtcattttaaaaggcagaatttttactattttatatagaactgaggcagtatttgaaaaaaatctcaaaacacttttcaggaaggactggcatctaaaacaccagttccaatatatattttagtaacattttaaaggacagatggttttcaaaatgttattataatttaaaaaaatgtaaccttcctctctgagttgatgtttatggaaaactaatatttcataaatgccaagttactatgatgtatgatctaaatgctgcccctgccattctataaatataaaaatcataaccttctaactaactttggtattagtcaacaattgtgctgatgaaaagtaaactcaattcatttaaaaaaaattttccatgaaagataaaacaagtaatttgtaagaagcatggtagatgaaccaaaacataaagtaacattaaccataaagacatgccatggacttctctaatcttcttttggaacacccttttcgtgcatatgagaataaaaattaaatattaaatgcctactttatgtatgtacttttacttgtacctattgctctttaaagattaaaataactcctaaagcctggatagttgagcccattgtgctcttctgcacataaaacagattggatatgcagtgaacagagaggtaaaacttaggctttcagatttgttatgatgatggaaacacaattccattcaatagtgttcatcttggtctttcaaatgtttaaggtcacaaggcaaaagagaacagactttaagaatgttcgcgtattacttctcgtcttatccaatagctacattagtttaattaggcaagtgttttggagtaaacagctctgtgaaatgtgttgtggagtctggaggctccacaacctatctccaggtagttgtccgatggagcctagagtaatacccccacagtttaagagatgcattacatctacaggtaccaaccaggaagggtagtcctgaattaaatggctttagaacacgttataagagcaaatcgaagtttccaggtattagaaccacttcaatcacagagcatctctggcttctatctgtggccagcatcaggtatctgtctgccctccccgaatggttccactcgtcatgtggatcttctagatggttttattcttccccagccagccaacttgaccaacaagcctaggtatattatgtatgtataaagttggttcttaaataaagtccacttctgtaactaggtaagtaatgtcttcagactggcaatttcattgttatctagaaagagtgactctagttagcttctagtgtcagtttttctagcagcttctttaaaaaaaaaaaaaatcctctctggaacaaagcttccctgcaagtattgctgttggcaatagtcctctttactgaaatgcttatccagtgaaacttgggctgtgccagtgagcctgcaggttgatggtccgtttgttcaacttctccattataaagcaacctctctgatcacccttttaaaactaaagaccaaagaatc

SEQ ID NO: 85175 - DNA, 1270 bp, Homo sapiens
ttacagcaacatgtcagctgcaatatagatgtgggggcaggtcactcatagcctttgaagtagatttatcaaattgttaattatgtcaaaattattaaatatgatagaatttataatagttcttgtttgacagcactgataactgaaaatgaaaaggttaaaactataactttatattctcaatgatgtgtcttctaaaatatcttctatgaaatcagtatttattaaaagattagcttaaaacttgtctaaaagttggaaattattcctgctccttttaaatgaaggcaataaaaagaaagagttgccaaaacatagttatgagattttaatcgtctaatttgacatgcagttcatttttttaaataattgtaccaaatctcatcagcaacawcatatcattggtgacataatgtgaattaatccttttaaagttatatgtgtcagggaatatattacataattgtgtgattataaaatatataatttcagcagagaataatctccagtttgtgtgagaaataaagtagatgaaagctaaaagcttaatctgctggaggtgcatattaaaatgataaaataataaaataacagcagaaagaatagaaagaaaatattaactcaaacacacatgtcctaccaggtttgttttgacttaaatgatagcactgtcagcactggagcaatttggaaatctttgtcataaggcaaaggttacatttaagtatgatgcaactacatttgatgaaatattaatagtggtaataggcaataacattaacaaagcatgagattttacagacagttttctaactacagaagttaaaatattaatattatctgcatattgcagatgcagaacccaaggtcccaatggtttacataaattttccaagacaataagttaatagctgtagaaactgaaacaaaacagaacctcaggaccccaaacttataatggcaaagggaaagttaagcttgggaattgagtcgtacaaaaaactgccttccttttgttcccaatcagatatctgtgacgatagaaggccacatatctccccagatggcttcccttacaaattactcacaaggaaatttctggtggactccaaaatctttcagaatatgtatctcccataaaatagtcttaaaacagaaattttttgattctcaccatacaatttaaattaacagcttatcttcacaggcatgggacaaaaacaagaataaaactcatccttctgcccacctgaaaggaatgacaaatgca

SEQ ID NO: 85176 - DNA, 1212 bp, Homo sapiens
taacacaaagattccaattcagagttcaaaaatactgaaatgaggaacaggatggagagtttgttgtctttgtttagggtttcccccattctctgtggattagctaaatattggtattattatttgacatgaatgagggctttggaggaaggataagcagataagaaaggtggggtgttatccacgtcctaaatgtttaactgagtagcagattttacaaagtctgtgatcatttggacagattgaagacatctcatagaataaacttatgrcactgcattaagcagtcaccagatattagctccaggtagtctaataaattttccccttttaaaaggcatattttaaaatttattttctatttttttaacttttatttggaatccagagtgtgcatgtgcacgtttgttacatggcagtattgagtgatgctgtagtttggggtacggatgatcccgttccccaggtcatgagcataaaactcattaggtagtttttcagcctaggcctcctccttctctcccctctctaacagttcccagtgtctatggatgccatttttatgtccatgtgtactcatagtttagctcccacttataagtgggaccatacagttttcagttttctgttcttgtgtcaatttgcttaggataatggtctccagctccatccatgttactgcataggacatgatttcattcctttttggccacatggtattccatggtgtcagtatatcatgttctctttatctaattcacgatggatacacacctaggtagattccatgtctttgctataaataataattttttaaaagcttaaaatttatttagaaggaatttgaaggaaataatttcatacgatacatattgcttttaattttaaaaatcatttattattctctatcactatatatgtatgtgtgtgtgtgtgtatatatatatatgatacattttagttccaaatcagaacacattcctttactgatttatttacactaataaaaataggcgatgattaaaataatggcaagcttttctataattttacttcttagttgttattttcttgtcagttttcacggctgattttttcccctgaaatagacaatttgttatgagacacaaagcacttaaaatttctatttaaatacaatttattctgagtaaatagcattagactctgtattattctgaaacagaatgttag

SEQ ID NO: 85177 - DNA, 1212 bp, Homo sapiens
taacacaaagattccaattcagagttcaaaaatactgaaatgaggaacaggatggagagtttgttgtctttgtttagggtttcccccattctctgtggattagctaaatattggtattattatttgacatgaatgagggctttggaggaaggataagcagataagaaaggtggggtgttatccacgtcctaaatgtttaactgagtagcagattttacaaagtctgtgatcatttggacagattgaagacatctcatagaataaacttatgacactgcattaagcagtcaccagatattagctccaggtagtctaataaattttccccttttaaaaggcatattttaaaatttattttctatttttttaacttttatttggaatccagagtgtgcatgtgcacgtttgttacatggcagtattgagtgatgctgtagtttggggtacggatgatcccgttccccaggtcatgagcataaaactcattaggtagtttttcagcctaggcctcctccttctctcccctctctaacagttcccagtgtctatggatgccatttttatgtccatgtgtactcatagtttagctcccacttataagtgggaccatacagtwttcagttttctgttcttgtgtcaatttgcttaggataatggtctccagctccatccatgttactgcataggacatgatttcattcctttttggccacatggtattccatggtgtcagtatatcatgttctctttatctaattcacgatggatacacacctaggtagattccatgtctttgctataaataataattttttaaaagcttaaaatttatttagaaggaatttgaaggaaataatttcatacgatacatattgcttttaattttaaaaatcatttattattctctatcactatatatgtatgtgtgtgtgtgtgtatatatatatatgatacattttagttccaaatcagaacacattcctttactgatttatttacactaataaaaataggcgatgattaaaataatggcaagcttttctataattttacttcttagttgttattttcttgtcagttttcacggctgattttttcccctgaaatagacaatttgttatgagacacaaagcacttaaaatttctatttaaatacaatttattctgagtaaatagcattagactctgtattattctgaaacagaatgttag

SEQ ID NO: 85178 - DNA, 1212 bp, Homo sapiens
taacacaaagattccaattcagagttcaaaaatactgaaatgaggaacaggatggagagtttgttgtctttgtttagggtttcccccattctctgtggattagctaaatattggtattattatttgacatgaatgagggctttggaggaaggataagcagataagaaaggtggggtgttatccacgtcctaaatgtttaactgagtagcagattttacaaagtctgtgatcatttggacagattgaagacatctcatagaataaacttatgacactgcattaagcagtcaccagatattagctccaggtagtctaataaattttccccttttaaaaggcatattttaaaatttattttctatttttttaacttttatttggaatccagagtgtgcatgtgcacgtttgttacatggcagtattgagtgatgctgtagtttggggtacggatgatcccgttccccaggtcatgagcataaaactcattaggtagtttttcagcctaggcctcctccttctctcccctctctaacagttcccagtgtctatggatgccatttttatgtccatgtgtactcatagtttagctcccacttataagtgggaccatacagttttcagttttctgttcttgtgtcaatttgcttaggataatggtctccagctccatccatgttactgcataggacatgatttcattcctttttggccacatggtattccatggtgtcagtatatcatgttctctttatctaattcacgatggatacacacctaggtagattccatgtctttgctataaataataattttttaaaagcttaaaatttatttagaaggaatttgaaggaaataatttcatacgatacatattgcttttaattttaaaaatcatttattattctctatcactatatatgtatgtgtgtgtgtgtgtatatatatatatgatacattttagttccaaatcagaacacattcctttactratttatttacactaataaaaataggcgatgattaaaataatggcaagcttttctataattttacttcttagttgttattttcttgtcagttttcacggctgattttttcccctgaaatagacaatttgttatgagacacaaagcacttaaaatttctatttaaatacaatttattctgagtaaatagcattagactctgtattattctgaaacagaatgttag

SEQ ID NO: 85179 - DNA, 1392 bp, Homo sapiens
cattaaaaacattaaatgaagaaacataacagccaagggaaagatggaaggacccttccacggaaaaaaaaaatggaacaaatagcttgaaggaaaatgagaaggaaaacctgttgaaggatgacaccgatctggaagaggatgcccagagtgtaaagaaggagatggggatgggcaacagggctccagagggctaccaggctgtgcgttcacaggtcggaggagcagaaaatgcgtccatcgcaacaagaagggggactactgtgagtggaaagcttgctcatggagagggagacattcactcctctcactgtcccctatccctgctgtcccaaggagagagcaccccagttatgtgattgagtgtagtattttttaaatgtcagtactggtttgatttttaactaagtaaaaatggaaaattaaacaaaaagtacagggtatctgtcaacttcccagaacatatctttcgggtcttgtgtaaagaaattgatgtaatctgcttttctgagaatactacattttaattgttaattatgatttaattaaattaaaatttaatttaattttaatagttgctcatgaagtgaggaagaatttttgttattcaatttttttttcatttttatttatttattttttttgagacaatgtgtcactcttgttgcccaggctggagtgcaatggcgtgatctctgctctctgcaacctctgcctcccgggctcaagcaattctcctccctcagccttctgagtaggtggaattacaggcacctgccaccacgcctaattttttgtatttttagtagagacaaggttttgtcatgttggccaggctggtctctaactcctgacctcaggtgatccacccacctcagcctcccaaagtgctgggattacaggcatgaactaccgtgcccagccctttgttattcaatcttaagagtgtcagttgctgaacaacaaacttttaaaartattctagctgtaaaagtaacgcctttcactagtgaaaatttacaaagtagaaaaaaaataagtataaaacaaaaattagccagccataagcactttattcaaaaaataacattttattgattatctttagggttctttattgtattaaacttcatatattttgagttcatagtgcaaattacattttttaatataagttaattcacatatttttgtatattactaaatattactttgcttttcttgagacgagatctcactgtgtcccccaggttgagtacattggcatgatcttggctcactgcagccttaacctcccaggctaaagtcatcctcccacttcatttttgtattttttgtagagatagggtctcgctaagttaccctggctggtctcaaatgcctggactcaaa

SEQ ID NO: 85180 - DNA, 3868 bp, Homo sapiens
ggtagaacactacagaaatgcaacataaagtgaatttccttctctggatcaccttgaaaaaacctgcctgatcttaagaaagaagttcagtggtcttcataagcactactagtgtaaatccgtaacagccatagatgagtaaacttacagtcaccttcagaaaagcacatttactaatagttactgcatgcctaccatgtacatcagaaacaaaaggtttggggcattttgcagggagtaggtggagtgatttcccagcatcagaaattttttaaactactacataaatgctacctatttccagaattcacttctcaagttcccaaatgcacctcaaagttgtctctatatgtaacacttccttcaacacacattgatccacatgtcttctttcaccattaccttgtttgtgggccattattactcctaaatattttaaatgtctttgtctatcactggggagattcacctgtgatatgagagatgcccaatgtacatttagttaaacaaaaataagaatacactccaatgcactataacagacaaacaaatgaatactgggtatcctgtagcaaggttccaaattcacagcaattgaatcttagaaagaacattaaaggtcatccrgtccagcggactgcaaatgtcaggcttcagtgaactttttactgatctatgtcaaaatgaggacaatgtaataagttttcataaggctaagttttttaaatttaaagacaatcctttagtcagattatattcttccttatatttgaggaaggatactaaaatgtttttttctttcataaaaagatggtgatagttgatcattgttgtttcataaataattcttttacttagcaaaacaaaaaacttagcaattgttagacttcaattgtttttttctttttttaattttacaggtcagttaaattcaaaaatgtgagaacctctgctctaatccaaccaattttctgctgcctaaatgccttagaacatggtcaacaagttgtttttctgcctatgcatgaccacctctgacgacaagtctctagtaatgtggaaccatcaactgaaaaaagatatggttctatctgagggatgtttgcttagttttgtgaaggaaaagcaaaaaaatcaaggcttacagagagtaagccgacttgtgaaaatggagccagtaaaaaaacaagtgccaagaagactgatcagtaagagaagatcagagggatgcactcaggcctatacctcacagtcttccttcaacttattatgaaaatcctttatacaaataactataaaagccagactgtaaaatacattcctgaggtcagggctggtcaatttacatttccttttgcacatctcagtttaccatctgaaattcctttactaatctacatctaaactacatctctcaatttactacctgaaattcctttactaagctacatcttttagttacacatctttcaggtttgatcagaagcaaatgtaacacagtctcaatatcacccagacccagaatgcaacagaatctaaatgccacatatactcaagtatgcaaaaaacaataagcacaaatatatagtccaacgacaatttttaattatatgagaattaaaaaggatgaaagttggaggcaaggaatagaaaaagcacaaaagatcaaaagctaatttcaaggagtccatcctgaaggaaccaggaatggtgggtacagatgcctgacctccctccaagacaatgtgccaacaggccagtggagaacaaggtgggatctgagaacaatgtaaatttggatgttaaaagagaacacaagcaaaagcaccacgcacagtgccaggcagagacaggcattcaaatatttgcacattgaatgaattaataaacagacacttacacaaagagaatctggggccgtgcttccaaccataccataaggcactttaagtccaggtcatctttctttgacttaaagctcaggctaaaaatctaacttcatgaaaagctgagtcttcctaatagtttccactggcctctgttctagcccagctctggcagtgaggcccggtaaagttccttcctaaagacactgcctgcaagtctcaaatccggcacacgggatccatggtggagggatgttaatgggagtggaggcaaacaggccaaggggtggcaaggaaaaaaactatttctgatccacagaatggcaaataacaccataacgagttcttgaattaggtttaatcctggacagaaccaaatgaaaataaaaacctacttgtatttataattaaatagacagaaacaatgaaaaagtctcaccaactttagccacccctgattgaaaggagttttaacaattctttcatccatgctggcattccaagttttccattatatctcagcctctcattgttccagcactattgatggaatctcaatgccaaaaatggcgctggtcatcaaaattatgattagctgatctaccctagagtcagtttatcaatgtttcaatgcatacatcaattctattttttattatttcaatttaaatcatctgtgtctctattccctccctccctccagaggctgctttcccacacccttcttttcacctgcattctaagtattcccttgttctttcctttagctccctctgttccaaaagtaaaaacgaactgcaggaacttatgtagaaggcaggtttactacagatagcatacctacatgttacatattatataccatatgttggctaaatacagctagcatatcctgctttaagtgcttctgagcctgggcagacccccgtgtgctcatgctgctgatgtgaaccatccaccatcatatttcctaggggttcaggtgccttcctccagcctgctgaagaacatgaccaaatctcagagccctcaaagccacagctatcgagaggtgactaagcccctgcttctgtcagcccaggaaggccaattcaagagtcttatctaccccctagatttccacgacctgttccactcaagctaaaaattctgaaacgcacttttagaaactgtcgttccagaatcccattagctctcctaaaagggctgaacatcaaaaaattattcaacccaagccaagtatccttattttggctggaattctgccaaataaccacaagagactggtgcggtacaatcggcatggagtgaagcttgccaaatttgaccggagaacgacaagcctccatgaataagctctcatgaaaaggtaaaccattcttcaggatgaggtttgtctgcgatttgaaaagtcagattcaaaggactcttgttccttcctaagagaagagggaaccaaaattgaaattttcgaaactcctgggtatttacagttcacttttaccaagatgtttttaaaactaaaaactaaaatttaaaaaaaaaacccttgttctgaataatgcaataatgtcttctacataatgtttcagctattatttctagaaagtaattctgttgccagtgatcttgaatgtacttgggtaccaaagaaaaaagacacctgtgcctggcaggtcgatacgctactaatttgcccgaggtacgaacgaaacagaagatgctgatttctggataaaacgttctgcagtgccaggtaaaagaggtcacatgccctgaacggccgccgctcatttagagtgatgcaaaagctcctcagatattaattttgttagaaattcggggaatcaagcaacctaagatcaattcatttagacagcgggtgactggtactttccagtttccttttttcaacggactcagtgcatcctagcctgatctcttataaaggggtaggcaaactcggcaccaggtgcccatgc

SEQ ID NO: 85181 - DNA, 624 bp, Homo sapiens
aatgtaggttgagtatcccttatctgaaatgcttggaaccaaaagtattttggatctcagattttctcagatttgggaatktgcattatacttacaggttaagcatccttaatccacaaatctaaaatctgaaatgctccagtgagcatttcctttgagtgtcatgtcaatgctcaaaaagtttcagattttggagcattcagattttgggtttttcgattagggatactcaccctgcatataactcaataatataaattagatatcttgatgttacatactatagtttactatctaaaaagacatttaaaatcattttaccagaattatctcaccctaaattatagctgaataaaacctcacaaaatatctaaagtatcagcagtttgggcagttggatagaataggtgtgtttaattcagcagaaaaactgaacttttaaattttatgaagcaacaagaacatggttatacatgttaccaggaggaggaaaaggaggcaagtaaccttctggagaagaaaatgtgagaaggcagattggggtaggtgtgggtggggaagtgggcagttaaaaacttgacccataatgtagagattctagaaaatacagtgtaatacacagtc

SEQ ID NO: 85182 - DNA, 546 bp, Homo sapiens
gttacatttggaattttcctacatttcatatttagtaaatggatttattataagaacagtgattttttttaaagaatgaatttaataagtaacttttgaaattttgatttacagatcattattgccatctgctggttacatagtttaattgcattttttaaaattcccaattgttttactaaaagacaaaggaaaaaactgaggcaagttttagatatccataaccggattagagatctctatgtaagacagataatttgcagccaggtgcagtggctcatacctgtaatcccaatactttgggaggcagaggcggcaggartgcttgagtctaggagttttagaccagcctgggcaacatagtgataccccatctctacagaaataaacaaattagctgtgtgtggtggcctgcacctgtagtccttgctactcaggaggctgaggcaggaggatcccttgagcccaggagttcaaggtttcagtgagcaccatcacactttagcctgtgtgacagtgagaccctatcttgaggaaaaaaaaaaa

SEQ ID NO: 85183 - DNA, 546 bp, Homo sapiens
gttacatttggaattttcctacatttcatatttagtaaatggatttattataagaacagtgattttttttaaagaatgaatttaataagtaacttttgaaattttgatttacagatcattattgccatctgctggttacatagtttaattgcattttttaaaattcccaattgttttactaaaagacaaaggaaaaaactgaggcaagttttagatatccataaccggattagagatctctatgtaagacagataatttgcagccaggtgcagtggctcatacctgtaatcccaatactttgggaggcagaggcggcaggagtgcttgagtctaggagttttagaccagcctgggcaacatagtgataccccatctytacagaaataaacaaattagctgtgtgtggtggcctgcacctgtagtccttgctactcaggaggctgaggcaggaggatcccttgagcccaggagttcaaggtttcagtgagcaccatcacactttagcctgtgtgacagtgagaccctatcttgaggaaaaaaaaaaa

SEQ ID NO: 85184 - DNA, 546 bp, Homo sapiens
gttacatttggaattttcctacatttcatatttagtaaatggatttattataagaacagtgattttttttaaagaatgaatttaataagtaacttttgaaattttgatttacagatcattattgccatctgctggttacatagtttaattgcattttttaaaattcccaattgttttactaaaagacaaaggaaaaaactgaggcaagttttagatatccataaccggattagagatctctatgtaagacagataatttgcagccaggtgcagtggctcatacctgtaatcccaatactttgggaggcagaggcggcaggagtgcttgagtctaggagttttagaccagcctgggcaacatagtgataccccatctctacaraaataaacaaattagctgtgtgtggtggcctgcacctgtagtccttgctactcaggaggctgaggcaggaggatcccttgagcccaggagttcaaggtttcagtgagcaccatcacactttagcctgtgtgacagtgagaccctatcttgaggaaaaaaaaaaa

SEQ ID NO: 85185 - DNA, 546 bp, Homo sapiens
gttacatttggaattttcctacatttcatatttagtaaatggatttattataagaacagtgattttttttaaagaatgaatttaataagtaacttttgaaattttgatttacagatcattattgccatctgctggttacatagtttaattgcattttttaaaattcccaattgttttactaaaagacaaaggaaaaaactgaggcaagttttagatatccataaccggattagagatctctatgtaagacagataatttgcagccaggtgcagtggctcatacctgtaatcccaatactttgggaggcagaggcggcaggagtgcttgagtctaggagttttagaccagcctgggcaacatagtgataccccatctctacagaaataaacaaattagctgtgtgtggtggcctgcacctgtagtccttgctactcaggaggctgaggcaggaggatcccttgagcccaggagttcaaggtttcagtgagcaccatcacactttagcctgtgtgacagtgagaccctatcttgagraaaaaaaaaaa

SEQ ID NO: 85186 - DNA, 1008 bp, Homo sapiens
tgagttctaagggagagatcctgctaaatttcagactatagaggaaaagaagagactaagaattgagcattgggctgtccattgtatagaggtgaggaagatgaggacaaataagcaaagggaacttgaaaaggaatggccaatgagaagaaaaactaagaaagtgtggcaccctggaagcctaggcaggaaagggtatcagggcagaggaaggaatcatttgtgttaagaaggaagatcaacaggaggaatattaaggattgaacattggatgtagcaatcctggtttagtttaacaggagctgatacagggagaatgggaggtggaaagcgttattagaaacaataaatatgggcaactcttttgagacctttgtttataaaggagattaaaaaaaggaatggtagctgaataacaggatatttggatttgttcagcttttgttttaatatgagaaatattatamcacatttgaatataaattagaaaaatctagtagaaagggtgaactaatgatgcaggaatgagagggagaattagacaacaattatctcctgttgatgtaacattatcctttttactgttgatgttcatttaagttgcttctgattttttactattatgttgcaaagaaaatatttgtgcctacttattttttattcgttgagatcattttcttaagataaatttgcagatggggaattactggattaaagattatgaacatttttaatacccttaacactgccctattgccttaaaatcaattccatgtggccagtaatgtataaatgattgttttattgtaaccttcctagagttatgccatataacttgagtccataattcatggaattcctagtgtttcaactaccctttttctatcagactattagcttctaaaagacagagataatgtcttaatttttttgttgccatctatttttagacaaaatatttctctaataataataattacaacagttatctgaaatccctcagggttc

SEQ ID NO: 85187 - DNA, 1008 bp, Homo sapiens
tgagttctaagggagagatcctgctaaatttcagactatagaggaaaagaagagactaagaattgagcattgggctgtccattgtatagaggtgaggaagatgaggacaaataagcaaagggaacttgaaaaggaatggccaatgagaagaaaaactaagaaagtgtggcaccctggaagcctaggcaggaaagggtatcagggcagaggaaggaatcatttgtgttaagaaggaagatcaacaggaggaatattaaggattgaacattggatgtagcaatcctggtttagtttaacaggagctgatacagggagaatgggaggtggaaagcgttattagaaacaataaatatgggcaactcttttgagacctttgtttataaaggagattaaaaaaaggaatggtagctgaataacaggatatttggatttgttcagcttttgttttaatatgagaaatattataacacatttgaatataaattagaaaaatctagtagaaagggtgaactaatgatgcaggaatgagagggagaattagacaacaattatctcctgttgatgtaacattatcctttttactgttgatgttcatttaagttgcttctgattttttactattatgttgcaaagaaaatatttgtgcctacttattttttattcrttgagatcattttcttaagataaatttgcagatggggaattactggattaaagattatgaacatttttaatacccttaacactgccctattgccttaaaatcaattccatgtggccagtaatgtataaatgattgttttattgtaaccttcctagagttatgccatataacttgagtccataattcatggaattcctagtgtttcaactaccctttttctatcagactattagcttctaaaagacagagataatgtcttaatttttttgttgccatctatttttagacaaaatatttctctaataataataattacaacagttatctgaaatccctcagggttc

SEQ ID NO: 85188 - DNA, 1831 bp, Homo sapiens
atagaaaagatttttcaagtttaagaggtgtattctctgtatgtgtacatttgtgcattcctacatagaacttatgtaatacagcagactagataacctgaaaaacctctcactacaaaaccagttacactgtgcagaatatgaaacagcatgcaaagaagagctttgaaaaaaagtaaaggaaatcccagtgcttaataaaaagagactaaaaggcataaaaccagaaaattaaacatattgtaatggtaatacaagaactggagacaaagcctgatcttgcaggagccaggtgttggaactgagaccttacataaagtgagcaccttcaaaggtaacacctccagtaaaaaagtgaacaacggccgggcgcggtggctcacgcctgtaatcccagcactttgggaggccgaggcgggcggatcacgaggtcaggagatcgagaccatcctggctaacacggtgaaaccccgtctctactaaaaatacaaaaaattagccgggcgtggtggcgggcgcctgtagtcccagctactcgggaggctgaggcaggagaatggcgtgaacccgggaggcggagcttgcagtgagccgagatcgcgccactgcactccagcctgggcgacagagcgagactccgtctcaaaaaaaaaaaaaaaaaaaaaaaaaaagtgaacaacaaaaataaatctgcctactaatataggatgatgctaagaaattcgcctaagtctggccttcttatggtataaacgaaaaggctctcttgagtatttaaagctgagaaatcacagaattcaaaaatcaagaaacaccaagtgaagtcattaacataaaaagtaatactaggttggtaacgccctatgatactttacagaaacgaaggcaaaaactttctgatgcacatactctcagcatatacctcacagatttccatagaaaagcccagccagggcaaagcaagagagccgactagagaagccgaatgctcatacttcccaccaaaaaaaagagccaaaacaacaaataagaaagtatgtttgaactggagtgtttgagggagcacactggaatacagtaggagagagacagaaatcctgtgagacaaggagacctttagtgagggtcacatagagaagagaatgaagcactctgcctctgccacaccgccatctccccagccagtattagctcagaacaaggagatgcatccccagtggggactaggcaagcaagaggccccagcagcccccattaatgtcacagacatctgcactctttgttgctgagaatcctgcagtttctacagaccctgagtccagtttagggagctgcctgacagccacatggctgcaatgccccagagaaggagcccacattgtatcccctcatccctgtgattcaagctgcagctatatgatgccattttgaaaccagagccacaactagagtacatcctgttccaggggccagtagccaccatctcttttcattcctaaggctacactgccattacactaccttcacacacagtagtacaccattcccttgctgagttgctacagctccctaccccctgggaacaagctcctaggaggtgttccacctttcacatcctagtgactgcagcaccctgaaccctgtctctcagagcctagatccagtgccccatccatgaagcccatatagcaccttgccctcaaaggaacagacaatcttgatcagcagagaaaccaagtccaaactggcctcatgmgcagtcagcatgctcaccagcgaatgcaccattccaaagcgagtcccacccaaaccagtggaccagcccctgcat

SEQ ID NO: 85189 - DNA, 837 bp, Homo sapiens
ttttatatatttttagaaaccaaataaatgcagaaaactatttmgtatactaattatattaaaccagcagaaatataaaggcaataaagtatatacatatatatggggggaggggaaagattaaaaaatagatttacagccagacatggtgatagccctaaatgtatttctcaatatgtttttctttattgaccctaggaggatttgagttgctgcagctttaaacagaaaattgccatgttcactaattgtgagcacataaatatgcttttagtactgctttgcttatgtacaaataaatctgtaatatgtattatatgtaatatccttttctttgactttcattttaaatgtatattttctgatcattatgagctgtaaaacaaagaatcaatattggatattctcccaaataataaattttcaggattcattggggcattacagttgtcagtttgtttcttacatcctttatatttttaaatacaattttacttcctttaaaagataccaaagagaatagtggcacatatcactacacataattacatttttcatatatacttaaagaatcatctactgctccaaagatggcttcatcaaagtaaaactgaattaagaaactactatgccttttatttcaaaagtgaaagaagaaatgatatcttaatgaatctctgtattcccagatttccctaaaaccataagtgagaggaagagaactaacatttcagtccctactacgtgccaagtgcaatatggggcaccggtcacactttaaacattcacagccatccaaggaactgctcctaaatcacacaacccctaagtaactga

SEQ ID NO: 85190 - DNA, 1003 bp, Homo sapiens
ggtcagaattcagaattgcagtaatgaattccaagcagaaaacctgaaaagatggaaggtgattattgtagaagaaagtgctgcagcagcgtttgctagaactattcaagyattcttggttccgtctacctcattaaccaaggcctgaaaattcccactgcatttcaggcagtttgtaatttactgaagcattctggagaagtgtgaaatgtgatctgcagtgaggagaaaacggcatgttctaagtgtcggtctcaggagaggcaatgctgaagtcagagcaagctcaagtcacatgctagctttgctatgagaccttggtcaagtaactggttttgggtttttcctctgtaaataggggaaagcaatatctactttacagagtctttgtgaaaactaggtgggataatatacgtataatatatatatttataatacatgtaataatatatagcatagtatctggcatagagtaaggactcaataataaaaacaatacaggaagtattatttttttccctatcatttatcttttatcttctttcaatgctttttttatttactcagccttttgaaggtatcactgatgtggtattccttacctcattctttcttggcccttctagtttagaggctggaaagccaattactcccctcccagtttcgcttgctattatgggtggccatgtaacagatgcagaaaactactgggggcatcttctggagaaatattcgaaatcctcatgaaaatgaacatacttggtggtataatccttttctttcctgctgccccttcttctgctgagaatacaaatctattgtctatagccatggtatctatctcatgaccatccaggaaaggctaagagcatcacagaaatgtggtccttacattttttgggtggctgaacaaatgtttgtaaacacccatctctggttttttcattatgtgagaaaaaataaatatatttctacttgttcaagtcactgtatgttttctctt

SEQ ID NO: 85191 - DNA, 1003 bp, Homo sapiens
ggtcagaattcagaattgcagtaatgaattccaagcagaaaacctgaaaagatggaaggtgattattgtagaagaaagtgctgcagcagcgtttgctagaactattcaagtattcttggttccgtctacctcattaaccaaggcctgaaaattcccactgcatttcaggcagtttgtaatttactgaagcattctggagaagtgtgaaatgtgatctgcagtgaggagaaaacggcatgttctaagtgtcggtctcaggagaggcaatgctgaagtcagagcaagctcaagtcacatgctagctttgctatgagaccttggtcaagtaactggttttgggtttttcctctgtaaataggggaaagcaatatctactttacagagtctttgtgaaaactaggtgggataatatacgtataatatatatatttataatacatgtaataatatatagcatagtatctggcatagagtaaggactcaataataaaaacaatacaggaagtattatttttttccctatcatttatcttttatcttctttcaatgctttttttatttactcagccttttgaaggtatcactgatgtggtattccttacctcattctttcttggcccttctagtttagaggctggaaagccaattactcccctcccagtttcgcttgctattatgggtggccatgtaacagatgcagaaaactactgggggcatcttctggagaaatattcgaaatcctcatgaaaatgaacatacttggtggtataatccttttctttcctgctgccccttcttctgctgagaatacaaatctattgtctatagccatggtatctatctcatgaccatccaggaaaggctaagagcatcrcagaaatgtggtccttacattttttgggtggctgaacaaatgtttgtaaacacccatctctggttttttcattatgtgagaaaaaataaatatatttctacttgttcaagtcactgtatgttttctctt

SEQ ID NO: 85192 - DNA, 709 bp, Homo sapiens
actggggtgttctaaattttaacgagcaggcaaattcacaaatacagaatccacaaataatgaggattaactgtctttttttttcaagtttcattcattcattatttgtagagatgaagtctcactgtgttgcccaggctggtctcaaactcctggactccagtgatcctccagactcagtctcccaaagtgctgggattacaggygtgagccacggcttctggcctattttttcacatttgtagccagcttcttaatccaatgtgaactctctgatgactaggtgaaaataaatcacttttgttgtcctcacctgactcttttttaacttctcttctcttctcagaagaatttccaggatggggatgacaaaagcgagtgttttgccactacctgtgacctgcaaacagagagttttggtttccctttcttcctcagagttcatctgagggagaacacgaggacaggctgcacatacccgaggcactcaccgcttctgcagcgacatctttgtttcgcatgaacagagggatggttgcggactaaagagagagattgcaaagcactggttaaaggatgccatcaattcacaggtgagacccgaagccctaggaacataatgggcagctaaggtcacagtgggtcccaccacaaaaggggctctgagtaaccaagtcaccatagagaagttgaatcaaacgtggcaact

SEQ ID NO: 85193 - DNA, 1449 bp, Homo sapiens
tccttcattgtaactcaacgacatagggggctattcataaatatttatctaataagtagattaaaatttatatttcctgaggtctagtttttaggtggtatctcagttaaagttttaactttttaaagatttaagatactatctcacacaacagtggctacattttgtttgtttgttttgagatggagtcttgctctgtcacccaggctggagtgcagtggtatgatctcggctcactgcaaactctgcctcccaggttcatgtgattctcctgcctcagtctcctgagtagctgggattacaggtgcatgccaccacgcctagctaatttttgtatttttagtagtgacggggtttcgccatgttggtcaggctggtctcgaactcctgacctcgtgatccgctccccttggcttcccaaagtgctgggattacaagcgtgagccaccrtgcccggccaagtggctacattttaatagaagattccttaagatcaaaaagcttcaatattgaattctccagtctccagtagtgtcaggcgtcacaggaatcaatgagagaaggatttgttggacaggtgggtctctgtaacttctcttaaatcataccagcatggaagccagttactcccaagactagatgtgcccatttttttttggttggagagctaagggaccaggccaatcgtttatctgtgcaatgattcaatgagcgcacacggagtactacttagtgtcgtacgctgtacttggcacatgtactttcctagtgaattgtgaagtccatcttgaattattgaattatttgaattattttcaaataattgaaaattattgagttattttcagttcaaacagttgcttgcaagagaaaggtggaaaaacaaatatttggggtttgtaaattttggggccatgtacatcttagtgtttgcaatgaaagcattagtttgaaaattattttactttgttctgtattttaaaattacttttcaaggtttatgtttttttctaaattcaaaattcacatttcaaaagattctaatttcttagcatatcaagttaagtggattaaaataaaataactttttaagaatttcttgagcagcatgtcattaaaaatacataatatacatgtatacatgataaaacaatattaagatcatttttatacttaaaatgcaattaatagaaatcaatgttccaaggcggattctgattttttgtggaattttgacttctttgtattgttagaacaatttaaaaggatatgttcttctgttttccctttccctcccaccttcttttattttctcaatatatttaataaactattttcataccaaagctccattccagataggacaagcaattcgaacactccatcctgtgaaccaaggcttgtaagaaaagacaggaaagaaagcaataactccagagcatacactga

SEQ ID NO: 85194 - DNA, 1449 bp, Homo sapiens
tccttcattgtaactcaacgacatagggggctattcataaatatttatctaataagtagattaaaatttatatttcctgaggtctagtttttaggtggtatctcagttaaagttttaactttttaaagatttaagatactatctcacacaacagtggctacattttgtttgtttgttttgagatggagtcttgctctgtcacccaggctggagtgcagtggtatgatctcggctcactgcaaactctgcctcccaggttcatgtgattctcctgcctcagtctcctgagtagctgggattacaggtgcatgccaccacgcctagctaatttttgtatttttagtagtgacggggtttcgccatgttggtcaggctggtctcgaactcctgacctcgtgatccgctccccttggcttcccaaagtgctgggattacaagcgtgagccaccatgcccggccaagtggctacattttartagaagattccttaagatcaaaaagcttcaatattgaattctccagtctccagtagtgtcaggcgtcacaggaatcaatgagagaaggatttgttggacaggtgggtctctgtaacttctcttaaatcataccagcatggaagccagttactcccaagactagatgtgcccatttttttttggttggagagctaagggaccaggccaatcgtttatctgtgcaatgattcaatgagcgcacacggagtactacttagtgtcgtacgctgtacttggcacatgtactttcctagtgaattgtgaagtccatcttgaattattgaattatttgaattattttcaaataattgaaaattattgagttattttcagttcaaacagttgcttgcaagagaaaggtggaaaaacaaatatttggggtttgtaaattttggggccatgtacatcttagtgtttgcaatgaaagcattagtttgaaaattattttactttgttctgtattttaaaattacttttcaaggtttatgtttttttctaaattcaaaattcacatttcaaaagattctaatttcttagcatatcaagttaagtggattaaaataaaataactttttaagaatttcttgagcagcatgtcattaaaaatacataatatacatgtatacatgataaaacaatattaagatcatttttatacttaaaatgcaattaatagaaatcaatgttccaaggcggattctgattttttgtggaattttgacttctttgtattgttagaacaatttaaaaggatatgttcttctgttttccctttccctcccaccttcttttattttctcaatatatttaataaactattttcataccaaagctccattccagataggacaagcaattcgaacactccatcctgtgaaccaaggcttgtaagaaaagacaggaaagaaagcaataactccagagcatacactga

SEQ ID NO: 85195 - DNA, 1449 bp, Homo sapiens
tccttcattgtaactcaacgacatagggggctattcataaatatttatctaataagtagattaaaatttatatttcctgaggtctagtttttaggtggtatctcagttaaagttttaactttttaaagatttaagatactatctcacacaacagtggctacattttgtttgtttgttttgagatggagtcttgctctgtcacccaggctggagtgcagtggtatgatctcggctcactgcaaactctgcctcccaggttcatgtgattctcctgcctcagtctcctgagtagctgggattacaggtgcatgccaccacgcctagctaatttttgtatttttagtagtgacggggtttcgccatgttggtcaggctggtctcgaactcctgacctcgtgatccgctccccttggcttcccaaagtgctgggattacaagcgtgagccaccatgcccggccaagtggctacattttaatagaagattccttaagatcaaaaagcttcaatattgaattctccagtctccagtagtgtcaggcgtcacaggaatcaatgagagaaggatttgttggacaggtgggtctctgtaacttctcttaaatcataccagcatggaagccagttactcccaagactagatgtgcccatttttttttggttggagagctaagggaccaggccaatcgtttatctgtgcaatgattcaatgagcgcacacggagtactacttagtgtcgtacgctgtacttggcacatgtactttcctagtgaattgtgaagtccatcttgaattattgaattatttgaattattttcaaataattgaaaattattgagttattttcagttcaaacagttgcttgcaagagaaaggtggaaaaacaaatatttggggtttgtaaattttggggccatgtacatcttagtgtttgcaatgaaagcattagtttgaaaattattttactttgttctstattttaaaattacttttcaaggtttatgtttttttctaaattcaaaattcacatttcaaaagattctaatttcttagcatatcaagttaagtggattaaaataaaataactttttaagaatttcttgagcagcatgtcattaaaaatacataatatacatgtatacatgataaaacaatattaagatcatttttatacttaaaatgcaattaatagaaatcaatgttccaaggcggattctgattttttgtggaattttgacttctttgtattgttagaacaatttaaaaggatatgttcttctgttttccctttccctcccaccttcttttattttctcaatatatttaataaactattttcataccaaagctccattccagataggacaagcaattcgaacactccatcctgtgaaccaaggcttgtaagaaaagacaggaaagaaagcaataactccagagcatacactga

SEQ ID NO: 85196 - DNA, 1449 bp, Homo sapiens
tccttcattgtaactcaacgacatagggggctattcataaatatttatctaataagtagattaaaatttatatttcctgaggtctagtttttaggtggtatctcagttaaagttttaactttttaaagatttaagatactatctcacacaacagtggctacattttgtttgtttgttttgagatggagtcttgctctgtcacccaggctggagtgcagtggtatgatctcggctcactgcaaactctgcctcccaggttcatgtgattctcctgcctcagtctcctgagtagctgggattacaggtgcatgccaccacgcctagctaatttttgtatttttagtagtgacggggtttcgccatgttggtcaggctggtctcgaactcctgacctcgtgatccgctccccttggcttcccaaagtgctgggattacaagcgtgagccaccatgcccggccaagtggctacattttaatagaagattccttaagatcaaaaagcttcaatattgaattctccagtctccagtagtgtcaggcgtcacaggaatcaatgagagaaggatttgttggacaggtgggtctctgtaacttctcttaaatcataccagcatggaagccagttactcccaagactagatgtgcccatttttttttggttggagagctaagggaccaggccaatcgtttatctgtgcaatgattcaatgagcgcacacggagtactacttagtgtcgtacgctgtacttggcacatgtactttcctagtgaattgtgaagtccatcttgaattattgaattatttgaattattttcaaataattgaaaattattgagttattttcagttcaaacagttgcttgcaagagaaaggtggaaaaacaaatatttggggtttgtaaattttggggccatgtacatcttagtgtttgcaatgaaagcattagtttgaaaattattttactttgttctgtattttaaaattacttttcaaggtttatgtttttttctaaattcaaaattcacatttcaaaagattctaatttcttagcatatcaagttaagwggattaaaataaaataactttttaagaatttcttgagcagcatgtcattaaaaatacataatatacatgtatacatgataaaacaatattaagatcatttttatacttaaaatgcaattaatagaaatcaatgttccaaggcggattctgattttttgtggaattttgacttctttgtattgttagaacaatttaaaaggatatgttcttctgttttccctttccctcccaccttcttttattttctcaatatatttaataaactattttcataccaaagctccattccagataggacaagcaattcgaacactccatcctgtgaaccaaggcttgtaagaaaagacaggaaagaaagcaataactccagagcatacactga

SEQ ID NO: 85197 - DNA, 798 bp, Homo sapiens
cccagagatgggcttccatgcactgtggaggtgggaaggcattggggagccagtggaggcagaaggaagccagcctgagttgaaatattggccagcacaatgtgtggaatgaggagctgactgcactggtgtgaaggctgcttggtgtttctcaatgcacctgagtctgcagagttgagacggctcccctgacccaggaccagcaagaccccaggaagccagagccccagtaacttccagtggcctagccgaagcctttcaccagatgtatgaggttaggcaacccttccagccacagggcraatggagcaggtcaaccctgcatgcaggatacttctctgggtgaccttggaccgacccagtcctccctgctctctcacttgtagttctcaagaataactgcaggatgttctgggaatgcagcatgctgagataaaggggtcagagcagctggggtgctgttctggtttcccctagaaacacagtgtccttcaatgctttagcccagcacatcacattcccttggggtataagactctgggcaggctgcttttcagggttccttagctgtagtgtaagtgggatacatgactccatccactctgggcagcttttctaggctttggggacccactcaacatgaatcctgggcttctgttgttctttgctgtctggaagcaataaatatttttcctgtaacttgttgcatgtgagtgtggtctgcctcgctggactcagacaagttagtaacctctggacagtgagcctgcttcacaaacccctgttggtggagggagg

SEQ ID NO: 85198 - DNA, 560 bp, Homo sapiens
gccacttgtaggagtggctgccctctctgctaaacatgcccacctgtgtaccaagcccatgttaagcacatgggaaatgcagccaaatcatccaactggagggaaaagagacccagctgattggaaggtcttgaatctcacctcacaccctcacattttctcagcccctagaagcccctaacataccagcttggatgcttctcttggcagcctgacaccctcaggggcctgggtagaggctgaagattatcctcaaaataaacaaaagagaggcaattttattaagaattctaaccgggggtaacagcaacagtcatcctggctataaggagagaggatctgaatccagtggtttctggtgagcacaggccaagaaaaaatttacgctacagtaacgggggtgctagaaggccttccctgcagagaggccagagagctgggcactccaagctgccatgccattgcctctggagggaagagaagttttgactgggtttcaggggtaggttcactgccaactgaccctgtgcacraggataaacaacttgatgaccgagaag

SEQ ID NO: 85199 - DNA, 532 bp, Homo sapiens
tgctgccaggacaggtgagatggggagaaacttctcagacagaatggaggggtgtgcctgggaacacagtgtcttatcaatatgggttcctgtcatattcgaatgaatcccatatccaaatttcatcaaagtccctccagggaattagaaagtagatcacatcttttatgtgattcttttacatggactcagaactamcacataggatgaggtgatggcttaacttgctccattatggaatttctgcatctctgcttccctcaaggcatcaattgaagatgtctctgcccatgaccccactcagtttgtgggcctcagcccctttcttccctagctcagtttctcctgtccagctgctccttctcacccccacactctctcttattttgagtctctgagcagactatccccctgtttggagggcccttccctcatctccccacccacacctctcttccttggccctgttccatatcccagtcctccaggagtctgttggaaccaaacgtcccttccccagcactggcacctg

SEQ ID NO: 85200 - DNA, 738 bp, Homo sapiens
tcaccatagccaaaggtggaaacagctcaaatgtccatcaatgaatgaaaaaaaaaaaaacaaaaaaaactgtggtatatactttcagtggaatatcattcagccataaaaaggaatgactcagtgatatgtgctacaatgtggatgaatctcaaaaacattatgctaagagaaagaagccaaacaaaaaaagccacacattatataatttcatttatatgaaaggtctagaataggtaaattcatacagatggaaagcaaattggtggttgcaggarttggggaaggggaaatgggggtgactgctagtaggcacagggctttctttcggggtaatgacaatgttttagaactagattgaggttatggttgcacaacattgtgaacatactaaatgccactgaattgttcactttaaatagttaattttatgttatgtgaatcttaccccaataaaaaataaaataaaatttgggagtgcagcagggaaaaggtcagagaaactgtatccctggactttgctctctgccttccctaccgtgtggcaaatagcaacctggcataaagacagagttgtccatgaccagcagggggacagacactacttaccctcatttgactggccaaggcaagcctgggggagctggacttctgatagccaagagctgaccatgtctctgacacttggccgctacacccagctgagggcaaccactggctctctctcggctaattaag

SEQ ID NO: 85201 - DNA, 615 bp, Homo sapiens
ctcccctgacccaggaccagcaagaccccaggaagccagagccccagtaacttccagtggcctagccgaagcctttcaccagatgtatgaagttaggcaacccttccagccacagggcaaatggagcaggtcaaccctgcatgcaggatacttctctgggtgaccttggaccgacccagtccgccctgctctctcacttgtagttctcaagaataactgcaggatgttctgggaatgcagcatgctgagataaaggggtcagagcagctggggtgctgttctggtttcccctagaaacacagtgtccttcaatgctttagcccagcacatcacattcccttggggtataagactctgggcaggctgcttttcagggttccttagctgtagtgtaagtgggatacatgactccatccactctgggcagcttttctargccttggggacccactcaacatgaatcctgggcttctgttgttctttgctgtctggaagcaataaatatttttcctgtaacttgttgcgtgtgagtgtggtctgcctcgctggactcagacaagttagtaacctctggacagtgagcctgcttcacaaacccctgttggtggagggagg

SEQ ID NO: 85202 - DNA, 615 bp, Homo sapiens
ctcccctgacccaggaccagcaagaccccaggaagccagagccccagtaacttccagtggcctagccgaagcctttcaccagatgtatgaagttaggcaacccttccagccacagggcaaatggagcaggtcaaccctgcatgcaggatacttctctgggtgaccttggaccgacccagtccgccctgctctctcacttgtagttctcaagaataactgcaggatgttctgggaatgcagcatgctgagataaaggggtcagagcagctggggtgctgttctggtttcccctagaaacacagtgtccttcaatgctttagcccagcacatcacattcccttggggtataagactctgggcaggctgcttttcagggttccttagctgtagtgtaagtgggatacatgactccatccactctgggcagcttttctaagcyttggggacccactcaacatgaatcctgggcttctgttgttctttgctgtctggaagcaataaatatttttcctgtaacttgttgcgtgtgagtgtggtctgcctcgctggactcagacaagttagtaacctctggacagtgagcctgcttcacaaacccctgttggtggagggagg

SEQ ID NO: 85203 - DNA, 615 bp, Homo sapiens
ctcccctgacccaggaccagcaagaccccaggaagccagagccccagtaacttccagtggcctagccgaagcctttcaccagatgtatgaagttaggcaacccttccagccacagggcaaatggagcaggtcaaccctgcatgcaggatacttctctgggtgaccttggaccgacccagtccgccctgctctctcacttgtagttctcaagaataactgcaggatgttctgggaatgcagcatgctgagataaaggggtcagagcagctggggtgctgttctggtttcccctagaaacacagtgtccttcaatgctttagcccagcacatcacattcccttggggtataagactctgggcaggctgcttttcagggttccttagctgtagtgtaagtgggatacatgactccatccactctgggcagcttttctaagccttggggacccactcaacatgaatcctgggcttctgttgttctttgctgtctggaagcaataaatatttttcctgtaacttgttgcrtgtgagtgtggtctgcctcgctggactcagacaagttagtaacctctggacagtgagcctgcttcacaaacccctgttggtggagggagg

SEQ ID NO: 85204 - DNA, 1976 bp, Homo sapiens
ttttggtccccacaatgccactgccactgagtgcagtgaatgagtcctgaattgatttcttcactccctgggagtgccaccacagagtaaaaatagagagtggcaggaatttctcacggtgttgtgagctgtgctgacaagcctgggagagctgcttgcctaatctcttgctttgataaggtgagcaaaaatgagccatgggaggttgtgttgtctgcaaacattttccagcctagagtcagaatccaaagggagctaaccagggttggcccctcagaggggcggagtctcaagggccgggggatttggaggaccctcactagtgtcacgtggtaggggagtgtcttcagggttccgttctgaccacacaaagcagtgggtttgcccctttacatggtgcccagaggaggaagcaggattctggagggtgtgtgtttttgggcgtgtgcgcctgcatgcggccgagcaaagtctggaggcagcatcactgctgctatcagggcactggagcagaggctccacagtgtctacctggctgaggaaaggtggaggctggtcattaccatgccaaggacaagccgcacactttgcacagccagccgcctccctgggccccgcatcttacctccatatccacagttttgggagaagaggtggtgaaaatattgggtgatgtccactctccatttcccgggaaatagcaagtgggtagttctcaaacacctgacaacccaaagtcctcactttggggcacttgaatgcattagacttttaaaaaatgaggacatttgccttaaaaattctgtctgcattataaaagcatttaaatgagttactttcctgacaaacatcccggcagacagcagaggtggtggtggctgcagggcaggggcacccaagcaagtgtgctcaggaattagtttaatgttctaagccaaattgatccttctctctttttctttcttcctctcctctatcacataatgcattttgaccacaaagagaaaggaaccttggggtcatcagtgtctcagatgctccgaaacaccatttccttacgttggcatggataaattgagtgtggagggtgagtgctctatgatgtaaatgaaggaggtgatttaccttcaaaaccagagtgagcttagtgtcaattttaggcaagttgaccttacagccattggcagtcagaaaccacattgccctctgtgtgtctcaatcccgagaaaaggaagctctctgacccttggaggagccatcctgattctctgaggtctggatgtgttgagggggtatggatgctcctacttatgggggagctgctctgatccatggcctggggtggactggggtctcttgctcttaggtgcgattcctggagcagcagaaccaggtgctacaaacaaaatgggagttgctgcagcaggtgaacacctcaactggaaccaacaacctggagcccctcttggagaactacatckgtgacctgcggaggcaggtggatttgctcagtgcggagcagatgcgccagaacgcggaggtcaggagcatgcaggatgtcgtggaggactacaagagcaagtgagactccaggcagggcaaaacaggggagaagcatggccggaaactggtcacaggggcaagacattcggcttcagtgtttgtgtgtaagggtggggggcggggcatgcaggctctgcactgcacaactgcaggaggcactgttttgtatgtggcaaccctgggtagaatgatattggcagccagctgtcaattgcattgggtggggaggggcaggatagcttcatggatgttgaaaccaagtaagcctgatttccagtgtggcctctgccacttactagctgcttacaaattcatctttttaagtttctagtgttcacattagtaatgtgggaatagcaagaaccttccttgttggattgttgtgggtagatctgtggttctcagacttgagc

SEQ ID NO: 85205 - DNA, 1089 bp, Homo sapiens
ttcagatacaggggactgaggcattctctcacttgctaaaatttagatacagggaactgaggcattctctgatcaagagactcatctctgaaagaaaatgagattggcttcattttcaggctttctctcaggaagtgagagcaaacgcatgcttcctttgcatgaatgccatcttccttctgaggctctcaaatggggtaactctgcttccctgttagtgaaggacgtttccgtggtcagcggcagaaaccatacaaaatgcacttaagaacaaacagaagtgacaggattgcatgactgaaaagtttacaagtagttctggcttcaggcatcgctggatcaaggggttcagaaattctcaccaggactcagtctctctcaagctcttgtttctgctttcacaggtggtgacttcattttcatttctaggcaggtttgccctgtctaaaagccagatacgcagtatatctaggcttcatcatattagctataattccagtggaaaaaagagattaaaaaataccaagaatcaatccccttggcctgagcacccagttaggatcaatgatcaactcctagatcaatcaccattgctgcctgtggcaatgctgcgaatggcccagccccgggtcccatgccactgctacaggagagaggtggggttggacccacacaggtcaaataggatgctgcctccaggaaaggggcactaggttccaggaggacaaaaacacagatgttccctccacagtgcagtcagagccctgccatgacctgacagcaagcactcagatctgtaggtttccgagacccacgtcatctccctgttgagagtggagttcacattcactcgcctgctgtttcctggtcycatgctgatcctcctggtcccatgctgatcctcctggtcccatgctgatcctcctggtcccatgctgatcctcctgacggtcactcaaacatccatcatccagttctcagcgaccacagtcactggcatggctagcactgctcttggtcctcagcttcctcaagtcattccctgtgtgtttttggctttgacgcccttctgcaactgtattcacatcc

SEQ ID NO: 85206 - DNA, 1089 bp, Homo sapiens
ttcagatacaggggactgaggcattctctcacttgctaaaatttagatacagggaactgaggcattctctgatcaagagactcatctctgaaagaaaatgagattggcttcattttcaggctttctctcaggaagtgagagcaaacgcatgcttcctttgcatgaatgccatcttccttctgaggctctcaaatggggtaactctgcttccctgttagtgaaggacgtttccgtggtcagcggcagaaaccatacaaaatgcacttaagaacaaacagaagtgacaggattgcatgactgaaaagtttacaagtagttctggcttcaggcatcgctggatcaaggggttcagaaattctcaccaggactcagtctctctcaagctcttgtttctgctttcacaggtggtgacttcattttcatttctaggcaggtttgccctgtctaaaagccagatacgcagtatatctaggcttcatcatattagctataattccagtggaaaaaagagattaaaaaataccaagaatcaatccccttggcctgagcacccagttaggatcaatgatcaactcctagatcaatcaccattgctgcctgtggcaatgctgcgaatggcccagccccgggtcccatgccactgctacaggagagaggtggggttggacccacacaggtcaaataggatgctgcctccaggaaaggggcactaggttccaggaggacaaaaacacagatgttccctccacagtgcagtcagagccctgccatgacctgacagcaagcactcagatctgtaggtttccgagacccacgtcatctccctgttgagagtggagttcacattcactcgcctgctgtttcctggtccyatgctgatcctcctggtcccatgctgatcctcctggtcccatgctgatcctcctggtcccatgctgatcctcctgacggtcactcaaacatccatcatccagttctcagcgaccacagtcactggcatggctagcactgctcttggtcctcagcttcctcaagtcattccctgtgtgtttttggctttgacgcccttctgcaactgtattcacatcc

SEQ ID NO: 85207 - DNA, 1112 bp, Homo sapiens
ggaatcaaagatgggtggaaacaagtcacttagagcaaatgaatggggagttagtggaaggattttttaaaagttgcctgattcactttacatttttaaaatttatcgtctcatgaattctcagttcagcctagaatacttttctctggcaaatgatataaaatctgtacacaagaaagaccctctctagttctctctgtgtgttttttaaccacaaaaatgaaaaatgaaaacaaagggcatagttttgcttttgtgaaatcaggcctttgtgagttttacttctggcgcatttgatcccttgtggttgacccactcattcagtctctttgtaaaagaggtaatttgaaacaaggtagtaaagattctcaacaagacagatccattctttgtgcccaggttcacgctggttcagcgtctagccattgaaatggttctgcaaagaactgggattttaaaaattctgttgctgaaatttcctgctgcttttgacgaatcagcttaaattcctattgtttgtttttatagtaatgtaggcgacggcagtctggttctcttttaattgtcttcatttctgcccttatttgagttgcagcaaatcagcgaaatggtgtgataatgacaatcccaacagctttctccccttggcacacactcttcctttccattttgttaatcacaatcagaataatgcatctgttcggaggccccctcttctatcagatcttagagcatgaaacaaagaggcctgaagatartccgtgctgcatatgtctgatgcgataaattaaaagaaaaataaccgtctgagcaattcaatcaaaacggtgtcccctctgcaataattggggcgcaagaatttcatagcgtctccctacctttctttttgtaatgggtctatcagactccaggcgcgtgacttgctcagggtctttcaacaagattaagagtgaggtgttcataggagagccgccttcttcacgctgaatgaaggatcatttttttcacaagggaataatgctttttgctttttattgagaggcacctaggcttctctttcttcatctgcctcgcgtgaagtatgaacagcatcatttccaatctcttgccca

SEQ ID NO: 85208 - DNA, 1190 bp, Homo sapiens
caagggtgccaccgagtcaccggggaagaggaggctcctctaggacctgctgtttgggcgtcgctgttatcaagcagtcagggcaacaggtttctctatattttcatctggaatgagagttccctgattcggtgacctccatggaattcgggaggcccctgctgccttaatgcctgcatgaaactttcacgttccgtcctaggatctatttggttcgagtattttatcttcaacaggaaacatcagaggtataaggaaccaagcgtatgaatctatttattcaatcattttgaggacaaattataaacgtaatatgatacactctgaggatacagagatgaatatgagattaactctgccctcatgagattagagtctagtgggggaaaatgaggcatggacagtgataaatatctctggcaagctgtataatacagctgcagaagaattcrctgattgcgtgatgtgaggaaggactgacatttttggctttcgtgtaactctttagaaatctcttttccacaattgtgcttcttctgtgttggtcatggtcttcactgctgacaacagatcccactgtggtagagacagttttattagagcataggaggtagcagctagactccttgagtaccagggagccagggttgggtgccaggaacaccagcagccagtgggaactcccagccacagtgtgttcctattctggccccaatcccaatagtaccattgccttcctttcagcacctatggtgtagggcccggcaggactacccgtaaataaccaaagacagcactctagaatatgtaagcagggcggatcccatgtgaaaccatggcctcatgtcactcactgccctgcgccaagttccagatggatgcacctgctcaacaggacctaggccaggccaaaaacccaagctctgagagatccctgcacatccaatttataggactggggcttctttgattcaaggagttactccagaagggacctagaactggtgttctgtgtgccaatcttcatactcatcatactcacagaaatactcatcttattaaagttgatttttgatactattgaccttgcaaaaagccacgttagaatatctcgtacatgtcatgtttctcttttcatgaggcttctaggaaaggatgcaaggatcctaattttgtgtttctcgcattcc

SEQ ID NO: 85209 - DNA, 643 bp, Homo sapiens
  misc_feature (1)...(643): n = A,T,C or G
tttattcaatacacaaggcatatgtcaaaatattcattattaaataatgtttaaaataattttactcctaaagccattgctacatcatgcttcttagatttaagctatgagtgagacctgtaagtcaagaacaagggcaggaattcttagcaagtaagtttataggcttttctaacatcactgctcacctacatggcagccattctttcttttttcctccataacagaatccctcttctattcargtactagatatccttgtgcttcagaaggctgtccaatggaatgaacaaccccaggcccaaaagatgaatactgatccatttaagacaatcatggtaattttattcctgttgtcagttattagtttaagaataaacgcttgacaaaagttcttgccagagacacatgagtgaagtctaataagagagctttaggagaagactttcttgttctcagagatggacccaaggaagggtcacattccttttccctcttctagcctttcagggttgttgcctattgtgatggccaccaccttgnnnnnnnnnnnnnnnnnnnnnnnnnnnnnnnnnnnnnnnnnnnnnnnnnnnnnnnnnnnnnnnnnnnnnnnnnnnnnnnnnnnnnnnnnnnnnnnnnnnnc

SEQ ID NO: 85210 - DNA, 743 bp, Homo sapiens
ctcctcctgccatgacctagaggtggtacatccgcagagacaatatagaggaaaggtcttagatttagaattagaccctttagattttggagttagaccctttagaatctgagctctttcacctgctgggtgaggtacctttagcccattatctaccctcactgagccctgtttctttacctatagaaagataacaatgatggcttgttgacaacactggccccactctagcatggcatcagttgtgtgaactgtgtttctgtgggctctctggcctccttcactcatcttcactgactacctggacacttccaggatttsagtttgccagccctgtcttggttaaagcatgaagccatgtacaattctgtggggaaactgagatcctggtgagtaaggaagatggctgcagccatctttctctcaagttccatcttaagtatctccattatctgtgtgctgtgtatgtccaccagtgcagaaactgttggcaagaagaggatcagtaataaaagtattcctgaaggattattctaagggtggttaccagactagcagcaacagctccaccttatgtttgttaaaaatgcagattctcgggcctatctgaaacactggtagagccagcaatctgtgtttcagccagccccttgtgttgttctaatacatgctgacatttgagaaccattggtataagtaaagactggagagaacacagatccaaaatgatggtctcttgactg

SEQ ID NO: 85211 - DNA, 714 bp, Homo sapiens
tgagcagagaatgttttcattacacagaagaggaaactgagggtcacatcagttaagtgatgtgttcaacatctcacagctgaaagtgatggtgctgagaccagtccctcaacctctcgcttctaaagcccacatagtctcagcaccaccctgaaagttgcccactattgattaaaaaaaaaaatggaaagttcacagcccataggaagtagattaggagcctcatgctacataatctgcagaaataaccaaataagctgaagggttaggactagaggtatcctatcatctcagtaccctaaatagctgttcccttcacttcatctacctgagaatggtgtaagagctgcacatatagctggaataccaagaagaagattacgtatcctccctgggatacagggacatcacacatgttccaagcagcaggagcaggatagggctgttttctttcgcatttgtgtgctctaggtcttcacttgttctgaatgctcccagcaatgatgtctatggctttgggtagttgctcttagaatcctgctttataatataaaaaagaaagcctttgtaagataatattcagtttttatgatttcatttgcaacctgtaaataaatctagctttattttgggagattttatatatatatatatatgcgtatatatataygtatatatatgtgtgtgtatatatatatatatatatctcctcaa

SEQ ID NO: 85212 - DNA, 556 bp, Homo sapiens
ctgttattattaaacatataagctctctcctttttaaattttgaagcttgtggtctgtttactttttgcatattttcttctttagaaggcttgtgggaagggtagggttaaagtgggtctaccgtccctccatctttggggttgcctgaggtagttttgaccctggtcagaactcttagaaatattaactgatcaaatgtaccaattaaaagataaatgagggtgttgctgggttgctttgtactgaggtattgctttttattttttgtttgttttggacagctcacattttgtctcctgccttgggtcctttcatttctgcttggtaatcttccttcatagtggcaattgatttcttaagggtttctcttttttttttaactyatggcaaagtattgggatacaaagattttctggtattcttcatctgataggttttgctgactttttaaattatacctttccactgatgcttggtcagctacctttcattttctcagcactgaattagttggattttcccaactgtctgtgtgcaagtgatggatatctttgt

SEQ ID NO: 85213 - DNA, 760 bp, Homo sapiens
ctgaaatctgtaaaattaaattaaattaaatcacatatactcattactttttgactacaaaattaattatatctgaatgaaatactgatcatagcttttttaaaaagcaattagtaaatgtaaacacaaaaacattttttaaaaatatgaaaaccgaagacattttttattgagaactttcttagtgcaaacattttccttttcataaccttgtattctttgcttttctttttaatactaaattcagcagagatgtaaactaatgatctctttttatcacttacatttaaaaatatgttgctttcagattagtgttccatgaattgttcgtatagtttacttcccctaaaacacttatatcttaaagaaaaatcctttcacatattcagtaagttatgatgtaattacattgytgttcctgagccaactagtccacactaaaatgcgtttttattcttaagactcttctttaagaaattaataaaatttgtgctcctaaaacaaattaactaattagaaaaacttaatacagtctccagaagtaattgagccattaactggtttatacactgattagattgtgttaaaacctaaaataagacaattccttaagaagtataatacccattccaggaatagtaaagcgtttaaattgctgaactgcattattcttaatccttcccccactgcttaattggaaaggttaatggattctgaattgttctaatatattaagacaaccaactttttcttgcatttc

SEQ ID NO: 85214 - DNA, 608 bp, Homo sapiens
tccaagattgtctagttgtaatgttgttgcccttgttggacctgaatcttaccccgtagttagaaaagtttccccaactttggtaagaattccctgggggcacttttgtacagagtattgcsttccagggaaatcctgattcagtaggcctagattgggccccaaaatctggtttgaagaacccagatgatttctttttttttttttttttaattattgtgggtacgcagtaggtatatgtaacctaggtgatttctgttaagaaattttgggagacactgtcttagttgataagattataatctacttacgaatttttaaaactgtaaaatagatgcatctatagttattcatgatggcagtttatttctaatcgtggtttaggccagtttctttatccatttattttattttaattgtttttgaataagtaattacattctcatgggttcattgagtagatataaaaaggtatgcaatgataacattctgcctgtgtcaaccactaatcagcaagtgtgttctcagttttttgtgtatgtatgacagtttacatacacatacaattatggaaggacctcatttttttttaatttaatgtttttttt

SEQ ID NO: 85215 - DNA, 2741 bp, Homo sapiens
ccaaaagattggcattatttactctttaaatatttgattggattgaccagcaaggccatatggacctggcttttctttatggcaaaatttttattactaattcaatttctttacttgttatatgaccattcatatgtcctatttttttccttgcatcaattttgtgtctttctaggaatttatctttataggaattggtatcattctaggaattttctcatttcatataagttgtttaatttgttggtgtaatataaaagttgttgttgctcatgataatcccctgtaatccttttaatttctgaagagttgacaatgatatcccctctttctttctaattttggtaatttgtgtcctcaaagaactagcatttagttttattgcttttacctattgcattacctattactaaattttttaggcaggaccagagcagattttcatcttgagcaaatcccttcctcacttcccccagcacccctcatcccctcacacactaatgtaaaattcttttgaattatgaggttttccagtctggcctggtgggaacagaatcttgtcacaactctctatgagcctggggactgttctctgtaattctgttagcccattcttttcctggcttccagtagttcccttatatgcatgcaaacttgaggggagctttctgcaaatctccagatttctgtctctgtgcagctatcctctctatgatgctctgtgctataaactcaagactgtttggcttttgtggacacccagctccatatcctcaacttagactgccagacttggcctgaattctcctccttctgccgtggcccgtaaactctgatgacattgagctggtggattacagggttcttgtttgtctgctgccactcaaatatcactgtctttctttgtcacttgaaaatccattgtttaatatatattttttccagttttttagtcgtttcaggggggaggataaatacacatcctgccactccatctcttataaaaataaaagcttaactataaatgtaagcataaatatgagtcatctgtggaaagttttgactgttctaatttgattcaaatattccctgtatttgtgttgggagggaggtgtgaggaattatcaaggcctgaagaagccattttaatatgctgtcactaatataaactacagctctagatcttcacttgtatctgagtccaccaaaagcaaactcattggccaaacattcctatgtctattgttgcaagggttaatattcttagaagataacttacttgattaaatagaacaaaatctataaaggcaccctaaattatagaatttataataaataatgtccaaaatatgagtatagcaaaaaaccttttattagaagtcattaaatgaatttttactttcagggggaagttgctgaagttatatttgtaggtgctaacccgaagaattcagtacaaaaccaggtaggtatcaatgattttcttttacaaatgtaaatccactttttagccattcattcatttaaatatccctctagaggttaataacataaagacaaaatgttccaacttgttttccatcttattttgtaggtacgggaaaatattcaataggtagttaatgtggattgagtctgggtaaaagcacacagraaacataattggcttcacttaggaccaagtatagcataatgcatgtatgactgcattgtctgtcaagaagatgttaagttgaatacaatcccatatatataattacgcgccacatacaatgatgtttcagtcaaagatgaactgcatttatgacattggtcccatgagattataatactctacttttactgtaccttttctatgtttaggtatgtttagatacacaaatacttaccattgtgttacaattgcctacaacattcaatacagtaacgggctgtacaaatttgtagcctaggagccacgggctgtaccatatagcctaggtgtgtaggaggttacaccatctaagtttgtgtaagtctaagtctgtgatgctcatacaatgatgaatttgcctaacaatgcacttctcaggatgtatccgatatatgactgtattcaaatatatagaactctaccaaatgttgtgaaatagtcaaagggccaactgaaggatgtgtgtctttggcttcttcttctctttttggctctctcctcctcctctacactactatctctggtcctacctgtactgttgtggaacggtcacagatccccgggtgtatactctcctggcttggagtcctggtgcatgtgctttactttatcttgcatcggccatttccctattatttactactggtgctaatagagcatttatttattaaacctaaaaaatgacattcaaaatacatgcccaatgttaaaacaatatagaagtgtagaaaatagaatatataagtgctcttctacccacaaacctgctttccagaggtaatagctgttaagagttttttaataaagcatttcagacttttttgtttttatcatatgtatgataaactatatacatatgtaatatatctattaataaaattaatgtatacttctataacttccttaaaatatacttataactacacaagcagtaactggacacattctagttgtaaaacctcaaataataaaggaatttatagtggaaaaagagtgggcatatgactgtgatttcgaggtcatggttttcactgtggctgaggatgca

SEQ ID NO: 85216 - DNA, 2741 bp, Homo sapiens
ccaaaagattggcattatttactctttaaatatttgattggattgaccagcaaggccatatggacctggcttttctttatggcaaaatttttattactaattcaatttctttacttgttatatgaccattcatatgtcctatttttttccttgcatcaattttgtgtctttctaggaatttatctttataggaattggtatcattctaggaattttctcatttcatataagttgtttaatttgttggtgtaatataaaagttgttgttgctcatgataatcccctgtaatccttttaatttctgaagagttgacaatgatatcccctctttctttctaattttggtaatttgtgtcctcaaagaactagcatttagttttattgcttttacctattgcattacctattactaaattttttaggcaggaccagagcagattttcatcttgagcaaatcccttcctcacttcccccagcacccctcatcccctcacacactaatgtaaaattcttttgaattatgaggttttccagtctggcctggtgggaacagaatcttgtcacaactctctatgagcctggggactgttctctgtaattctgttagcccattcttttcctggcttccagtagttcccttatatgcatgcaaacttgaggggagctttctgcaaatctccagatttctgtctctgtgcagctatcctctctatgatgctctgtgctataaactcaagactgtttggcttttgtggacacccagctccatatcctcaacttagactgccagacttggcctgaattctcctccttctgccgtggcccgtaaactctgatgacattgagctggtggattacagggttcttgtttgtctgctgccactcaaatatcactgtctttctttgtcacttgaaaatccattgtttaatatatattttttccagttttttagtcgtttcaggggggaggataaatacacatcctgccactccatctcttataaaaataaaagcttaactataaatgtaagcataaatatgagtcatctgtggaaagttttgactgttctaatttgattcaaatattccctgtatttgtgttgggagggaggtgtgaggaattatcaaggcctgaagaagccattttaatatgctgtcactaatataaactacagctctagatcttcacttgtatctgagtccaccaaaagcaaactcattggccaaacattcctatgtctattgttgcaagggttaatattcttagaagataacttacttgattaaatagaacaaaatctataaaggcaccctaaattatagaatttataataaataatgtccaaaatatgagtatagcaaaaaaccttttattagaagtcattaaatgaatttttactttcagggggaagttgctgaagttatatttgtaggtgctaacccgaagaattcagtacaaaaccaggtaggtatcaatgattttcttttacaaatgtaaatccactttttagccattcattcatttaaatatccctctagaggttaataacataaagacaaaatgttccaacttgttttccatcttattttgtaggtacgggaaaatattcaataggtagttaatgtggattgagtctgggtaaaagcacacaggaaacataattggctycacttaggaccaagtatagcataatgcatgtatgactgcattgtctgtcaagaagatgttaagttgaatacaatcccatatatataattacgcgccacatacaatgatgtttcagtcaaagatgaactgcatttatgacattggtcccatgagattataatactctacttttactgtaccttttctatgtttaggtatgtttagatacacaaatacttaccattgtgttacaattgcctacaacattcaatacagtaacgggctgtacaaatttgtagcctaggagccacgggctgtaccatatagcctaggtgtgtaggaggttacaccatctaagtttgtgtaagtctaagtctgtgatgctcatacaatgatgaatttgcctaacaatgcacttctcaggatgtatccgatatatgactgtattcaaatatatagaactctaccaaatgttgtgaaatagtcaaagggccaactgaaggatgtgtgtctttggcttcttcttctctttttggctctctcctcctcctctacactactatctctggtcctacctgtactgttgtggaacggtcacagatccccgggtgtatactctcctggcttggagtcctggtgcatgtgctttactttatcttgcatcggccatttccctattatttactactggtgctaatagagcatttatttattaaacctaaaaaatgacattcaaaatacatgcccaatgttaaaacaatatagaagtgtagaaaatagaatatataagtgctcttctacccacaaacctgctttccagaggtaatagctgttaagagttttttaataaagcatttcagacttttttgtttttatcatatgtatgataaactatatacatatgtaatatatctattaataaaattaatgtatacttctataacttccttaaaatatacttataactacacaagcagtaactggacacattctagttgtaaaacctcaaataataaaggaatttatagtggaaaaagagtgggcatatgactgtgatttcgaggtcatggttttcactgtggctgaggatgca

SEQ ID NO: 85217 - DNA, 853 bp, Homo sapiens
acataattactggcccgctaaactggaaggcacccaagaatctcttttagtaggtgactaaaggggaagacatttaactattgaccagtgtatttatttccaaagcctgccatagcaaagtaacacagatggggtggcctaaacaacagaattgtctcatgattctggaggctagaagtttgagaccaaagtgtcaacagtgctggttccttctgagggctataaaaaagaatctgttccatgtcagcctccttgcttctggtgattgctggcaatctttggcaatcatttgcttgtagaggcatcactttgatctctgccttcctgttcacatttcattcttcctgtatgtgtctctccatgtgacattcttttttataaaaacaccagtcatattggattacggacccactttactccagtatgatgtcatcttaattaatcacatctgcaatgattttatttccaaataaggttgcattctgagatactgagggttaggtcttcaacatatcattttggggatacacatttcaacccataacaactcagagagtcaaaaaaacaaagaggccaccataccaatttccacaggtcaactagtaaagacctgctttctgattgtatgcaaatatgttgacatttgtcctaaccacagtagaaaaagtatataaatggtagccttcatagggctgtaacaggtatgctatttagaatccakgttccagatgctttaacaatgagatgatacagtgaaaaatgagatagaagtttattttcctttcagttaatcatctgagaataagcactttagggatgatttaacagcactgaactattaaggaccctggga

SEQ ID NO: 85218 - DNA, 677 bp, Homo sapiens
tctcactgtagtttccttgtccaaaaaagtttgtaacaactcctgccttggtggtagaatggcaagggtagggaggtggaaacagttgcatgtaagcaaaacttgtattagtgttgtaggagtcaagtctcccattttggctatctgaagtracaaactgaacctcatttagcagtcctgagagagcaggagttgagactttttgtgagctcaggcattaatcagtactgtgcttccgtataacacggcatttcccttatctcaaccttgaaagccatttctgtttacctccagattgtcaacagcgatgtggttctctagcttttatcccgtaatgtggacccattagagacaaaggaaattgttcacagggctcttctgtttatattgactaagttattgtccccaccaggatttctaagcttataacatccccctcttttttaaccttcagagcattgacatagcacacacaaatatgaaaccaggcaaaatcttcatcaataaaggaaatgtggatggtgtgcagatcaacagaagtccgtattcttaccttcaaaatccgcagtcagagagagcaaggtgaggaggaatcgtcaaaatgaaatcgtttcattcccttagggaacagcaacaaaatctaagtacagggctgttacttgatgaatatggtgagg

SEQ ID NO: 85219 - DNA, 677 bp, Homo sapiens
tctcactgtagtttccttgtccaaaaaagtttgtaacaactcctgccttggtggtagaatggcaagggtagggaggtggaaacagttgcatgtaagcaaaacttgtattagtgttgtaggagtcaagtctcccattttggctatctgaagtgacaaactgaacctcatttagcagtcctgagagagcaggagttgagactttttgtgagctcaggcattaatcagtactgtgcttccgtataacacggcatttcccttatctcaaccttgaaagccatttctgtttacctccagattgtcaacagcgatgtggttctcyagcttttatcccgtaatgtggacccattagagacaaaggaaattgttcacagggctcttctgtttatattgactaagttattgtccccaccaggatttctaagcttataacatccccctcttttttaaccttcagagcattgacatagcacacacaaatatgaaaccaggcaaaatcttcatcaataaaggaaatgtggatggtgtgcagatcaacagaagtccgtattcttaccttcaaaatccgcagtcagagagagcaaggtgaggaggaatcgtcaaaatgaaatcgtttcattcccttagggaacagcaacaaaatctaagtacagggctgttacttgatgaatatggtgagg

SEQ ID NO: 85220 - DNA, 574 bp, Homo sapiens
gatcctagaaggtcatataccagttaaactctaccatttgcctcttaatgcacatgcttgagcccactcacccaactcctgagatcttgttgggaagctgctgatcaccagattcagtgtttctatctattgggagtctgcctttccctggcaccagctgtgatcaattattatkttagagagacagctaacaactgcctgatcatcacgtgatagtggtgtaacatttttggtgtgtgtgggagtagtgggagctttctcctgccctgctcatgtctgactagttacctactgtaacagtatgaacaatgtggcagatccaactatgctcactgtggcaggttctcttaaaggaagtctgagtggcactcctccatggccaccccactggttaataacctcagctctggagtcagcatttctggatttgaaacttggttatgccactcattggctatgtgattattggcaaggtacttaatttctttaaactatagttatcatatcttaaagcatgaggtttatagtaattatgtcataggcaagcagtgagacttaaagagttaacacatgc

SEQ ID NO: 85221 - DNA, 389 bp, Homo sapiens
ctaaagtaaacatttatgaaatgtggctatataaaaatttaagctcacacgtgtaatcctaacactttgagaggctgaggtgggacgattgcttgagccaaggagcgcaagaccagcctagctacatagcaagacctggtctctacaagtaataaaaaaaaaaaatgagttgggggtggtggtgtgcacctgtggtcccagctacctgggaggctgaggtgggaggattgcttgaaccctagaggttgaggatgcagtgagccaagatcttgccactgtattccagccaccctgggcgacagagygagactctgtctcaaaaaaaagaaaaaaaaaaaagacttctgtacggtaaagcattctataaagcaaggtgaaagacaaaccaa

SEQ ID NO: 85222 - DNA, 631 bp, Homo sapiens
catccagagattctgattgaagtagtctagagtgtcatttttgcgatggtatttttaaatgacagcagaaaatgttatttaaagatatttggggacattattattgacttggaaatgaataacaatatcacctaagtcttcaaaaatcataacaaataaacagcatcaattaatgagatataatatatttgcaaagtctactgcactgtgcaaaattctttcacatatttaatcttttatgatcctgacaactctgacactttctatttagactgcctccattttgcagatgaggaagttaatatgagaaactaccttttcaccatttcattttacagctctcataaaaatgtacataagtgaacgcagatccttgcaagagcaaatacgttcctctgtcagaggcgtttgaaccagagagactccatctttaataggggctggataaaataagcctgagacctactggactccattcccaggaggttaggcattctaggtcactggatgagataaggggttggcacaacacacaggtcatgaagaccttgctgataaaacaggctttggtaaagaacctggccaaaaccaagakggtgacaaatctgaactctggttgtcctcactgctc

SEQ ID NO: 85223 - DNA, 542 bp, Homo sapiens
tttgtatattttcagaagtatactttcatatgttattgtacttatactttcaaatatcatttcatgcatctgttttatatatatatatataaaagtaatggaaacatagtgaataatgcattttttctaatttttatttttaaatcatttgtttaccaatattggaaattaaatagtatttttctccaatacctgatatttttaacacttatctttaataaacaatgtaagacttggtagaaaaattaagacaaatcagtctgactctaggattaaagaacttagcttcaaaaagcaaacaagtggcttaagaagtgactcaggcccaagaaaacagggttagtagttagaatgacccagtctgttcttctctcttttattaatgtcattaggcagtcaaaaatcagaaagacagacgttgagtggractcacaaaaacaatccatgattagtgcctcaccatcaactcatcaaggaaaagtatgctaaagttatgaaacaaagcacaggatgcccacaagttttctagcatgtccatgtaa

SEQ ID NO: 85224 - DNA, 656 bp, Homo sapiens
tgcatttaattccttgtcatcctaatgtttttacagactgaacagtttaaaataataacgtttacagtgaatatacctccaaagcagactttttaaaaaagggaaaaacaccaggccacatttctaagatttaaaytgaaggtgaagagtaacactttgctttctgatctttagtacagcaaaatgtggcaataatttttctttttaaatgacataacatatagattcatcagaaaaaccagcataaagaaaatggctatcaaaaaagagaagagtgttttacatacagaggaagaacatatcaagcaataaattgtgaatcagcctgcttactaaaaaggctgagctctactgattatggtaaatttagagcaaaaaatgttactgggcaaaattatactcaaactgtaataatcccattatctacatatacactgctttcattctactcatcagagaaacacatatttaccttttataatggaattacagaaaagcagttgatgactggtttgcaaggcccttcaggatcactgacctgaaattcttgactctctgaaagttgcctttaggttttgttcacttgtgatcctaagtattggtcttcaagctgaatttcattaaatactgacacttgaaactacaggaaacatctt

SEQ ID NO: 85225 - DNA, 1225 bp, Homo sapiens
tgcatgccatcctatttttcaaaaataatcatgctttattgccttctaattaagcaaaaacattgctagtaccataattattttgtacaaatgacagacaaagaattggataatcaatcccaaaagtatcatagtaacataaaaatatataatcaagtaaaataattcatataattcagatattatataatataaaagaaaatacagtatttcttattttataatatttccttgtcatagtcccaggtaggtagtgcaaaaagaatactttaaaaaactacatctcggccgggcgcggtggctcatgcctgtaatcccagcactctgggaggccgaggcgggcggatcacaaggtcaggagattgagaccatcctggctaacacggtgaaaccctgtctccactaaaaatacaaaaaattatccgggcgtggtggcggcacctgtagtcccagctactcgggaggctgaggcaggagaatggcgtgaacccaggaggcrgagcttgcagtgagccgagatcgaaccactgtactccagcctgggcgacagagcgagactccgtctcagaaaaaaactacatctcttattaaataatttcatgtttttgttaactatggtttaattatatttctgaacatacacattaataattttgtctttaagacctacattttaatgtagttagctatcagataaaaatgtaaattgttcataaatcgattcaaaaccatcaccatcaaaaatcattgatagagagaaacttatatttactgatctagtgaccaatacttctaagtgtaagaacaaatttcaagaaattcatttttatatattctataaacatgtatattttatatatttatttgtactaatctcacaaaataattttaaaattctatgtatttatgacaaaatgattttatatttaaatatcaaagcaaatattttattttagattaaataaacaataaacctcagccaaatcacagttcttcttggttagcaaagtttattaaagattttttgatctttctattttttataaaagctattgattcttgcttcattttcccaaaatttcttacctccctctattcctattttcttctggttcacagagccctaaaagagagagaaaggggaaggaggaggagaaggaaaaggaggaaggagaaatgcattattttaattatttcccactcgagtctcttgattagatatgat

SEQ ID NO: 85226 - DNA, 655 bp, Homo sapiens
gtgggtcctggaatgcttcctttccaactggtgctcacttttaatgagatgagcatcctctggggctgccatttacaggaggtattctgggaggaaggacccggggcatattcaggtgggttggaattctcattatggtacaaggctgtgtgaataattmttttaaacatcaattcaaaaaagccaacaaagatcactgcagagtggctcacaaatcacaggttctctactttctttgccttaccaacaaaatgatgccaatgggcaacaaaatgctatcaacgtgactgggccacagggtgcccagatattcgctcaaacactattctggatgtgtctctttggatgcttctgtatgagattaaaatctgaatctaaattgttacccttcctaatgtgggtaggcctatttagtcagttgaaggcataaatataatacaaagactgagtaagtggataatcatcctgcatgactgtctttgaactggaacattggatttttgtttttatattgccctcagactttatctaaaacatctgcatgttctgggtctcaagcctgtggtgttttggattgaagctacaccatcaaatctttggattccttgggatggagtctggaactagaacatcggctctccaacttaccatcttg

SEQ ID NO: 85227 - DNA, 655 bp, Homo sapiens
gtgggtcctggaatgcttcctttccaactggtgctcacttttaatgagatgagcatcctctggggctgccatttacaggaggtattctgggaggaaggacccggggcatattcaggtgggttggaattctcattatggtacaaggctgtgtgaataattcttttaaacatcaattcaaaaaagccaacaaagatcactgcagagtggctcacaaatcacaggttctctactttctttgcyttaccaacaaaatgatgccaatgggcaacaaaatgctatcaacgtgactgggccacagggtgcccagatattcgctcaaacactattctggatgtgtctctttggatgcttctgtatgagattaaaatctgaatctaaattgttacccttcctaatgtgggtaggcctatttagtcagttgaaggcataaatataatacaaagactgagtaagtggataatcatcctgcatgactgtctttgaactggaacattggatttttgtttttatattgccctcagactttatctaaaacatctgcatgttctgggtctcaagcctgtggtgttttggattgaagctacaccatcaaatctttggattccttgggatggagtctggaactagaacatcggctctccaacttaccatcttg

SEQ ID NO: 85228 - DNA, 655 bp, Homo sapiens
gtgggtcctggaatgcttcctttccaactggtgctcacttttaatgagatgagcatcctctggggctgccatttacaggaggtattctgggaggaaggacccggggcatattcaggtgggttggaattctcattatggtacaaggctgtgtgaataattcttttaaacatcaattcaaaaaagccaacaaagatcactgcagagtggctcacaaatcacaggttctctactttctttgccttaccaacaaaatgatgccaatgggcaacaaaatgctatcaacgtgactgggccacagggtgcccagatattcgctcaaacactattctggatgtgtctctttrgatgcttctgtatgagattaaaatctgaatctaaattgttacccttcctaatgtgggtaggcctatttagtcagttgaaggcataaatataatacaaagactgagtaagtggataatcatcctgcatgactgtctttgaactggaacattggatttttgtttttatattgccctcagactttatctaaaacatctgcatgttctgggtctcaagcctgtggtgttttggattgaagctacaccatcaaatctttggattccttgggatggagtctggaactagaacatcggctctccaacttaccatcttg

SEQ ID NO: 85229 - DNA, 655 bp, Homo sapiens
gtgggtcctggaatgcttcctttccaactggtgctcacttttaatgagatgagcatcctctggggctgccatttacaggaggtattctgggaggaaggacccggggcatattcaggtgggttggaattctcattatggtacaaggctgtgtgaataattcttttaaacatcaattcaaaaaagccaacaaagatcactgcagagtggctcacaaatcacaggttctctactttctttgccttaccaacaaaatgatgccaatgggcaacaaaatgctatcaacgtgactgggccacagggtgcccagatattcgctcaaacactattctggatgtgtctctttggatgcttctgtatgagattaaaatctgaatctaaattgttacccttcctaatgtgggtrggcctatttagtcagttgaaggcataaatataatacaaagactgagtaagtggataatcatcctgcatgactgtctttgaactggaacattggatttttgtttttatattgccctcagactttatctaaaacatctgcatgttctgggtctcaagcctgtggtgttttggattgaagctacaccatcaaatctttggattccttgggatggagtctggaactagaacatcggctctccaacttaccatcttg

SEQ ID NO: 85230 - DNA, 1460 bp, Homo sapiens
gtgaggcccagagcctgagaggaaccttagagtaaaactgcaataggacagttgtctcctgtcccccagaacagtgtttgccccgtgccacactgatctgtgtgctggagcagatggttaagtgttctccatgagttccgcccactaggggcttgggctgtggggaagatagaaccgacacatgtgaagcagacatcatgtaaaatggtatataacagaatttaaaaatatacgccgggcacaatggctcacgcttgtaattctggcactttgggaggccgaggtgggcagatcgattgagcccgggagtttgagaccaacctgggcaacatggcaaaaccccatctctacaaaaaatacaaaaattagctgggcatggtggtgtgcgcctgtagtcccagctacacaggaggctgaagtgggaggatggcttgagccctgggaggttgaagctgcagtgagttgtgattgtgctactgcactccgtcctgggtgatagagtgaaaccctgtctcaaaaataaaaaaaaacaatgaaattcagactgtgagtgatgcagtctctggatgggccttgagggcttcagaggatccttgctctcctgctggctccagatgccccatctcgggcacacacagtagcatggcgggaagcagcgctaagcacaggaggtgaggctgaggtagctggttgggtctaaacatttcccagggataaatcagagtggatccacccacagacacttcagatgggatcactgaatgcattcctgccttgtctctgtaaagctgtgtctgacatgaggcatccgggtgatgcattgtttgcttgtgtgtttccgtgaatgagaacttctgtagccatggagctgtgttttccatgatcttgagaggacaggtccctttggcacccagtcttggcctaggaattcttgcctcattctgaggtgcatggctcccagctgacctgtaagcactaaatcagcacacactgatgatgaggatggtgacaatgacaatgaggtcaggagagccattatgctaggagtgactgactcagtgtaaatggagaacagaaacctcttcctgctctgctttaagaggtgtagatatttgaaagccccgacgcaggggaatgaaaaattagggcccatgactcattcttgacaaagaattaatctctttgaaggaagactcagcagagggctcttctaatcagccagctctctttgtgtgtgttcaaagtgcaattgattggcatgtctcttggaggagggtttccagagtgtaaaaccagatatatgaccggsatgtcatgagtaagatagtttccactgaacagaccagggctgtgtctgtgatgcaggttacatccgagcagccaggacgccactttcctcccttcccagaaaagggtaaaatggcttagaaggcccacaggcagacgccaggatgacctct

SEQ ID NO: 85231 - DNA, 586 bp, Homo sapiens
ataacccttcctagctcctacccactctttcctcaccacagcaaagatgtccttggcttccagggctctccgatggaggatgtcgcggcgcaagactatcagcaggaagaggaagcccagaagcacgtggcccagattgctgagaatgttgttgaaggcactacagggatgagtgagagaccatgagagagtcaagaccatcaaagggacccagagaatacatgatgcatgaaggaatgaatgaattcagcatgaatgttttccattaacctttccataaggtttcaagatcagaaaagtattagaaatcctctttaacctaactccttcattttatgatgcttacttagcctgtgacaacgtgactgtttcctctcaagggtgcctgcttggcttcctaacaccctcccatcctctcttatcccagtggcrtttgtatagtatgaatcctgggaaagacagctgcttcaaagacaggcaagtgtttcagctacaccgtgagagtgagttctcacaggtggacccgtgtgtgtcaatgttcagctctctaattgtgaatttcaggtaagtgtcagccaatcatagc

SEQ ID NO: 85232 - DNA, 576 bp, Homo sapiens
tttcataaaaattaaatacctgttttaaaagtaatgatttctttagaaaggacatttcaagacatttaagcaagaggtgtataattatagaggtgttatttagaagtcataaaatttgagcactrtttataaaggtaatgaccacaatttaggctgtcatcaggctgggctcagaatttagctcgcaacaatagatgtaatttttatatatctacttgcaacagaaatcataatcaatgttgaggattggttcttctgaagcagaactgaaaacttctgtccttaagtcgcctaaagaagctaaagtgagtgtcaaacccagttatgtttctgctccagagagtccttggccagagtttggacctgtgacactttgtgtgggctgggtagagccctttcagcagtctgggagtgtctcccggtgttaccagggcaacatgagaccttcaattctttgttgccagatcagagaacaaagaagacatgattttcttggctggcgacatgacttctccttactctcttgtctgcaccctgatctttcaagtccatcggttcctcatgacagcatgaaat

SEQ ID NO: 85233 - DNA, 576 bp, Homo sapiens
tttcataaaaattaaatacctgttttaaaagtaatgatttctttagaaaggacatttcaagacatttaagcaagaggtgtataattatagaggtgttatttagaagtcataaaatttgagcactatttataaaggtaatgaccacaatttaggctgtcatcaggctgggctcrgaatttagctcgcaacaatagatgtaatttttatatatctacttgcaacagaaatcataatcaatgttgaggattggttcttctgaagcagaactgaaaacttctgtccttaagtcgcctaaagaagctaaagtgagtgtcaaacccagttatgtttctgctccagagagtccttggccagagtttggacctgtgacactttgtgtgggctgggtagagccctttcagcagtctgggagtgtctcccggtgttaccagggcaacatgagaccttcaattctttgttgccagatcagagaacaaagaagacatgattttcttggctggcgacatgacttctccttactctcttgtctgcaccctgatctttcaagtccatcggttcctcatgacagcatgaaat

SEQ ID NO: 85234 - DNA, 576 bp, Homo sapiens
tttcataaaaattaaatacctgttttaaaagtaatgatttctttagaaaggacatttcaagacatttaagcaagaggtgtataattatagaggtgttatttagaagtcataaaatttgagcactatttataaaggtaatgaccacaatttaggctgtcatcaggctgggctcagaatttagctcgcaacaatagatgtaatttttatatatctacttgcaacagaaatcataatcaatgttgaggattggttcttctgaagcagaactgaaaacttctgtccttaagtcgcctaaagaagctaaagtgagtgtcaaacccagttatgtttctgctccagagagtccttggccagagtttggacctgtgacactttgtgtgggctgggtagagccctttcagcagtctgggagtgtctcccggtgttaccagggcaacatgagaccttcaattctttgttgccagatcagagaacaaagaagacatgattttcttggctggcracatgacttctccttactctcttgtctgcaccctgatctttcaagtccatcggttcctcatgacagcatgaaat

SEQ ID NO: 85235 - DNA, 1399 bp, Homo sapiens
tttgagaatcccccatttgcagaataagcctgaacacagagacggtttgagaagctccagttcttcttaagtgaccctggagcagactgtacccaccagtcccccagggaccacttactaaggagtcttctgttggttgaagggtttgcagccacttcctagtctgcttggtctagcccagaaggatttattttgctgggagaaaggcagcatcatcacttagaaaaagcgctcagctgagtgtttggagatctaagtttagggcctggctccataggcttgtgtgtcctagaagaagccccttttccctgcctttgccctgaagcggtggagagaataaggcccctccagcttttctcccaggactgggatgaagaccaaggtgtggaagtactcactgtaaaagcatgggaggaaggcaggaagccagtggtgatgtgtgttatgtgttgttcataacaagtgaacagtcctctaggcaattttacctctcacattacttaaagattcttcaacttcattggaaaacatgcagacctgtcttccatgcctttgaacccttattcaaagcaccccagttcttcagttcctttttcttctaatattgctgcctgtgtttcaggaggtaaaacaggagataaatcagaggctgacactgagtgacttcctcatcaagcccattcagagaataacaaaataccagttgctcctcaaggtaagaagctgggagcctgggtgagggctggagaaggatccatcaggctcagagcaggttctgagctaggggtagagctaggggttctgtctccaccacactgtcccaaaggactgtgaactgtgggaggggtggtagggacgtgggaacttttatctgactgctggttactctgtcagctttgctcccaaataaactgcatggctgttcttcctrcccttaaggtgggttgttacttgattttattttttcaattcacattcttactttgtctcaatcattgacttgatacctttaaaaaataagaagaatatgatatcagagtgaactacaagggagaaagaaagggaaaggcaaggctttagaaatcttagattagtaatacctaaaatttgattttatatatatataaaatcaatatattatataaaatcaatatattttatatataatcaatatatattataaagtataatatgtatgtatatatttgaggcagggtctcactctgtcacccaggctgcagtgcagtggcacagtcatagctcactgcagcctcaaatgcctgagctcaagcgattctcccttctcagcctcccaagtagctaggacaacagatgcatgtcatcatgcctggctaattttttattttttttgtagagacagggtctcactatgttgctc

SEQ ID NO: 85236 - DNA, 1399 bp, Homo sapiens
tttgagaatcccccatttgcagaataagcctgaacacagagacggtttgagaagctccagttcttcttaagtgaccctggagcagactgtacccaccagtcccccagggaccacttactaaggagtcttctgttggttgaagggtttgcagccacttcctagtctgcttggtctagcccagaaggatttattttgctgggagaaaggcagcatcatcacttagaaaaagcgctcagctgagtgtttggagatctaagtttagggcctggctccataggcttgtgtgtcctagaagaagccccttttccctgcctttgccctgaagcggtggagagaataaggcccctccagcttttctcccaggactgggatgaagaccaaggtgtggaagtactcactgtaaaagcatgggaggaaggcaggaagccagtggtgatgtgtgttatgtgttgttcataacaagtgaacagtcctctaggcaattttacctctcacattacttaaagattcttcaacttcattggaaaacatgcagacctgtcttccatgcctttgaacccttattcaaagcaccccagttcttcagttcctttttcttctaatattgctgcctgtgtttcaggaggtaaaacaggagataaatcagaggctgacactgagtgacttcctcatcaagcccattcagagaataacaaaataccagttgctcctcaaggtaagaagctgggagcctgggtgagggctggagaaggatccatcaggctcagagcaggttctgagctaggggtagagctaggggttctgtctccaccacactgtcccaaaggactgtgaactgtgggaggggtggtagggacgtgggaacttttatctgactgctggttactctgtcagctttgctcccaaataaactgcatggctgttcttcctgcccttaaggtgggttgttacttgattttattttttcaattcacattcttactttgtctcaatcattgacttgatacctttaaaaaataagaagaatatgatatcagagtgaactacaagggagaaagaaagggaaaggcaaggctttagaaatmttagattagtaatacctaaaatttgattttatatatatataaaatcaatatattatataaaatcaatatattttatatataatcaatatatattataaagtataatatgtatgtatatatttgaggcagggtctcactctgtcacccaggctgcagtgcagtggcacagtcatagctcactgcagcctcaaatgcctgagctcaagcgattctcccttctcagcctcccaagtagctaggacaacagatgcatgtcatcatgcctggctaattttttattttttttgtagagacagggtctcactatgttgctc

SEQ ID NO: 85237 - DNA, 689 bp, Homo sapiens
tcctaattaaaagttccctcaatccttttttatgtctagtttccctatgtctagtttttggtttcctgcaaaacatctggccgatgatccttttctaagtgtataattcatacaattattttacatttctctagcttatatctatttgacagtgtattcccttcatctatgtaaaataaattaaattctgaaagaagtgccactttcagaactcagttaagaaattccatccttcgctcttccatgttttttttagtatctagccttgtacctctcctagctgcttcattgactgttaaagtttctaaaaatcctttccccttttctgccttctgtatcyagactgttgttcagtcctgtttatttgattgacatctcactcatcaattcattcattcagcttgcacttattgaggcaaaggaatagtcagtctcagggcaccatgggcactgctgtctataatattccattccccattactggcagagttcaggccagtgaatcacttctcatttagaccactgaacttgccctttacgggccttaagacaagagccattgtacacaggtctgacccacagtagttcagaatacattagaactgagcattcccctgtccagtaccatacttttgtttcttgatattttgagtgtgttcctcattcctaatgcttggctatgatggcag

SEQ ID NO: 85238 - DNA, 528 bp, Homo sapiens
caagaatggaataatccatccatggactaatgggttaatggattattatgttatcatgggaggggaactggtggctttataagaagagaaagagagacctgagctcatgctcagcacctttgccatgtgatatcccgtgctgcctcgggactctgtaaagaagtccccagcaagaaggctgtcactagatgcaacccctcgaccttggacttagcctcctgatctgtagaaaataaattccttttctttataaaatacacagtttcaggtattctaagcaacacaaaatgaactaagatgtaataaacaaccagatgaatttataatttctacagtttgatccacagcttcaattacaaygttagagtttcagatgtttttagatcctttcttagcacaaaggaaaatgtagaatgtggaggaacatattcctcataaaaccaaccaataaaacttacaaacgtataacttggacaacagagggagcagaaggctgctagctagaggttttcttaaagaatcccctgg

SEQ ID NO: 85239 - DNA, 985 bp, Homo sapiens
ttctttttcttttgctgggggtgggaatttgtgggggttactctttattaggttaaagaaattctcccctattctcgatatgttaggagtttttcttcttttttaaaatgatgagtattattgaggttctttttaatctattgagatgatgacataagttcataaatktattaagtggagaattaaaagattttctagactgggcgcggtggctcacgcctgtaatcccagcactttgggaggctgaggtgggcagatcacgaggtcaggagatcaagaccatcctggctaacatggtgaaaccccgtctctactaaaaatacaaaaaattagctgggcgtggtggtgggcgcctgtggtcccagctactcgggaggctgaggcaggagaatggcatgaacccggaggcagagccgagatcatgccactgcactccagcctgggtgacagagcaagactctgtctcaaaaaaaaaaaataaataaaaataaaaataaataaaaaaataaaaaataaaaaaagattttctagtgttatgccttctaatgaaagtatttctgggaaaatccattttattcatgttatattttatacacatcactggatttgctttactttgtgtttagcattttttgcttagttagtaataagagtgtcctgtgacttttctcattcatacttcatcatattggacatcaaagttatgctaaactcatcaaatgattctctgtttacctgaaagagtttatagaagactagaattacttgtttaatgaatgtttcgtagagcttgctggttaaacccttgaagcccgaagtttttgtgggcagatttttaactaatgactcaaattctataattgttgtagtgttcacttatttttgtagtgtgaatactcccaccctggccaacatcaagctaccaacagtttaacaatcagctcacaaaattctttaataattgacttaataattgactcctgga

SEQ ID NO: 85240 - DNA, 985 bp, Homo sapiens
ttctttttcttttgctgggggtgggaatttgtgggggttactctttattaggttaaagaaattctcccctattctcgatatgttaggagtttttcttcttttttaaaatgatgagtattattgaggttctttttaatctattgagatgatgacataagttcataaatgtattaagtggagaattaaaagattttctagactgggcgcggtggctcacgcctgtaatcccagcactttgggaggctgaggtgggcagatcacgaggtcaggagatcaagaccatcctggctaacatggtgaaaccccgtctctactaaaaatacaaaaaattagctgggcgtggtggtgggcgcctgtggtcccagctactcgggaggctgaggcaggagaatggcatgaacccggaggcrgagccgagatcatgccactgcactccagcctgggtgacagagcaagactctgtctcaaaaaaaaaaaataaataaaaataaaaataaataaaaaaataaaaaataaaaaaagattttctagtgttatgccttctaatgaaagtatttctgggaaaatccattttattcatgttatattttatacacatcactggatttgctttactttgtgtttagcattttttgcttagttagtaataagagtgtcctgtgacttttctcattcatacttcatcatattggacatcaaagttatgctaaactcatcaaatgattctctgtttacctgaaagagtttatagaagactagaattacttgtttaatgaatgtttcgtagagcttgctggttaaacccttgaagcccgaagtttttgtgggcagatttttaactaatgactcaaattctataattgttgtagtgttcacttatttttgtagtgtgaatactcccaccctggccaacatcaagctaccaacagtttaacaatcagctcacaaaattctttaataattgacttaataattgactcctgga

SEQ ID NO: 85241 - DNA, 737 bp, Homo sapiens
tttagtatatcattatttttatgcacccttttatcactctgaagcaagaaaatcaatctagggaaaatgcgagagagagttggcattttgaaatgcgctgagaaattctaaattatgagaggtactgacaaagctggtatttatagctctatcaaggatttttataatatttacatctatctgggctataaacacagtcagagctcacaatcctatttcaatttattaatgctgtttccatcctcaaagtcactagattaaagtatcatgacactcttcttgcagccaaatccatgcaagacagagtcacactgagaggttagcttggatcaagatttaaaatacagaccatttaaaataaaggtcacccaagccagactatgcactttgacaagttataaattggatctaaattggcatcatcaaggacatacattttttaactaatcagcttaatttaagattcaagagatatagmtttcatattcatctgcaagcataaattcttacagcaaagtcagacattgcccaggcatgtaaaatgtccatggagctgagggatttctgattcctaaaactgtggcagagttttctctaaaaccccaccttcttcagattctgtagctggaggaaacatattcaaacaggaagaattaacaattggcttcctcttagcacctctgttcatttcccccaggtcttaatttccccttcctttggtgaggtcttccatttca

SEQ ID NO: 85242 - DNA, 855 bp, Homo sapiens
  misc_feature (1)...(855): n = A,T,C or G
tttaccatagagaagaacacagttcttttactgttaaagccaaatagaagagtcagtagtcatgtcatccaagacagaggctcttctggccttcaatgtacagagacatgttgcattaaattcagttaagggcaaccaatgaaaaacaagctacacacaaagattacctctcaccccatcatgcaaagtttccattcagcaacatctggagactgcacagcccatttgatttaaatagaagactcagaggcagaaaccatattcagcccagattctttgtgaacatagcttgttgctgaaccaattcactctgcttctaattcacaaatcttcagccctaagcggcatcatttggttcttatgaggcacagagccctttccccacccagggcctttgcttggtccattctcgctgcccgcattgtggctcccctggctcttggcctgctggctccctctcagacttcaggtttcaattaaaataacagcccttcccactcttcttacttcagagttagtctctgacatggcagtctgttgatttctaagtcctattccagggcttgacatctcatagttgcttgttgaattaatanatgttaactccaaaaaawataataaatgctttctccagctaaaaaagtagatattacaccggcttttaacagaatagtagtggacaaaaaacaatagatcgccttaactgggtggggcagttacagctacttgggagggtaagatgaggagatcactttgacccagaatttgaggccacagaaatataattttgccctgatttcagcctggggaaaagggaggaatcctggttttaaaaaagcccacaaaggtattttt

SEQ ID NO: 85243 - DNA, 595 bp, Homo sapiens
gggcaaatgggggagtctataaattcacaaatctgtgatcttgccactatcattgtctaaagctcaaactggctcttaaatctagtgaatccatgatcttgccatttttgttgtctgaagcttggaattgtgatgccgtgcatctcactgctcattttcttgttaaaacccaaactgtgacacatcagtgtaaccacatgagtgcatgcgtgcgcgtgcacgggtgtgcacacacacacactgcttaccagactttacctaggagggaatttacaccattggtgaactgcagatattccaaaaacacttaaaaatgtaaaatttcaaatatctcttgaattttctttttctttctttctttytttttttttttttttttttgagacagaatcatgctctgtcgcccaggctggaatgcagtggtgtgatctcggctcacttgcaagctctgcctcccgggttcacaccattctcctgcctcagcctcccgagtagctgggactacaggcacccgccaccatgcccagctaatttttgtatttttagtagggatggggtttcaccgtgtgagccaggatggtctcgatctcctgac

SEQ ID NO: 85244 - DNA, 593 bp, Homo sapiens
tccccaggtgctcaagaatagttattaagagaagcaatcaatgcaactgctttgcttagaaatacctttattttataaagccacagatcattctgtaaagttttttttttttttaaaccacacttgtaaaaaagatgttgacaattcataggaaaaaaagctgaaaatgtttctcattaagtcagggttacacaaaggttatatttataatatatrtatttgtatatttataatttagagacgaaaaatacggaatggcaaagtgatgcctgctgtagttagatctcagatacttgatcgtttcccacaaacagtgtttcttgacagaaggggttaacaaggaccatcccagtgtctctatagtcgccattggctggggagcggggctctgagagctggtcctgggaagagagagggaggagatggagtgagctggagaaggcttaagaggtggccattcttaaagaaatgtacacatgggaacatttatttcagcactgatggcttggtgcacattttcatcatccctactgctaatgctgaggtgcacagccctctatgccattcttttaattaatttgtgtgtgtgtgtg

SEQ ID NO: 85245 - DNA, 697 bp, Homo sapiens
aaatgtgtacaggccmcactaaaggtcaatgctgcagtgaagctggcccctcgtttgtcctctgcttaaaaatttttcttgggcatttactgtgtgttaggctctgactgggtgatgggtaaattgtggtgaacaacatttatagttcattcacatgataaacatttactaagaacctaccatgtgccaggcactgctccaggtgctgggaatagagcagtgagcacaacaaacaatgctcctgcctcaggcagcaggacagccagaccacaaaccaatcaacagagagacaatgatgcaatgtcaagtggtgagaagagctctgaagacaagtaaagtaaggaagaggaaacagaatgaggttggagatttaattaatacagagtggtaagggagggagggcctcccagaggaggtggcatttgaacagagacctgaaggaattgagggttcaaggtatccaggagaaaagcatttcagatagggtgcaagaacgaagctctaaggtgggggcaagcttcctgtgcaggaggaagagcaaagaggccactgaagctggtgtgtgatcaatgggaagtgtggtgggggctcaggtggtgggcaggggccaacttgtgaagggcatgagaatgggagtctggattttattcaaaatgtagagaagagccacttgaaagtggaagctgtggcggacatg

SEQ ID NO: 85246 - DNA, 697 bp, Homo sapiens
aaatgtgtacaggccacactaaaggtcaatgctgcagtgaagctggcccctcgtttgtcctctgcttaaaaatttttcttgggcatttactgtgtgttaggctctgactgggtgatgggtaaattgtggtgaacaacatttatagttcattcacatgataaacatttactaagaacctaccatgtgccaggcactgctccaggtgctgggaatagagcagtgagcacaacaaacaatgctcctgcctcaggcagcaggacagccagaccacaaaccaatcaamagagagacaatgatgcaatgtcaagtggtgagaagagctctgaagacaagtaaagtaaggaagaggaaacagaatgaggttggagatttaattaatacagagtggtaagggagggagggcctcccagaggaggtggcatttgaacagagacctgaaggaattgagggttcaaggtatccaggagaaaagcatttcagatagggtgcaagaacgaagctctaaggtgggggcaagcttcctgtgcaggaggaagagcaaagaggccactgaagctggtgtgtgatcaatgggaagtgtggtgggggctcaggtggtgggcaggggccaacttgtgaagggcatgagaatgggagtctggattttattcaaaatgtagagaagagccacttgaaagtggaagctgtggcggacatg

SEQ ID NO: 85247 - DNA, 697 bp, Homo sapiens
aaatgtgtacaggccacactaaaggtcaatgctgcagtgaagctggcccctcgtttgtcctctgcttaaaaatttttcttgggcatttactgtgtgttaggctctgactgggtgatgggtaaattgtggtgaacaacatttatagttcattcacatgataaacatttactaagaacctaccatgtgccaggcactgctccaggtgctgggaatagagcagtgagcacaacaaacaatgctcctgcctcaggcagcaggacagccagaccacaaaccaatcaacagagagacaatgatgcaatgtcaagtggtgagaagagctctgaagacaagtaaagtaaggaagaggaaacagaatgaggttggagatttaattaatacagagtggtaagggagggagggcctcccagaggaggtggcatttgaacagagacctgaaggaattgagggttcaaggtatccaggagaaaagcatttcagatagggtgcaagaacgaagctctaaggtgggggcaagcttcctgtgcaggaggaagagcaaagaggccactgaagctggtgtgtgatcaatgggaagtgtggtgggggctcaggtggtgggcaggggccaacttgtgaagggcatgagaatgggagtctggattttattcaaaatgtagagaagagccacttgaaagtggaagctgtggcrgacatg

SEQ ID NO: 85248 - DNA, 610 bp, Homo sapiens
ggatccaggggtccctgtagctggttccctctctaccttttctgtagtttttgtatgcgggccaataaagttccataacttgttagtttagcttagtttgatttgggttcctgtgacccactaatgtaatccaataatacaacatcttaaagacacatttctttgtcttcaagttaacatgtattactcacaacagtatcttaatacttatttatttatatgtttattttgtttctcccaattactaaaatgtaagctctatttgaacaaaaacttgcagyactctttcttcagctgttggaaaacctctaccacctactaggttctcagtaaatattggacgaataaatggataaaaagagaaagaaagtgacacttttctaaaagtgctcctgaattaaaattgcatctgtatttcttcctgaatagactagaaaaggacacaaatttaacatttattgagaacttacactgagctagccatcatgttagatattatatacattttgaacttgatgatattatctccattttacgaatgcacaaatggagggacaaagagctaaagtcaaattggtggcctcctggttctctgctcagaccgaccttt

SEQ ID NO: 85249 - DNA, 732 bp, Homo sapiens
aaccatgcccaaaggccagaacatactattggaatctccaaatatatgatacaataaatttccattaaaatagtgtgagcygaattttttgttatttgcaatacaaatagtatgattgaataatctttccactataccatgtagccatcaaatgaggaattccctggtaaaattaattaatttgaatgacaaatttgatcttcaagactgaatttttctgcatgtacatgtgtggtatttcttttgggagaattatccaaataattttttttttttttttgagatggagtctcgttctgtcgcccaggctggagggcagtggcccgatctcggctcactgcaagctccgcctcctgggttcaagtgattctcctgcctcagcctcctgagtagctgggactacaggggtgtgccaccacatctggctatttttttgtatttttggtagagatggggtttctttctttctttctttctttctttctttctttctttctttctttctttctttctttctttctttcttttttttttttgagactgattctcgctcttgttgcccaggctggagtgcaatggcacgatctcggctcactgcaacctctgcctactgggtccaagcaattctcctgcctcagtctcccaagtagctgggattacaggtgcccaccaccacacccagctaatttttgtattgttagtagagacagggtttcaccatactggccaggc

SEQ ID NO: 85250 - DNA, 702 bp, Homo sapiens
tttaaatgaatattctttttgaaaaataactttcttctagcttcaaaactgcaacccatttttcctcccaaatcagcaatttggaaaatgatttttaaaagctcaatattaaaaaatgtgtaagtccatttagtgttctaatctttaattttcttgtgtttcatttgttctatattttaaaaagacaagataaaaattgtaagtacttaacttttgttaaaaaatcagagagacaggcatacgactccatctggaattatttcaaaataagtctcatgctgtgcacacacacagccacacacacatacgcacatacacatgtacatgcacaatggaaaggaaaaagaaaggatttttactatatttctgtatggcttttgatttaccccaatgaaaactaaggaagtatgaaaaactgatcataactagaattttaaaayataatcccaaaatattcatgtgtcttttgataaattctaggtcctccatttgaaatatgattaatatgctgtgggctagaagaaggagatgtttctaaataattgcacagaaaaagcactaaggattcgcttaagtagagagagatggcaggttcttctggaaagagaagggagtacaaaaaattgatttttatgctcaccaaggggagatggaaagaactgagaaacataaaagaagatggatgctagagaacagaacaaa

SEQ ID NO: 85251 - DNA, 982 bp, Homo sapiens
tattttaatggcactatagtctgagagaaatgcagaaaaatgtggattgagggtatttttgtttactaagaggtagagggaaaaaaaacttccttttatattgttcttcttcagtgacacttcaatactactctgacatcattgtttaaataattgtaactatttcagctccttattggctagaatttatttccyagaatcctgattttctagatgataggcaggttaagtaactatagaatgtgacttgagaaggttgggtttttcatggagaagaaagaatttcacataaagttcaaaatattcagatcataacaatacattctgtgaggattacatatgtgtgtgtactgcactgacctctggtatttttaataatatacccagatataatctatctgctcttttatgatgaaaacaacttgtctcaggatatacttctgtttgttagatatcatcccttacttataataacattgcctacagctaattcatttcgccaagcactttacatcttgtaataatatacattttcatgaggtaaatgtatattattacatttaatacaaaaaaaccttaccatataaataattaaagcttcattttgcagaagaagaaaattaggcacaaactgagttttagtttggggcttacagggaagcaatggttagcatgactgggacctaaaccaatgtgtctaatatcaaaaagattttttttaataatcttattctcttaaagcaaaaatacccagaaattattgagcagagccttcaagaagagtccctggattggctaaaaattgcaatccttttaagtcctttgttgtctgataaaaaacagtgattgatggacaagatatttttgaagattaactcaatggtatcattaagtaacagagcctccctacaacttgataggtcttgctagatttgctgtgcttattactgccacaagatgtgattttttgaaggaaagcata

SEQ ID NO: 85252 - DNA, 588 bp, Homo sapiens
gtttctattgattgaatgatactccttcatcatcattgaattctgttttgcaggtaaacaattatgactcaattgctgtgtaccaaaaagrctcactaatccagtggttctcaatcctggcttcacattggtcaatactggagactgatgctaatgtcccgcccacagagattctcattttattgttctgggctgaggcttgggcatcaggattttaaaagcttcccagaggattcttatgtgtagccaggttgagaaccaatggtttacgtttttatagtagaactcattccttgctttggtccttataggcttgaagaagccatggtaagagagagcaggggtataattcatgggtattgtatgattcctgacagtttaagaggtacttcacagctgttatcacatctgataataacaagttaagggatctactctctggtttaaatattgcctttatgttgatgattcctaaaaatctccatctgccctcacttctaattgtgcataccagtatctaacctcctcttagaccaaattgtttgctgatacctcacatgcagcagctccagtgctgtgcttggttcc

SEQ ID NO: 85253 - DNA, 588 bp, Homo sapiens
gtttctattgattgaatgatactccttcatcatcattgaattctgttttgcaggtaaacaattatgactcaattgctgtgtaccaaaaagactcactaatccagtggttctcaatcctggcttcacattggtcaatactggagactgatgctaatgtcccgcccacagagattctcattttattgttctgggctgaggcttgggcatcaggattttaaaagcttcccagaggattcttatgtgtagccaggttgagaaccaatggtttacgtttttatagtagaactcattccttgctttggtccttataggcttgaagaagccatggtragagagagcaggggtataattcatgggtattgtatgattcctgacagtttaagaggtacttcacagctgttatcacatctgataataacaagttaagggatctactctctggtttaaatattgcctttatgttgatgattcctaaaaatctccatctgccctcacttctaattgtgcataccagtatctaacctcctcttagaccaaattgtttgctgatacctcacatgcagcagctccagtgctgtgcttggttcc

SEQ ID NO: 85254 - DNA, 770 bp, Homo sapiens
acagcccctctggacatccccaccccctgcccataacttctctgtaacagyagcaaatctggcaaacttggaggcaatgggtatccagtacataaaccaggagggagataaactagggaaagatgggaataggacttgaaaagattttcttttttttcgcaaaacttagcattcatgtctcaacattttatatatgtatcctgaatagagataatagaaatatagcagaatatacttctgatcctaaaaatgtaagggggggaatggtatagatagcaggtggtggctattatatttaaaagctttactgagtagcatgtgtattcatccttttaatggatgtgtgagccaatcagaatactgaacactgaatggtccaagagtaagcaggtgaatgacatgagaccaaacagagtccttccctgagacttttcaaactagggctgagagagacatccccttttccccttggaccacaagccttaagaatataagcctagagcagcccacagccaggccctcactgcataaagaagctgatggaagagaatgtggtcaaagtgctgagagaggcagatgcaagagactaaggtcctaaaaatgttttccttcccagaagtagtcatcaacccaggccactccacccctgcccttcccagaggtaagttttcctagctcacaccatcaatttgggtttacaggctcaccttatcagtgtaagattaaaacttgagatggagatgtaacatactgtgtctggctctgttgga

SEQ ID NO: 85255 - DNA, 1025 bp, Homo sapiens
aggcgctgtgtacttgtcagttgccctgctaataccttctgaaaagctgtctataacaacatttattttgtttacaaaaggaaaagacaagcagcaaagaaaacaaaacattagtgtcacattaatgtatcactttagagtttgccatgctctttcaaaaagagtattttgttttctagttagagacaacaaaaggcacatatgattgttttaatttcactgtggagaaagtatggcctggtcrggttacagtactttctcaaggtcttagctagcagaggaagtaataataacaggaatttaaataatactaattaactcttctgagacagccaagtgaagaataaatgaagggaatctgcaatgtttaatagctctagacatggtttgtgtgttttaaataactttgtctattaaaacaagtgaaagtatttctgttattgatttacatttggctctcaatccgtaaactcgtctgatggctttaatagaagagatgtaagtaattatctaatgtgttaggaaaagataaatggaaaaaaatttctggcttccttttcctatgtacatattgacttttacaatgagaactatttcatctctgcctacaaattgaaccccaccccagaagacaagaggaataattaaacagaacaacaacaacaacaacaaaaacctgtcaatactactactctgaatttgagaattttgaggaatttggatatttgggaggcatgcctaaaatacataattattttgttttgagtaaatagatttattattatttgaatttatgctctagatgtttttatttgcactttagaaagagtgtatattaattataaaatactattttgttcataactctgtttagaaaatatgtcatcccatttctgtcattaactaagggatcagactcccgatcagggattacaagaaattgaaaaaggcctaatatcctagtaatacactcaaactataagtgtgtgagtatcattaaaataactaataaatgactattgctt

SEQ ID NO: 85256 - DNA, 1012 bp, Homo sapiens
tcagtctacagatactttaccttcgtgattaaatttattcctattttattcttcttgtagctattatagattagattgttttcttgatttctttttcagawttttttttgtgagaaatactagtgattttcacatgttgatttggtatcccttacatttgctgtatctatttattagttctgacaggtttttttgtggaatatttagggttttctatatacaggatcatgtcctctgcaaacaacaacaatttcactttcttttctatttgcatgcctttatttccttatcttgacaattgctcgatgatgacttccaatattaccttgaatggaagttgtaagagtaactatccatgtcttcttctggatcttggaggaaagaaataagtaaaagtgtttttcttccaaatacattaaaatgtcatatttaaaaatatagtaaattcagtgtgatataattgtgcttaattgggaaaagggtacggatgttgattgatatcatatcatttatatgataatttgggcagtcaaagaagctattacaatggagaaaaaatatggactgaaacttacatggcaagaaaaattcagcaaaacagttaaaaatacatcattcctgacagaaagatcatcaagattaaaagctccaccttggaaagaattttaatatattttgtaaaacaacaaaaacaaaacaaacaaacaaatgaaaaacaaaactcatttggctaaaaaagagagaaatggcagaaaatgagtcaagataaataaccaagaaccagttcatatataacctattgtccataatataaatttggttttaagtccaggtacaatggggatctattggaacagaaaagacaaacatctgaactattttagtctgggcaagagaagacagtagagtgaattggggagtagaaaaagagacagcaaaatgtgaatggtgccgatgtcagttttagaattagaggacacagggattttgaatgtgagtgataaggaaagga

SEQ ID NO: 85257 - DNA, 761 bp, Homo sapiens
tttatataaaaagatattgtatggtaattttttttacctaaagtaacataactgcttatttaaataagatgaataagaaaatctgggactgaataggaagcccaggcatctgcagatggtctgtgtaagtcatatgtaatttttgctgtttcttgtgtgtctatcttcatgcacatatagagaaagcagaaagtttaaaaagtttatataatagaatattctttagaacctaatagaaaattggagaaatttggctaattaacatttttataggtaaacctcttagtcttggacaaaaacaaatggaagagcattccatgctcacrgataggaagaatcaatatcgtgaaaatggccatactgcccaaggtaatttatagattcaatgccatccccatcaagctaccaatgaatttccccacagaattggaaaaaaatactttaaagttcatatggaatgaaaaaggagcctgcattgcaaagacaatcctaagccaaaagaacaaagctggaggcatcatgctacctgacttcaaactatactacaaggctacagtaaccaaaacagcatggtactggtaccaaaacagagatatagaccaatggaacagaaaagagaccttggaaataataccatacatctacaaccatctgatctttgacaaacctgacaaaaaaaagaaatggggaaaggattccctatttaataaatggtgctgggaaaactggctagccatatgtagaaagctgaaactggatcc

SEQ ID NO: 85258 - DNA, 761 bp, Homo sapiens
tttatataaaaagatattgtatggtaattttttttacctaaagtaacataactgcttatttaaataagatgaataagaaaatctgggactgaataggaagcccaggcatctgcagatggtctgtgtaagtcatatgtaatttttgctgtttcttgtgtgtctatcttcatgcacatatagagaaagcagaaagtttaaaaagtttatataatagaatattctttagaacctaatagaaaattggagaaatttggctaattaacatttttataggtaaacctcttagtcttggacaaaaacaaatggaagagcattccatgctcacggataggaagaatcaatatcgtgaaaatggccatactgcccaaggtaatttatagattcaatgccatccccatcaagctaccaatgaatttccccacagaattggaaaaaaatactttaaagttcatatggaatgaaaaaggagcctgcattgcaaagacaatcctaagccaaaagaacaaagctggaggcatcatgctacctgacttcaaactatactacaaggctacagtaaccaaaacagcatggtactggtaccaaaacagagatatagaccaatggaacasaaaagagaccttggaaataataccatacatctacaaccatctgatctttgacaaacctgacaaaaaaaagaaatggggaaaggattccctatttaataaatggtgctgggaaaactggctagccatatgtagaaagctgaaactggatcc

SEQ ID NO: 85259 - DNA, 722 bp, Homo sapiens
tataaattcttctctttttttcacatagatacagagaaaaaggcttcccaaaagttaaattttatattacaggatttttataaaaaataaarttaaggagcaaaatgatagatttcctgaccatgaagagtctccaaccatgagttccttccaatgtccatgtgtagaagagttaacacaaataaaactatttttgttatctgttataatgtatgcatgcttccaagttgtgtttgttaaccttggaactacacaaaattgtaccaccggtgaaactagtgtgcacctttctcattttccttctccagtaacttaacgagaattggtgatttgttagtagcaccgtttgtccattgtaactttgagaagactgcacttcaatttatttccactgtattgaagtggaaatggcaggtaccttatcatgaaatatgttcgtcatgacttctccagctccattttgttttcaggttaagtgcttctttcagtctaaagagtgggttaagtttttaaaaaatgtttatttgtttccttctaataagttacttttatatcttcagaattcattttctgtgcagtttttgagcctcaatggcttcttgagtgttttgcagtaaacaggagatcaaaagaccttatctaattagctttcaaaatgttggttgccaaaaatttcaaattatccacagtatctaccaaatataacattctctttatatttt

SEQ ID NO: 85260 - DNA, 722 bp, Homo sapiens
tataaattcttctctttttttcacatagatacagagaaaaaggcttcccaaaagttaaattttatattacaggatttttataaaaaataaagttaaggagcaaaatgatagatttcctgaccatgaagagtctccaaccatgagttccttccaatgtccatgtgtagaagagttaacacaaataaaactatttttgttatctgttataatgtatgcatgcttccaagttgtgtttgttaaccttggaactacacaaaattgtaccaccggtgaaactagtgtgcacctttctcattttccttctccagtaacttaacgagaattggtgatttgttagtagcaccgtttgtccattgtaactttgagaagactgcacttcaatttatttccactgtattgaagtggaaatggcaggtaccttatcatgaaatatgttcrtcatgacttctccagctccattttgttttcaggttaagtgcttctttcagtctaaagagtgggttaagtttttaaaaaatgtttatttgtttccttctaataagttacttttatatcttcagaattcattttctgtgcagtttttgagcctcaatggcttcttgagtgttttgcagtaaacaggagatcaaaagaccttatctaattagctttcaaaatgttggttgccaaaaatttcaaattatccacagtatctaccaaatataacattctctttatatttt

SEQ ID NO: 85261 - DNA, 1294 bp, Homo sapiens
tagataaaggaactgaaactccacgcatgtcttagtcagcttggaccgctataatgaattaccatagacttaatggcttaaatagcaaattatttctcatatttctggagactataagtcaaatatcagggttccagcatgagcaggttctagggaaggccttctttctagtttactggaagctgttttctctttgtatccccatataggggaggagagagagaaagcaaaaggaacacaagcaagctagctagctctctttttattcttataaggaaacaaatatcattatgggattctacccttataatgtaatcgccttcaaggaccccacctcttaataccattataatgtgggttagggtttcaacatatgaattttatggaggcataaacttgcagcatataacaaagacaatacgtaacttttaaggtcagttaggcaataagtgatcaactcttcaattttaactaagactgtctgactcaaaaaagcatgcttttttcaattgttattttttctgcaattaccaagtaagagtaaaggagttaaatcctgtagtctaattcacttcattaaattctgtaaataatttttagccttattacataacaaaaagatatgacatgatctcatatcatacacaaattatagtagacctgagaagaaataagggatttataggtagtcagagtttctgcattacagtttggactacaaataattcctatctccctatctacctcccacacacattctattctatagtacaaaatccagtccttcacttgcccaatgaggaagatactatcacaaattaagaatatctatctatctacctatctatctagtcatccatccatctgtcctagatttcttttctcactcagatgtttattaatatctaattcattcctgtcttgctgctttagttataaataagtatacccaactggttgggraaataatactctgaaataagctacaagtacctgaaatcttggcttttaaaaattattatttatatcagctgccacctaagatttttctgcatggtcattaaaaccacgcctagaagagaatgcctgtcttctcctgtgcctaaaaaatgctactccaggacaaggtggcctgggttcccactggagattccaagttgttatcagaactccatatactcctgatccaaaactgtcctgtctccaagcagaagccccaacactctcattcagtgctagacccgatgtcatgctctaattgcctattctttctgagacttactttcctcatctg

SEQ ID NO: 85262 - DNA, 693 bp, Homo sapiens
ttcaaatcctggctctgtccttgggtagttgtttgaccctggcacgtcacttccctgtccttgtgtggagaatgaagatcacaatagtattcatctcccagggctgctgtgccaatgcctgaggacagataaaaagccccagcaagcggcctggcacccatgagccctccgtcaacactggcagacagctgctgatgccatcacagggcatgcctgactccatggaggcgacaggaaaggagagcaagtcttgggctcaggctgcccaagtcttccgggccggagcggacacttgccctttggtgggaggctctcgaggccgtggagcttgaaagtgctgcggggcagctcacaaatccatataactcactcccgattactctccagcctgcctgagcagctgctccaggaagaaataaaatatgctttgcatactttaaatgtttcacttatgaaaactggcagggctgcctttctaaattgtttagcaataaagtcactaacgagcagtgtttgaggctctccccaccggagctggagccgggccggggagccagccggkgtggggggagggggcagggagggaggacagactggccgccagtgcggagactgctagggcttccagaaggcgccatctgggatttttcagaggggcacggggatcacatcctggtgtcccgatgtgaaact

SEQ ID NO: 85263 - DNA, 674 bp, Homo sapiens
aaaagatggcgctgttaccaggtaatcatcctggcagggactgatgtgatggctgccttcagaggccacctcagcaggagctggcatgaacacagtattacctatagcaaatgtttattgtgcacctactgtatacaggcatgaacatggtattactaataccagacgtttgttgtgcatctgctgtatacaggcatgaacatggtattaccaatagcagacgtttattgtgcacctactgtatacaggcatgaatgtgatattaccaatatccartgtttattgtgcacctactatatacaggcatgaacatggtgttaccaatagcagatgtttattgtgcaactactgtttaaggcatgaacatgacaagtaacagacatttattgtgcacctactgtataaggcatgaccgtgacagtaccaatagcagatgtttattgtgcacctgctgtatacagacatgaatgtgctattaccaacagcagacatttattgtgcacctactatatacagacatgaatgtgctattaccaacagcagacgtttattgtgcacctactgtatacagacatgaatgtgatattaccagtagcagatgtttattgtgcacctactgtatacagacacgaatgtgctattaccaacagcagacgtttattgtgcacctactg

SEQ ID NO: 85264 - DNA, 865 bp, Homo sapiens
atgctaatctacagggacagaaagctcctgtaggaacgtgggcttattgcagagggtaggcagaaactgggtgatgggtattttcactgtcttgattgtggtgatagttttgcaggtgtgtacatatatcagagaatgtcaaatggcacatgttaaatatgtacagttcattgtattttatttaaaaccaataaagctgtttttagaaggaagtaaggtggatttggagtcctgcggatagagcattgtagggcaaggagcattttagaaccctgtaagtcacatcagtggggtggcctctggctttgccttctttccctgtgtgctggcctcagcaggtcacagaggggacccggccccagatgggcagagtcctcgaagacaggcagactgtgccagccagctcctgggtgagggaaagagcagagagtctgcagagctccaatacccagggctcctgggctcgcattccaggaacaggcagagaccagcaaggtccaaagctggatgtgctgtggcttgagctcccgcccaactttttaaataggtctgaccacctggcccagctagaggctgagacataagctcctgatagccaggcaggctggacaggccttcatgcctggagcctgatgttggagcagaaggagaggcatttttcttggcacccagctaaaaattcagaccagcttagagakgaacgttctaatttcagcttagggcctggtgctatggctgggaaaagaccaaggttaaaattcaatgtctccatgaatataatatttttaaaaataatctttagatttaaggtatatataattaataaagtttttatatatttatggaatattggtatagtccaggc

SEQ ID NO: 85265 - DNA, 1977 bp, Homo sapiens
tgtacaaatttaaagttttgggagttgtttctgggatgtaatattaattaggaaatgacaaacactggataactgctgctagaacatccattaaagaaaacatatacccacatagacatatacactaacttactcacaatgtctctctctctctmtatatatatatgtatgtattttaaagtaagtatagaaatataactaagatttattaccattattttaataataatcaaaacacattagaacaatctgaaaatctcaattttcctaattagtttcacattgctaattatttcaagatcctaaatattttttattcattaaaataacgataaatttgtgatttttctccatatctgattttacaaaaattcaaaaactattcatgagcattttaatttgatatcgatataattattttcataagttcagttagaatcatttctgtgtacacggaagcaatggacatgttaattcagttgccaagatttgacaaaaaataccatttgcgacaacatggatgaacctagaggttattatgctaagtgaattaagcaagttcaagaagaacaaatattttatgattccacttatattatttaaataaaataggcaaattaattgaagcacataataaaatagtgttttccaggggtttgggagagagagaaatggggagctgttgttcagtgggtataaagtttcacttatgcttatgaataagcatagagatttcctctgcaatataatgcctagttaacaacatggtattgtacacttaataatgtgttaagagggtcaatctcatgttaagcattattaccatcaaaaacaaagagtgacaaagaaagttttgtaggtgatggatatgttaattaccttcactgttataatgatagtatcatgggtgcttgtacatgtccaaactcatcaatttatatatatataaataatataaatatatatgtataaaatacttacaggtgttttttgtatatcaattgtacttcagtaaagctattaaaattatatgcatctatttttgaaatttacataatgcattacttttattgatgtacaaattatttctttacaggaaatcaaataattcattgaaatgttgggaaaatggtattgtggtttttatttaaattgatgatcacaaatttcacagagaaaaacacaaatatatcaaaataatctttcctagatccgacagaaatttatttaaattttaaactctatatctgattcttaaaattacttcccacaaaaggagataaaatttcaaaattcaggtttcctttaatactgcaaatcttgactcgtactgttttcaaaccattatatcaatataaacaacagatgacatttttaaattatggacagaaacccagcttctgtctataaaataaaaaaaaaagtgaatgccttactttatccatcaaccaagttctatgataatggattttctaaataaagtgagaaatagctagatataaaatgataattcctatctctgttacaaggccttctttttccaagctaagggcatttcctccattgctccccagataaactttccccttccttggggcctctcaagtacaatctgtggtgcatggggacagctcttagagccactgagttgctatttgaactattcaatagttggaattggaaggaagaaaatatagtcagttgggacacaggatactggcaccgccgtaagagaggggcttactcctttgatggcaagtagggacagaaggctagagtacagcagcggttctctcagccctggcctagaggacatctaccaccccctttaagcttactaagcctcctgttgctaattcagagatttctccttgaaggacagttttatggccaggcccacataaattgagccttagcatgcaggcatcagtggtgccccagacccaggccttgccgccatggaacaggtaggatgca

SEQ ID NO: 85266 - DNA, 3250 bp, Homo sapiens
ttttgcagatgcttatttaccctgtggtgagctgctggctgagctatttaacataccctttgtgtacagtcacagcttcagtcctggctactcatttgaaaggcacagtggaggatttattttccctccttcctacgtacctgttgttatgtcaaaattaagtgatcaaatgactttcatggagagggtaaaaaatatgctctatgtgctttattttgacttttggttccaaatatttaatatgaagaagtgggatcagttttacagtgaagttttaggtaagatttttttcagttagtaacatgaagctctaacttatttgtgtctttgaagcacaacttgcataaagccataaagtcagggaagtggagtttttgataaatgaatttatgaaatgaaaatacaagatgatctaccaatctcacaaatattatagaaaagcttaaattatggggtcagtgaaaacgctgtgaccatcactcatacagaacaccccaggaaatcataaacctatatattagtacacctaagactttaagcaattatatatctgttttactatagaatgtttcagatcttaaaaacagcaagatccgtcaagtaacatctaaccgaatgcatagatttagaatgagtaattacacatttttctacaactatctatataactgcagaaagttttccttctaaatctcagttgtcttatttagaaattaaaagatgttcccatgttaccaggaggttgtcttcacagtagagagagataatgtctatatctcagatgcaaaaatcaataagggtaatttgaagtttcaaatgtttctatactccttcactaaataattggaaatcttttatttaaagtccaatcatcttgttgaagtgtgaaggttgttatatctatatagtttatttgaaactatgtctctttatttaaaaatacgagactgattatggtcgagtacagatctctatttcaataatttctcaaaaatttctagctataatttacaaatatttttacttaatattattaagatcttagcttggatccaaatgagtagttggtacaatgatttcagccatactcacaaaatagtccacagttaacttgaagaaccaaagataaaaggattagcttaatgagttgtgtaaactagactatttgttagaaaattgtttctatggttactgtagaattaattgattatggagctcaaagatttgtttaaatatctagaggctactattgaagctttaaagagaaaataaattgatgtttaattctctatgacttattttaataattgtgagtatactgacatgacattagagatgtagcttaacctcataattctcccactactttgcctttcttataaataaacaagggcaaaatatagaatacataaaaaataaattattcctatatatgaatatatgtacatatttttcaaagcacacaaactttaccaacatttttgcctgcattattctaacccctttcagaaaattacataaagtaattatcttatgtcatccacttcttcttttctttattcctatcaggaagacccactacattatctgagacaatgaggaaagctgacatatggcttatgcgaaactcctggaattttaaatttcctcatccattcttaccaaatgttgattttgttggaggactccactgcaaasctgccaaacccctacctaaggtaaacatactttcgttggttttattttgttggcttcaaatttcagtagaaatgactctatagtcttcattcagagtgtttgactaacactgaaaaagatgggaagtaggtggggtaaagcagataccaattagaaactcatgtacatgttaataccatcacacgtatgtgagttttatgcatgttacaaatagagaggaatactaaagaaactttgaaaataggtttggttaaattaaagtcttgattatgcaacacctaagaaggtattggtcattcattcaaagaatatttacaaagagattatcacaaaacacaggtaagtgcacaattttcagagaaaaaaaatagacacagtttctgtccctacataccttacattctactttgaaatatagaatataagtaagtaatgaatattatataaaaactattatctcaagaaaaaacccaatgctaagaaagcatcagtggagataatagaaagtatcctggagtcactgatgagtacgatgagagctgaacaatatgcaggaatagggaaaagaatggtggggagagacagacaaaaagggaaagcagataaagtggtcaggacagttctcaagtcctcaggtttagtttgcagggaatgattaagaatcagatgacgctaaaaggtaaattagagccagatatgtattaggagttgaaatatttattaagaacattgaaaacatcctaaaaagagttcagaaataaggatatatgaaatgattctttttataagaaaagcctccaagatattcaatggattaaattgcagaagggccagactgtaaagaccgaaacattcaggaaattttccatggattcaggtagcagatgatgaaaaagtggactacactgttgatagaaataattatgcctacatttacaaaaatagtgccaacttcatattgtgttgtgtggaaaaaaatattaacacagacaaaacacttaaaatgtctctggcatatagtcagtgactcagaaatgttattaattttgcaattatggttattttattactaatactactaactacttaacatgtgcatgtcacttgagatatcattcctcatttaagagaaccagattattcagcacatcaaggttatattgtcttggaaagtcatagatgacagatacccttggacttgattaaaagtagacatatcagttgtgacagcaagataagctagttgaaattttaaaattcttccataagtaataaggatcttcaccagtattccagcttaaaacacttcctcaacaatataaatgtgtgcctcaaatatgtgcagacaaacacagggttcacatgattttaataaagcatttaaatcattctgcattgagatcccagaattttacattttagagcataaacatatcctattagagcagatgatttctgccttatgacaggccactcaataaagcttcctgggggaactcgtcttgacatcataggtgtctgacagagaagcacagagataatgaacaatgca

SEQ ID NO: 85267 - DNA, 1445 bp, Homo sapiens
  misc_feature (1)...(1445): n = A,T,C or G
atgtttggtgaaaatagtattacatatttggggatcattctctaatattagctttgaagcaatatcaacaagaataaaaaagataatccaaactatttttttctttattcttctcatcatatgacaactaactaaaaatttgtgaatacaattcaagaaacaggtgtcaaatcaattctcagccagaaaactcatcactttggtctcaccttagccaaggtataaaacaacatatttctgttctctaaataaacagtgaacacatgctgattctggagatagcagtaaaaggtttgcttttttaaatgtatagtactccccaggtgtgacttcatcttcatttcccatttatagtgattatggccacccatgaccctgtgcatagtctagacatgctgattcaatccccatccggttgatggaagaacaggtacagtcaaagagctgtggtcactgaggagccaagcaatgcaagccatccagatcctgagacgacattcctgccatctgctccagccttgagttccctgggctgccgtgtgtgaatgtgtctctaataggacagcgctagccctctaccctgtttattctaaagaactgcaaagacagagaccctacgaactcaactcaacaccccaaaactactcagccctctacattaaacacgccactcaggaaacatttgatctcttaaagattgtaagcatttctcacaagagataatctacttatgcttggctcgtaatgagtgggcatctccaggcataagtgaaaacagaactaaacacagttacaagtcaaatgtggggctttacaggtgatgttcatattattttttccagtccaaaaggattaagactgttctctttaaaatttcatattcaagtgagactagtgtcctcccggttacgatgaccttaactattggagtgaggaaaagaaagggagggtgtccatttccatttctcatggccataaattcgaatgattgactcaagttgttgaggtgactccatttccctgagtactaaagaaggcagcaagtggaaacacctctttgcttgcaagtttacagccctcgagtccaagtttttcaccctctaaacccaaactatgctatagccatatgtgaccccttagcttatgtaatcagggagaggtccagccctttatcactctcatgtgccccaaaatcacttycattctctttccggctcctgtaaaatactctgtacacatcaaaaccacctaataacaaatcgatgcaacccaagacactctgtggaagggcatcgtctcctatttctctatggatcccaccaaacagcaaaacatttctcnnnnnnnnnnnnnnnnnnnnnnnnnnnnnnnnnnnnnnnnnnnnnnnnnnnnnnnnnnnnnnnnnnnnnnnnnnnnnnnnnnnnnnnnnnnnnnnnnnnnactga

SEQ ID NO: 85268 - DNA, 786 bp, Homo sapiens
cttgagcccaggaggcagaggytgcagtgagccaagatcctaacactgcactccagcctggacaacagagcaagactctgcctcaataaataaaatgtttttaaaaggttttataaaaaggtttaactctcaagacagtgagtgtttctgtaaactataccgcatctcctcatgaaatgagtaaggacatctgttaatgagcgaagtcagtactcactgaacaaatgtgaagacagaagtaaaatttacagaacagattgagagcagtagttcatttgttaatttaggaggctgttgataaactagcaaagtctgtaaatgatgaacttgtagagttattggtgataaactagcaaagtttgtaaatgataaatctgtgaaattattggacattatattattatacctttctgcccaggtatagaaaagagaggaggcttcctagcacctttgagtaacccgtatatcattaattatatatttgacatatggcttgaaacagaataaggtaaataagttgtacataaacctctgaaaaaattgttttaaagcatcaacaatacacaaataaaaaataaggaattttgctgctcatttgtaatttattaagcatcactggtaggtcttgttttccaaagttggataagtcatggtcagaaggatttttagaaatgtttttgtttttaaaaagatctgcttattcaagaatagaaatacaatttctattttaaagtgaattcttccttaaaagtttcaatgcagaatttctgtctaaaagataaaagt

SEQ ID NO: 85269 - DNA, 786 bp, Homo sapiens
cttgagcccaggaggcagaggctgcagtgagccaagatcctaacactgcactccagcctggacaacagagcaagactctgcctcaataaataaaatgtttttaaaaggttttataaaaaggtttaactctcaagacagtgagtgtttctgtaaactataccgcatctcctcatgaaatgagtaaggacatctgttaatgagcgaagtcagtactcactgaacaaatgtgaagacagaagtaaaatttacagaacagattgagagcagtagttcatttgttaatttaggaggctgttgataaactagcaaagtctgtaaatgatgaacttgtagagttattggtgataaactagcaaagtttgtaaatgataaatctgtgaaattattggacattatattattatacctttctgcccaggtatagaaaagagaggaggcttcctagcacctttgagtaacccgtatatcattaattatatatttgacatatggcttgaaacagaataaggtaaataagttgkacataaacctctgaaaaaattgttttaaagcatcaacaatacacaaataaaaaataaggaattttgctgctcatttgtaatttattaagcatcactggtaggtcttgttttccaaagttggataagtcatggtcagaaggatttttagaaatgtttttgtttttaaaaagatctgcttattcaagaatagaaatacaatttctattttaaagtgaattcttccttaaaagtttcaatgcagaatttctgtctaaaagataaaagt

SEQ ID NO: 85270 - DNA, 1095 bp, Homo sapiens
taaaattcagatgacaggttgataggtacagcaaaccaccatggcacatgtatacctatgtaacaaacctgcacattctgcacatgtatcccagaacttaaagtaaaataaaaatacaattaaaaaggtggcttatgcgtggacaattgttcactgctctattagaactagaactggagtttcatcatctcagtgagtggaataatataaacaygaatgattaggtcaaaataaagcattcaaaccagcagtcacctggaagcacttgttaaaatgcagattcatggccccagacaatctaattcaataaagaccaggataagaccctggaatctgcatgataacaagcacctcaggaggaatgatgcaggtgatcctggaaaccttatctgagaaacactggtctaaatttactcagacacaggttaagtggaaatatttcaaaaaatgggaatgtgggggagaacatcttaaaaactgctggcctgggggtctcatacttaagcttaaattgatgtattttattagttgctggctcccagcttagtcctgagaatatgttttccatcccttcaagaacatggaatgacaagagaggaggaagggataaagaatgagaaggaagaagaatatttctgtttttctctctctacaggtagattccttgtactttcatgctaatgaacccaagtaaggctgtctggatgctgaaggctctcactgccccggagtcagcccagaaccatgaaggcaggctgtggctggcagaaaggactgccactccctctcaatacaccctgcttatttctcattaactggatctgaaggcagccaaaatatcgattaacttaggggttaatttgtgtggttctgattagtcaagattttcttgattgaatacaaaaggctttcattttaaaaaatcaaaaattataaattttaaagaatatttagtgcaaattaagaacagactttctttttttactctaagttctaggatacatgtgcaggatgtgcaggtttgttacacaggtaaacatgtgccattgttgtttgctgcacctatcacccatcacctagggattaagtccagca

SEQ ID NO: 85271 - DNA, 1095 bp, Homo sapiens
taaaattcagatgacaggttgataggtacagcaaaccaccatggcacatgtatacctatgtaacaaacctgcacattctgcacatgtatcccagaacttaaagtaaaataaaaatacaattaaaaaggtggcttatgcgtggacaattgttcactgctctattagaactagaactggagtttcatcatctcagtgagtggaataatataaacacgaatgattaggtcaaaataaagcattcaaaccagcagtcacctggaagcacttgttaaaatgcagattcatggccccagacaatctaattcaataaagaccaggataagaccctggaatctgcatgataacaagcacctcaggaggaatgatgcaggtgatcctggaaaccttatctgagaaacactggtctaaatttactcagacacaggttaagtggaaatatttcaaaaaatgggaatgtgggggagaacatcttaaaaactgctggcctgggggtctcatacttaagcttaaattgatgtattttattagttgctggctcccagcttagtcctgagaatatgttttccatcccttcaagaacatggaatgacaagagaggaggaagggataaagaatgagaaggaagaagaatatttctgtttttctctctctacaggtagattccttgtactttcatgctaatgaacccaagtaaggctgtctggatgctgaaggctctcactgccccggagtcagcccagaaccatgaaggcaggctgtggctggcagaaaggactgccactccctctcaatacaccctgcttatttctcattaactggatctgaaggcagccraaatatcgattaacttaggggttaatttgtgtggttctgattagtcaagattttcttgattgaatacaaaaggctttcattttaaaaaatcaaaaattataaattttaaagaatatttagtgcaaattaagaacagactttctttttttactctaagttctaggatacatgtgcaggatgtgcaggtttgttacacaggtaaacatgtgccattgttgtttgctgcacctatcacccatcacctagggattaagtccagca

SEQ ID NO: 85272 - DNA, 1095 bp, Homo sapiens
taaaattcagatgacaggttgataggtacagcaaaccaccatggcacatgtatacctatgtaacaaacctgcacattctgcacatgtatcccagaacttaaagtaaaataaaaatacaattaaaaaggtggcttatgcgtggacaattgttcactgctctattagaactagaactggagtttcatcatctcagtgagtggaataatataaacacgaatgattaggtcaaaataaagcattcaaaccagcagtcacctggaagcacttgttaaaatgcagattcatggccccagacaatctaattcaataaagaccaggataagaccctggaatctgcatgataacaagcacctcaggaggaatgatgcaggtgatcctggaaaccttatctgagaaacactggtctaaatttactcagacacaggttaagtggaaatatttcaaaaaatgggaatgtgggggagaacatcttaaaaactgctggcctgggggtctcatacttaagcttaaattgatgtattttattagttgctggctcccagcttagtcctgagaatatgttttccatcccttcaagaacatggaatgacaagagaggaggaagggataaagaatgagaaggaagaagaatatttctgtttttctctctctacaggtagattccttgtactttcatgctaatgaacccaagtaaggctgtctggatgctgaaggctctcactgccccggagtcagcccagaaccatgaaggcaggctgtggctggcagaaaggactgccactccctctcaatacaccctgcttatttctcattaactggatctgaaggcagccaaaatatcgattaacttaggggttaatttgtgtggttctgrttagtcaagattttcttgattgaatacaaaaggctttcattttaaaaaatcaaaaattataaattttaaagaatatttagtgcaaattaagaacagactttctttttttactctaagttctaggatacatgtgcaggatgtgcaggtttgttacacaggtaaacatgtgccattgttgtttgctgcacctatcacccatcacctagggattaagtccagca

SEQ ID NO: 85273 - DNA, 1095 bp, Homo sapiens
taaaattcagatgacaggttgataggtacagcaaaccaccatggcacatgtatacctatgtaacaaacctgcacattctgcacatgtatcccagaacttaaagtaaaataaaaatacaattaaaaaggtggcttatgcgtggacaattgttcactgctctattagaactagaactggagtttcatcatctcagtgagtggaataatataaacacgaatgattaggtcaaaataaagcattcaaaccagcagtcacctggaagcacttgttaaaatgcagattcatggccccagacaatctaattcaataaagaccaggataagaccctggaatctgcatgataacaagcacctcaggaggaatgatgcaggtgatcctggaaaccttatctgagaaacactggtctaaatttactcagacacaggttaagtggaaatatttcaaaaaatgggaatgtgggggagaacatcttaaaaactgctggcctgggggtctcatacttaagcttaaattgatgtattttattagttgctggctcccagcttagtcctgagaatatgttttccatcccttcaagaacatggaatgacaagagaggaggaagggataaagaatgagaaggaagaagaatatttctgtttttctctctctacaggtagattccttgtactttcatgctaatgaacccaagtaaggctgtctggatgctgaaggctctcactgccccggagtcagcccagaaccatgaaggcaggctgtggctggcagaaaggactgccactccctctcaatacaccctgcttatttctcattaactggatctgaaggcagccaaaatatcgattaacttaggggttaatttgtgtggttctgattagtcaagattttcttgattgaatacaaaaggctttcattttaaaaaatcaaaaattataaattttaaagaatatttagtgcaaattaagaacagactttctttttttactctaagttctaggatacatgtgcaggatgtgcaggtttgttacacaggtaaacatgtgccattgttgtttgytgcacctatcacccatcacctagggattaagtccagca

SEQ ID NO: 85274 - DNA, 980 bp, Homo sapiens
agtatcctcccccccaaaaaaattaagaaatatggtactaaggtctaatgcaatgaggttgatgtagtttcatttgaagattatttgtagtttagcagagagctcctggaaagaatgccttaacctaaagaaagaattctacaataaaggaaaagtaggctccagtggtggggaacgtattatttgggagaggattttggagtacttcaccacattgtatgggcaactaattattttttcttgctctgtctctttaatactgatgacaaagggatatctgtcttttatttcgccctgtagttatggtcctaacayatactaggatataatacattttaaaatgttaacacaagtgccaaaatggggtggggaagcattaagtccacttaactttagcaagcacttactgagcacctactatgtataaagcacagtgctaggtgatataggatagaaaggcaaataaaattctataaggtgtgaaccttccagaacctgacaatccctaggagggggatagataggtgatataggatagaaagacaaataaaattctataaggtgtgaactttccagaacctgacaatccctaggaggggtatagatagacacacacacacacacacacacacacacacacacacacacacacatacacgacagtacacacacatatatatatatatataaataatattaatgtaagacagactatgagatatgctattgcataatatgggagaaggcattgatgctaactagagagcacctaggaagctttaactaaaagtagaaacaaggctaccaaccctcaaatccctggacccttccccttctctgaacaactatcttcaacagattcagagattaggtccactgaactttaattttttctcttttttctttattatgaaatatttcagacctgcaaatggtatataaaaaccattataaatacccatgtgcataaatacccataa

SEQ ID NO: 85275 - DNA, 980 bp, Homo sapiens
agtatcctcccccccaaaaaaattaagaaatatggtactaaggtctaatgcaatgaggttgatgtagtttcatttgaagattatttgtagtttagcagagagctcctggaaagaatgccttaacctaaagaaagaattctacaataaaggaaaagtaggctccagtggtggggaacgtattatttgggagaggattttggagtacttcaccacattgtatgggcaactaattattttttcttgctctgtctctttaatactgatgacaaagggatatctgtcttttatttcgccctgtagttatggtcctaacatatactaggatataatacattttaaaatgttaacacaagtgccaaaatggggtggggaagcattaagtccacttaactttagcaagcacttactgagcacctactatgtataaagcacagtgctaggtgatataggatagaaaggcraataaaattctataaggtgtgaaccttccagaacctgacaatccctaggagggggatagataggtgatataggatagaaagacaaataaaattctataaggtgtgaactttccagaacctgacaatccctaggaggggtatagatagacacacacacacacacacacacacacacacacacacacacacacatacacgacagtacacacacatatatatatatatataaataatattaatgtaagacagactatgagatatgctattgcataatatgggagaaggcattgatgctaactagagagcacctaggaagctttaactaaaagtagaaacaaggctaccaaccctcaaatccctggacccttccccttctctgaacaactatcttcaacagattcagagattaggtccactgaactttaattttttctcttttttctttattatgaaatatttcagacctgcaaatggtatataaaaaccattataaatacccatgtgcataaatacccataa

SEQ ID NO: 85276 - DNA, 1365 bp, Homo sapiens
agcatggaggggctggtggagcatgctctgtggttccctaacccagggctgtgtggggagagcttgcagcacccccctgaccccatatgaacgtccttgctatttcctgctgtgccatccagcaactataggatgctgggctgtggctgggagacctgtttggtcttggaagctgggtcctggatgagcagaatgaggcaggcatagaggtgatgttggctacgggcaggggagcrtttgctttgccttggagtagtgccatttccatgtagaggggcaagatttaccaccctgttgtggggatttgagactttgggttttgttttcctttacaccttgagctttgttctacagcaggtccctgggaagactggtccacaaagctgctgaatggggctgctgtccttcagccctgcctcctgctgcagaatgcagaggacgctgtagacttgcttggtgggtgcctggggttttctgcctccctggtgcactgggcacagcggcttgcctgccttttgggtcgtctccacctcccagggatgtttttgttccctgatcgaatgacctcctgttttgtttgttttttgagacggagttttgctttgtcacccaggctggagtgcaatggcatgatctcggctaactgcaacctctgcctcccgggttcaagtgattcttgtgcttcagccttctgagtagctgggacttcaggtgtatgccaccatgccacgctcatttttgtatttttagtagagatggggttttaccatgttggtcaggctggtctcgaactcctggcctcaagcagtgcgcctgcctcagcctcccaaagtgctgggattacaggcgtgagccaccgtgcctggcctgacctcctgtcttctgtttttgcccactgtcaagggtagacttcttcaaggctgtacttgtgctatcctaaagaggagtaatgggagacatttctgactttgtcagcatgctgcttggcagcacctgcctcgtttctggtgaccatttggaaatgtgtcctttatctggtagcaaggagcatttacattgatccctatgcacttaattggcatacttttattcctctggattttttttttaaagcataattgttcgtgtctacatgatgtaacatgctgctgacttttaagcaaattaacagagttcgtgctgaagcgcaagggtgcagggaaacaaaatgggagggttattaaaggggtgaggcggctcctcaaagatgtcactgcaccattcattcttgtgttcctggcccatggcaggctcattaatcctccacgacaatccattagcatgcctgtcaacccttcagagaagatgagccataggaaggcttag

SEQ ID NO: 85277 - DNA, 742 bp, Homo sapiens
ggatcctattccttttcactcaatataagcctataagacatctcaacactcgccatcttacaaacatagagaagcatctgggtgtctgggcgtgccctggacccacaaaaatccctaaccaaaactgttagctctgacaacggtttaagcagaagtaatagcatatacctctgaaggcagaggtttggtttttattgctaggtttactcctgctcgtttataaggatgccctaaatgccatctcccaatgaaaacccttccatgtccaggggcaaaggatgctctggaccctcaatgcttgagcctactgaaccatccaggaccacttcgcttggctcgtctagtgatgcagagctgttacatggttctgcaaaggattctcagagagattcccacctcacagtcactgctttgctttcagatatttctggtaacccccagagttcagtgtctttctagcttgatttgtcccaacagaatggagccttattgaacctatggatcaattctggtgaaatgtcaaataaggcaaaataaaacagaagtaagtgtgaaggcaagagtttttaccagaatctgaccctttkgtgagataactcacgtgacggaaagctctgatgatattgctgaagctggagtgtttaatgacctccattttctcaagagcattttccctgtaaacaaagatgacaactgttacagccagagaaagtgacagcttctgaggtttccaccataaaca

SEQ ID NO: 85278 - DNA, 724 bp, Homo sapiens
tccaggtggtagcaaaagggttgttacaactttaaccctgcatccccaccttcaggttcagtacccaagggtgagcaatctgttccagtggcacagacctgtttcaagaggtctctagccgtgatagtgctaggccactgccctccaccagtgtgttccagagaaagatgctctgatgtgccagcccaggccatgaggttcccggcctcagtaaggaagaaggaggacaaggtggtcccttaggagaaaatgtggatattcaagaaagagggtcgcaaaatagcaaacacccactatggctgggcagtacagggttgcagaaatatattttgatgtgtgatcgcattggagctacttcaaagagcaaacacaccactttgatttatttctcttagtgatacagtatttagagagggagatactttttatcttcrtgggatacttacagtggtgctctagaagccatgtactgcttctggcttctccttcctttcctccaaggctcctcctgcctcctcccaaagctctgtgccctgaaagagccttgagccattgctcagatgtcaaaattgtattaagcagacacatcaaattaaaacttttgggatcactcaccaatatggtttcctgtacagtactgccctgaggggggattacaagtagttatgcatccatttcattgatgtatcatttttattaaaaagaaaaacaatccaaccaagag

SEQ ID NO: 85279 - DNA, 1356 bp, Homo sapiens
agttaccttgttctcatttttcttctccctctttgccccgtccccacaatatcttagggcgaagaaaagcaggtttgagaaaagctttttttcatcatgtatttgtaatagctggagcctgctgagatgatgaggtagagtggagggagaaagagaccttgaggaggtgtggagggggaaggggtggaaagttctgtcgtcttctgtgcctctctctctctcttgctcagggtctccagtcagccctctgggtttgtgcccttcgtgctgcactgacaggtcaaagccgactcaggcctttgatgtctgctctaggagcaaaagtgattcctggtcccgcagccgttyccactgccttgtgtatgaaggtctgctgctctgaggtggatggtggctctaggcaggctgtttccgctgggtgcggttgttgctgcaggtttttctatatagcttggtcatgctcctgtatctagattaaaatcctatgacagatgggcctgcttatatctaaacttattcagagagtcttatgataggcaacaggttaccctttaccggggtaaaacatggtttattctacagtttggtcccgttgtaaggccaggagatagagtctcactagtttgccccggctgaactcaaactgctggactcaagggatccttccgactcagcctcccaattagctgggactgttggtgtcaggcacacaccaccttgcctagcttgaagatctttcttctaaatgagcgggctttaaagtgatcagtgggacctgggcaggttggctcttgcctataatccaagtgctttgagagaccgagacaggaacatcacttgagcccaggagttcgaggctaaagtgagctgtgagcacaccagtgcaccccagcctgggcaacagagtgagactctgccccaaagcaagataaaattatcccacaggattttagtcctgacttgtgtattactatgcagttgtgtctgtctgaggctcagattcccccccatttaggatttgtgtggctaaatctcagatctcattttcaggtgaatttctctattaaggttataaaagaccaaaataactggaaattcaactctgtacttgaatacttggtaatgcccagcattctcttgactatcccatttcacagtttgccggtcatttccccagtgtactcactggattcttcccgcagccatgaaaggtaggtataattaactccagtttacattcaggacaatagaatgttcgtcaaaatgcttttgcacatgttttctcaccctgagtggctacacttgtacagtcataccctccaaactctaagatgtatactcttacataccaaaaca

SEQ ID NO: 85280 - DNA, 1356 bp, Homo sapiens
agttaccttgttctcatttttcttctccctctttgccccgtccccacaatatcttagggcgaagaaaagcaggtttgagaaaagctttttttcatcatgtatttgtaatagctggagcctgctgagatgatgaggtagagtggagggagaaagagaccttgaggaggtgtggagggggaaggggtggaaagttctgtcgtcttctgtgcctctctctctctcttgctcagggtctccagtcagccctctgggtttgtgcccttcgtgctgcactgacaggtcaaagccgactcaggcctttgatgtctgctctaggagcaaaagtgattcctggtcccgcagccgttcccactgccttgtgtatgaaggtctgctgctctgaggtggatggtggctctaggcaggctgtttccgctgggtgcggttgttgctgcaggtttttctatatagcttggtcatgctcctgtatctagattaaaatcctatgacagatgggcctgcttatatctaaacttattcagagagtcttatgataggcaacaggttaccctttaccggggtaaaacatggtttattctacagtttggtcccgttgtaaggccaggagatagagtctcactagtttgccccggctgaactcaaactgctggactcaagggatccttccgactcagcctcccaattagctgggactgttggtgtcaggcacacaccaccttgcctagcttgaagatctttcttctaaatgagcgggctttaaagtgatcagtgggacctgggcaggttggctcttgcctataatccaagtgctttgagagaccgagacaggaacatcacttgagcccaggagttcgaggctaaagtgagctgtgagcacaccagtgcaccccagcctgggcaacagagtgagactctgccccaaagcaagataaaattatcccacaggattttagtcctgacttgtgtattactatgcagttgtgtctgtstgaggctcagattcccccccatttaggatttgtgtggctaaatctcagatctcattttcaggtgaatttctctattaaggttataaaagaccaaaataactggaaattcaactctgtacttgaatacttggtaatgcccagcattctcttgactatcccatttcacagtttgccggtcatttccccagtgtactcactggattcttcccgcagccatgaaaggtaggtataattaactccagtttacattcaggacaatagaatgttcgtcaaaatgcttttgcacatgttttctcaccctgagtggctacacttgtacagtcataccctccaaactctaagatgtatactcttacataccaaaaca

SEQ ID NO: 85281 - DNA, 688 bp, Homo sapiens
atattttcctatatttactattcaaattttagtaaacatttagtattggcaacatattatgtgctaaatactagtttttaaaatgagaattattatgttttcttaaaaacatcttttgaatatttttaggatgtaattttcatgaggggcaaaaatgggtggtatagcatggtaattgttatcctccacaggttcagcaaaatctataaagatcctaatctatcctagtacataactatggatcaagtatttgtaatttttttctaaaccaaaactgcatgttatttaacccatacttggaataacagattctattttgttaaactgtaagctaaagtattatttgtttcaatagtaaacaaaaggattattttatgttatagaaattttatcttttttyagatgtcaaacatcacattgataaaattatactgaaatttggataacatattttgtttgctgtattatataaccacaaagatttaaaaacttgatcaaatctaagtttaagataatgtaatacggattaagtatgcactttagagatagtataggttttgaatattgctctcaccctttactagctgtgattttgagcaactactcacacataatctgtacattgtcactgagcttgtacacataaagcatttagtacagtgtctattttaaaattttatcagtaaat

SEQ ID NO: 85282 - DNA, 1281 bp, Homo sapiens
gtgacttgattcctgattctggagtatttaagaattcctataactcaacaaaaagttcagttttttaaaatgagcaaaaggcttgggtaaactattcacaaaggaacrtagacaaatgccagtacacacatgagaagcgcatacacatccacaaacttcaaacaagcccacctcatgtatttctagtgagtaaggaaaagaacgcaaacacttttgaaaattgtttggttgtttcttgtaaatttaaacaaataccctattatattatccagcgagtccatccttaggtttttatccaaggataaagaggtgaaaactcatatctaacaaatagacttctgaaaagatgaaaatagaagctttattcataaaagacaaaaactagaaataacccaaatattcattcacaggagaatgaataaacagactaggttgaatccatacaatggaatggtagcagacaataaaaagaaaatgaactattgatgccccctactgcacagcagaagctctgaatcgtgttcctgaatgaaagaagtcaggtatgaaagaataaacattgtatgattccatttatatgaaaatgaatctgtgatttaaaaatcagactagtattaggttggtgcaaaagtaattgcggtttttgccttttttttttttttttttaaatagttgctttggggtttatggatggagtggcatggtagaggttagctgaagggggcatgaaataactttttgggggtgctagagtgttgtaaatcttacagtgggggagggacaggagtgcaggcatttgacaaaacacattgaattgtgaaatttaagatttttgaatttctttgtatgtaaattacctgccaataaaaacatgacgaatagagcagttatgagcatttgtgtgtagctttttgtgcaaacttaaattataatttctctgataaaagcccaggaatgtgattgttgagtaatatggtaagtgcatgttttttgagaaactgtcaatctatttttgggagtggctgtgtgtatcatgttatattcccacaagcaagggatgagaaatttggtttctctgcatccttgctagcatttggttttatcattatatttttatttcaactgctcaaataagtgtgcagtgatttctcatgatctcaatttgcatttccccaaaggctaatgatgttaaatatatttccacatgctgatttgactcggccatgaaatgtctcttcatgtctattgcccaatttcttattagattttttttttactgtt

SEQ ID NO: 85283 - DNA, 1281 bp, Homo sapiens
gtgacttgattcctgattctggagtatttaagaattcctataactcaacaaaaagttcagttttttaaaatgagcaaaaggcttgggtaaactattcacaaaggaacatagacaaatgccagtacacacatgagaagcgcatacacatccacaaacttcaaacaagcccacctcatgtatttctagtgagtaaggaaaagaacgcaaacacttttgaaaattgtttggttgtttcttgtaaatttaaacaaataccctattatattatccagcgagtccatccttaggtttttatccaaggataaagaggtgaaaactcatatctaacaaatagacttctgaaaagatgaaaatagaagctttattcataaaagacaaaaactrgaaataacccaaatattcattcacaggagaatgaataaacagactaggttgaatccatacaatggaatggtagcagacaataaaaagaaaatgaactattgatgccccctactgcacagcagaagctctgaatcgtgttcctgaatgaaagaagtcaggtatgaaagaataaacattgtatgattccatttatatgaaaatgaatctgtgatttaaaaatcagactagtattaggttggtgcaaaagtaattgcggtttttgccttttttttttttttttttaaatagttgctttggggtttatggatggagtggcatggtagaggttagctgaagggggcatgaaataactttttgggggtgctagagtgttgtaaatcttacagtgggggagggacaggagtgcaggcatttgacaaaacacattgaattgtgaaatttaagatttttgaatttctttgtatgtaaattacctgccaataaaaacatgacgaatagagcagttatgagcatttgtgtgtagctttttgtgcaaacttaaattataatttctctgataaaagcccaggaatgtgattgttgagtaatatggtaagtgcatgttttttgagaaactgtcaatctatttttgggagtggctgtgtgtatcatgttatattcccacaagcaagggatgagaaatttggtttctctgcatccttgctagcatttggttttatcattatatttttatttcaactgctcaaataagtgtgcagtgatttctcatgatctcaatttgcatttccccaaaggctaatgatgttaaatatatttccacatgctgatttgactcggccatgaaatgtctcttcatgtctattgcccaatttcttattagattttttttttactgtt

SEQ ID NO: 85284 - DNA, 1116 bp, Homo sapiens
cacatgccaggtattctcttgttgtagaacatactagaattgcacataggattcttgggatggcttcatttctcaggaaaaatgaaaaatgaccaaacaagggaagatggccttgctggaggttttaaaagtaagccagctatgtgtaggcctgcaaaggtgttaccgaatccctcttctctgacctcttgtagctagagggccactgttccagtgtggcacaatgcccttctttagggtcatgggttaagcccttggactgtggatcgtttttaaccccccagtcaacagtagatacttactgacttcttgtcagttgaagctggctttttgggtcccgtcttccaggggtagaacattttgccatgagtgacatcggtttcctcccagacccttgtgttcttcctgaataacaaaagaagtgctgtttaaataagaaggagcagctggtttatgtgcctgtttctggagttgagggtgtgctgtatgacaaagacgctgtctgtgttgaccttggtggcagccacggttttcaggcatcagtgaggcaggagtctttgctctgaactctcattattctttcctaatctattttttaatcaaaaaaagtaatgtactcagcttttatttattgaagatttttctcttgtacttataataaaggcccaaatgcatattgtcaatatgtagaataaaaagaataccattttttcattgtaccaagcagaagagtcctgtcctccatgcctccttgatccatggccccagcgcgggcactgctgccagtgtggcacctgcacggcttatttcygtttctacaaaatcagtgtgctttccagctctcgtttgtctttttctttttctcaatcacagtggtctcctcattattttaaagtggatttccaatatttatttcttagttctgtagttgaattttattgggttaaaagcagggttatttaaaaatgttagaaaagctagcactgttgtagcactggaactgaggtttttctagctaggtgtttaggttatcaagttatatactcactgagctttggacaagtttaatggagatggggatccatttcaagctttgttataaggattttcttctct

SEQ ID NO: 85285 - DNA, 1116 bp, Homo sapiens
cacatgccaggtattctcttgttgtagaacatactagaattgcacataggattcttgggatggcttcatttctcaggaaaaatgaaaaatgaccaaacaagggaagatggccttgctggaggttttaaaagtaagccagctatgtgtaggcctgcaaaggtgttaccgaatccctcttctctgacctcttgtagctagagggccactgttccagtgtggcacaatgcccttctttagggtcatgggttaagcccttggactgtggatcgtttttaaccccccagtcaacagtagatacttactgacttcttgtcagttgaagctggctttttgggtcccgtcttccaggggtagaacattttgccatgagtgacatcggtttcctcccagacccttgtgttcttcctgaataacaaaagaagtgctgtttaaataagaaggagcagctggtttatgtgcctgtttctggagttgagggtgtgctgtatgacaaagacgctgtctgtgttgaccttggtggcagccacggttttcaggcatcagtgaggcaggagtctttgctctgaactctcattattctttcctaatctattttttaatcaaaaaaagtaatgtactcagcttttatttattgaagatttttctcttgtacttataataaaggcccaaatgcatattgtcaatatgtagaataaaaagaataccattttttcattgtaccaagcagaagagtcctgtcctccatgcctccttgatccatggccccagcgcgggcactgctgccagtgtggcacctgcacggcttatttctgtttctacaaaatcagtgtgctttccagctctcgtttgtctttttctttttctcaatcacagtggtctcctcattattttaaagtggatttccaatatttatttcttagttctgtagttgaattttattgggttaaaagcagggttayttaaaaatgttagaaaagctagcactgttgtagcactggaactgaggtttttctagctaggtgtttaggttatcaagttatatactcactgagctttggacaagtttaatggagatggggatccatttcaagctttgttataaggattttcttctct

SEQ ID NO: 85286 - DNA, 1323 bp, Homo sapiens
  misc_feature (1)...(1323): n = A,T,C or G
tgcatttacaaaatgaaggaataaaatcatttgatcatttcagtagatgacaaaattcaatattcattcatgataaaaaaaaaaaaagtttagaaaactaggatggagactgggcgcagtggctcacacctgtaaccctagcacttcgggaggctgaggcaggtggatcacgagctcaggagtttgagaccagcctgcccaacatggtgaaaccccatcactaccagaaatacaaaaattacccaggcgtggtggcgtgcgcctataatcccagctacttgggaggctgaggcgggagaatcgtttgaacccaggaggtggaggttgcagtgagctgagattgtgccactgcactccagcctgggtgacagagtaagacaccctcgagaggagaggagaggcgagatgaggggaggggaggggaggggagcanagggaaactaggatggaaaggaactgccttaatctaattaaataggcctacaaaattccttcagcaaatatcatccctaatggtaaaagctttccctctgtaataaaaatcaagacctggtatccactttactcaatgtcatattggaggtcctaagtgcagtgtccctcactttataggcatgctgcatatgcagttggcatcagcgaagcaggtccaccaaaactttattttgaaatgatttgatatctaaacaaaatgtaaaaacatcaaatttaatgcaatattgcaataattccctaaccactctcctccaaccactttctcttcatagagccaaacttttaaaaaatataagtcagattattgatgaagagacccaggacctggtcatgagctaccagatttgcctgcctctccatcccatcttatgtctcccttcctgttgtctgcattctggcttcaccagcattttcagagtctcaaaggtgtcatgcaacttccacatctaggcctttggaaaaagccctttcctaagcctgggaccatttccaatgccctcttcacctaattcatcctttagattttagctcgctagttcagggacaacctaatcacaaatagggaatagcctcagtcacaataaacacatctaacacccagaacttgctttctaatatgatttttcaacaaagaggaaccaaggctccttggagaaatggttgattctaggactggagcagaaaatatacaagatgagcctgcagcatcttacaatgccagaaagtaaggaagtgatcaaaatatacaccgcctcatgatgagagtatgtcaaagaygcacagaagtcaactgaaagagctcccggtggccaaagctagagaatctga

SEQ ID NO: 85287 - DNA, 1276 bp, Homo sapiens
gttgggacagctccttgtgtgcagccggccacgacggggctgtcaggggtcgaagtgtgcgctctcagtttacaagctctcaaaagggacctaaaattggcctttgcctcagagtgaatagtcaaagaacccttcaacaatgaagtttacatctcagccaaaaggcaatttaaaggctgccattcctctgagttgtgtgtctagctcaaaaaaagctggccacccaccctgccctcagggttaccccaccccccaacctgagatggtggccgctgtctcctcggctaggaggcggtctttctcttctcgaagtttctctagctcccgctggtgctgcctctggagatcttcaatcttcttctggtgcgtttcttccattgctgcaaaccctcgctcgcacgtggcctgcaaaatgcaaaagggacttcatcgacttctttctttacctctaagttgggggcccttttaaataaaggagccaggaatcccaccctgtccaggcccagctgtgactgggcattcactgagcttgctccaccatgggcgccctgaacaggatccctggggctgtctggggattctcagcaatgccatcagagcattcagaaaagggtgttaccagtcaactctacctcttatttctgtgactgtactgtgccccatttcttcctgggagaagttggtatggtaggtggggasaggctgctatgaaatggaaaccagccaaccctggaccttcctgcgttgctgccaggtgggacccacaggaaggaagagagagcacgtgggcagaggctggctgtgtctggtctggagggacacggtgaaaggcccgtaaaacagggatgagggacttgtctgctggagggaaccaaggccattccacatatagggagtggcctggcgggcaccgggctgggagcctctcaacccacagtgggttgggggtacatagagtccacttctgggagctgggggttgggactctgccactagccagctgacaacctccagctggtcacttaatgctcaggtgttgactgagggagtaagatcaggctacaggctccccttccttctagcctgtgtcttctttcttactcttttcttaaagaagggcaccaatgacttagcacctctgctaactctaacaagtacatgacaggagacctgctttccaaactctcctgtgcctccctagagcgacataggcatgccccaggatgggagcaagccacaccaggaagcccaggcctggttatcagagctgtgctca

SEQ ID NO: 85288 - DNA, 971 bp, Homo sapiens
cagctgccccatttcatagtcatgggactttcggcatgttatttaacctctctgggactcagttttcccatccataaaacagagaataaccacagtgcctgccctatagggcttaggaggtttagagatgtttgtaaagtatctggcatgtagtgagtactaaaaaaagagaaaaaaatgcaatttgggccaggcaccattattattctccatccatcttcacaataacccgtgtgtgaggcaggaggtgtacycatttgacaggtggggaaacagaggctcaaagatattaagtggccctctcaagttcactccctaagtggaagagtgggaattcaatcccagatgtgtccaattacaatgtccgtgagttttacatggtccctcgctgtctcagggcttctatgctggtgcacctcgccaaaatgtcacttgcggctgaaaccacattgtcttccagatgatcagctattgcaccagcaacgcagggcaggagccaagagcactgtgctgggggagcatccaagcccccccacgtgagcacgcccagcccaggcacttgtccctgctgtctcaggtaaaactttggaaacctcaacccctaattaccgcctggcacagggcacccggtggtttccggatggcttgtattgactcgcgcagtcttcataggacataggtctgagctaaatttaagccccgtcacagacaatttaacagttttctgtgggggggtaattgaatggtaaaccataattaccgatacaactgataccttaattcccaaaacaatctgtggaggtgtgtggaattcaaatcagtccaattagaattctatcttctcataataaaatacagcataattgctaattgccccctggctcacaatattttaaggcagaaagttggttttgttttttaatatggcttttgtttttaattttgggctgttgcacatgagtgggaaagga

SEQ ID NO: 85289 - DNA, 1171 bp, Homo sapiens
tgcataatgaactatttacaatataagrgccatgatcatggcatgtaattatagcacaatggattttttttacaacagttgataaaattaatcttttacttggtatttcaataatgcctttttaaaaattccactgtttgtttaattattaatatttttatttctctctaacatttttggtaaaactccttccccttctcatggaaatatttttaaaatttaaaaagtcagaaaggcctaggttatatcgtggctctcccactctagctgtgtgacattggacatgttaccctcactgagcttcagagcgccacatgtaaaacaggaaaagaagccctaatttgtgaatttttttgaggagaagagataatgtataaaaatcccctagcccaaggtccagtcacctagtaatggtgatgatgatgataacatcaacaacctttattgactgcttgcaacttccaggcccttgtctaagcattttacatgaataaacacatttactcaatagatagtagcgggcagaagtaattgtagtagtggtggtactcagtctgaggaccccattcccatgcccaccatttctccatcaaaaacagagcactggaaacttttaaaacatcttgtatttaaaattttgatactcacccaaatgagatgaaaatttacgttaacacaaaaacctgcatacaaatgcttatagcagctttcttcataactgcctaaacttagaagcaaccaaaatgtccttcagtaggtgaataaactgtggtgcatccataccatgaaatatcattcagtgataaaaagaaatgagctatcaagccacaaaaagatgtgaaggaacctgaaatgtatggggaccacacaggtccctgttaagtgaaagaagaaagaagccaatttgaaaaggctacatcctgtgtggttccaactatataacattatgaagaaggcaaaacaatagagacagtaaaaaaaagatcagtgtttgctaggtgttttgtagaggaaagaggggaataaataggtggagcacaaaggatttttaaggcagtgaaattcttctgtctaatataatggcagatattgtcattacatatttgtcaacacctgtagaatgtataacacagagtgagtcctaatgtaaactatggacttcagttattag

SEQ ID NO: 85290 - DNA, 1171 bp, Homo sapiens
tgcataatgaactatttacaatataagagccatgatcatggcatgtaattatagcacaatggattttttttacaacagttgataaaattaatcttttacttggtatttcaataatgcctttttaaaaattccactgtttgtttaattattaatatttttatttctctctaacatttttggtaaaactccttccccttctcatggaaatatttttaaaatttaaaaagtcagaaaggcctaggttatatcgtggctctcccactctagctgtgtgacattggacatgttaccctcactgagcttcagagcgccacatgtaaaacaggaaaagaagccctaatttgtgaatttttttgaggagaagagataatgtataaaaatcccctagcccaaggtccagtcacctagtaatggtgatgatgatgataacatcaacaacctttattgactgcttgcaacttccaggcccttgtctaagcattttacatgaataaacacatttactcaatagatagtagcgggcagaagtaattgtagtagtggtggtactcagtctgaggaccccattcccatgcccaccatttctccatcaaaaacagagcactggaaacttttaaaacatcttgtatttaaaattttgatactcacccaaatgagatgaaaatttacgttaacacaaaaacctgcayacaaatgcttatagcagctttcttcataactgcctaaacttagaagcaaccaaaatgtccttcagtaggtgaataaactgtggtgcatccataccatgaaatatcattcagtgataaaaagaaatgagctatcaagccacaaaaagatgtgaaggaacctgaaatgtatggggaccacacaggtccctgttaagtgaaagaagaaagaagccaatttgaaaaggctacatcctgtgtggttccaactatataacattatgaagaaggcaaaacaatagagacagtaaaaaaaagatcagtgtttgctaggtgttttgtagaggaaagaggggaataaataggtggagcacaaaggatttttaaggcagtgaaattcttctgtctaatataatggcagatattgtcattacatatttgtcaacacctgtagaatgtataacacagagtgagtcctaatgtaaactatggacttcagttattag

SEQ ID NO: 85291 - DNA, 1291 bp, Homo sapiens
agaaacagccacacactggcactggattggccaggactctacttaaattatacttattgaatgatagaagagtagaaaacattctccggtctcttttatttatatagtgatttgaggtgataatgttttattttgatttgagtttcaacattttaactacttaagaccaacatagccaaatatttttattgcctttgcttttgagggcagcttttttgaaaacctgtctttgatgcagggcaggtttccctctccctatgggtggggttttaacaccagtttttctacagccactctgaagggaaccaataaatctcagcaagttcgtaaggtttcacattctattagagaaagagaacaaaggaacaacagaattagagacaaatgatttgacrgagtgccacgaagaaggttcattagatactaaagacaaacctgtgaaacattcacctgaaaaatgtttgcatttttatagaaaggcctgttttggatgcagtgactgatttgtgaggggtcacaatgacaccggtgaaatggcattctttgttcactgaagctgccacccaaacaacctgaattttaatctctttcattttgaaatacattttcctgttttctatgaacagtcatcaggaggcttaattaatgaattagtgtttgtagaaatctttgatattccaagatgaaagattttgcataagagtaaagcatcagcaccagcagtaaaatgtcctcttgatgacagaatgtgtaaagtgctaggctggaatacatttgacaactgcaattaaaggggtttgatcctgttttcctgctccattttttatcatgtacattattctggaggatatgaggctaataggaaaggtaaattctcattggccagaaatcgtggatacccacacattccccagcggttaaagcaggtggaaagtttatgggcagcctctttctagggcaataaaagcttcttttatttcaaattctctttttacaccagttgttattactctgaaaagctcctggcatttggaaggcaataagcagggcataaaatccattctttcctgaacaggtcccattcctaggaccacttttaaactgactagtttacagcaaagaaacagacagccaggtctccggcaaaagctctcaggaaaagccgtggactggagacctgctaactacctcagtacagtacatgggtgatagatgagttgccaatagcatctatagcgatttccttatgctactgaaattctctggatctgaaaaattaagttgacagaat

SEQ ID NO: 85292 - DNA, 1291 bp, Homo sapiens
agaaacagccacacactggcactggattggccaggactctacttaaattatacttattgaatgatagaagagtagaaaacattctccggtctcttttatttatatagtgatttgaggtgataatgttttattttgatttgagtttcaacattttaactacttaagaccaacatagccaaatatttttattgcctttgcttttgagggcagcttttttgaaaacctgtctttgatgcagggcaggtttccctctccctatgggtggggttttaacaccagtttttctacagccactctgaagggaaccaataaatctcagcaagttcgtaaggtttcacattctattagagaaagagaacaaaggaacaacagaattagagacaaatgatttgacggagtgccacgaagaaggttcattagatactaaagacaaacctgtgaaacattcacctgaaaaatgtttgcatttttatagaaaggcctgttttggatgcagtgactgatttgtgaggggtcacaatgacaccgrtgaaatggcattctttgttcactgaagctgccacccaaacaacctgaattttaatctctttcattttgaaatacattttcctgttttctatgaacagtcatcaggaggcttaattaatgaattagtgtttgtagaaatctttgatattccaagatgaaagattttgcataagagtaaagcatcagcaccagcagtaaaatgtcctcttgatgacagaatgtgtaaagtgctaggctggaatacatttgacaactgcaattaaaggggtttgatcctgttttcctgctccattttttatcatgtacattattctggaggatatgaggctaataggaaaggtaaattctcattggccagaaatcgtggatacccacacattccccagcggttaaagcaggtggaaagtttatgggcagcctctttctagggcaataaaagcttcttttatttcaaattctctttttacaccagttgttattactctgaaaagctcctggcatttggaaggcaataagcagggcataaaatccattctttcctgaacaggtcccattcctaggaccacttttaaactgactagtttacagcaaagaaacagacagccaggtctccggcaaaagctctcaggaaaagccgtggactggagacctgctaactacctcagtacagtacatgggtgatagatgagttgccaatagcatctatagcgatttccttatgctactgaaattctctggatctgaaaaattaagttgacagaat

SEQ ID NO: 85293 - DNA, 1301 bp, Homo sapiens
ttctctcttgggttttagagagtggttctcaagataaaattcatatatgcattctctgttttcccaggtctctcttagggtttcagctggttccaatccttataatgcttgctccccgctcagtccatttcatagaaaatatctcattttttctcccctgatggtcttaggaatattctcacatgtgctcctgaatgaattatattggtttcccaaggtaatccacaaaatattcattgtcgattatctctgccaagtatgtagcatgacaatgttctcagtggacaccatacaacactctcctagaaaaccagctcctccaggggacttctgtgggctgcagccacctctcctagctctagaaatgtttctaaagggatctacaggtggagctatctaaaacttagtggtgctgctatcctggagtaaaatagataaatgtcttgttccttgctgatggacaatgtgattaattgctttctaaaatcaaaccatcaaacatgctaagytaacatgcttagcacaaacatgctaaggtgctaacagcatgaaggacccttgtaagtataatatttccctttccagctgaggggggtgagttttagaggcaattatctggtccttatttccccaagagggatcctctaattctaggaagcatcttctatacattattaagatgtatggaatgtggtttgaatgacagttatcctgctgcccagtgatgaagcaccatgcaatctgtgggtgcatgactgttcattggaagggaaccctataattatgaactttaggacacaatttggtcttatacttggtcttattatgttcaacatggagataaaaaatcaaatgtattacatttgtgaaaaaaagaaagttgaaaataataatatactctatagtagaattaataatacaaattattaataatttttggaaccaataatttcacctccagcactgattctaggaaaataatcagtgatgtgtagcaggatgtacaaatgttatttattaaataaacattgtgagtagtagttgctgtattaatttgctaggactgccataacaaagtaacacagactgataacttaaactgaaggcatctattttctcacagggctagaagtccgaaatgaaggtgtcagcaagactggtttcttctgaggctgctctcattggcttgtatctagccatcttctctttgtgtctttatatgatctttcctctatttgcttctgtgtcctaatctcttcttataaggacaccagtcgtattaaattaaagcccaccctaat

SEQ ID NO: 85294 - DNA, 2472 bp, Homo sapiens
caccgtaagttgtgataaaacaggaaaccaccactgctccaatagcaagtgtctcttgacaaccatacagccattgtgtgggcattctaatactaccgcaggaaaactcacgtcaataactctgcttgccagcagaaaatgatcaaattaaaaagcagtaggaaaatggcttctatcttccttctatctcccaaatcagatttcagtgcatttaatcatgaaaccccatttgcatcaaaaacaccttttaaaaatatgcgttatagctttccagcccctacagtacaggaagccacaataagagctcatgagaatagatgctgatttatcagttgacattgcaaagacatttggcttagttgctgctgagtccacacatcagtcactttttaagaaaatctgaggagttaagtgggaccttgaagtatcttaagaatagtaaacacagcttagcagcctgctcagggagaaacatcggaaaccaacacatttgggaggtcagtagtggtgacaagtacaaatataatttgtactttgtgtctgccaaatataattatgcctgactctacctaacctccaatggcacataattgtagctataattttaagaaatctccaacgtcatgttatacaagtatatttttattgttattcttattgatgatagcattatgcaaaatagtattttaattctgtgattctctatcttgctttcactctttctttgaactccatcttccctgatttttctcctcctcccttcttgcttagttctaatgcttattaaaatatttacttcagtgtgagtgttatgtagaagaccatctgtgaacgctagtgccaggggcataatacaaaagtaatttggggagaaataatatgaagaccctaagaatactagccttgtgatttccttctcagagagcatgaatcactcatctgcctttgctcctgatgcaattcaataagccagagtttgttattgaatgtgttccactaaacttatagaacacatttgttgaataagtggtgacagttggtgcttcctcccatcagctattttgccatataatgagcaaagctttccatattgtgtggctttctataaacattaaattttcttctgtttgtatacattgagcctgtgtgtagatgaccgtatttccctactgactctgtgttgttttggaagatgttgcattccaaatgcattgactcttcaaaacaggaagtcttatttttgaaagtgtagcattttcttyataaattaatacaatttggggtcaccattacagtttacttttgggagctgtgaagtagctatgacggaattttttttcaatatcgaactatgaactttattttaaattttctgaagattaaatggagtggttttgaaagtagaattgtactgattttttccttgtatctatttcttccattgcactggagttgaattagtttataagcaataacataatgtaaaattcatccagtgtttcagaatcctatttttacagagtctaaagccatagttgtttgattggggaagggaagtagcactatttgattctgccaagccgtaattacaccagtattccaagttcttgacatccatatttttaaaaacaatagctttattgagatgtaattcacataccatacaatttacccatttaaattaaataattttgtgacttttagtatacccacagttgtgcaaccatcatcactatttaattttggagcaatttcattatcctaaaagcaaaccccatacccattaacagtcacttccactatctttctccccaactcctggaaaccactaatctactttcagtctgtatagatttgcctattctgaacatttcatgtaaatataattatataataagtgaacttttgtgtctgtcttctttcatttagcagaatgttcacaaagttcatccagttgtagcatgtattagtagtttattctttttattgctgaataatattcctttacatagatataccatattttgtctagccatttatcatttgggttgtttccattttttagccattataaataacaccaccataaacattcgtgtgagtcaaagaggatggtagagggattttgttgttattatcaagagtcatcttttgtgcccaaatgaagtattattattattttttgtttcctactcactccttacctgtaaactttctttcctcccttcctttttaagtttctaccttctcttccttcactaaatatttttgagcctctactcagttcccagaactatgctagagactaaagatacagaggtggacaaggcacagatccaatccctgctcttatgaagttttcattctagtaagtgttaaactaaataaatatacatttcccatatggtaggcgctatgggaatatatttaggagtatttggaggctccatggaagcatagatggggatggca

SEQ ID NO: 85295 - DNA, 2325 bp, Homo sapiens
aaaaaatatatggaggtttactcaccaaataaaattgcagtaaatttttttcattgtaatataggctgcaggagtggagacagtgtggctttttcttacactgatatacctctagcacctaaaatagttctcagcatatatgggatctcaatatgtatttgttaagtaaaggaattagaactactttatgtgaaatccaaatgcaatatctcaattcataatataatttcttcatcatctaatttgccccttaaattacccccactagtaattttctcaatctcaataaaatatccaggcttttcaactattctaatattttttcttcaggtttctatcttccctgctcagctaaatatatacttaagacttatcatctaacctttcttttgccaatatatccatgtaagttgtttcattgcttttctgtcctaccactttgtgaaaagccactccaccccatgaatttaaaggtctcttatttcttatgtacattatagaatgaatctaccatatgctgagggctgccttagaaatatcatacagaacctcaaatgcctttacacgtggtcttcaacagcaactgtcccctcaaaccactcaagaatcctatttcatatgttcaggcagctctctcttgttctaaacagcaactcttttaaattttatccactaccatcaaacttctgactttctcacctgcctcctctctctgctgatgaactctccttttcacagccctgagaaaaatggaggccaagggaaagtacctttctcaacttttgctgcaaaacatactttctttatccacattagaccaaaatatgctcagatctttttcactttaggaaacatactcctgtaatcttatattcttctccattaccatattacattcttttccttcataacaacttatttttacttctcagcccattcaatgcacaacctattattttctggttttcacttccatcaaatctataaaagtgttcgtgctaaattatcaatgcccttcatgttgccatgcataactgtcatgttgaagtgttagtatgatttcactctatacagcactttcttcttaaaccattctattgcctgctatcctgtactccaaacacttatgtttcagacacactgaaatgtgtttctctctactgtcccataaatgtttacatggctcaaaactctgttgcataaactgtttttaatcagtctatatgttcatgctaggttttctcatattattctattcattaaattgtaatcktagaatccctactttttaaatctatcttcttgtccacttttctatacatccaactgtctgttgggcatctcttcttgtgtgtgctttcaacacttcaagttcaaaatttctaaaacagattttgttttcttctcacttaagctcatcctccatcctgtgttccctgttccagtgatctttggttactgaaaaatttttcagacgtgcttaattaaccactgttaggaactctgaaaggccttggaatttaccctatttttaacctaacaaactggtctgttactacttgatggatataggtagaggattggtggcttctgagtcagagacaaaagaagttattatttaagacaaaagtatttggagcttctacaccagttcaccatgaccctcaaattccatgggggcaatgcagatcaacccagagagatacagcccactcagtgtgttgcattaaaacagacaaaactgagtttgaggaacttactgcttttacagtgagtatttagtagtcctgctgtttatttcatccctaaagcttactttctgcaaccataatcctcagagtccaaggtagaatgcttctcccaacaaccactattcacatccaatcaataaccaactctagttgacttcaactcttaaatagcttttaaaataatccattggtcttgatcttcactgtcattatcctaattcaggccactacacattttctctcattagtattactaaaacagcctttactcattgtggccctgccctacctcacccatcaaatcctcaatgaatctcaaatctagaaccaaacaatccttatacaaattaattccaatcattttgtttttatatttattaatcttcttgctctcaggaaaaactgacaactccttaaactaatttaaattaatgccttttatgatcacccctgcctgcatttcatgacaggcatttaaattaatgccttttatacctttcatgatcacctctgcctgcatttctagattaatttatatcactgctccttctttatcattcccttttccatttac

SEQ ID NO: 85296 - DNA, 804 bp, Homo sapiens
tggcctccaggaattggtgagaacgaagagctatcgtgagaagccacccagtctgtggcattctgtgatggcagtcacgggacaccgacccagatgatctgaatttccagccccactggccaggctgactgtcctgggggctgcacctgacaccctgtgctctgggggccactgacaccctgaggaccaggccctgctggctcctctccttggattatttccatctggggagcagcggcagggccctcccttcccgctccagcgctggaactacatctggaagctcttctcacccttaattgttcttaatgctttaacacacggagtgactaatgggctctaattgggagcggtgtcctggggaactcgcccacagcgccctctgcgacccgcccagtctcctccgctgctcactcacagagctctaaagtcaccaaggaaaaatattggcccgtttttctatttttttaaaaaatgtcacaccagtgccaaaaagcagttttatccttcagccaacaagtatagggcaaagaaaaggatagaggcaaagccaaaagcagatgggacaaaatatcacaaatgccactgaggtctgtgacatctgtctagagacaaagagttcttggaggcaaaccccacgccagtcagttcagggcgtgtgaaggattccagccacaygtttccccttgaaggggaaaggaaagaggggataaggcatctctgatgtcttctcatctcctctccgacccctgtgaggggtaagtggtgactgccaagtcaccagaactgcagagaaggaaccag

SEQ ID NO: 85297 - DNA, 592 bp, Homo sapiens
cggccatctgtctgttgtggggagctgggccagaggctgcgctgggtgacctccacactcccagccccctcttagattctaaatattgtcagatgtcccaagaggagtgctccagtggccccctaccttcctgcagcactgccccgggccacagagcctctcaggccatgaccggggagctggaccccagatggcgaggaaagagccaaggaagccaattgccgcggccaggcctggggactggagtgctgagcgggccagmcccttcaccctgttctgtttgtcagaggttggaagctggggccaaggtgggctcagtgagtctggatgggagacaggaccaaagcaccgaggagaaacgaatcaggatgggggccgcagaggagcggcggccgcttccggcagaacatggaatcctgacgcagcccagctgggaagctggaacccttctccagtgcccccacgatccagaggatgggaagttctagagacaaagcctctaacccagtcaccacaggaggcctgcgcagatgtggcctaggatgggtactctgggttgttgcgggctggcaagcatctgcctgagaaatcg

SEQ ID NO: 85298 - DNA, 1932 bp, Homo sapiens
  misc_feature (1)...(1932): n = A,T,C or G
tgttggccacgtactatttgcggggcactgtcttaggagcttggtactcattgatggatagagatagaaatacctaccctcatagaacttgtgttctagagagagaggcagacactgaacacatccataaattgtacagtttgttagcaggttaattttctagggctaccagaacaaattaccaaaatctaggtggcttagaacaacagaaatgtaatctctcacaattctggaggccagaagtgagaaatcaaggtgcccgttggcaggactggttccttctggaggctttgaggaagaacttcccttgccccttgcaccttctgggggttgctggccacccatggcgttcctcagcctgtgtctgcatccctccagcctctacctctgtgtcacatggccttctcctctgtgtctctgtccaaatccccatctttttcttataaacatgccagtcattggattggaggcccatcctaaatccaggacaatttcgtttcaagagctttgacaaatgacatctgtgcagaccctgtttccgaataaggtcatttctgaggttctgggtatatctgagttctgggcgtccactgttcaacccactgcagtaagtgatgctcaccatggggaaatgggcagtgtgccgagaccctgtgctcagcagggctggggacacttcacaaggcatagaaaggataagatgtagtctataattgttaaaatggtatagttccacctacaaatgctgttggagttcaaannnnnnnnnnnnnnnnnnnnnnnnnnnnnnnnnnnnnnnnnnnnnnnnnnnnnnnnnnnnnnnnnnnnnnnnnnnnnnnnnnnnnnnnnnnnnnnnnnnngtgggctctgcccatactttcttggtgccttcaatgggacagtgttcatcaggagcatccacaaggcaaaatcactggctgagctcccaagcgtattcggcctcacagctcccctggtttgtgggaaatcttgtaggatcagtgttgcaaggagcaggcacagcccgggaaggccccctgcagtcgcccctcagagacaggggtgcttcccgccagcccaactgtgtagggacctttctaccaacagggtcaaaggacatctcccaggaccttagagcctcagcccctccattccctagagcagggtccctgaggtggtgctgggtgatgtggaatggagcctccctggccgcactgcttccccggacagattgggatccagattctgagtgggcctgtctgggcaggggccccccgtccgcatctcttaccagctaaaggggaggcacagctactgctccgagcaccatacctggagaactgaggatgtagagagcttcgggattggcgggaactgagggtctgcaggtcatcagagccaggtccctgcttctgcagataaataaactaagaaaagggactccggggctgggtgtggtggctcacacctgtaatcctagcaatttgggaggccgaggcgggtggatcacctgaggtcaggagttcgagaccagcctgaccaacatgatgaaaccccatctctactaaaaatacaaaattacccgggcatggtggtgcatgcctgtaatcccagctacttgggaggctgaggcaggagaatcccttgaacctgggaggtgtaggttccagtgagctaagatcacaccactgcactccagcctgggcaacaagagtgaaattctgtctcaaagcaaaaaaacaaacaaacaaacaaaaaacacacaccccaaagtaaatagagccgtgctgtcccctccaaaatttggaaatgaggtggggtgtggacaagtaagtcaagctgtgggctagggmagttctggggttcacaccgaggcttcatcagttcacttttggactccagttccctcaccggtaaaacgaggatgatagg

SEQ ID NO: 85299 - DNA, 566 bp, Homo sapiens
ctccgtgtcctgcagccccacaaccaagggacatggggccccactatggttgtrggggtccactgggaggggaagagaagccggttcccaggagctgattgtcttctgcccggctctcctacacaggctctaaagccacagctcctccacaccagccaccatctgaaggagggtgtttgcctgatggaatccagaggggtgcagagctcacaggggctcctggaccaggacggggatgcaaaacccttcctcccgacttagactccagcggagcttgtgcacacccaccttccagactccagtcaaggaaatgggaaggtgggtgggcggggtggcagggtgctccaggtggcagggtgctccaggtggcagggtgctccaggtggcagggtgctcacctcgagctcctgagcaccgtcccctgagagagttcctgtgaccaaagacatcacctgcttaggcagagggagcagccaccccaatcagggcttgcccacatgcaaccgttcagtcgcgtaagcgtttgtgacattggcatgtaccccaatcaaaacctggcatagcag

SEQ ID NO: 85300 - DNA, 690 bp, Homo sapiens
taaaagccggtgggcctggatgggactcattccttggcgtcctgttacagcaacaggaatgaccagcgctcctaaaggccccccacctggccctgagacctccatctctgcccacggtctggctgcrtctcctggaaggttttgttttttaatgctcctgtcctggggctcttcctctctctaggcctagcacacacttccagcctgggcatcagggaaataactcaaaaccataacacgctttaaaaaatacactagccagcaactgcaacaacatttgctttgcacaaacatttcaagagaattccccagatagtcttgctgtgggggaattctagccaccaggagaaagctgcccaggccctggcggggcttggcttcccagcggtccctggccaccttgaggacaggaggcaaacagggacagacagcagcagaggggtttgaggccacaacagcatacagaatttcctggcaggatgtgtcattagagctctcctagagacggcccttaccccaccctttccttgacagcctaggacacagtgatgcccacctctgagcctcccatgcgttatcttaggtgttcacgagattgtcacgtgaatgccgaaagcctgcctgcctcccacggagctgggagctcttgaggacaatgtctgccacgtagcagggcatggaaatcttcct

SEQ ID NO: 85301 - DNA, 690 bp, Homo sapiens
taaaagccggtgggcctggatgggactcattccttggcgtcctgttacagcaacaggaatgaccagcgctcctaaaggccccccacctggccctgagacctccatctctgcccacggtctggctgcatctcctggaaggttttgttttttaatgctcctgtcctggggctcttcctctctctaggcctagcacacacttccagcctgggcatcagggaaataactcaaaaccataacacgctttaaaaaatacactagccagcaactgcaacaacatttgctttgcacaaacatttcaagagaattccccagatagtcttgctgtgggggaattctagccaccaggagaaagctgcccaggccctggcggggcttggcttcccagcggtccctggccaccttgaggacaggaggcraacagggacagacagcagcagaggggtttgaggccacaacagcatacagaatttcctggcaggatgtgtcattagagctctcctagagacggcccttaccccaccctttccttgacagcctaggacacagtgatgcccacctctgagcctcccatgcgttatcttaggtgttcacgagattgtcacgtgaatgccgaaagcctgcctgcctcccacggagctgggagctcttgaggacaatgtctgccacgtagcagggcatggaaatcttcct

SEQ ID NO: 85302 - DNA, 820 bp, Homo sapiens
agtcttttattcagccaaagtcagccaatggagcccaagcaatacgtttgggaaaaaaagcaatcatcaatgtaatgataaggaaagtgtctcatacgtagtactaggagacctgcctcggtgagtttctaccagcagtggcaggaaggccagaagccaccggtgtccacacaaagcctggctctttcctcatcagttctctggcagtgaggagagggcaggagtaaacacgaagctctagaacaatgtcctcttcccagccccccagctggctgcctgggtaaggtgccaggtagggatggacattacatacacaaggctggtggtactgaggggccatctctgaaggtgtgcaccttacagcaacacagatgggcasggccaaagctgctcccctcccctctggagccaatggccaccccagcagggactaagccaaagcttagagtctgcccaagacctccccaggttaagagaggctactgcaggactccaggagcttccccactccctctgacagcaacaaggccctggccttggaccagacccctagaagagcagatgttaggcagatgtgcaggaggctccagaaggttatggtgggaacagctgtgggtgctgaggagcagacaaaagcagacaggagaggagcagaatggagatttacctctttggcaagaggctcttctgaccaccgcttgccctgccttttggctgagaacacagactgaggcctggcagagagaaggccttgctatgtaagcccaggttgactcagggccagttttggccttcagtatgctctccctcagggatcccg

SEQ ID NO: 85303 - DNA, 566 bp, Homo sapiens
caatggaatatgatcagaagtcacaagtgccacttctagccaaagaagattaaaagcatatgtgctttctgcattgcctcccttttccactggatgattgcagaggtgaaggcagacttagaagatagctcactcacctgatggaaatctccgtttcagagtgtctgaatggagaggaacttccttctggttctaggtggactgggataggagtggaaaaaaaagtagacttcttataaaattaagcatctgaaatttggagatgctacaacatttaaactagcctgattaataaataattaaatgggaagaaattctggaaaaagagctctgcagcaggctcataaagcactaaatccaaatttgaatgtaattcagggcaccctaatggtttaatctctaagaaggaagaagactattaaatatttaataatagaattgaaaagtcaggaaatcctatgggcttggtagaaaaagtrtgtgtttcttttgtcagcaagtgaaaaacagcaatcagaatcaacaagaaaaattaaaggatgtataagaacatcattgttcaagta

SEQ ID NO: 85304 - DNA, 2253 bp, Homo sapiens
catgggcaatgccaaagaaaaatacatgttaataagccaatatttctataggtccgtattctacattttgcacaatggattcctctggagatgagggcccaaagcaggaaagcttttctgaaaaagttcaagggaagaaaaggtttctctaggacacaactcctgccttttttaaatctgccaaacagcagtggccttaccctctttccaaagtgctagagattatttaggtaaactcagttattggcagtaatgagggtttcaattcaaaaccctcttttgggtaaagtgattcagagtgagaagtgttatgtttgatttttttctcactgtgaaatccagattttgcaaggctataatgttccattttcaggaaggctggcagggccaacgtttaagtctggttcaaccatgcttaatgctatatcctgtcattttaaagccccctcccatttctttctttactcacctttcttcccttacactttgccatttaagataaactgaaagataattatgaccctggtttttagagtctcttaattctgttgttttagacacatccgaaggcactgaagcatttttattttattttaacttgtgcttaccaaacctgtatcatgcactccattgggcagtgggctcctttgggctctttccagaaaattaaaaccataaattaaatataaatggtcaaagccacagaacaagcaaggccttcttagtgtccacagagaggagttctattaccaccactcgctttggagaagagggaggttacctgtaattcttgttctcttgaaggtgtatattttataataggtctccattcaccaccctgccttccccaaggagttcttagctgcttgattttcttggctagagaagaactggcagttaggggttagcaaattcttaggacccctggggtagatacattgcagttctagcaagagttcatastctcttaaactgtgtttctggattttaattttgcctcaagctgtatgttaagagaagctctctctgatgagaataactctgcacttagggagaaatgcttccctcaagataccatgtctttattaacagaaattttcccctcaccttgtttatttacatttatttatttatttatttattttgagacagagtcttgctctctctcccaggttagaatgcagtggcacaatctttgctcactacaacctccacctcctgggttcaagcaattctcctccctctgcctccctggtagctgggattacaggcatgcatcatcatgcccagctaatttttgtaattttagtagagatgaggttttgccatgttggccaggctagtctcgaactcctgacctcaggtgatctgcctgcttcagcctcccaaagtgctaggattacaggcatgagccagcgcgcccagccatcctatccttttaaaataatagcaataagacatgaaggaaactcaaacattttttaagaccccaggattccccaaacttctattcccttgagcccaaaccatgcagattaatatacatggggacacatttcagtctctctcccttaccaaaattaacaaccttttgaagcaaaagtgtcaactcattttggctcacctggcatctcctattgatggatagtggctgcctgcttaggagagtggaggccagatgcagactcagcaggaagcagtgtggtgattgattaatgatgtctgctgcagtggaggacaagggagtggcagcatttgtgctgtgtatttgccattcctggtaaggactgtgtgttattcatctctgtgtccctgtgcctagcatggtgcctggcacagagcgggtgctccataaatatttgttgaactgaattgaactaaactttccaaccaactccctctttataaacaccgcaatggttttctctgagtcagaaggtatggtggtagttcatctcttggtagaaagcagtgatagtaagaaattctccaagggttgaattgttatggggacagtaggttcaattacctcagaaactgttcagttactctgccatggacccaatgtctattaaacgagcctttcattaccatcagctctttgctgttgtcctactacctccccccaaataactaaatcatgtctccatgtgcctagctgctggctgacgtcctgctgtgacacatctctcagtgccctaacacagatctgcctcacaacattaaccactgacaaccatgtatcttttgctt

SEQ ID NO: 85305 - DNA, 2253 bp, Homo sapiens
catgggcaatgccaaagaaaaatacatgttaataagccaatatttctataggtccgtattctacattttgcacaatggattcctctggagatgagggcccaaagcaggaaagcttttctgaaaaagttcaagggaagaaaaggtttctctaggacacaactcctgccttttttaaatctgccaaacagcagtggccttaccctctttccaaagtgctagagattatttaggtaaactcagttattggcagtaatgagggtttcaattcaaaaccctcttttgggtaaagtgattcagagtgagaagtgttatgtttgatttttttctcactgtgaaatccagattttgcaaggctataatgttccattttcaggaaggctggcagggccaacgtttaagtctggttcaaccatgcttaatgctatatcctgtcattttaaagccccctcccatttctttctttactcacctttcttcccttacactttgccatttaagataaactgaaagataattatgaccctggtttttagagtctcttaattctgttgttttagacacatccgaaggcactgaagcatttttattttattttaacttgtgcttaccaaacctgtatcatgcactccattgggcagtgggctcctttgggctctttccagaaaattaaaaccataaattaaatataaatggtcaaagccacagaacaagcaaggccttcttagtgtccacagagaggagttctattaccaccactcgctttggagaagagggaggttacctgtaattcttgttctcttgaaggtgtatattttataataggtctccattcaccaccctgccttccccaaggagttcttagctgcttgattttcttggctagagaagaactggcagttaggggttagcaaattcttaggacccctggggtagatacattgcagttctagcaagagttcatactctcttaaactgtgtttctggattttaattttgcctcaagctgtatgttaagagaagctctctctgatgagaataactctgcacttagggagaaatgcttccctcaagataccatgtctttattaacagaaattttcccctcaccttgtttatttacatttatttatttatttatttattttgagacagagtcttgctctctctcccaggttagaatgcagtggcacaatctttgctcactacaacctccacctcctgggttcaagcaattctcctccctctgcctccctggtagctgggattacaggcatgcatcatcatgcccagctaatttttgtaattttagtagagatgaggttttgccatgttggccaggctagtctcgaactcctgacctcaggtgatctgcctgcttcagcctcccaaagtgctaggattacaggcatgagccagcgcgcccagccatcctatccttttaaaataatagcaataagacatgaaggaaactcaaacattttttaagaccccaggattccccaaacttctattcccttgagcccaaaccatgcagattaatatacatggggacacatttcagtctctctcccttaccaaaattaacaaccttttgaagcaaaagtgtcaactcattttggctcacctggcatctcctattgatggatagtggctgcctgcttaggagagtggaggccagatgcagactcagcaggaagcagtgtggtgattgattaatgatgtctgctgcagtggaggacaagggagtggcagcatttgtgctgtgtatttgccattcctggtaaggactgtgtgttattcatctctgtgtccctgtgcctagcatggtgcctggcacagagcgggtgctccataaatatttgttgaactgaattgaactaaactttccaaccaactccctctttataaacaccgcaatggttttctctgagtcagaaggtatggtggtagttcatctcttggtagaaagcagtgatagtaagaaattctccaagggttgaattgttatggggacagtaggttcaattacctcagaaactgttcagttactctgccatggacccaatgtctattaaacgagcctttcattaccatcagctctttgctgttgtcctactacctccccccaaataactaaatcatgtctccatgtgcctarctgctggctgacgtcctgctgtgacacatctctcagtgccctaacacagatctgcctcacaacattaaccactgacaaccatgtatcttttgctt

SEQ ID NO: 85306 - DNA, 620 bp, Homo sapiens
agctcctcacattttcttagataatatcttagcagagatgtggaagggattttgtgaaagagcatttgtattttaattcatagaatatttgcaccactattatactgatcctcaacatgcagcctccacctcacgtcttaagatagttgcttggactccaggccaccctgtccacattccaaccatcagaaaggaagaagagtgtgtagggcagctgttctctgtgtcaccacaaccacctgccacttacaaaattttccctaaaacttggccatgtgaccacaactaacttcaagggaggctgggtcttatttcaggcatgtgcccagctaaaaatcacaagtcatataataaagaataatgaaaaaaaaaaaaacgggttttgagagacaaccaacaagctctgctacaatctcaagcaagttgcatgaccttgctsagcctgtttcttcatctgtgaatacatgaattttaaccccacagcctcgactggggctgaggctggcctgactgatcatcagctttgggacagatggtgcctgaatcagggactttattcttttaatatgtgagcttctgagacacaaagtacagattcaactagaacccgggcaggagag

SEQ ID NO: 85307 - DNA, 637 bp, Homo sapiens
tgatctcctgacctcgtgatccgcccgccttggcctcccaaaatgctgggattataggcgtgagtcaccgcatccggcctgaaaattcacttttaacatttaytggattcaagccaataaaatgtaaaattcaatgtttcattctcaatttcccacaactactttatttttctagctaagaatcatcaaatgaggccctcccccactttttgagacacagtctcgctgttgcccaggctggagtgcagtggcgcaatctcggctcactgcaacctccgcctcctaggttcacgcccttctcctgcctcagccttgcgagtagctgggactactacaggcgcctgccaccatgcctggctaattttttgtactttcagtagagacggggtttcactgtgttagccaggatggtctcgatctcctgatctcgtgatccgcttgcctcggcctcccaaagtgctgggattacaagcctgagccactgtgcccggccaaattaggccttcttgactttcatcatgacagttagctaactttctacttgaaatcatttccttattgttcaagttctgccaatgcagtcactctcatgacagcccaaacactagctgcctcaaccccaccacatcccagcacc

SEQ ID NO: 85308 - DNA, 637 bp, Homo sapiens
tgatctcctgacctcgtgatccgcccgccttggcctcccaaaatgctgggattataggcgtgagtcaccgcatccggcctgaaaattcacttttaacatttattggattcaagccaataaaatgtaaaattcaatgtttcattctcaatttcccacaactactttatttttctagctaagaatcatcaaatgaggccctcccccactttttgagacacagtctcgctgttgcccaggctggagtgcagtggcgcaatctcggctcactgcaacctccgcctcctaggttcacgcccttctcctgcctcagccttgcgagtagctgggactactacaggcgcctgccaccatgccyggctaattttttgtactttcagtagagacggggtttcactgtgttagccaggatggtctcgatctcctgatctcgtgatccgcttgcctcggcctcccaaagtgctgggattacaagcctgagccactgtgcccggccaaattaggccttcttgactttcatcatgacagttagctaactttctacttgaaatcatttccttattgttcaagttctgccaatgcagtcactctcatgacagcccaaacactagctgcctcaaccccaccacatcccagcacc

SEQ ID NO: 85309 - DNA, 1187 bp, Homo sapiens
agccacaattgagagctactgtgcaacacagttgtgagccaacagtgaaaactacaaggccaattacaagcttcagggacaatctacatatctatctctctttatttattttggaacaaggtgcctgtggtcccagatactcaggaggctcaggtgggaggatcgtttgagcctgggagtttgaggctgcagtgagctgtgattgcaccactgcactccagcctgggcaacagagtgagaccctgtctcaaaaaaaaaaaaaaaaagttgaaaattcccttttaggtccacatccacttacctttaaaaaattgagggataatgggccaggtacggtgtctcacacctgtaatcttagcactttgggagaccacagcaggcaggtcacttgaggccagaagtttgagaccagcctggccacatggtgaaaccccatctctacttaaaaaaaagtagctggatgtggtgatgcacgcctgtaatcccagctattcgggagtctgagacaagagaattgcttgaatctgggaggcagaggctgcagtgagctgaggttgctctattgcactccagcctgggcaacagagcaagactcagaaaaaaaaggaaagaaaagaaaaactgagggataatgtaaatagagaaaagtgtacaagtgcacaccttgacaaatttgcgtatgtgtacaactgcaaaatcaccattcagatcaagatataaaccatttccagcctgggcaaatggtgaaaccttgtctctactgaaaatacaaaaattagctgggcatggtggtgcgagcctgtaatcccaactactccggaagctgaggaaggagaatcacttgtacctgggaggcggaggttgcattacctgagattgcaccactgccctctagcctgggtgacagagcaagaccctgactcaaaaaatactaatattaagcccccttcggaggtaaacgctcttgtgtcttctctggcctcttcttagacttcatawaaacagaatgcagcatgtgctcttttgtgtctgctttctcgcatgcagccctacgcctgtgagagtgattcatgctgttgcattcagcagcgggttgttgctgtttttgctgagtagtcttccattgtatgaaatttatttattcattcttctgttgttgagcgtttgggttatttgccgtttggggc

SEQ ID NO: 85310 - DNA, 864 bp, Homo sapiens
tattctagaagtccctgacagcctagaaataagctgtttgtcttctataaagcattgctatagtgatgaatagtatgagtaactgatacatactcaactgctactgttccctttgaggaaatgtttacaggggcggccttttaacatatctcaggctcattttcattgcaattatccatttctaaaacaagattgcttcgatctagacttggaaatggaaaataagaaaaccaatgctttttcaaatgttcacaattcacacactacatttgttttgttatgcatgacgtgtctataacaaatatacacatacgacaggcaacaagcttgtttttgatttgccagacatgcatcattggctattgtttgtttgttttttgttttttttgtgttttttgggttactttgaaaatgagccagagccttcttgaggatattttgcacaaagtcacgctgacaaaatcattagcagtgcaacccaagcttctggctgagcaagattcagtttccactttttaaaatttttttattttgctctgtagctgcacttctcgttatcataaattgagatgaaaaggaaaaaacatcaagttttagtacctttttatgaattggcctatcttacaagagaagggcacaaacaccaacctgacttaggaacgcctaaattcagagaagtcaaagccggtgaaggccacttgctctttccaacacaagcctgccacagaggtcttcgggacagtactggagatgcaggttgacacrggcttgagttccaaggtgaaaaaactggggaggctgtgaaggaagagctgcattaaggagggtgaggagcgtgtggttctgtatcatggcagccccaat

SEQ ID NO: 85311 - DNA, 527 bp, Homo sapiens
ggtggtacagaatagtgtgtataatatttttatgcaaatcacaaaaaatagtacatgtaaataaactggcatacataaatggtgttttctagaaagatataccagggagagtttgacaaagaaaaaaactcttcttattttaaacttaaaaagatatttttgatgagaattgctggcaasatggtcaaataggaatagctctggtctgcagctcccagcaagattgacgcagaaggtgggcatttccaactgaggtacctggttcatcttactggaaccagttggacagtgggtgcagtgcatggagggcgagttgaagcagggtggggcgtcgactcacctgggaagcgcaaggggtcggggaattttctcccctacccaagagaagccgtgagggactgagcctgaggacctccagcacagatactgagcttgtcccatggtctttgcaacctgcaaaccaggagattccctccactgcctaccccaccaaggccctgggtttcaagcacaaaactgggtggcca

SEQ ID NO: 85312 - DNA, 527 bp, Homo sapiens
ggtggtacagaatagtgtgtataatatttttatgcaaatcacaaaaaatagtacatgtaaataaactggcatacataaatggtgttttctagaaagatataccagggagagtttgacaaagaaaaaaactcttcttattttaaacttaaaaagatatttttgatgagaattgctggcaacatggtcaaataggaatagctctggtctgcagctcccagcaagattgacgcagaaggtgggcatttccaactgaggtacctggttcatcttactggaaccagttggacagtgggtgcagtgcatggagggcgagttgaagcagggtggggcgtcgactcacctgggaagcgcaaggggtmggggaattttctcccctacccaagagaagccgtgagggactgagcctgaggacctccagcacagatactgagcttgtcccatggtctttgcaacctgcaaaccaggagattccctccactgcctaccccaccaaggccctgggtttcaagcacaaaactgggtggcca

SEQ ID NO: 85313 - DNA, 608 bp, Homo sapiens
ttcatgtctttagcagggacatggatgaagctggaaaccatcattctcagcaaagtatcacaacgacagaaaaccaaacaccgcatgtcctcactcataagtgggagttgaacaatgagaacacatggacacagaaagaggaacatcacacaccggggcttgtctgggggtrgggggctaggggagtgataacattaggaaaaatacccaatgtaggtgttgggttgaagggtgcaggaaaccaccatggcacatgtatacctatgaaacaaaactgcacgttctgcacatgtaccccagaacttaaagtataattttaaaaaaatttataaaagaaaaaaatacatatttttacagaggtcatactaatctctgtgtcattccaattttagtatacatgctgctgaaccaagtgctattttatactcttttgtaagctttttttactatatatgtatattttattgatttattcttttaactatttcataccttgctaaatatgcatatattttaatttttgtcagcatatttcggggtgggcttctgaatcttttgaaatgcttttgtattccaaagttaactttttttttttttttttgctatca

SEQ ID NO: 85314 - DNA, 608 bp, Homo sapiens
ttcatgtctttagcagggacatggatgaagctggaaaccatcattctcagcaaagtatcacaacgacagaaaaccaaacaccgcatgtcctcactcataagtgggagttgaacaatgagaacacatggacacagaaagaggaacatcacacaccggggcttgtctgggggtagggggctaggggagtgataacattaggaaaaatacccaatgtaggtgttgggttgaakggtgcaggaaaccaccatggcacatgtatacctatgaaacaaaactgcacgttctgcacatgtaccccagaacttaaagtataattttaaaaaaatttataaaagaaaaaaatacatatttttacagaggtcatactaatctctgtgtcattccaattttagtatacatgctgctgaaccaagtgctattttatactcttttgtaagctttttttactatatatgtatattttattgatttattcttttaactatttcataccttgctaaatatgcatatattttaatttttgtcagcatatttcggggtgggcttctgaatcttttgaaatgcttttgtattccaaagttaactttttttttttttttttgctatca

SEQ ID NO: 85315 - DNA, 608 bp, Homo sapiens
ttcatgtctttagcagggacatggatgaagctggaaaccatcattctcagcaaagtatcacaacgacagaaaaccaaacaccgcatgtcctcactcataagtgggagttgaacaatgagaacacatggacacagaaagaggaacatcacacaccggggcttgtctgggggtagggggctaggggagtgataacattaggaaaaatacccaatgtaggtgttgggttgaagggtgcaggaaaccaccatggcacatgtatacctatgaaacaaaactgcacgttctgcacatgtaccccagaacttaaagtataatttwaaaaaaatttataaaagaaaaaaatacatatttttacagaggtcatactaatctctgtgtcattccaattttagtatacatgctgctgaaccaagtgctattttatactcttttgtaagctttttttactatatatgtatattttattgatttattcttttaactatttcataccttgctaaatatgcatatattttaatttttgtcagcatatttcggggtgggcttctgaatcttttgaaatgcttttgtattccaaagttaactttttttttttttttttgctatca

SEQ ID NO: 85316 - DNA, 608 bp, Homo sapiens
ttcatgtctttagcagggacatggatgaagctggaaaccatcattctcagcaaagtatcacaacgacagaaaaccaaacaccgcatgtcctcactcataagtgggagttgaacaatgagaacacatggacacagaaagaggaacatcacacaccggggcttgtctgggggtagggggctaggggagtgataacattaggaaaaatacccaatgtaggtgttgggttgaagggtgcaggaaaccaccatggcacatgtatacctatgaaacaaaactgcacgttctgcacatgtaccccagaacttaaagtataattttaaaaaaatttataaaagaaaaaaatacatatttttacagaggtcatactaatctctgtgtcattccaattttagtatacatgctgctgaaccaagtgctattttatactcttttgtaagctttttttactatatatgtatattttrttgatttattcttttaactatttcataccttgctaaatatgcatatattttaatttttgtcagcatatttcggggtgggcttctgaatcttttgaaatgcttttgtattccaaagttaactttttttttttttttttgctatca

SEQ ID NO: 85317 - DNA, 608 bp, Homo sapiens
ttcatgtctttagcagggacatggatgaagctggaaaccatcattctcagcaaagtatcacaacgacagaaaaccaaacaccgcatgtcctcactcataagtgggagttgaacaatgagaacacatggacacagaaagaggaacatcacacaccggggcttgtctgggggtagggggctaggggagtgataacattaggaaaaatacccaatgtaggtgttgggttgaagggtgcaggaaaccaccatggcacatgtatacctatgaaacaaaactgcacgttctgcacatgtaccccagaacttaaagtataattttaaaaaaatttataaaagaaaaaaatacatatttttacagaggtcatactaatctctgtgtcattccaattttagtatacatgctgctgaaccaagtgctattttatactcttttgtaagctttttttactatatatgtatattttattgatttattcttttaactatttcataccttgctaaatatgcatatattttaatttttgtcagcatatttcggggtgggcttctgaatcttttgaaatscttttgtattccaaagttaactttttttttttttttttgctatca

SEQ ID NO: 85318 - DNA, 721 bp, Homo sapiens
taagcaagacaagtgacactgatctcaaaactttgtactcatcctgctgacaattttgcatttgtctcttagaaatgccttttctttttctgggatattgcatcttttcccggcccctcagggctgcccagtcagttcctggggccagcatcagaagcccccatctccgggacttgcaaacggccccgagttcagatctgaggaaagaacatgaaagatgtcctttggcccatcgggagcagaggcttggcagcgggatgacagcagcaaagaggcttcctctgattcattgaagccatcagctgtctctccaaatgtttcttcccctctaagccttgttttggttaatttaagaacagctgccctcaatgggaaccaatttttgacagtaggtagaagcagcttcccaggaaagctgctggcgtgggaatggaggattagctagggatttagaggtggggacctcttggggtgtgctacttaattgctttcctcccttagtgaggagaccccattatggaggatgagtaaataaacttggttattcccagggagagttaaaagcgkcttgagaacctggaactatggtggaaggaaacttgcgatggactagataagtggtcagcaaagccattttctttgatacctggacagggctggcctgtgtttcccagctcccttgaagttaggtgggcccctgagcctgagcaccagcagggag

SEQ ID NO: 85319 - DNA, 789 bp, Homo sapiens
ggttggaatgggcctggagaggaggtggcaggaagggagtcagcagcggcggccagggcttctgcttcagtggcaaccagtgccccatgcactttgccagggacaagaaccaggacagaaggagcagtggacagagcccggagggaagctggtcccctcttcctccgggcaagggatgtgcaggggctgcatcagccytccccactccatggctccagatgccccttcctccctccacatcccacatcctctcctctgtggggaaagcagccctgcctagaggcagccttctccacttctctctccaagccttgatttctcctgcactctgtagactcgagtctctgtttcacccccaattcttttactgagatggttccagaaggcaaattcctccacagcattaaaaaataatttatagaaataatgttcctttaataaaagccacatagagttatacaatttttatagtgcacgaccgaacaagaaaggtctgaactcttgtataaaaatgaatctgtcccgctcccatgctcagaatgataccacctccttgggctaacataatatattggcttggaaagtttaactttcagtgtcattgggccgagctggccactcattctgctccaaagagctcctccaaagacaaactcttccagtgtggctcataaatatgagggcaggaaaaacaaacttgcttctgcttctctctctctctctctctctctctctgtctatatatatatatatatatatatatatatatatatatatatgtataatata

SEQ ID NO: 85320 - DNA, 789 bp, Homo sapiens
ggttggaatgggcctggagaggaggtggcaggaagggagtcagcagcggcggccagggcttctgcttcagtggcaaccagtgccccatgcactttgccagggacaagaaccaggacagaaggagcagtggacagagcccggagggaagctggtcccctcttcctccgggcaagggatgtgcaggggctgcatcagccctccccactccatggctccagatgccccttcctccctccacatcccacatcctctcctctgtggggaaagcagccctgcctagaggcagccttctccacttctctctccaagccttgatttctcctgyactctgtagactcgagtctctgtttcacccccaattcttttactgagatggttccagaaggcaaattcctccacagcattaaaaaataatttatagaaataatgttcctttaataaaagccacatagagttatacaatttttatagtgcacgaccgaacaagaaaggtctgaactcttgtataaaaatgaatctgtcccgctcccatgctcagaatgataccacctccttgggctaacataatatattggcttggaaagtttaactttcagtgtcattgggccgagctggccactcattctgctccaaagagctcctccaaagacaaactcttccagtgtggctcataaatatgagggcaggaaaaacaaacttgcttctgcttctctctctctctctctctctctctctgtctatatatatatatatatatatatatatatatatatatatatgtataatata

SEQ ID NO: 85321 - DNA, 789 bp, Homo sapiens
ggttggaatgggcctggagaggaggtggcaggaagggagtcagcagcggcggccagggcttctgcttcagtggcaaccagtgccccatgcactttgccagggacaagaaccaggacagaaggagcagtggacagagcccggagggaagctggtcccctcttcctccgggcaagggatgtgcaggggctgcatcagccctccccactccatggctccagatgccccttcctccctccacatcccacatcctctcctctgtggggaaagcagccctgcctagaggcagccttctccacttctctctccaagccttgatttctcctgcactctgtagactcgagtctctrtttcacccccaattcttttactgagatggttccagaaggcaaattcctccacagcattaaaaaataatttatagaaataatgttcctttaataaaagccacatagagttatacaatttttatagtgcacgaccgaacaagaaaggtctgaactcttgtataaaaatgaatctgtcccgctcccatgctcagaatgataccacctccttgggctaacataatatattggcttggaaagtttaactttcagtgtcattgggccgagctggccactcattctgctccaaagagctcctccaaagacaaactcttccagtgtggctcataaatatgagggcaggaaaaacaaacttgcttctgcttctctctctctctctctctctctctctgtctatatatatatatatatatatatatatatatatatatatatgtataatata

SEQ ID NO: 85322 - DNA, 789 bp, Homo sapiens
ggttggaatgggcctggagaggaggtggcaggaagggagtcagcagcggcggccagggcttctgcttcagtggcaaccagtgccccatgcactttgccagggacaagaaccaggacagaaggagcagtggacagagcccggagggaagctggtcccctcttcctccgggcaagggatgtgcaggggctgcatcagccctccccactccatggctccagatgccccttcctccctccacatcccacatcctctcctctgtggggaaagcagccctgcctagaggcagccttctccacttctctctccaagccttgatttctcctgcactctgtagactcgagtctctgtttcacccccaattcttttactgagatggttccagaaggcaaattcctccacagcattaaaaaataatttatagaaataatgttcctttaataaaagccacatagagttatacaatttttatagtgcaygaccgaacaagaaaggtctgaactcttgtataaaaatgaatctgtcccgctcccatgctcagaatgataccacctccttgggctaacataatatattggcttggaaagtttaactttcagtgtcattgggccgagctggccactcattctgctccaaagagctcctccaaagacaaactcttccagtgtggctcataaatatgagggcaggaaaaacaaacttgcttctgcttctctctctctctctctctctctctctgtctatatatatatatatatatatatatatatatatatatatatgtataatata

SEQ ID NO: 85323 - DNA, 596 bp, Homo sapiens
taagggaagtctgcatatcttgttgctgaagacacaggtaccgtttgtgccctcctagatccccttcaaagccagtgctgtgaatattggatgctaatggctcacagcacccccttctccagagcagcctgtttttgtaaataaagttttattggaacacagccacgcccgttcatttaattgtctgtgactgagttcgcagtacaatggtagagtcgagtcattgcaacagaaaccatatggcccacaaagcataacatatacactacctggcccttaacagaagaagtttgctctagagaatgagcttctgccaatgcacctgcgcgtaaaagtcatgctgcccacagcccactgcatgactaactcagggatctgaaaagcccacctgcttgtctcaaggtgagaccagctgtgcactgtggttcacactccagagcgccccacagggtcaggctgaggttagagccagctgagagcccctgtctgcctggctcctgcccctgccctctctcatcatccttgtttcccttcttctctgaggacttccacgataaattacatgccccagaacscccgtcctgggttgtttctaa

SEQ ID NO: 85324 - DNA, 705 bp, Homo sapiens
tattcacaatagcaaagacttggaaccaacccaaatgtccaacaatgatagattggattaagaaaatgtggcacatacaccatggaatactatgcagccgtaaaaaaggatgagttcatgtcctttgtagggacatggatgaagctggaaaccatcattctcagtaaactatcacaagaacmaaaaaccaaacaccgcgtgttcttactcataggtgggaattgaacaatgagaacacatggacaaaggaaggggaacatcacacaccggggcctgttgtggggtggggggaggggggagggatagcattaggagatatacctaatgttaaatgacaagttaatgggtgtagcacaccaacatggcacatgtatacctatgtaacaaacctgcatgttgtgcacatgtaccctaaaacttaaagtataataataaaaaaaaaagaaatcaagacgggatagtgttgtcccctggggtttgtaacaataaggagcccctcctatccctacaccgagaggagagagccttcgaagggaactgcagggagagtgggctgctcagctgggaccaagacacacaacctgcccaaggcggccagcaggggagaagctggggaagcaaaccctgaccacgctattttcccaccatttgatcgcctgccaaggcctgcctctggccaaacccaactggaagccagaaagcata

SEQ ID NO: 85325 - DNA, 764 bp, Homo sapiens
ggccctccccccctgcagttgatgccaggcgctggctctggaaaagcccatgagacgaccagcatggctttgggtcacatgtgtcaggtggctgttgtcatccacacaggcagggtccaacttcaagggccacaatagacaggtcttcctgctgtagaatctgccccccaacccatcctgcatgggggtggggcagagggaggctcctctcaactcgcactttcccagcctgtgcactgcggagccctgcccctcgtggagctgctgagactggaagggagaggcatggagcgggtgaggcagccgcaggtctcctgggagaatgtcatgcctcctcccaccggacgttcctggatgggggcgtgggcagaggaaggggagttactgcccctttgagacaacagctctaccctttgcctcttctatggtggtggcatattgcagcaggaggggtgagccgggcttgctggattcagcacgtgtgagcccagcagccatgaatggagccacaagggcagaggccaacagtgcggggtccagagggaccctggtccttcccaccatttgctgcagaggaactgcttctgtctcctccgcagagatggatggtatgctcaggcttcccaattagcccacaagaaaactgtgcttagagagtccacgctcctcccagagctagcctggggaaacgggagagctgacrggaagaggggaaagtggtcgggtaaggttgtatggaggcaaggttcacgcttcattcgaga

SEQ ID NO: 85326 - DNA, 1116 bp, Homo sapiens
ccaggcagtaccttgggcctctgccgtcacgcagggagggaagctgggtagccagttccccacgagcgcagagagctgcacctctagctcacccagaatctgccccagcaggtagtgcttcgagtacgtcctctgcagagccacctggctaagaggggagaaaagaaatccggccggaagtcaggctggtgggaatttccaaacgagagcccatgtgttgggaaggacgcgatggacagaacttctcaggggtttgttctgaatagtactgagtggcatgccaaagtcaagatttttatttcttatttttcaaaagccgcattgatgggaacaagctcacaatacaaacagtggtgattgcaatcacttgccgttcccatggcaacagacaagattaaaagagcaaacaacgaagctggaactctcttcagactaaatgctcccgattttaattgccaggcagcacgctgacacatggagtccccggctcgcggtttaacaggatccaaacctctcctcagtttctaactggaggccatctgggctgaccacccacaccctcactcctcccacccagagcatgaagcacaagaaagcatcaggttgctccttgaatacctccagcgacggggagctcattccagccggctggacgtgagggctcagtaatggggcagtcttagcattcagaggagaaaaccatgagggcgtgggttcaggctgctaaaataagaaccaaaaggcaaaggttgataatagcattaattttaatcaaatccatcatttatggaggcatggttctcagtgttctacccttgaccacaggaagacagcaccgatgacttaccttcagcagagaattcctatgtgtcacacacacagcrctagtcaatctttatgtatgacctcacctaaccctctcaacagcctgcagcaaacgttattataattccgattttgcagatgagggggctgcagcttggagagatcaaagccaaggtcacataaccagcggtggcagaaccacaacagaaactcagacccatttgacatcagagcccaggcttttgctaccattttgcccctggaggaaggaatccgctggatttggagaca

SEQ ID NO: 85327 - DNA, 1417 bp, Homo sapiens
aacccttgcagccaggagctgcaagcccaggacaaaagggaccaccaggctgggttctggggtcctcgtgctcaccgctgtggacgaaggaccccttgcacatgtgtgcatgctgcaggcacccttcccccaccagagtgctgggaagacccctggagttttgaggcgatggcaggagagggaggaaagagaagctcctggacacacagaggaggaggagtccttcaccagcacagctgcaagggaatgtacagtcaaaatcaaagtggcttacagaaaaacaaaggaaagggcgattcttccacgtggaagtaagtagactgtgcagtgaggtctctctttgcccctccagagcctcagtgccccatctctgcccgactcagcccgaggccgaggccccctagctacaggttgggtgtagcgatggaaagcaccagtaggagaactggggcaagggagccccctccatgccgggtcatcgtaaggtggtctctgctgaaggctcatgcaggagcctctctgggctcttctccttcaggggtgggaacaaccccagggtattgctgatgccttcttggtttccttaaagcctcactcacctgtgaataaagtctctctgctaagccctcctcccacctgtggtttgtgtgagccttccgtttcctgctagaaccctgactgcatcacgggctggatcctaagtgctctatgcaaatcccatcacctcctcccacaccacccctctccaggcttctcttatcctgaccaagcccccgccttctgctccgctctcccacactcgcccctccctctctgaactcagccagttttcgcacatcccctttccctctcactgcagagtcccagcaaatgttccccgggcctgggctcttctctccactgccccgtgaccagataattcccacaggaacctcagtgttccttccttccgggggccttccactcttcctgtcctctccacaaaagcgccacggtcctctctttcctggggttaatcctcacgcttttcattttatgactatttgattattatcttcccctcctccgtctcccagatgacaagatccttaagggctgggactgggtttgattttgctctattttatccccaaagactatcatgatgttggcatataaaggtgctcattaaatattttttaaacaratgggtgaatgaactaatcatttgttcccattttgcacccctataagtgtcggaagctgcacgtgccccagcaaagcccagatgctatgtagatagacttgtatatgcgcacagagacgcacactcatcctcatgaaagtgaatgcaccaatgcattggcatagaggctaatgcacatcctcatgaaagtgaatgcaccaatgcgttggcatagaggctaatgcacacata

SEQ ID NO: 85328 - DNA, 1470 bp, Homo sapiens
aatgttttctgcaagcgttagacagtagtggctttgaaaacataaacgctacctttcagctggcccttagggtatgtttacaagactgggcaagcctacctaaagccacatgaaaagttatccttaagcaatttctccagtttaaaaaaaagagagttttgaacgtttgtgacatatggccattcggtgttctcttgagatgatttttaattttctcttgtcaaacaattacatttgagtagttcagcttggaatgaaatatgcagaatttaaagagggttttgcatcattcatactgtctcagtgttattaatgtcaggaaatgaggcctgcattagtctgtrtcagtcagagctcttaattgccagcaatagataccatcagtggctgttttaaacattggagggattccttgacagaatgttgagtaattcacagaatttctgagaaggctgtagaatccagcttaggaaactgagaaaaagagaggctggacaacagtgaggagcacagcttctgtcaagccctgacattagggtggtaaggacgctgacgctgtctccgctgagtggaggaggacatggcaaccccgcactgcagtcagttaccagcctcattacaaatattggtcccacccaggaaactggattttgccatcaccataatcactaccaccagagtaggttctccccagtccctggattaccagctctggatccagagtattgggcagatccatttcatttgtcaagtctaggctctgagagaaaagttggtaaagtaagcatgtagccttttcaggttattttagagagaggtatgttctcttttatgcagatcttgcaatggggatttcttaaataaagaaatgatagaaatactcttgacagaaaaaaaaaagatagctgtattagtcaagattctctagaggaacagaattaataggatatatgtatatatgaaaggaagtttatcaaggaggattgactcacatgatcacaaggtaaagtccccatgataggctgtctgcaagttgaggagcaaggaagccagcggtagatcagtccagtccccaaacctcaaaagtagggaagctgacagtgcagccttcagtctgtggccaaaggcccaagatcccctggcaaaccactggtgtaagtccaagagtcaaaaagctgaagaattaagtctgatatttgagggcatgaagcatccagcacaggagaaagatgaagcccagaagactcagcaagtcgagtccttccactttcttctccctgctttattctagctgtgctggcagctgattagatggcgcccacccagattgagggtggatctgcctctcccagtccactgactcaaatgttaatgtcctttggcaacatccttacagacacacccagatacaatactttgcattcttcagtccaatcaagttgacacccaatatgaaccatcacaatagct

SEQ ID NO: 85329 - DNA, 996 bp, Homo sapiens
taaagtattgtattgagtctgtggatgacccagtacatcaaaatgatatatttggggacatgatgacatacctcgaatacctaacaccacgcagcagttagtcatcagtgacctctgagttccataagacaggcttcaagaaaggtgcaattaaggttgtgcagccccaccctttcctatcattcttaaaaatatatcakcatgccagtgagagaataagatgattaaggataaccttgagtccaccccaattatcattttagaaaagcaaatcattggcaaattttggaagttcagctgtttttggcagcaaatgtttatatgatcacactgattataatccaagcaattgtactgcagtgctttgttgtgactcattggattggaccagtttccaaaggtttccaaaggggctgagattgataccagaccttgaagggtgagaggatagaggaacaaagaaagactgagagttctgtgtgtctggggttaggacaagcgaacaatatggggagagtctcaaggctacagcagagcatagtggaatttaggactaagtgcagcacatatagattataagatgaagtcctaggaggagtctttttttttttttgagatggagtctcactctgtcacccaggctggagtgcggcatgatctcggctcactgcagcctcctcctacctcccgggttcaagcaattctcctgcctcagcctcctgaatagctgggattacaggcacccgccaccatgcccggctaatttttgtatttttagtagagatggggttcaccatgttggccaggctggtctcgaactcctgacctcaggtgatctgcgtgcctctgcctcccgaagtgctgggatgacaggcgtgagccacctaaacggatgtgtttaaagcaaactgaatgcagactgaagtacttggctttccttctttaggcaaagtagtgggtttccatctaaacttttctgttgttaatgctgtcatg

SEQ ID NO: 85330 - DNA, 1359 bp, Homo sapiens
agtattgggttcctaagacctaggaccgcctgggtctgcacttgagattggtaaagatcattcagaataatgccaagtcaattagaagatgatggagttgatggcttctaagttaaaaattctttaagcagtaaggtaaagaaaaagtcgaattataaaataaagattcctttctatgaaggtgtaaaaataacacaaagcaaagaggcaaataagcacagatagctatgccttatttaaatacaaatccttcaaaaataattatcagagtatttttctctccagataaattcctcccactcttttctttttcaccattttttttgccctcagatcaaccctaaggagctggagaaaccaatattagaaattaaaattttcacttgtgaaatatgttatttaacatatttaataattattccttgcttaataatcatagtagcataagaaaaaaaaacatgcacagatgtcagacacacattcttcaactgcaaacctatcccttgacctcagtccttatacagtgggccgcattgcattccaaatatttccaagtttgcagtcatcaccacctccttcccaggagatcagcagcttaaaatccttaggacaaccctggacatggcaatcttgccttggcagagaagatatgtgccaccacccccctactgctgatgcggcctttctgattcaagttaattgctttggaaaaaaggatccagcctccttctcacctcaccgggaacgtttccctggaaaggaggggatattgtgtgtccagctcggctgatatgggtctttaatcagatcagctctgagaagcgaaggaagcagagactgagaagatgggaagccctgaagtgaccttgggaggcccagagtgtgggaatattccgagttttgtcattttaatcctcaaacataactcagcaggagagcttacagttcagctctgcagcaactcacactgcatgtctgggtatctgaggtctgaattttagcactacctccattgctactcactagcacccagagcctggaggaaggtgtccacctcctttcccttatctccttaaagaaaatctaccaaaacacaggcttcatgcagctgttatgtaaatgggccctgccgcagagagaagaaagcaggcatccataaaccaccaggtacaagttcactgtcattccaacmcaagacagcgcgctctggggagggacgagagacatgagctcacgtgagcgctgcagctcaaattcaggaatttgtcctgggcaccctgtaggcaggaacccaagacaagggaccaatccttgattttcagcccaagtgccttttctcatccctcgagagctgcaaat

SEQ ID NO: 85331 - DNA, 784 bp, Homo sapiens
cctctctcatatacccatgcctcaaagtctagttttacgttaaagttttggattcatgcacaccatcccaagctgtggtgtgctttagatgatcttgcctttaatggttttcttattaaaactttattcgtatcagtgtaaaagttcataatggatatttcatatcttgcagtgatgctactggttggtagtatgaccacctttaggggctattcataatctcttkttgggacctggttttaagagtagctattatttttagatgtacatagtctctgtcttaaatatcagcttaattctcaacaggtcccaacctgtgttgacagaattacagctgttaatctgatttgcctgatcttgcagagacgctaaaccatgggaattgtattctcctgcagcaaatataagcttgcaccaacaggctggcactgtgaaggaactgaagcatctctgtatttagtgtctgtgctgaagtgctgacaaagcatcaaccccatgctctgcaaaatagtaattactaaagcggggagatgtaaagaaggaaacaaacctctttaccttgtcagcgcataaaagcaagggtctgagaaatggagcattccctctcacttatgtttctcaagttccctggctaaaagtaaacaatctcccagagtaacctggatttctgtgcttatctacgctttcagcaaatactgccttagtgcatgtttgaggatgagggagagagaagagagttggtcctccttgtggacatccttacctccccactggcctgaaatga

SEQ ID NO: 85332 - DNA, 654 bp, Homo sapiens
ggggtctctgtccaggactgtgtggagcacagccccctgccagcttcagtggaacaggcagcagagctaggagtgaaggcagctgtagggctgtttgtttctacagtattctgacgaatgcgatgagttggcgttgctcctgaktcacctggaccaggtatttcccctgtaaaggttctgcccactctccagcaagcctactttcccgccctggagcaggtcacacaaatttagttgcacagatccaggattccccaggaggtgccttcaacctccagaaactccaccttcctctagccccgcctcagcgctcctctcctctttccaaacacattggtgggcattcttggaagacaattgctggtaatctctgtgcagccaggattcacttccaggacccgcctcccagaaagcccaggcccagacaccagctcccgcaggaagttctcctgccctcagctgtccccctggctcctttccagcccctcactgaattcagttcactgccagcttttctgaatagcccatgaaaacttgcctccctacctatcagagatgccaccttctccctctgttcataagtaaagactcatgtttctgcatttttctcttccccgtctggtagaaagaatcagccactttccactgggatcc

SEQ ID NO: 85333 - DNA, 654 bp, Homo sapiens
ggggtctctgtccaggactgtgtggagcacagccccctgccagcttcagtggaacaggcagcagagctaggagtgaaggcagctgtagggctgtttgtttctacagtattctgacgaatgcgatgagttggcgttgctcctgagkcacctggaccaggtatttcccctgtaaaggttctgcccactctccagcaagcctactttcccgccctggagcaggtcacacaaatttagttgcacagatccaggattccccaggaggtgccttcaacctccagaaactccaccttcctctagccccgcctcagcgctcctctcctctttccaaacacattggtgggcattcttggaagacaattgctggtaatctctgtgcagccaggattcacttccaggacccgcctcccagaaagcccaggcccagacaccagctcccgcaggaagttctcctgccctcagctgtccccctggctcctttccagcccctcactgaattcagttcactgccagcttttctgaatagcccatgaaaacttgcctccctacctatcagagatgccaccttctccctctgttcataagtaaagactcatgtttctgcatttttctcttccccgtctggtagaaagaatcagccactttccactgggatcc

SEQ ID NO: 85334 - DNA, 654 bp, Homo sapiens
ggggtctctgtccaggactgtgtggagcacagccccctgccagcttcagtggaacaggcagcagagctaggagtgaaggcagctgtagggctgtttgtttctacagtattctgacgaatgcgatgagttggcgttgctcctgagtcwcctggaccaggtatttcccctgtaaaggttctgcccactctccagcaagcctactttcccgccctggagcaggtcacacaaatttagttgcacagatccaggattccccaggaggtgccttcaacctccagaaactccaccttcctctagccccgcctcagcgctcctctcctctttccaaacacattggtgggcattcttggaagacaattgctggtaatctctgtgcagccaggattcacttccaggacccgcctcccagaaagcccaggcccagacaccagctcccgcaggaagttctcctgccctcagctgtccccctggctcctttccagcccctcactgaattcagttcactgccagcttttctgaatagcccatgaaaacttgcctccctacctatcagagatgccaccttctccctctgttcataagtaaagactcatgtttctgcatttttctcttccccgtctggtagaaagaatcagccactttccactgggatcc

SEQ ID NO: 85335 - DNA, 654 bp, Homo sapiens
ggggtctctgtccaggactgtgtggagcacagccccctgccagcttcagtggaacaggcagcagagctaggagtgaaggcagctgtagggctgtttgtttctacagtattctgacgaatgcgatgagttggcgttgctcctgagtcacctggaccaggtatttcccctgtaaaggttctgcccactctccagcaagcctactttcccgccctggagcaggtcacacaaatttagttgcacagatccaggattccccaggaggtgccttcaacctccagaaactccaccttcctctagccccgcctcagcgctcctctcctctttccaaacacattggtgggcattcttggaagacaattgctggtaatctctgtgcagccaggattcacttccaggacccgcctcccagaaagcccaggcccagacaccagctcccgcaggaagttctcctgccctcagctgtccccctggctcctttccagcccctcactgaattcagttcactgccagcttttctgaatagcccaygaaaacttgcctccctacctatcagagatgccaccttctccctctgttcataagtaaagactcatgtttctgcatttttctcttccccgtctggtagaaagaatcagccactttccactgggatcc

SEQ ID NO: 85336 - DNA, 2197 bp, Homo sapiens
caagacttcatttagtttcagtcttcaaagtcatattattaaatatgcttacaattagagtgttctgcaagtacatataataattcaaaagtcccgtctctgctctcaggtaattcacactctgaatggaacacagcatttgttgtggcactagcatggaatacagttttatattgtcaaactcttgcctttcttccttgttcccccaaatgtaagaaggtcatggggtggaagtgaccaaatgaattgattacaaattgtcagtggaactaagccagggaagtcctgatgatgataaactcaatgcacgtcatatggcagacagaaaaaaacatgtgatctggaaactctgtcctgctcaccagcaaaattaggacacttgattgtaaaaaacagaaactcaacctaagctagttgcttgagcaaaaagggaaacttattagaaggctcacatacccatctggaaggaggaggtgccactggacatcagagacgggatcagagactcgcaagccccagcatgcatcatgctcacatgctcacatgcactctctctctctccctctctctctctttctctgtctctctgtctctctctcctcccctctgcatttctctgtgatttagttttatttctaccagactggctttgcctatgtagtgaaactatgagccagtcttcattccccagcttaaccatcagggtaggattaaccctttttctgcagtttcagttgcaattcccctgagaaatgattcggttggactgacaagagtcaggtgcctatgcccactcctgggtattgagggccttgctcagatgaggggagatcattgagccccacagtcacttcagtttacatccaccccaatatgtggcaatgggcaagttccttcactcctctgagccttggtttctccattgtaaaatgaaaaagtgagtgaaatgaaaaagtgagtgagtagggacaaaaataataccttcttcaaagagctgttgatcattttacatagataactaatgtcaaagccttgggctggattggtatatgaagcatcaataaatgttcatttttcttccaaggtgaatcttaaagtcaaggaagaagtcagcacgttaaaatggagaggaaaattatttgaagcacagggaacggaatgggaaatgcgatacaattccgagtaagaggcactacaggagttgttaaatggaaggtaattgagccttaagtcactcccacccataaatcatccacaagatctgtgttctaggaaaaggggcactagcattagctattgggaacatggaatgtcaagttgaccaattaatctgtrgcttataagacattctttgctattgaggggaagattatttcagtcaagtagcattttagggccaacataaaaaagaattgtaaaagatatggattttgatgaactctgaggagcaaaagctgcatttgctcatattccctttataactttttggagtcagtccaatgagcatacccagctgcgcagtcagataacttgaatttactactagttctacaaaaatattccctatgttgtcttccctcatacattttatccttaagttttatgaaaggaaaaatagacttcatattatgcatttcttaggtaagaatactacactggtggagtattaaaatcagtggattataaaatttgcagtttctccacagctttgcaagtttagtgcatctacgttttggcctttctgcatttgaatcaatttgactcacaccaacatctgttcttgataaaataacatgaaatgtaatatcttaatggtggcacagaatcaaactccactgccctcttgtttcacatccctttctttggtattccccacatcatcttctcctccagtttgtaactgagtgtgacatctaacaactcactagaattcacctgccccagcctttcatttccctgggcactcgtgggctactgaggacaacggccactgcttcatcagtgtggggtgtagagtcttatccagttgtctcaccactttgtcaacttcattcccctccttgagctttggcttgacccagacctactgtttcaaagaagtcttctcttactattccagtgcacagtcacattcttatctaacacttacttagagcaccagtactttgatcttaatcaaaggctgcctggtattgca

SEQ ID NO: 85337 - DNA, 567 bp, Homo sapiens
tggtggactttcctgcaaaatttcttactatatttttctattagtaattttctatttccctcatttcttctacatttgttggattttttctgtatcttttctgtttatttgttcacttatttgttgaaaaaataaaatttattgatatcataaatatttattttattcaagtattataatccaatacttattttgttgctcawatggttccaggttttgctttggggaactcttttatgctctctgatatgccttcatcatttttttgagctcttgcctactttccagcaccaacagatattacaggctcattttatattttctctaccccagccatggattcattcacttctccaaggagtcccagttccttttattggagaatggtatttaaaacccaagatctgggtggtaggtgtgctcatcattactgggatgtcattgcatctatgcctgcttagcagataaggctagcaaatatatgtattttcccatgcatacatgcacacatacatatatctgtatttatttctgtattatctatctggatctatattggggaaaaaa

SEQ ID NO: 85338 - DNA, 677 bp, Homo sapiens
tcaagaagcatcggtttcatgattttacaggtcatgaaaaagagtctacagatcagctggaggtacacagctggttagcagcagagcctagacaaagaccctgccctccgatcccatcacagkggtgcctccaatacatgaagtgcagctctctgtggtgcagaagtgtgccaagaagtggccatgccaaactgttcttataaagacagctctgaaacctcttaaaaacagggagagttgaaattgtatgcgaacaagatttgtatggctctctctggaaacatccgaagatcctaattcttttgatccgtgagactttgggatagcatcttcctcagaacgtgatctcgagcagccacatgtcacagcacttcccccaggtgctgctgaaatgtttgtgccatgatgcaagaagggtcaggaaacttcccattattatatttgctattattttttgtaataaccttagaatatatcaacgttggtgaccaccactttccagcacttcaaccccctggcaatctttcttgtttcttggagagcttggcagagtcatcttggaacagagaatgtacacttcagtgctaaaggaaagatgctctatgtggcaggcaaagagcccagaggacattctatgttggaagaaggagaacatcctctcactcagcatccacctt

SEQ ID NO: 85339 - DNA, 677 bp, Homo sapiens
tcaagaagcatcggtttcatgattttacaggtcatgaaaaagagtctacagatcagctggaggtacacagctggttagcagcagagcctagacaaagaccctgccctccgatcccatcacaggggtgcctccaatacatgaagtgcagctctctgtggtgcagaagtgtgccaagaagtggccatgccaaactgttcttataaagacagctctgaaacctcttaaaaacagggagagttgaaattgtatgcgaacaagatttgtatggctctctctggaaacatccgaagatcctaattcttttgatccgtgagactttgggatagcatcttcctcagaacgtgatctcgagcagccacatgtcacagcacttcccccaggtgctgctgaaatgtttgtgccatgatgcaagaagggtcaggaaacttcccattattatatttgctattattttttgtaataaccttagaatatatcaacgttggtgaccacyactttccagcacttcaaccccctggcaatctttcttgtttcttggagagcttggcagagtcatcttggaacagagaatgtacacttcagtgctaaaggaaagatgctctatgtggcaggcaaagagcccagaggacattctatgttggaagaaggagaacatcctctcactcagcatccacctt

SEQ ID NO: 85340 - DNA, 559 bp, Homo sapiens
tcggtgtgtctgtgaaggtgttaccaaaggagattaacatttgagtcagtgggctggggaaggcagacccacccttccatctaatcagcggccagtgaatataaattaggcagaaaaacgtgaagaggcaagacttgtctagcctcccagcccacatctttttcccacactggatgcttcctgccctcaaacatcatactccaagttyttcagttttgagacttggactggctcttcttgctcgtcaagcttgcagacagcttatcgtgtgaccttgtgatcatgtaagttaatatttcataaactttaatatatataatatataatatatataattttttatatattatatatattacatatttatatataatatataaaatatataaatatatattatataaacatatataaaatatatgtttatataatatacaaattatattttatatattatatataatatacaaattatatattatatattatatacaaattatatattatatattatatattatatattatatataatagatagaactaataggatatatag

SEQ ID NO: 85341 - DNA, 583 bp, Homo sapiens
tgctaggaaatgcagctaaattttagccttggcagtgataattaactcatttcaagtgcttgataatctctatttgtctgatccttttgtatgtgcttttttcccctccattatcctatttcatacactatctcatttcacagccatttcaaatgaacttgggaagtaatcagggaacaaatccttaacttaaaatagctactttattctctaattctaacrtttctgaacttgaatagtaaaacaggagggtgtcattggtataatcttaaaaactgggttctggcacgtagtttggtatacctgctcttaaaacatctttgctttgtaccttggagcttgcttgggcattagaagagagtaggtgcagggtggggaaacagtgggaggcaggtagatgcttgccctccactattgggcactgtggattttatttgggtggcagcatgttttgtttgcaataagatgctattatgcacaatagcttacccaacagagctcagaattaggtatcaaggctcttagcagaacctgcttctgggcctgattccaccactgatttgttctatgacattggtcaatg

SEQ ID NO: 85342 - DNA, 666 bp, Homo sapiens
tgctgtttcgctacccaagtttcatggggctgttaggtggccacttcgctgtgrtccatggaagtctccacacattccatagctgagagcttaggagctcaagagtccagtggtgcactgagccttatcctcacggagcaccacggagcagagcggggagcagctgctgaggtggttgcagggaactgggctccagcccaggcctcacgtcctccctctctgcctctcttctctcaccggcagtctctcatctgtaggtggaggggttcaccaggtgatttctgaggtccctcccaaccccagtatttcttaatttctgagcttccttaagaggtacactgcagcccttgcattcctttgactggaggcgacacaactcttcaaagctacaaccgtgttcttgtaaatcaacctgcagcctctctagagtacatatggacacataggtatcctttaaattcctgtgaacattttacatgtattttcttagaattggcattggccctcacatgaggccatgccctcactatgaacccagccctttaatctctttctttgtccttgcagcccagcctaagggctgtctctccatttccaggtactgctgccaccgtttatgtatccaagtcactgcagagccagttgctgttgaccagctaatccagt

SEQ ID NO: 85343 - DNA, 859 bp, Homo sapiens
gagggaaattaggtgtgtgtaacttctgggccaaatcatcaaggagagactgtgagttctccacacttgattctctttctataaagatgtgggtgacacgtgtcccaggggctgggcaagtttcaagtgaccagcattctcaagtcaccttacagaaggaagtagccttggaaatgggcagttgttgacttagagaaaataaactgttatgtgcaaaccactgagatttttttccccacaatataacttagtgcaatctaatgcaaggttcccttaactttgcttataccctctctaggaaccagacaaaaacwtgggaaatagataccctaaaatcttcccctctttccctttttttctctaaatatgtttctctcctactctacataactatcatctggagacagtccctgggaaacaatgtcataagcccacctgttcaggaaacgaattagattttaagacttggttggagctggctggtcttggtggtggtgatagtggtgttggcagtgggagtggtggtgtgtatatgtgagaaagagtattggttctttatttgggaaatgcggtagtaatattgtagcactgactcacaaaccactctcaggaatctgatgttgccaggtaggcctgagaatgagctatgtcagagggaatcagcttttccttgggggctgactggttgtatggctttcttttggggacagtcctactgcagggagaaaaaacatgttggttcccctcaacttgcagctgtgagaaaaagaagagcatcaagactcttcacaagcctgatttgaacatcctccagtggaaactctcttagcacctcactgacattctggaaaatgtgcgt

SEQ ID NO: 85344 - DNA, 859 bp, Homo sapiens
gagggaaattaggtgtgtgtaacttctgggccaaatcatcaaggagagactgtgagttctccacacttgattctctttctataaagatgtgggtgacacgtgtcccaggggctgggcaagtttcaagtgaccagcattctcaagtcaccttacagaaggaagtagccttggaaatgggcagttgttgacttagagaaaataaactgttatgtgcaaaccactgagatttttttccccacaatataacttagtgcaatctaatgcaaggttcccttaactttgcttataccctctctaggaaccagacaaaaacttgggaaatagataccctaaaatcttcccctctttccctttttttctctaaatatgtttctctcctactctacataactatcatctggagacagtccctgggaaacaatgtcataagcccacctgttcaggaaacgaattagattttaagacttggttggagctggctggtcttggtggtggtgatagtggtgttggcagtgggagtggtggtgtgtatatgtgagaaagagtattggttctttatttgggaaatgmggtagtaatattgtagcactgactcacaaaccactctcaggaatctgatgttgccaggtaggcctgagaatgagctatgtcagagggaatcagcttttccttgggggctgactggttgtatggctttcttttggggacagtcctactgcagggagaaaaaacatgttggttcccctcaacttgcagctgtgagaaaaagaagagcatcaagactcttcacaagcctgatttgaacatcctccagtggaaactctcttagcacctcactgacattctggaaaatgtgcgt

SEQ ID NO: 85345 - DNA, 2624 bp, Homo sapiens
aaataaaaatgctgtgtctagaggacagggtggagaaaaaaagacaaaaataaataaaacatcaaatatgaagattctcagagataatgcatttataaacacagaaatggttacaacaaagacagccatgatgagtgggtatatacatatgtacacatatatatgtagaaatccttgcccagcaaccaactatggcatctagggagctaaggccagtctttgtatttgtcctgaaggctcccttctccacagcagccccttttctggggtttcatggagtacataaaactccctcagctccttgggggctgggcgggggatattgagatgagaaggtcttggctggcagaaaagggagagggaggatccaaggaaaaccataacccacacttctaagacacccttgaccaccctgggaatcttggccccttgggaaccatatcatagcccttgtccctttacagataaaaaggagatctattccccacccaaatctccttcttccagagcaggtaggaagtaaggggagattgtgaggggaagaaaatgggtcccggggttggggcacatgagaaacctctgttcttttgtaggcaagagcagaagaggaagctggctgcattagggtttccttctgtctgatatcggggaaggccagccgctagtcctccataggcccaaaccttgaggaagagggggtagggggtcagtgctaacacttgacttttctatgaagtcacagcaaattcctccctggagcaccaagccccarttttaaagctttgcttgggcagggaggttgctcgatgacaccaccatcccggtgctcctgggccagccaggagggctgatgttccttttggagaagggtagagaatgaggatgaggctggaaccctttaaaggaagaccatgcctcaagcccaaggatggagccagcacctgtcaaggagggagaggacttttcccagcaagagatgctggagaaagaagagactagaacttctttctcctctttccagcaacgagcagctggccaggtgctcatctggaggatgccggtggtgacagtgaaacagatgtccttatgatgcccctctaccttgctgggagtcaagtcaagggactctgggatggaaggttgattgctgtccctatcctgggaggatactgcaggggactggatgggtggtggctaaggctgctactgctatgtctgggaggcctggacctgggcctgagccaccgctgctgtcactgccacctgcccatgctgctggagatcaggagggctgtgtttgtgcctgtgtttcctaagggatgtttcagacggacaggcccaactgcagagagttgggtgtcctccttggtgtgcttcactgtagcatagacaggtagacaggtgcccctctatgaggccacatccatgcatgctggatgatagctgtggcacttggagggctagtgtctgctgtgctgctgtgtgtgaggcagtgagctagagggtatgtgaaggccttctcacatcccgggggcacatgcacatggaccatccctggcctggatctgtgtgtgctgctggaggtgggaagccccctggcagttggagcagtggtagggcttggccctgagtgaatacagaggtactggaggggtagcagctgttggcaaaggtcttggaggaatgtgggacctgtggggcttaccttggtgtggggcttggagcacatcagcatctctaacttccagtaggatgttagtgagcacattggcacctttataatatgatgtcaacattttccagaagccctcttattgtataaagcagggtacacccatggtcatataataagtttgtgatagagctgagatctgaatccaggaacccaaggctctgtccatttccttttgccacagttcccttcactctcgtaagtcattccatctttctgatggtcatcattctccgtagggaagagggcctaaggttcatttatctcaggcaaccctgattccagcattgctgcttcttttggccctctgtgtgggcaggggttggggtgggggatgggagattagaaaccacactgccacttccatcaccttctacctccctctcgttaggccaacaccatcttcttggagaggtcacgaaccacctgcaggacttgtgaggcagagggaggagcaaagacaatcatgggaagccagatggggaggttcagagccgatcaggctgtagccccaagaaagcctgaggggactggactggcaggggtcagccccgtgaacagcatggggaccaccaggatgcgtgggctaagctgctctgacttggcctccatccacacccatcccgagggcagggaggggtccaggacccagggcccaggggcaggtgctcccagcagggcagaatggagagatggagctttatgttcttcatgaaaccccaaaacgaggggtgctgtggagaagggagccttcagggcaaatgcaaagactggccttagctccctagatgccttggttggttgctggacaaggatttgcacatatacatgtatacatatgtatatacccactcatcatggctgtctttgttgtaactgtttctgtgtttat

SEQ ID NO: 85346 - DNA, 498 bp, Homo sapiens
aaactccaattcctccacacccacctccctcgggcgcactggacaggagagggtggaggaaaggcagtgcattattgtgaacgaaagctcacagttaacactggggctcactccttttgttgtacattctataggtttggacaatggtatgaggacaccttttcaccactaccattccatacagagctgttccactggagtgggaatcagagaaaggtttcatgaagtctaaatataatttggactttaaaaagagaggccaggcatgatggctcacatctataatcccaacactttaggaagccaaggcaggaggatcacatgagcctaggagttcgagagcagcctgggaaacaaagtgagacactgactctaatatagacatagatatagatatagatatagatatagatatagatatatagatatagatatatagatatatggtcmcagtggtatgcacctataattctagctacttgggaggctgagacagaa

SEQ ID NO: 85347 - DNA, 750 bp, Homo sapiens
ggctctcctttttccccttcaagggcagtgggtgtcagtttcaaggacagaatgcaagggctgtcctggaccagaccactcaccaagtactcactatgaacggcattcacctcctagctgttattttgggataggaattcatattgtgctcacaccagtcatatgagctaagtagcagtatcatctcctttattttattttagtttttgagacaaagtcttgctctgtcactcaagctggagtgcagtggcgtgatctcagctcactgcaacctccacctcccaggttcaagcaattctcctgcctcatcctcccaaatagctgggactgactatagctgcaccactacacctggctaattttttttggtctttttagtagatacagggtttcactatgttggccaggctggtcttgaactccaggcctcaagggatctgccagccttggcttcccaaagtgctaggattacaggtgtgaaccactgtgcctggcctcatgttctttatagatgagtgaactgaggccagtgaagtcccacayacctagtgagtggcagagctagacatggagcccagaccatgcagaggctgacccacgattttagcactacctcaggctgcctccccctcgtcctctctccctcctcaagaatcatccatttttctgtgctgattcagagctcgccactgaattcagattggtctggggatcagtggaaggatcagaaggttctctcaggaccagaga

SEQ ID NO: 85348 - DNA, 3672 bp, Homo sapiens
  misc_feature (1)...(3672): n = A,T,C or G
atttccaaagcatacattttataagcttagtaattagaggatgatagattgcctgagtcactttacccacttcacatatccattcatctggactaaagcgtttgcgccttgtgtttctttccaacctaagttttggagcacatataacacaattttcctgaagacatctgtttacaacattgaaaagattaaatcaagctaaggattgtccaggcacctagtaagcacattctagtatcctcagagtgcacgtgtgctctggattcagatctgattttccatgaacccctcatttataattggagaagcagttgcccacatgactctataatggaaaatccacaaaggctatcccctcagggtggatggccaagctttgcagcccagcccagcaggccctttatttcctggttcctgctaacctcttcatgtctcaaccctgcctttcccaccttctgtgctcagccacagtgagactatcacagtgaacacaaaaggaatcttcctatgggctgaacatttttatggttagccaaacaaatctatggggtagatattactctactaatattcctcccattttacatatggagacactgagggacggacaaatcaaacaatctcatcatccacagttcctatcatttacaattaataagtattaggatgtgaacccnnnnnnnnnnnnnnnnnnnnnnnnnnnnnnnnnnnnnnnnnnnnnnnnnnnnnnnnnnnnnnnnnnnnnnnnnnnnnnnnnnnnnnnnnnnnnnnnnnnngtcataatttcagtgaggaataacagaatcgggacttcttagcaagtggttcgtgtgtaatgaaatattaaatattctgtgttgttttggtattttctgatgagtcaatagtgctcctaacaatggattctgaaagtctagtggactcttgcaatcttaaaagtgacttattttctacagtaaatttccttgctaaagggaactggctggtaactcctgaaattgagagcctgagcatttctggatttccagtggagataaaacaactcaggggacaatatgcatgatggattttgtgcctgtatctaagaaatgtaaaagtaattaggtgaaagtgatcaggaaaagaataagatagagatgaaggacatgatagagatgtgatgacatccagggattttgacagtattgctcttggtccttcacaggaccaagatacataatgagtgaatgaatacacaaatgagtgaatgaataaagttatgccttctcaagtattcattttaaggaaactttaaagaaaagggaaagagagactttgtgaccagttaagtgtaacattatttgtccactttaagggttttacagctttaggaagcacgtacagacttccagttaagacagcactattctaggccaaatgtggcaatgatggatcttgcagggcaccgtctgtaggcagggagtgaccaacagacataacagatcaaaaaatgaatgtggttggaaagtgaacaaaactagaagacatgaataagtgtcagaattatttatccatcatgaacaatttctttctctacttagagtccatccaagtcttctttcaaccttccttttaagcttcaggtcctacagctttctcttgctgcattctatttatcctagattggttactctttcccaaaatggcttataaacataaatgctattccttctgcctgaaatgtacttttttctggttttttttttttttttttttttttttttgagacagaatctcactttgttgcccaggctggagtgcactggcatgatcttggctcactgcaacctccactgcctgggtcaagcaattttcccgcctcagcctccagaatagctgggattacagacgcccgccaccacacccggctaatttttgtgtttttagtagatatggagtttcatcatattggtcaggctggttttgaactcctaacctcaggtgatccacctgcctcagcctcctaaagtgctgggattacaggtgtgagccactgtgctaggccaaaatgtacttcttatcctcctcttctcacttgtaaaactactcattccttacgattcaattcaaacgtatcgttcaatgagaatccttgtttcatttctgttccccaaactccagcagaaataattttgttttccttcaatagagttcccactataatgttactacactaaccatattatttcataattagatattcacatcctttcctactagattaacaattatttgagagactttgtatcacattaatgttgaaatttctagcacctaccatagtccttagcatataacaaatctggtaaataaatgaatagatgatgtgaaaactagatggtgaatatgcacctttgaatgacatttatgcatcccctagccatttatttattcatgcaaccatgcatgcatttatatggccaaaaataaaaaaatatattgaataactcctatgctattatttagaaatattatttccatcatggggctgaaaggattgacttttgcccagttttacccacccccaaaccatccctgacattgtgagctgttcagtctcgcagtccataataactaatagcttgctcccatgctttctttaccccagtgacttgctgctgcatagctggtagctgagttctctagggaacctctttccagatttgatttatgcctgaacaaaaccccggtagccatttggaggtaaggtcaatacttctgcaagggtttctgctctttgataccgtgcagtgccagcctgtgagtaatgtggcaaactggatctaatagcagttaatgaagccagtccacatttccttggcaggcaccttagtccctgttctccatatacttgaactaagatgcctcttgctagcttagcgtggtgcagaggggagggcatggcctgccagatgtgaaattacgggggcagagtaaattggtacaaagcaccctgtgagtgcactacttaataatggaaacgtgtttcaatgagtcaccacaataaccctctgcaatagggattatgatcttccttttacagaaagagaaaatgaggtactgagatactgagtaacttaagtaacttaagttagagccacagctagcaaatgatagagtcaggattgaaggccagacccagttgatttcaatgttcaagggtacattgtttttctgtacaatcaggtaccatcccaggaaggttaatttcaactcaatacgaaacaagactttctaaaaaatagagctatcaaaagaataaatgtcttcaaaactcagtgaactcattaagcagaattcagtaagaggtcagaagaacatgacagaataaaactgtcaaagaagctggaaaatgaattactctatttgttggaatgttggtttatatattcccctttttgtctaagaytctgtgattgcatagcaattatagacagacacacacacacacacacacacacacacacacacatagaaagccctcacgttaatgcgtaaaagattaacatatgtaaaactgtgtgtgtcccaaatgtaagtgcagacaaaattaataatagtagttagtattaattgaacctctacactacactctcctttatactagaagatatgcctaacacatttcatgca

SEQ ID NO: 85349 - DNA, 1429 bp, Homo sapiens
caatggggaaaagactccctattcaatgaatggtgctggcataactggttagccatatgcaaaggaatgaaaatggactcttagctttgaccatatacaaaagtaactcragatgttttatttgttcaccctcatgattattcttctgttccttagggtcatgagttcttaagcatgagctaaacaaaactgtggatatttattagtctcactttttaattctttgctttatcatattaataatctatttaggatagattatacagaagtttttaacatgctttctgaacagcagggatactgaaggctgaaggtgcctggaaagttcaaataagatgccctaggagttctttactaaatttcaccaagttgatcataaaatatcagtatgattcagaggaaaaacataagagacaaatcatcacagttttgtgtgaaattgtgagagttgtttaacctctttcatcttcaattcctcatgagtaaaaatattatcaataatacctaccatgcaagtttgccatgaggacaaaacctagagttagtctcaggtacaccaagatggtagcaaaaaggccttttctcatgacacaaggtagcggacattttccccttaatttctcatccacatgcaactgttctaccttttattctttttagagtgaccacatgtcttttaggaaatatcaagaatatagtttcagttttaagattggggatcccaggtaagacaactgcagtagtcttaatttgaggtcagcacaagtcactaaatgttatttacaggttatacaaacgttattatggattatcacacatctcaaaggattccaaaaattgtgtaatatataatatatccttcagctaaatgatctaatttgttaaaatcatcattgctttttcattaacagcatgaggtttggaatttgacctcctagtttaaatttcaaaccttgtctatgtacaatcttcatgctaagttacttaatctctctgagcctcaactaactttctttctctctctctctcttcctctgtgtgtgtgtgtgtgtgtgtgtgtgtgtgtgtgtgtgtgtgaaatagagataatagttcctacttcacaggatttttaaggtaattaaatataataacacatactgatactcagtacatttcctggcacaaagaaaaactcagtaaatgctaaccattgatgctcaaagacatacattgctgctgaggacacagggctctttgtatcccattaacagtttacctggctcgctttttcataagtaaacagcccacatttccccttttcccttttcgttagatgagtaactcccaagtagatccctgagcatcatgggattttgaagtatatttatggtataatttagaaaacgatattgattctacttgtagcccatattgaaaggtatctcaa

SEQ ID NO: 85350 - DNA, 1429 bp, Homo sapiens
caatggggaaaagactccctattcaatgaatggtgctggcataactggttagccatatgcaaaggaatgaaaatggactcttagctttgaccatatacaaaagtaactcgagatgttttatttgttcaccctcatgattattcttctgttccttagggtcatgagttcttaagcatgrgctaaacaaaactgtggatatttattagtctcactttttaattctttgctttatcatattaataatctatttaggatagattatacagaagtttttaacatgctttctgaacagcagggatactgaaggctgaaggtgcctggaaagttcaaataagatgccctaggagttctttactaaatttcaccaagttgatcataaaatatcagtatgattcagaggaaaaacataagagacaaatcatcacagttttgtgtgaaattgtgagagttgtttaacctctttcatcttcaattcctcatgagtaaaaatattatcaataatacctaccatgcaagtttgccatgaggacaaaacctagagttagtctcaggtacaccaagatggtagcaaaaaggccttttctcatgacacaaggtagcggacattttccccttaatttctcatccacatgcaactgttctaccttttattctttttagagtgaccacatgtcttttaggaaatatcaagaatatagtttcagttttaagattggggatcccaggtaagacaactgcagtagtcttaatttgaggtcagcacaagtcactaaatgttatttacaggttatacaaacgttattatggattatcacacatctcaaaggattccaaaaattgtgtaatatataatatatccttcagctaaatgatctaatttgttaaaatcatcattgctttttcattaacagcatgaggtttggaatttgacctcctagtttaaatttcaaaccttgtctatgtacaatcttcatgctaagttacttaatctctctgagcctcaactaactttctttctctctctctctcttcctctgtgtgtgtgtgtgtgtgtgtgtgtgtgtgtgtgtgtgtgtgaaatagagataatagttcctacttcacaggatttttaaggtaattaaatataataacacatactgatactcagtacatttcctggcacaaagaaaaactcagtaaatgctaaccattgatgctcaaagacatacattgctgctgaggacacagggctctttgtatcccattaacagtttacctggctcgctttttcataagtaaacagcccacatttccccttttcccttttcgttagatgagtaactcccaagtagatccctgagcatcatgggattttgaagtatatttatggtataatttagaaaacgatattgattctacttgtagcccatattgaaaggtatctcaa

SEQ ID NO: 85351 - DNA, 1429 bp, Homo sapiens
caatggggaaaagactccctattcaatgaatggtgctggcataactggttagccatatgcaaaggaatgaaaatggactcttagctttgaccatatacaaaagtaactcgagatgttttatttgttcaccctcatgattattcttctgttccttagggtcatgagttcttaagcatgagctaaacaaaactgtggatatttattagtctcactttttaattctttgctttatcatattaataatctatttaggatagattatacagaagtttttaacatgctttctgaacagcagggatactgaaggctgaaggtgcctggaaagttcaaataagatgccctaggagttctttactaaatttcaccaagttgatcataaaatatcagtatgattcagaggaaaaacataagagacaaatcatcacagttttgtgtgaaattgtgagagttgtttaacctctttcatcttcaattcctcatgagtaaaaatattatcaataatacctaccatgcaagtttgccatgaggacaaaacctagagttagtctcaggtacaccaagatggtagcaaaaaggccttttctcatgacacaaggtagcggacattttccccttaatttctcatccacatgcaactgttctaccttttattctttttagagtgaccacatgtcttttaggaaatatcaagaatatagtttcagttttaagattggggatcccaggtaagacaactgcagtagtcttaatttgaggtcagcacaagtcactaaatgttatttacaggttatacaaacgttattatggattatcacacatctcaaaggattccaaaaattgtgtaatatataatatatccttcagctaaatgatctaatttgttaaaatcatcattgctttttcattaacagcatgaggtttggaatttgacctcctagtttaaatttcaaaccttgtctatgtacaatcttcatgctaagttacttaatctctctgagcctcaactaactttctttctctctctctctcttcctctgtgtgtgtgtgtgtgtgtgtgtgtgtgtgtgtgtgtgtgtgaaatagagataatagttcctacttcacaggatttttaaggtaattaaatataataacacatacygatactcagtacatttcctggcacaaagaaaaactcagtaaatgctaaccattgatgctcaaagacatacattgctgctgaggacacagggctctttgtatcccattaacagtttacctggctcgctttttcataagtaaacagcccacatttccccttttcccttttcgttagatgagtaactcccaagtagatccctgagcatcatgggattttgaagtatatttatggtataatttagaaaacgatattgattctacttgtagcccatattgaaaggtatctcaa

SEQ ID NO: 85352 - DNA, 785 bp, Homo sapiens
aactcttagctctaccacttattgctgtgtaacctggggcaagtgacttgagtctcagtttctctgtctgtgatttagagatggcaatatctcccatatagggctacagtctggataaatgaaagaaaatctttaaagctcctagctagggcccagcacaaagcaagcacccaggatatgttacatatttttcactctgcagatttactgattgctcatatgttttaggcatgtgccaagttctgaagatatagcaggagaaacataggcccagtttctgatttgttatcatttctttgtctctggcaggaagttactcattaaataattaatayggcagcaataaatgtagtgagtactggtagcaggggacattacctagtctgggtggggtagggatctatttttaagaatctaatatttaaactcagactctaagaataaagatttatctaggtgaaagggaggtatagaagaataaaaataaaggaaaagcatatatttattcatccattaatgttatttagtattttttgagtgcctaatatgtgccaggatatgtgaatacagcaagaaaaggaccaatcctcatctagggtagcgatacataaaatagattataaaaaaataaaaaatgcaaaagagacttcactttggggctatagaaaaagtccacctgagaagagagatttaaagtgggaccagaagaatgagtagggccaggttgagtagggccaggttgaataagctcaagatggagagggaaaaaactattccaggccaga

SEQ ID NO: 85353 - DNA, 1647 bp, Homo sapiens
ttactcttctctgatttgctttaactttgaaatgttggaaattgcaaatctagtccctaaatttagggtaaattaacaaaagattcatgtttcagctgagcaagttattgtatgaaacttataggtaacagatgtcattagctgcaaaaaccaaaatagtatgactacattcagtaactatctagccatgcaaatgrtagaccaattagattaagatcctaactggtgcatgtagaaagcatttatgcacaatgttttgaccctcccccaaacatctttttctgtctccttacagagataccaaattttcctgaatacctcaaggtgaatactgggaactgagaggctcagtgttcagagttgactactgggaacagagttaacacatttcttctatattataaagaaattttatgaatcttgctctgcctcagaaaggcttttagtaaaagattgttcatgtgtaacactctatttggattcatgaaaattttcaatattccatttaagtcagacacactgaaatgtcaaccaaatttcataaaacatatttgaatgagatcaagcctttcttagctaagaattttatttcagcagtaaatttagaggaaaataagaaatgtgtgtactttgggccaaataacagtgttggccacttgggaacaattcagacaagtgctcttcatcattactcttaaagtagcaatagcaccacatccatttcctggcaccagccggcctgcttttcactgatatgaagtgcagaaggcattgaaacagttaagaagggtgaaataaatggaatacttatatgaagtacaattgttaataaaaagtagcatttgatattgtacaactatagataagatgacaagtgtgagataatatttttactttaattgacaataactttattcacaatatttctatttcaaataatttttttgcttttcatccaatattacctgagctcaataggaatcaataaaatgaatctttatttcaccacaagaattttattcatgcatatgcttaatttgctgaaaatatgtgagccttccatgaaagatttatactttgagtgtgtcattttttgctgagaagtggctctcctgccagaaaactgctattctcaactctgctcacattgactctggtcagcatagtgatgggaagtgatgagtgaataaaaagcaaatgtgtcttccttgaatcttttttcatctattggctgaagaaacagagaatgcagatagaaattttttttaaaaatctaatctctgaataatcacaaagaagttttcttaaccagaaataaaccaaaggggatggtgatttaagcagaaaatgcattattttgctaagcctttgaaattttagagcttattagtatgacaatctgcattgctttaacaaatgtattggtctttcagttttaattcttccggatatgattcaatttcctgatgaatctgaactgagaggagaataacttatttgttaaaattaaagacgcaggaaaaaatatgttgcctaaaataagatagccaaaaagagacagacaaaacagaaagtaaaatgatgttcttcagaagcagaaaagagagaaggagaagacagtttattggatattaaattgcacttttt

SEQ ID NO: 85354 - DNA, 1647 bp, Homo sapiens
ttactcttctctgatttgctttaactttgaaatgttggaaattgcaaatctagtccctaaatttagggtaaattaacaaaagattcatgtttcagctgagcaagttattgtatgaaacttataggtaacagatgtcattagctgcaaaaaccaaaatagtatgactacattcagtaactatctagccatgcaaatgatagaccaattagattaagatcctaactggtgcatgtagaaagcatttatgcacaatgttttgaccctcccccaaacatctttttctgtctccttacagagataccaaattttcctgaatacctcarggtgaatactgggaactgagaggctcagtgttcagagttgactactgggaacagagttaacacatttcttctatattataaagaaattttatgaatcttgctctgcctcagaaaggcttttagtaaaagattgttcatgtgtaacactctatttggattcatgaaaattttcaatattccatttaagtcagacacactgaaatgtcaaccaaatttcataaaacatatttgaatgagatcaagcctttcttagctaagaattttatttcagcagtaaatttagaggaaaataagaaatgtgtgtactttgggccaaataacagtgttggccacttgggaacaattcagacaagtgctcttcatcattactcttaaagtagcaatagcaccacatccatttcctggcaccagccggcctgcttttcactgatatgaagtgcagaaggcattgaaacagttaagaagggtgaaataaatggaatacttatatgaagtacaattgttaataaaaagtagcatttgatattgtacaactatagataagatgacaagtgtgagataatatttttactttaattgacaataactttattcacaatatttctatttcaaataatttttttgcttttcatccaatattacctgagctcaataggaatcaataaaatgaatctttatttcaccacaagaattttattcatgcatatgcttaatttgctgaaaatatgtgagccttccatgaaagatttatactttgagtgtgtcattttttgctgagaagtggctctcctgccagaaaactgctattctcaactctgctcacattgactctggtcagcatagtgatgggaagtgatgagtgaataaaaagcaaatgtgtcttccttgaatcttttttcatctattggctgaagaaacagagaatgcagatagaaattttttttaaaaatctaatctctgaataatcacaaagaagttttcttaaccagaaataaaccaaaggggatggtgatttaagcagaaaatgcattattttgctaagcctttgaaattttagagcttattagtatgacaatctgcattgctttaacaaatgtattggtctttcagttttaattcttccggatatgattcaatttcctgatgaatctgaactgagaggagaataacttatttgttaaaattaaagacgcaggaaaaaatatgttgcctaaaataagatagccaaaaagagacagacaaaacagaaagtaaaatgatgttcttcagaagcagaaaagagagaaggagaagacagtttattggatattaaattgcacttttt

SEQ ID NO: 85355 - DNA, 1826 bp, Homo sapiens
gttgaggaatggaatttacatttctgcacatgttctgggtccaggtataaaagtacacacctcttgaaatttaaccatgtgtccaagaatgcaaatcaccattttctttcttccctttctttccctttctttctttctttttctttctttctttctttctttctttctttctttctttctttctttctttctttctttttctttctttcttkctttttattcctttctctttctctctctttctttctctctctctctttctttctttagtttgacagagttgcactcttgtcacccaggctggagtgcagtggtgtgatcttagcccactgcaacctctgcctccagggttcatgtgattctccttcctcaggctcccaagcagctgggattacaagtgcgtgccaccacacccagataatttttgtatttttagtagagaccaggtttcaccatgttggccaggctggcctcaaactcctgacctcaggtgatccacctgccttggcctccccaagtactgggattacaggcgtgagccaccacaccgagctgcaagtcacaatttcaacagcaaattgaacccatgcatgagagccaaacctcagacagcacctattaggagagttaaagcctaatattggtgctgaatcttggtcagagactcaggctggatccacatattagagtaacaataccaacttctgactgcttttgggtgtgagaatcagaacctcaacagtgggctgtgtctatgtgggagtgtgacaatctttactgttggcagtgtatgcatatgagagtcaaaatctcaacagtgtactgggccttgttatattattactctttgcaccatctgcggcggtagataatatgtgtaagacttgcaatgcactccaaaacatttgtgcctatatgaacccatgatcttactcatttctccaagtctagggatgagattcaccatctcttctattgactggtttagatataagagtcattaccatgcctgtgagctaggtccagcaataagtcaccattttacctgtggccagatccacatatgacagtcaaaattccaactgtaaactgtgtctactagtgacattcaggaccttaactgtgggctctatgtgtgagattgacaattttaactgttggctatgtgctgggctccggaatgacatgctctgtaccaccaaagggcattatagaatatgcataagcttgctcatactttgccatcttaccggaagcaggaggctgaagacattatacattgtcataaatccagctaaaagagtcaaaatctcttctattggttgtgtccatgtatgatagtcatcagcatgcctatgaactggacccaattatatgtcacaataccacctgcaagcagggactaggaaggaaagccacatcacctgaatactgagcctgagtaggtcaatgtcccttctgttggaagagtcctggcaggaaagtcgtatcacctagctgctgagcccactcaatgtcacaatgccctctgtgggaagggccaaggcaggagagtcaaatgacctgggtgctgggtccagcagtatgtcacaaattaccctgtggacagagcccaggaaaaaaaggagagtcacatgacctaggtgatgggcacaaagatatatcacaatgttctctgagaaaagtgtccagaaagaagagttacattacccagatgcttgacccaggtttatgtcactattccaactataggaattgctaagacagaagagccacgtcaccgggatgcttggcccactgatttgtcacaatcctttctgtaggca

SEQ ID NO: 85356 - DNA, 602 bp, Homo sapiens
agagcccattatccttagcaaagtaatgcagcaacagaaaaccaaaagccacatgttctcacgttacaggtgggagctaaattgtgagaactcatgaacacaaagaagagaacaatagactcttggatctatttgaggatggaggataggaggtgggagagaagcagaaaagatagctatagggtcctgggcataatacctgggtgataaaataatctgcacaacaaactcttgtgacacaagtttacctacataacaaaccttcacatgtactcttaaaccaagaataaacgtttttaaaaaattaaaaaattgcacataaatactaaggtttagggttgctggatttttgcaatttcaactatgtcttaactctcatgatgtttaatggtctctcagtgttggagaaaaatactttgaaatacagtgatattgctgctttatagtttaaaaatattttccaattgtctttattctgcaaaaagataattttcataaaagaaatttaagaaaccaaaacaacaacaacaaaacyttgggtcaatatcattgacggccagaactgaaatgaaaagtaagctaaccaatggctcagacaacat

SEQ ID NO: 85357 - DNA, 905 bp, Homo sapiens
tgcattatttgatttgttttacaatctctgtggcagattttaactacattctaattaatttactaatgggatttgagcactaattggcattttacaaaatcttcagaattgtaaaaaaataagatgttgtacaagtcttgtcagaaacaattggtttatctgtcattctgtcaatcaaaaattttcaatattgagaaatttgaaatctgccttgaataataatctaggactagtttgtatgttaaaaacactaaatttcacaaaataaaaattcatctttgagcattatatttttccatttcacctgtcttgtaaaatgaaaataatagccagaaaagcattatattaaatttatctttccttccttccttccttccttccttccttccttccttcctctccttctacctctccttctctctgtctctcttcttctctctctttctctttcactacttaataaraataactgaattggtagcgtttatatctactagaaggagacgtcacaaattctttccagtattagtattatctaagaaatttatgctaaaattttaaaccccacacctgagagagtatattttgttaagtgtaaataaaatcagtaaattatgaagtatttcatgtgatcctgttcagggactgctctgtgagaaaatatctgatgaggaaaattaagcaggcagtggcatgaaagggaaagggcaagaatggacccaaatgcagatccaaatgtaactaaatagatcagttagtctacaacctgccacaaatgtgggttttaattcctaataatgaccctgagttactgcatttttaaaaattatagcctaaatcatcaaatatgtttgatcaatataatgctatagttactaaatttaaagtataattgaacattttta

SEQ ID NO: 85358 - DNA, 1558 bp, Homo sapiens
tcccacctcagcctcccaaagtgctgggattacagagccaccatgcctggccttttacttttggccctctattttcttcatcattaagctcccccttttgttggattatacccaccagcatgtacatatgccttgatatctttaatttttataaaatgccttttctttasccttggcctaccaatttttaaaaatatatgccccattattacttttcctgcagtcacaatatatgtctttaatataacagtgcaccttcacagaattatactcagaggatgagaaggaagataaaataggacaggataaataaggtaaaagaaagatctcaatagctgagaactttcaaaatttctacaaaaatgattactaatatagccaggaaactcataaaatctgaaggaggggaaagctataacaaatatcttatttagataccttgtcatcacacttataaaaccaaagttaaaaagaaagtgttaaaagcaaccagagagaaagcagacatgttatgtgatatattggtgacaataatatggtgtaatggctgacttcttattcaaaataatggaggctgaataacaatggaataatacctgtaaagcgctaaaattttttaaaaaggaaaaaaaaatctgtcaaacctaaaattctatatccaaataaaataaaatatcattgaaaatgaaagttaaacaaatatattttcaggcacataaaggctgagagaattcaattataacagacctgcacaataaatgctaaaagactcctaattctgaaaaatctggatctaattacatatgtggtaggcaatttaataacgtcctacaaatctcacatattcataccattttttttgctttcttctttatgcttcagattgaatactatctgtgccttcaagttcactgattttctcctctatgtggtttactcatatttatttaatgtattctttatctgtacgtctatataccatctatatatctatagatcaatataaatgcatatgtatatatctatatctacatctttacgtatcttatcctaaaatttttattttaatagattctatgtctttgctaaaattgtccatttcttcacaacttttgtcaatattttttgtaaaacccacatggttatttttaagtttctatctaataatttcaacatcttgattacctgtgcatctgtctttattaactctttcttcttttgaatatatattccatttgcttgcttgtttaagtgttctattctttttgatataaaatctttctttgctatttagtcttgctacccagttttgaggttgctacacagtctttgttttctaatcctccctagtgctttctatacttcagagaattatttatatgcatctgcgcttccctcagcagtcacaggatagtcattttattttctgcaacccaagagagtatctttcttatttctcatgtacaacccttagccttccgcaggtacacatcagcaatctttcagatagatttctttcaaccttcctgcctaccactttcctaacttgtggttgctg

SEQ ID NO: 85359 - DNA, 1558 bp, Homo sapiens
tcccacctcagcctcccaaagtgctgggattacagagccaccatgcctggccttttacttttggccctctattttcttcatcattaagctcccccttttgttggattatacccaccagcatgtacatatgccttgatatctttaatttttataaaatgccttttctttacccttkgcctaccaatttttaaaaatatatgccccattattacttttcctgcagtcacaatatatgtctttaatataacagtgcaccttcacagaattatactcagaggatgagaaggaagataaaataggacaggataaataaggtaaaagaaagatctcaatagctgagaactttcaaaatttctacaaaaatgattactaatatagccaggaaactcataaaatctgaaggaggggaaagctataacaaatatcttatttagataccttgtcatcacacttataaaaccaaagttaaaaagaaagtgttaaaagcaaccagagagaaagcagacatgttatgtgatatattggtgacaataatatggtgtaatggctgacttcttattcaaaataatggaggctgaataacaatggaataatacctgtaaagcgctaaaattttttaaaaaggaaaaaaaaatctgtcaaacctaaaattctatatccaaataaaataaaatatcattgaaaatgaaagttaaacaaatatattttcaggcacataaaggctgagagaattcaattataacagacctgcacaataaatgctaaaagactcctaattctgaaaaatctggatctaattacatatgtggtaggcaatttaataacgtcctacaaatctcacatattcataccattttttttgctttcttctttatgcttcagattgaatactatctgtgccttcaagttcactgattttctcctctatgtggtttactcatatttatttaatgtattctttatctgtacgtctatataccatctatatatctatagatcaatataaatgcatatgtatatatctatatctacatctttacgtatcttatcctaaaatttttattttaatagattctatgtctttgctaaaattgtccatttcttcacaacttttgtcaatattttttgtaaaacccacatggttatttttaagtttctatctaataatttcaacatcttgattacctgtgcatctgtctttattaactctttcttcttttgaatatatattccatttgcttgcttgtttaagtgttctattctttttgatataaaatctttctttgctatttagtcttgctacccagttttgaggttgctacacagtctttgttttctaatcctccctagtgctttctatacttcagagaattatttatatgcatctgcgcttccctcagcagtcacaggatagtcattttattttctgcaacccaagagagtatctttcttatttctcatgtacaacccttagccttccgcaggtacacatcagcaatctttcagatagatttctttcaaccttcctgcctaccactttcctaacttgtggttgctg

SEQ ID NO: 85360 - DNA, 749 bp, Homo sapiens
ttttacttaaggcattattctctgtgttagatatttaagaaattttaaggttttatccttagataaataatatgataatagaaaaatttatagaataatatttgccaatattcatgattcattattttgataatttctaatatgtgaaagctttttcattcaaaagagaagacattttctaaawataattctttgttttttaattatataattaatatcttccttttaaatgacaccactttagtttcattgaaactgtcttgaatttgttatataaaacttatttaagatctgtgacaactttttaagttttaattactgaagaagtttaaggttcacagtaaaattgagcagaaaatacggaaagtttccaaatgctccctgccctcccacacacttagccaccttgtctaccaacatccagccccaaaggggtacatttgttatcatcaatgagcttatattgacatgtcattgacacctgaagagcatactttacattaagttttcctcttggcattttacattttatgggttttggcaaatgtatccactactgtagtatcatatggaataactttgctgtcttaaaaatcccctttgcgctacctatttatccttcttcccaaaccctgccaaacactgatcatttttctctctccatagatttggcttttctaggatgtaacatagttgaaataatatagaatgtagcctttcagagttgcttctatcacttcatcatatgc

SEQ ID NO: 85361 - DNA, 1490 bp, Homo sapiens
ggtttagcctgtgtggggaaggatcagggaaggcttgaggttgggaatagggtgaggctcagagacaggacctagatcaagcttcagatggggatcagtgattgatgttgaaatcaaagctgggatgggggcagggatggggtggcagcttgggatgaggtcagagaaggatgaatgccaggaatcggtagagatctacaaggagggagagtgagagtcagggtcacagtgaggtgttgggaacagggagattcaacatggagctgggaccagatatggagagtgagactttggaatgggataagtgtgggggagtggtgaggctcagggagggggtgtcaggcctggaatgaatatcagggaaggcttagtagctataaggctggagcagaagacgtgcctggtagggtcaccatcctatctggagcatcatctaagatcctcttccggggccaaaagacagaggctcctcagtctgtcctgcttaagactctccaggcaggtgagtgaggagggagttaggcactcgagccctaagagatagacctgattcagcagagaagacaagaaggatgcaaaggatgcacagagaatctagggcagaaggctgagaactggggcctccttttcctctcctccctccgctgatctccctccacctctcctactgtttcctcaaagtccaacttcctccttcttcaccttatgctyctgcaaggacaactccatcagaggcttcagtaagtaaatagggatccacactgggtccaggggaaatgcaaatgactcataacctcatgaaaaatgctcagtctcactaggaactaaatgaggctcaaacagcaacaaaataactcagaagtgttttaaacaggggagggatatagtggactcttcaaacaagtgcaacatttttcgattggattttttttttttttttaatgagacagggtcttgctctgtcacccaggctggagtgcagtggtgcatacacagctcactgcagcctcaaccttctgagttcaggtgatcctccaacctcagtttccagagtagctgggaccagagctgtgcgccattatgcccagataatttttaaaattttttgtagatatggagtcttgccacgttgcccaggctggtcttggacccctgagctcaagtgatctgcctgcttcggcctcctaaagtgctgggattacaggtgtgagccactgcacccaggctgattggaaattctaatgcagcctgtaattttctgggtatagctcaagacacaaatgatttggatttcagatttttaaaaaatgtcaggattttggtacttagttaacagcatattgaagtaccaaaaactgatatttcaattactagatagggtgaggattagatccagtcagagccagggagagtgtttgccttaaggagggactcccttgtccaggatggggctggcactagggatggggtgaatcttaggacaggagtgg

SEQ ID NO: 85362 - DNA, 1944 bp, Homo sapiens
cagccagccattaggtgacaggctccagcgggccaggtctcgggcaccctgcacccttccccccatctgtccttgtagccatcacagctcagtgagcagcctccgggtaggacttccagcccataaacttgactcgtctttgctccacactagcaacagggtccttcctgggagctggagggaggagagaagcagctggagggcacgtgtggcagtgaacrtggagatgccagcagcaaggagagggactcccccacacccccaggcctgaggctgagcccagaggagagggaagaggagtctgggcagagtctggcttctctgtggctctcatctgtccctgtccttcccgtcattccctggtctcagtcctccagtgtcatggctctgctgccacatcctggggacagggggaggggtcctgggtcctgtgggaactcctgcttctgtcaacaggggagcagctgctgttgctaggatccaagtcaataaggaaaggattcatacctctcccctcctccaggacaggggatcagggccccatggctgccctgagctgagaggaaggaagatgctccccttccttcccaggttcccccagcaccctgagcctgggcctccaaggccttatgccccctttcccctcccctaagcatgttttctctttctcaatctcttccagtgccctccacccaggatgtcttttcctctctagaggccttgcagtttctgttccctttcccagggcatcatcaactctcttaagtcccgtgagactcagggtccattaccccaaacctggcctgagctggagctcccagccctaatcggaatgattccccccaacccacctccactagaacagcgacaaaggcagggagcagcccccaggggtgatttcccagcagggtgcaggctgtaccacctgcacacccccgagggtctggtggcttgggctgggtgtagtagcctctccaggatctggggtttgggggtttgggggagtagctactcacatggctgttgggagcaggtattgcctgcccagcctgggccttcctgagtgtcagggagttgctgcagccagccctgcagcggtttggaccatgtctggtgtcctggctgaagagcacaagtggaccaagtgcatggtgtctccacccagtggggacagcggggccaggctctcctacccaggctctgcccgtctgggttctcagagggatagagaaatgaggctggcaggactcagccctggccccgcctctgggagggtgggacctgacatattccaaactgcagcactgggggaggcctgcctccccctcccacccagttcccctctccccctgccacctaggtggcagtttccctactccagctcggagtaatctgagaaatgcattccagttaatgaataataatgattgacttacccctcccgacttcccgcctcagctgatgcatttacatttaagcccctggactggccagccagctgacagcacaccaggctccctccacacttccgtgtgtgatggtggcagtggcaggtgtttggggcctgaggatcttcactcccccatcccatcacctgatgggcctttcagtttctaaggccagacttgccttcctgaatctggggtcattccacacttttctcaactgctttctgagtcaagttctgaactatgagggacaaatggctctggggatgtgaccatgggtaaggtactactgggcctcggtttttgcctgtgttaaaatgggaacaagaaaaaccacctctaattaaggtcgtggtggggaatatcacaggataacacatatggcggcatataccccagtgcatggcccttgatgggtgggggtttgccccaacaaatggctccctctctttcctcccccatgatgaagaggcatgagctggcgctggaatcagag

SEQ ID NO: 85363 - DNA, 736 bp, Homo sapiens
agaaataatggaataatggcaactttatatcctgaagggaagtataaatactggatagaaaaggaactcacctaaggggagcaagtgggtgcataaagttgatcttggatacagattggtggtgagcgaggaataatagactgagccaagtccaaggcagggtctttcaaatggtcttctggtgtgagctcagggaattacgtgaagttccaagggagatgggggckgtggggacctgaaagatgaaatcaaggtaaagagcagagccactagagatgctattgggtaccacaagtgtctggagtttcatacacttgagaggagggtacttttcctacattagaggcttgtatacagtgactgttggagtgaaagggtgacctgctcctaacagccatcttaaaatggcatattcaccatggcaagacaatccaaattccttgtaagattcagcacacaggtgctagtctctacttagttctgaaccagttccttgacctgtatttatacctggttccatgttgctcctaaccctgttggtctccgacctttgtgaggttcttctgtttatccagcctgcctcacttgtttgacttgacactgcactgctccttcttggctctgatcccaggcccttggcagtaactctggttgtctactctactgggcctcttcttacctctaccaaacctccttgccagtacaccccaatctcactacaccctttcctttggct

SEQ ID NO: 85364 - DNA, 700 bp, Homo sapiens
aatgtaaactgaaaacaaggtgctgtcaaatactgtcaacttaacaaccttgattaaaactcaaagaataaagccatcaaaaccccagaaaaccaatctagaaaacaaatttgtccaattagtttagaaaatcagttcacacgcgctttggggccacctaaataggattacatttgtgcgtgattgacaatgagcattaagccatagatggaagcttgccctgggctagagagggtgataatatggaagactttattgcctgaagagtctcccctactgtagccttcacccatgaaaacttcactttaggtagattgtagagatgtgtacattttaaaggctttaaggcattctcctgtgaaaagtcaatgtgwcatatttatccctcatgttgctatagctatggtccttttctaagcactttcgcatccatttgctcatttgaacacagcatgaccctgtggagggtcccggctgagaagcatgaagggtgggatggggcccaaagcctgccacctacttgcagtgtgggactcagaggagtctgagtttagctcaggattcctttcaggaggacttccctgattatcttttcacaggacagcctcttcatttctgtaagcaccaggcaatctattgagtactttgaggaacttcaaatgagctaatggccctgttgtggtcaggagtgctggcctca

SEQ ID NO: 85365 - DNA, 687 bp, Homo sapiens
cctgctagaagggctggagtcactctacacctcttccctgaccacctcttccctccaggggctcacatgcctgttgggtggaacgaagggagcacgagcaaacacgcatcaccatgcctcgggagggctgggtgcactgagtgaagcarggcaggctgggagggatgggaaggaccttgggaggcggggagccacgcatctcctatttccaaagtcctcctccaccctgctctcccatcaccacttagagagcacaaaagggtgtttgaggtggaacaagtccatgagctcctcaccacctcctcctcccagaaccaggccttccagtacgagtttggagccatgtatgcatggatgctgtgtgtcttcactgtcatcgtggcctacagcatcacttgtcccatcatcgcgccatttggtgagtggccctggagcctgtcccagggtacatgggtacatggacggctgattgcaccaaacctctcggggacagctatcaccagggcacaatggagttcccaaaaccacagccacaagagccacaagctgctaaagactcacgtgacaccagatttcactcatttctttctttttttgttttgagacagggtctcatgctgatgcccaggctggagtggcatgatcttggcttactgcaacccccacctcctgggctcaagccatcct

SEQ ID NO: 85366 - DNA, 677 bp, Homo sapiens
tggctgcatctgggctggaagagggggcagcagccaggctgtgctacaaacccacctggagccacttcctcgctgcttctgcccatctcagcctcagcagagaaagaaggcttgaggacaggcctggtgcagcctgactcatctcatgagagacccggcctgtgctcagagtcgagttgctgtggcttctcatgcaacactgatggtccccctcccctgctcacccaccatgtgttagacacggggatctgcatgaaagacacgtgttcctccccttccagagacccaccgaaatgagggtgatgcagagtgaggagtggggagcacagtggcaggctgctcccctggagaaacacccagagaaaggggttccaccactggtatccaggagcacccagggccgatgggcagaagaaaagctccatctcagcagagcagccaaccagcttccctcataaaagtgaccagaaaaccagtgaccaccaggcatcyggaaaacatatcaatgcagaaaaagagggagaatgatgctagaggaagccgacagtgtgggaaaaagacaaaaattaggagaaacatctaatttgtgtcttcctaggcatagatggggatttaaaacaagaacaggctgctatgaacaaggaggcatcagacaaaaagaaagagtgcctggaaat

SEQ ID NO: 85367 - DNA, 782 bp, Homo sapiens
tcaaatagctgctgcatgcattctgtcttagttttayggctgctgttcagtgggagagacatcgagtagagtgtacgtgctccatattatttggaaccagaatctgctttctaaattttaaaaagttatcttgtgaattgcattgttgcatggtaaatgcacctgacagcaataacttaacacacctgagaatgaccctgtatggcagacacacctgaatgtgtgtgtggcgctctgaagtaaggaatcccaaagtgctgaactccgaaattcattccttatctatgaggaacatctgagccccagcgcatcccatggaacatgggctttatgaagggattgaggccttttgggttaaatgaggattgccacatgggggttgcaggggaagggtgctaagtgaaggtgctaaataaactacacgcttcctgcacgcatataaaccacacgcttcctgcacgcatatacaccacacgcttcctgcgcgcatatacaccacacgcttcctgcgcgcatataaaccacacgcttcctgcgcgcatataaaccacacgcttccttcagtggcagcagttctcccatccgcctgccatcactgcactgccctgtatgtaagcccccttcgatcaaccccatatttcatttgctggctctgggtctcttcctcggcctctcaaacctggtgccatcctgttggagttaataagggtccagcaagacaattatataaggaaaatagtcaatattctattaatagtttgatattttttgaggcttgtttt

SEQ ID NO: 85368 - DNA, 756 bp, Homo sapiens
ctgcgcctggccaggaaactttgctttaataatgtattggctcagattgcaagtcattaatttatttgttcaacaaatgactgttttactactgccttgtaagtgccagacaaatgttaggcatgtgtaggtttggggacaagggggatagattagggatgaaataatgatctagaagacatccgatgtgccatgaaggacccaacatttaacaggccacaagaggaaagagacagacatgtaataaatgattttacttcaactcattaagtgtttcaataaaagtagacataaagtcctgaggtggcaattactagggattggccaactgtggctcaaggaaccaggaagtgccttatggaggagcctaataattatgatggttctgctgtcctttgtactattgtttaagattcatgcccaatctaatacctgatgacstaatctttttattgcttgtggttctccttgaggaagatgatgaagagaggtgaaaactgcttcagccaccctccccccgaggactgctgccctgccttattttccttaagtttctgtaccatgcctctgacagaagagaaagtttatccctggggaggcaagtggagatgaggcctagcattccatatggagatcctggatccccttccttttgcccaatatagacctggggaagagttcaaggaagtggagaaaacagtacgtttccaaaggcagagctccttcatctgggaaactccctccaggggctggcta

SEQ ID NO: 85369 - DNA, 573 bp, Homo sapiens
aggatgaaaggaggttttagggctgcctagcaacactatgtttatacaatggtccaagaacatggagagaagaagagcaaaaatacaaaaatctgtttctggagaggggctgccagggtgactatcaggcggccccagcctggagcaggcctccccaggccgagcccgggcatgtgacacccagactccgcaggctgtgtgacatgggaaacaggcctggtgggtcccagattgccccagcgcccgccactaatcacagccatcctcggcttctccattgttttcacagctgttcaaccgctcctgctcagtaaggggacagacaggccgactccaaatcatggagtagaaaataacactctgtcgccgtctcaaaaaaaaaaaraaaagaaaagaaaagaacactctggccaaagaaagggtgcacaaaaaaggattttattggtgggggcggggcagggggatggtgtcagggagatgggaaacgtacaaaactcttaacccttttattggcttgatcaaatgtgactgttttcaaaagagaagagacagaattcaaattgttttgtagtt

SEQ ID NO: 85370 - DNA, 614 bp, Homo sapiens
cttccaataattcaacctggtccagcagtctgtggactgatccagttatagcctcaaattcatttcagataagcattcaatcccatgtagagattagcatcctccttccctgcctcctgcattaagctgctgcaagggccattgagacagaagagaagggtgacttgttcaccccagaccattcattttgatcatcttgtactttttctttctcctccstgttgtgtgctaacatgggggctgaggtggtaagggggcagtctgtttcccaggagaacgtgcggggcatatttatgagttctggtgacctttatcatttttttctcactgctcatctactcatggtctctatattcacctgtgacaggtaggcactaattgttttagccagcatggacatggccttatgcagtgacgcccaagacactgtgaaacatcttcagtctgactccagcccataatcttcaatatctgcagtagtctctagcaaatgtgtagacctccaatctcctcgccttcatcatcctgtacacaaggccgatggaagcagatgggattttccactgttccttgagtgggatggtctttgccccttcttctgtctccaaactcca

SEQ ID NO: 85371 - DNA, 1042 bp, Homo sapiens
cttggtataattctggtgcatgatgtggtaggtatcattgttccaagcaacttaagatgacccaagtaccaagcactgctagcctgattgaggacacaatttatcttcctttaccttaccctctgtgcactgcaatgaagtatgcacccagaatgcgtcccttacatktcagaatcttaagataatggctttaggaagaacacatgaatgggccaagagctgctgcagtgaaaaatgctgacatgtaccagaggatagtctgaggcaataaggttcacattgctcttttgaaatgtaatcaccagaaactcaaaattaagaaaaaaaagcttttaaaaaatttttaagagaaaaatacagtcatttatttaataatgaaagattctataaagttattgaatgttttatcatttaaaataacttttaaaaattatacttctgaagcatttaaaccattatgtagttctcaaaattgtattggtcattttctctctgtgacatttgtaaatatgtttgaccaaataattccaatttaactatacttgcaggtaacaattaagcatgtgttttccatgttcttccttttgactatttaaattttaagtttgatttttattttattaatgtgatttttggcttcagccaattgagtttttaatcactgtagtgtttgaaatcactggaagcttctcaaaggagaacaatataatgggaaaattaactcctaaataatttctatgcaagtctatgggaattttcttctattaaagaattacttctactttttacggcagctgaaaaaaaaatccacatttttttccttttgttaaatcttcagagtgccagaactcaaaaatattttttaaaaaatgaaaataaatttgaagaaaaatcacagactaaaaacagtgcaaaagacagccatatgtcctttatccatattttactgttgttaacattttgccccatttactttaccatttcttctcttttttccacgcacacatgagcgtgcatatgcacacacacacacacacacaca

SEQ ID NO: 85372 - DNA, 2159 bp, Homo sapiens
cggtgctgggcagtatagaccatatgtcagtggaagctccagaaaatctctagaaataaacaaagaccacccaaattagaacaagcagaggctacttattcagagcttatgacagcaagggagtcagccaccaccacttgaatttggtagaggctcaagtcaggtaaggaagtggaaatctttatagtgaaaaaaaagacacaaagcttcaagtgtgctttgataggaggttgttgggattgggaagctggaggcaggataaatagtggaaggacatcttatgtcattggtttggggagtatatttggctctccctagttggtcctgagttagcagtggaagaaaaaaacacggaagttggcagtcactgaccaagtcctgggtggattgctccagagttagtagtttgctccagagttagtagtttgacttcccaggttgcttgctrtagagtttgtaggtcagaaatctattgtcacatttggtcaggtcattgtttatattttcagtttctcaatcttttaattttctagttcattttccactaattgtccctgctctttgtacatataattacaaacatttggcacaacttaaatgttgaacattagggtattattgatggctatttaatttctatcatctaaactcctaatgttggccatttagaattcctcggaatcagttccaagtggagaggggaataaggatgcagcttctctggcctctcaaataggctggctccagattaagtaaattatagcccaagaaatactgactgggtcttcagcaacacaggccactggaaacgtagggaaaatagaaataagtgggaggagatacggaataacaataatagcattaactattatttttaagccattgagtcttcacaacaacacttttaaaggtgaatctttattatttctactttacagatgaggaaactgaaccagagaggttaagtaacttacccaagatgtacaactagtaagtgacagagtaacaagctcttgagcatgatgtttttagctaatgtaacaagggaaaccatgcctgaggacagacaaagcaagatcctgtcatgattaagacaaccagattgggagtccttcagacctgagttcaaatcccagctccagcacatattggcagtgtggcctttaacaagcccattaacctgtctgaactctgaattcctcatctgcaaaatggggataaaatatccagagccagatgaaatctatcatgtcttccaggcagttatttatgatgcctcaaaatatcattgaaaataaaatgagatgggagaaaaaaaaactatttctcagaatttttttcacagagaagaaatatctggctagaagaaatattttattcaattgctgagggagaagaacagtattaagtaacaataaacagtaatagttgccaaaccaccttctaaggacaggtgtgtctggttaacagtagggtttttgtttggcagagtgctttatgaattcctgggccagagcttaattgttctgtaaaatagaagaattgctgccatggccaacagggatcccctttatccactttgccacactacattcaggctctctataagtactagggattttaaaggatcaatttgaaaaggtacaaattattggactgccacaatacccacgtgccttggtctggcccagctcaggcttaactcatagaaacattgtaaagatgaagtgatattaggtaaaactatgcaagtgccaatacttaactgtttttaattccccaaaaacagtaattgcatgtggctcaacccaaacgtaaagtattgaggctactgtaattcaggacctgaaccagggtaattcttcgccaagggtaattcaattgccaagaagaaggtggctaatttcaacagagagcatttaaggttcaatctaacagatgggtaattctcaaattctggtgaacatcgacatcatggcttggaacttcagtccatttgaagccgaatgtctatcctgaggtgtctggcacaggacacagcacccagaacagggttctagtaagagtgaagctagattgtctgagtttcccaaccagcatactggggttcggggctgtatctgcatttcatgaagaaacagaagtgcaaaagacactga

SEQ ID NO: 85373 - DNA, 1131 bp, Homo sapiens
  misc_feature (1)...(1131): n = A,T,C or G
attagaatatagacattatttggtagacaacagagagatagcagagggctttatatacatgctgtgtgagtccttattatttaacttttcattcatttattccatgaatatttattgaattgccattaagtgtcaggtttatatttagaaagataacacttggctgggtatggtggctcacgcctgtaatcccagcaccttgggagtccgaagtgggaggatcatttgaggtcaggagttcaaaaccaacctggccaacatggtgaaaccctgtctctactaaaaaaaaaatacaaaaattagccaggagtggtggaaggcacctgtaatctcagctacttgggaggctgaggcaggagaatcacctgaacccaggaggtggaggttgcagtgagccgagatcaccccagggcattccagcctgggtgacagagtgagactccgtctcaaaaaaaaaaaaaaaaaaaaaaaaaaaaggaaaagaaacctaacccttacaaaaataaccctaataattctaataataattattaaaagcaaacattgattgagggcgggcctaggaatttctaagtgttggataaattctttctccatttgagtaatattaagtgtaaagcaaggttactaggcatccttttaaatgaraacacaggtacagaaaggttactgagccaagctcaaatcgcatcactataattcaggatcccacatttgaatgtaggcagggggaagtccgaacttgaaatcttattgtccctttgcaaaaaaacctgcgggnnnnnnnnnnnnnnnnnnnnnnnnnnnnnnnnnnnnnnnnnnnnnnnnnnnnnnnnnnnnnnnnnnnnnnnnnnnnnnnnnnnnnnnnnnnnnnnnnnnnagaaatggaaaagtaatagcaatcatttgtttagattattcaatgatacctagaatggaagccattgaagatactgcctgtattgtagtaaattacctggtttaaatgctggagttttgcttgtggtcaggataaagtagttaatcacaacccctgagatgcaaatataaattgctatagaactgaacactgtatttgagaaaatagctactaggctttggacaacaggacaagatcaaagtcctgtaatt

SEQ ID NO: 85374 - DNA, 922 bp, Homo sapiens
tttccagcttctgatagttccaggcttccttggtttatgagagcaaaaactccaatctttgtttctatcttcaccagaccttctcccgagtgtatctatgtgtcctctgcgtcttatagggacacaaatcattagatttggcacctaccataatgcaggatgatttcttcttcagattcataccttatttacatctgcagagaccctattcccaatcgggtagacatgaattttggaggatactattcaacccccttcagtgacctcttaaatcaagggagagttttgtagcttgaatttgtggggtttgaagtctaaaacacagaacagggtttaggttctatgagattttaagcatatccaaattttctaatcttctggagacagtaagagagtatttaattttgtattttgcttttgttttatttatataatagagatgcaattaaatgctgtccaaataaggattaatttgaggattaaataaaaggtcagtttcactaaaaccaatgagcatttggcatggtagatataaatgtaacgcggaggtactaaaatgaggaaagttcagctgacactatayacacacacacacacatatatatatatatatatatataaattttttttttttgagatggagtctctctctgtcacccaggctggagtgcagtgacgcaatctctgctcactgcaagctccacctgccgggttcactccattctactgcctcagcctcctgagtagctgggactacaggcgcccgccaccacatctggctaattttttgtgtttttagtagagacgaggttttaccatgttagccaggatggtctcgatctcctgacctcgtgatctccccgcctcggcctcccaaagtgctgggattataggcgtaagccaccacgcccggccgcacctg

SEQ ID NO: 85375 - DNA, 718 bp, Homo sapiens
tttttttttttttttttgagatagggtctcactctgttgcccaggcagtggtgcaatcttggctcactgcagcctcaacctcctgggctcaagcaattcttccacttcagcctcccaagtagttgggaccacaggcatacaccaccatgcctggctaatttttgtattttttgtagagacagggtttcgctacgttaaccaggctggtctcaaactcctgggctcaagcaatctgcctgcctcggcctcccatactgcttggattacaggcataagccaccatacctggcctattttttgtatataaawaattttgaattttaacatgggtattgtgaatgttatctcgtgaggatgctaggtagtattataatcatatagaggatgataatgttttgttctagcaggcaatcagcccagataggttcagattgtgaattccatctcctcttctttttgtgatggctcaaatctcaatcatatctctaactctactatgttactttgggtctgatttatgcctgcatagctcagggaatggtgtgagacacacgtgtttacttttgattttacttctgttctctaagcttttggtacattggtttgggtgtcttccctgcatatgtaatcctggagtaagttggagactgagcagcagtccaaatctcagttcagcttgccaaacctctgttatactggtttgggtctctctcacaca

SEQ ID NO: 85376 - DNA, 658 bp, Homo sapiens
  misc_feature (1)...(658): n = A,T,C or G
atcaccaactgtagttcttacacatacagttactcaagaaatggttgctaaaatgtctatagctgtatggaatataaaacaatatgtctgtggttcagaagctcttcatcgtatctcatacagggttaaattcagaatcaaacaataaannnnnnnnnnnnnnnnnnnnnnnnnnnnnnnnnnnnnnnnnnnnnnnnnnnnnnnnnnnnnnnnnnnnnnnnnnnnnnnnnnnnnnnnnnnnnnnnnnnngaaatgtacaggaagattttcaatattcccagcaaaaaaatgaaactctcccatggtgccatgttgtccaatgctctgattctgtttttaggtctttttttccagttttattgaggtataagtgacaaatttaaaaatgcatctattcaagatgtacaacatgattatctaatatatgtataaaatattaacatatttaatatatgtatacattgttaaatgattaccaaaatcaaattaacactgtgttaaattaacacaaattactgtgtgtgtgtgtgtgtgtgtgtttcaggtaaacaatacagtattattatctatagttactatgctattcattagacccctagaacttagtttacttataactgacagtttgtactttataacaaaygtctccattttcccc

SEQ ID NO: 85377 - DNA, 638 bp, Homo sapiens
ccttattatttaacgtttcattcatttattccatgaatatttattgaattgccattaagtgtcaggtttatatttagaaagataacacttggctgggtatggtggctcacgcctgtaatcccagcaccttgggagtccgaagtggggggttcatttgaggtcaggagttcaaaaccaacctggccaacatggtgaaaccctgtctctactaaaaaaaaaatacaaaaattagccaggagtggtggaaggcmcctgtaatctcagctacttgggaggctgaggcaggagaatcccctgaacccaggaggtggaggttgcagtgagccgagatcaccccagggcattccagcctgggtgacagagtgagactccgtctcaaaaaaaaaaaaaaaaaaaaaaaaaaaaagaaaagaaacctaacacttacaaaaataaccctaataattctaataataattattaagagcaaacattgattgagggcgggcctaggaatttctaagtgttggataaattctttctccatttgagtaatattaagtgtaaagcaaggttactaggcatccttttaaatgagaacacaggtacagagaggttactgagccaagctcaaatcgcatcactataattcaggatcc

SEQ ID NO: 85378 - DNA, 638 bp, Homo sapiens
ccttattatttaacgtttcattcatttattccatgaatatttattgaattgccattaagtgtcaggtttatatttagaaagataacacttggctgggtatggtggctcacgcctgtaatcccagcaccttgggagtccgaagtggggggttcatttgaggtcaggagttcaaaaccaacctggccaacatggtgaaaccctgtctctactaaaaaaaaaatacaaaaattagccaggagtggtggaaggcccctgtaatctcagctacttgggaggctgaggcaggagaatcmcctgaacccaggaggtggaggttgcagtgagccgagatcaccccagggcattccagcctgggtgacagagtgagactccgtctcaaaaaaaaaaaaaaaaaaaaaaaaaaaaagaaaagaaacctaacacttacaaaaataaccctaataattctaataataattattaagagcaaacattgattgagggcgggcctaggaatttctaagtgttggataaattctttctccatttgagtaatattaagtgtaaagcaaggttactaggcatccttttaaatgagaacacaggtacagagaggttactgagccaagctcaaatcgcatcactataattcaggatcc

SEQ ID NO: 85379 - DNA, 576 bp, Homo sapiens
tccttcttttacgttgtgaaaggaatcaacaggccaggctcatcaccrccggcaccgtcccattcatcacagacacacgtgcgcgcacgagcctgtgcaaggcccatttaaaaactcatttcaactgcggagaaacataatgggtacggaagaggtcaattcaggcaaacagatgaggcaagcattgcctgtgatattttaagatgataattaatcacccttaatatcgcaaccatctaaatattgcagacatttgctctctatccttatctaattctgattacttctcataaagagattcattttgaaaatgaccatttccttaatgtagtggaaatacattttcaattttctatctgcttcaaacatatctccaatgaatctgagatttaatttagtcagtaagttgctgaatggggcaaccaagatgaatggattgaataaaacagttccatcatcattcttttcttctgctctaattattagaattagtcataagatatctgcacatgtaaaaaattaacatggggaaatttgctccgggccaaaaagaaatcaggcaaggtataaatagaa

SEQ ID NO: 85380 - DNA, 576 bp, Homo sapiens
tccttcttttacgttgtgaaaggaatcaacaggccaggctcatcaccaccggcaccgtcccattcatcacagacayacgtgcgcgcacgagcctgtgcaaggcccatttaaaaactcatttcaactgcggagaaacataatgggtacggaagaggtcaattcaggcaaacagatgaggcaagcattgcctgtgatattttaagatgataattaatcacccttaatatcgcaaccatctaaatattgcagacatttgctctctatccttatctaattctgattacttctcataaagagattcattttgaaaatgaccatttccttaatgtagtggaaatacattttcaattttctatctgcttcaaacatatctccaatgaatctgagatttaatttagtcagtaagttgctgaatggggcaaccaagatgaatggattgaataaaacagttccatcatcattcttttcttctgctctaattattagaattagtcataagatatctgcacatgtaaaaaattaacatggggaaatttgctccgggccaaaaagaaatcaggcaaggtataaatagaa

SEQ ID NO: 85381 - DNA, 575 bp, Homo sapiens
acagtcgccctgtggtgctatcaagtagtaggtcttattcattctttctaacaatttttcgtacccattaaccatccccaccttccccccagtcctccactaccctttccagcctctggtaaccatcttctactctgtgtccatgagttcaattgttttgatttttagatcccacaaataagtaagaccatgcaatgtttgtctttctgtacctggcttatttcacttgacataatgatctcctaatttcttttttgagtccattcaattctagaacatctccttattttttaaactattttgtagacacaaggttttgtcatgttgcccaggctggtctcgaactcctgagctcaagtgatccacccacctctgcctcccaaagtgctgggattacagatgtgagccaccrcgcccagcatttttttttctttgtttttgtcttttatctcacctgggacccatgagattcatttttaaatactcaagttaaaaaggggagattgaggtggaagaagacatgaaacaagattgtttgtgtgttgaaaacctctgggtgatgtgtacatggatcc

SEQ ID NO: 85382 - DNA, 720 bp, Homo sapiens
atcgactcctttctcatccgcatgcaggaggtacatcccagcagccagtgcaggcaggtgcaaagccagggagagggaaatcaggatgggagtggggtgggcagacgacacaggcccattcaaattagccctcgtcataataatccttacaattggccaggcgcggtggctcatgacctgtaatcccagcactttgggaggccgaggcaggtggatcacctgaggtcaggagttcgagaccagcctgrccaacatggtgaaaccccgtctctactaaaaatacaaaaatgagctaggtatggtggcatgcgcctgtaatcccagctactcaggaggctgagacagaagaattgtttgaatccgggaggcagaggttgcagtgagccgggatcatgccactgcactccggcctgagtgacagagcaagaccctgtaaaaaaaaaaaaaaaaaaaaaaaaaaatcctgacaatcccaactacatcaaccactgctgttccatctactgagccctcacccacaagcacgacttatgcacgtgcattagaatagcaagcacttctacagcactaccgtgtgccaggcactgtgttaagtgctttaagatagtccgccatggaacacttataacagctcttgaaggaggttcaatcatggccccaattgtacaaatgaggaaactgaggcccagagagtttaagtgtcttaactgaggtcacaca

SEQ ID NO: 85383 - DNA, 867 bp, Homo sapiens
tccttgagaaaacctggctctgtcaagcatttataaggaagacttataggggacattcatttgcaagctcctctttggaagtttgaatagtgaatgtatgtgacagacaaataacaactctagccacagctaagagatcaaaatgctttatgtggtgctgacattcaccaagtcragatgggaggaggggaatttccccacgcagattaatggataaattagcatccatcaatttctaaggaaggaaaaagaacacctctgtattctttttaaagaatactttgccctccccatcagattgtagtgcaactcaacacctttcacatcctattttgaagaaggaaaaactttctttttttttttttttttttttttttgagacagagtctcactctgtcacccaggctggagtgcagtggcacgatctcggctcactgcaacctccacctcccgggttcaagcaattctcctgtctcagcctcctgaatagctgggagtagggacacccgcccccacacccggcaaatttttgtattttcagtaaagacagggtttcgcctttttggccaggctggtctcaaactcctgacctcaggggatccaccgcctcggcctcccagagtgctgggattacaggcatgagccaccgctcccggccaaagaaggaaaactttctagggatggaaatgtccacatgactttaatctttgacaatcctggatatcgaggctttattctttctgatctttgcccccttctccaactttctcaaccttcccccacctctcctccagcagtttgggttttttttttttttttttttttcctttctctcatgtgcaaagctgacttcctaggaaaaagctg

SEQ ID NO: 85384 - DNA, 867 bp, Homo sapiens
tccttgagaaaacctggctctgtcaagcatttataaggaagacttataggggacattcatttgcaagctcctctttggaagtttgaatagtgaatgtatgtgacagacaaataacaactctagccacagctaagagatcaaaatgctttatgtggtgctgacattcaccaagtcaagatgggaggaggggaatttccccacgcagattaatggataaattagcatccatcaatttctaaggaaggaaaaagaacacctctgtattctttttaaagaatactttgccctccccatcagattgtagtgcaactcaacacctttcacatcctattttgaagaaggaaaaactytctttttttttttttttttttttttttgagacagagtctcactctgtcacccaggctggagtgcagtggcacgatctcggctcactgcaacctccacctcccgggttcaagcaattctcctgtctcagcctcctgaatagctgggagtagggacacccgcccccacacccggcaaatttttgtattttcagtaaagacagggtttcgcctttttggccaggctggtctcaaactcctgacctcaggggatccaccgcctcggcctcccagagtgctgggattacaggcatgagccaccgctcccggccaaagaaggaaaactttctagggatggaaatgtccacatgactttaatctttgacaatcctggatatcgaggctttattctttctgatctttgcccccttctccaactttctcaaccttcccccacctctcctccagcagtttgggttttttttttttttttttttttcctttctctcatgtgcaaagctgacttcctaggaaaaagctg

SEQ ID NO: 85385 - DNA, 731 bp, Homo sapiens
cggctgaggccagcgctgggggttggggctgtggttggccagggggctcaggagctgggtggctgtgaggatgtgggtgaccaggccgggggagtggagcaggtgactccgactggccagactgaacaccgcgtgcaccccacctcacccggcaatgctaaggcctggtgggccaagccttgaaatgggtgaatttctgccaggctggagcctttccttggtgcaggggccrgagtcctgggtgctacagcggtgtggctgagcggccccctgggacggaggagaggtcgggtctagaagtagcaagcccctggctaggagtcactgatgccactgggggcagggtaagatgtccaaagcccgggagacccagggacgccggctgggctgcctccaccccttcttttcctcccgtggcacccacctgtccccccacctgccaaggccaggagggagggagagagctgaaaagggcacttttcctccagggtgactccaattcctttccactcaccctcaaggcgagttccttctctcccacccaacccggggctccccccaactgccactcgcctcacgtgtgagttgttaaacccgaaagcagaaatcccctgccctctcccttcctgtctccccctttccgctgcacccctacctacccaatttttatctcgctacaatcaggggttttctcaaccggggaaaaggtggtagtggcggtgggagggtca

SEQ ID NO: 85386 - DNA, 731 bp, Homo sapiens
cggctgaggccagcgctgggggttggggctgtggttggccagggggctcaggagctgggtggctgtgaggatgtgggtgaccaggccgggggagtggagcaggtgactccgactggccagactgaacaccgcgtgcaccccacctcacccggcaatgctaaggcctggtgggccaagccttgaaatgggtgaatttctgccaggctggagcctttccttggtgcaggggccggagtcctgggtgctayagcggtgtggctgagcggccccctgggacggaggagaggtcgggtctagaagtagcaagcccctggctaggagtcactgatgccactgggggcagggtaagatgtccaaagcccgggagacccagggacgccggctgggctgcctccaccccttcttttcctcccgtggcacccacctgtccccccacctgccaaggccaggagggagggagagagctgaaaagggcacttttcctccagggtgactccaattcctttccactcaccctcaaggcgagttccttctctcccacccaacccggggctccccccaactgccactcgcctcacgtgtgagttgttaaacccgaaagcagaaatcccctgccctctcccttcctgtctccccctttccgctgcacccctacctacccaatttttatctcgctacaatcaggggttttctcaaccggggaaaaggtggtagtggcggtgggagggtca

SEQ ID NO: 85387 - DNA, 576 bp, Homo sapiens
aagataagtatataccatagcaagctggcaaaatagacataactgtactayagtgactactatcctcacttggtaagattatgaagaaaggcaaggaaatgtctgttacaaaaatcaatataacatagttacatttacaggaagcaatgtaatttggctggggcatgatggagggcttttgggtttgttgcaaagttctgttttttgtttgtttttgttttttttctgagacggagtctcactctgtcacccaggctggagtgcagtggcgcgatctcggctcactgcaagctccgcctcccgggttcacgccattctcccgcctcagcctcctgagtagctgggactacaggtgcccaccaccatgcccggctaattttttatatttttttagtagagacggggtttcaccattcacaggatggtctcgatctcctgacctcatgatccgcccgccttggcctcccaaagtgctgggattataggcgtgagtcaccgcgcccggccaaagttctgtttcttgacctgggtagttgtgacaaagacatttgccttataatcataattaactaatct

SEQ ID NO: 85388 - DNA, 576 bp, Homo sapiens
aagataagtatataccatagcaagctggcaaaatagacataactgtactatagtgactactatcctcacttggtaagattatgaagaaaggcaaggaartgtctgttacaaaaatcaatataacatagttacatttacaggaagcaatgtaatttggctggggcatgatggagggcttttgggtttgttgcaaagttctgttttttgtttgtttttgttttttttctgagacggagtctcactctgtcacccaggctggagtgcagtggcgcgatctcggctcactgcaagctccgcctcccgggttcacgccattctcccgcctcagcctcctgagtagctgggactacaggtgcccaccaccatgcccggctaattttttatatttttttagtagagacggggtttcaccattcacaggatggtctcgatctcctgacctcatgatccgcccgccttggcctcccaaagtgctgggattataggcgtgagtcaccgcgcccggccaaagttctgtttcttgacctgggtagttgtgacaaagacatttgccttataatcataattaactaatct

SEQ ID NO: 85389 - DNA, 3180 bp, Homo sapiens
acatggcgaaaccccatctctactaaaaatacaaaaattagccgggcgtgggggtgcaagcctgtaatcccagctacttgggaggctgaggaaggagaattgcttgaacccaggaggtggaggttgcagtgagccaaaatcgtgccactgtgccactgcactccagcctgagtgacaggagcaggactccatctcaaaaaaaaaaaaaaaaaggagtgtttcctataaaaaggaagaagccataagcctaaggaaagagcatagagcctacagaaaagcaaactggagcctggagtgctcaggccactggagcgggatcctctgctcttggacagagatatttatgaggtctctgggaacaggtcttgggaaacaacctcaatgtcttctgcttcatttttctataactccatgctcccctgagaccttctcatttccagttgctgtactgtcagagaattacctctttcggcagacatggccatagttccccgggaggaaaggctgtgcgtaggccctccagtgagcatcacacacggcctggtgcagtgcagagctccatctgggtgtctagcatcagatgggcagaactgacagcctgtttgcctgtcctgggcactggtgtgggggcaccatccaccatgagtactctgtggtggtgtttgtggttgattcacacacctggatctgcaatctcctaagtgaaatcttgccaatattttctgcttattgtaaattggctgaattttatgcccctggatcctgaaccatccataaacatgcactagagaggaaaggtctccaggaagaaggcatatctggaaagctccctccttttcatgggctgcttacctgagattctcacagcatccaatttcatctctgacatgctgattggtcaccctttaaagacctttctgagcagacagctagaaaaatgcctgatggcacacttagactgacttcattcaatttcttgccttttctcagctaatcttcaactcgtaatttcttaatggcttttccaggcactgttctggatcactaaaagacatagccagccaagatcctctgcatggggctcctgttgggattttgtcagcattgctttcttaattatgaaccagtgtaagggtctctggatttccagcatttctttaaggtgagcattctctacccaggaattgggtttggtagagaccccagggtataggcatagaggaaactttggatgtccagtgctgtagagcccagagccttcctgccccgtccgcaaggcgctgggctgtctctgttcccttccccatcataacctgcacagcatagtttggaagggacctactcaaccaacacacagctaggctttcaaatatacggccctccactgatctgtactgtttacatccactggcacctgtctccccttgacttttcctgtggccttggtgctaaggaaatgcttcccaagtacattcattaatgtcatactatgaaattgcataagtggtttatcatcctaattgcccatactgcattatttccaagttaatgaggttatgagcctgcagcaggcgtactatattctaataatagactttaggacatgccgttaaaaagtcattactattattattgttatttaattgggagaaggtcctctcgccccctcacctataggcaaaagatgtcttaaataaaaagacacgtgagcagatatatgattccaaggtcaaccctggaccagaaagacatctgagctctacactgctctctgcccctgcacactgggagtccctcttcctttccctccctctccttgatcaataaggaaacacagtattcccatctgctctccacccctgtttgatgcctgccttatcttccaccaggacaagttctatggatccaaatctattgcacccattggacccaccacagtaatttcttcaggagttacctctacgatctttccccagttgaacacacattggtgtgagtaagaacaaaaaaatcaattttgtttgcaagtgcttaaacccttccataatccaaactctaccagtccttcagaatctgtctccagttcacattgtccaatctctaaccctcattccccaaatcaccagggttattacaattaaattaaagcttagtctggtctctgagcacaccaggctgttcccatccccgtacattgtcatgtttctactgtggcatagaaggcaaaatcttccttgtccgtctgtggctccctaaaccattccaagatacaaaacaagctcattccatctgtgagtattccaggggagcaagatactctttctacatccatgatccattgaatgatcatagcaacagcataaggaaaccaaaaccagatgactcaggaagtaattagtgtgtgccaaggacaaagcagtaagatgaaaggttgtaattmagcccatctaagaattactaagaagtttacttctcattattaagagtttacttaattttgcaatactcaatttatatgtaaagcaagtaaagttgaggatagcatgagatgacacagatcagagaatagaaaagcaaatcaatcatctctgtacaaaaacagactgagaatgatctatgcagaaatccatcccatccacacaaagcaacaatctaagcaagatcaaatgctggaggcctttttccttcattggtgcagatggtcgctacaggtcacaaagaaggatccctgtcctcaaatgtgcagagtattagtgaaaaacaaagtgaaggggcttttcagaacacacagactctcagcacaaataacacatggaaggaacgcaggtctcgtgtgcacactctcagtgcaagtgacaaaaaaatggcccctaacttcacccatatagacactcaataccaaacatcaaaagatgacacaatgtccaaacatttgcaaactctaagagaagattacaactgaagaccctgtcatcatgggagcacgctgtcagtacagatcacacacaaaaggcactattttcccaggcgcacacccttagtacaggaaaaaaaaacaccaaaggcacctctcctcccaggtgcatactctcattacagaaaacaaataaacaaacaaacaaaaaacactgaaggcccctgtgctcccaggtacagaccctcagtacagttcacacactg

SEQ ID NO: 85390 - DNA, 1387 bp, Homo sapiens
tctttactgtctgtggaaggcaatataggccttttctatcatgcttctcaaaaaggtttcagcctctgctcactgcccaattccaaatctatgttcacatttttaggaatttattataacgggacaccacttccaagtactgaattctatattcttctcctttttttttttttctttttggagacaaagtctcactctgtcacccaggctggagtgcagtggtgcagtcttgtttcacagcagcctctatctcccgggctcaggcgatctcccacctcaagcctcctgagcaamcgggcctacaggcacatgacaacatgccctgctaatttttgtattttttgtagcaacgaggtcgcgccatgttgctcaggatagtctcgaactcctgggctcaagtgatcttcctgtctcagcctccaaaagttctgggaatacaggtgtgagtcaccgcgcccaggctgtattcatttttttctgttgccatctcgacatattcacagatgtatcactagattggagggtcagaatcatggggaaccaacattccgccttccatactgtcactcttgctaggatccaagtcagagctctgaatataccattataattagccaaagcctaatcctcagctgaagtgatgcagcatttcaatatggcaggtaatgctggcggaagaggagctcatggaaacagactagatctactcaacaggatctcaaactggaacactagaggaaggagtggagaaaccctctcagggattttccaaagagggtgaattacactgtttatttgctttttcgttgttctggttaggtcaatttaatgatgcaagattgactgttatggataattacattttatattacagactacaatgtgctaattaaagtattaattgttaattaatcaaagcattatagagcctatgaaattatatagtgttctaaaatttgcagagtgcttatataggacagatatgagactagcatatgtaagtatggctggaacaatatttaaaatactgaaatacgttctttctaaacatttcgcttcatttcacagaagggcacctaaggcaggtagaagaatgaggtagttcctgcatttttccaccttgctgctccctccaaaacccacatgcatgcacacacacgcacacacacatgcacacaattgctgcaaaccactgcatttacaggatttttttacacctcaggtgggcctgttagtttctaataaacctacttgccatctatttttggatctcatcaccctaatgaaaggatcacagaatgcttcacagccaattacctggtgcaagataaatgcatgtatttattcattctccataatgatgattaagagggagttcatttcactg

SEQ ID NO: 85391 - DNA, 687 bp, Homo sapiens
tgaaaattacgtttgcacacaagccttgatttgcattttcaggatattaaaatcaaaactgcagaatcccatagtcattctctttgaaaacttcagctttgattcaaacattctgcagctgccaattcataaattctgagaaattaagagtcagattgagattgtacaatagcagacacatattccattactaaaggaagtccctggagggactaagatattcaaagtggtgagagaaagaaatactaataatttgttctatgttagctacatatcactacttcatataggtcctccactgtatgtggtattatccccatgttagaactgaggaaaccaaagttgaggatgatttgatatcaagtaagttcataggttccagagctaggacttcaactgcacatctatcagaagccttgattgacaatcatgaaatcatggagagagtgagaggatcatggaaaagtcagcctctgtctggccagggtcccatcccagctgcctgcaaagtcttctaatcacttgtacccatgctccattcaggcagaataacaagaccagaccttcagctagctcatagggtttgcaaatgatttttgctgatttatttgatgactaaagtacccacacatccttactcttcccctgcttgaattctggggctattctgggaragggtctaggagt

SEQ ID NO: 85392 - DNA, 1230 bp, Homo sapiens
caaagagctggggttaatctgaaagccttccttacagaaatggataaggatgtgtgttgcactgtttagatctcaacagtggtccatgtaaggaattagatttatatatatccacatatgtgtgactaatraacaaagcattatttacattaatcacatgaacacacaactactctatatcctacatatatttacatgaatatataaaaatggtttgaaaagattctctttagatagaatgtatgtacattgtgaaggtcagggtagggagtggaatgggaaaaggaatgatggattaaataactaacagaaagaaaagaaggaaggaaaggatggaaggagagaaagaaaagagagagcaagaaataggaggaggagaagggagggagggaggaaggaagggagggagcgagggaaagaaaggagggaagaaaagaaagaaaaaagggaactttgtacagactgatggtaagtgtgccataaactggggcatatagtctagttaattttgttcatctgtaatttttttttttttttgagacagagtcttgctctgtcacccaggctggcacaatctcagctcactgcaacctctgcctcctgggttcaagcaattctcctgtctcagcctcccaagtagctgggattacaggtgtgccccaccacgcctgcctaatttttgtaattttttagtagaatcggggtgttaccatgttggcaccaggctggtctcaaactcctgacctcaggtgatccaccctttcaccttcccaaagtgctgggattacaggcgtgagccactgcgcccagtccatctgtaattttagaaaacaaaaccagttataaattggatgctagtgactaaaagtcatctgtggagaaattcacagcccagttggagagttggataatacagctacagagatgaccattattctcaggacgacagtaatcttgccacccagtggaacattactatgtaatatgacagaaaatctatcaggggaaaacaagactgtgaccttttagtaatcttccagggaaaagcgtttttctatattccattagccctgagattgatgatctggggttaaagtagaggatctcaaatcatgtgcttggattacacaagagactggagattgatggagggctgctgggtgcccacatccaaccagcttgcgttccatccaaagtagaactgagagttgattgaagagcccttgttgt

SEQ ID NO: 85393 - DNA, 1230 bp, Homo sapiens
caaagagctggggttaatctgaaagccttccttacagaaatggataaggatgtgtgttgcactgtttagatctcaacagtggtccatgtaaggaattagatttatatatatccacatatgtgtgactaataaacaaagcattatttacattaatcacatgaacacacaactactctatatcctacatatatttacatgaatatataaaaatggtttgaaaagattctctttagatagaatgtatgtacattgtgaaggtcagggtagggagtggaatgggaaaaggaatgatggattaaataactaacagaaagaaaagaaggaaggaaaggatggaaggagagaaagaaaagagagagcaagaaataggaggaggagaagggagggagggaggaaggaagggagggagcgagggaaagaaaggagggaagaaaagaaagaaaaaagggaactttgtacagactgatggtaagtgtgccataaactggggcatatagtctagttaattttgttcatctgtaatttttttttttttttgagacagagtcttgctctgtcacccaggctggcacaatctcagctcactgcaacctctgcctcctgggttcaagcaattctcctgtctcagcctcccaagtagctgggattacaggtgtgccccaccacgcctgcctaatttttgtaattttttagtagaatcggggtgttaccatgttggcaccaggctggtctcaaactcctgacctcaggtgatccaccctttcaccttcccaaagtgctgggattacaggcgtgagccactgcscccagtccatctgtaattttagaaaacaaaaccagttataaattggatgctagtgactaaaagtcatctgtggagaaattcacagcccagttggagagttggataatacagctacagagatgaccattattctcaggacgacagtaatcttgccacccagtggaacattactatgtaatatgacagaaaatctatcaggggaaaacaagactgtgaccttttagtaatcttccagggaaaagcgtttttctatattccattagccctgagattgatgatctggggttaaagtagaggatctcaaatcatgtgcttggattacacaagagactggagattgatggagggctgctgggtgcccacatccaaccagcttgcgttccatccaaagtagaactgagagttgattgaagagcccttgttgt

SEQ ID NO: 85394 - DNA, 1230 bp, Homo sapiens
caaagagctggggttaatctgaaagccttccttacagaaatggataaggatgtgtgttgcactgtttagatctcaacagtggtccatgtaaggaattagatttatatatatccacatatgtgtgactaataaacaaagcattatttacattaatcacatgaacacacaactactctatatcctacatatatttacatgaatatataaaaatggtttgaaaagattctctttagatagaatgtatgtacattgtgaaggtcagggtagggagtggaatgggaaaaggaatgatggattaaataactaacagaaagaaaagaaggaaggaaaggatggaaggagagaaagaaaagagagagcaagaaataggaggaggagaagggagggagggaggaaggaagggagggagcgagggaaagaaaggagggaagaaaagaaagaaaaaagggaactttgtacagactgatggtaagtgtgccataaactggggcatatagtctagttaattttgttcatctgtaatttttttttttttttgagacagagtcttgctctgtcacccaggctggcacaatctcagctcactgcaacctctgcctcctgggttcaagcaattctcctgtctcagcctcccaagtagctgggattacaggtgtgccccaccacgcctgcctaatttttgtaattttttagtagaatcggggtgttaccatgttggcaccaggctggtctcaaactcctgacctcaggtgatccaccctttcaccttcccaaagtgctgggattacaggcgtgagccactgcgcccagtccatctgtaattttagaaaacaaaaccagttataaattggatgctagtgactaaaagtcatctgtggagaaattcacagcccagttggagagttggataatacagctacagagatgaccattattctcaggacgacagtaatcttgccacccagtggaacattactatrtaatatgacagaaaatctatcaggggaaaacaagactgtgaccttttagtaatcttccagggaaaagcgtttttctatattccattagccctgagattgatgatctggggttaaagtagaggatctcaaatcatgtgcttggattacacaagagactggagattgatggagggctgctgggtgcccacatccaaccagcttgcgttccatccaaagtagaactgagagttgattgaagagcccttgttgt

SEQ ID NO: 85395 - DNA, 1123 bp, Homo sapiens
catgattgagctaaattttcagcatccctccccttcttggaggttaagcctcaagttccagttctccaatcacttggttggtttctctggcaaccagcctccatcctgaaaccacttgagggaccccttccatgagccacttcattagcataacaaggaatttctgatttctgtcactaagagtttttgaagctctatgtcaggaaccatggacaaagaccaaatagctactttgtattatttcaatagctatcaactagagaatttcccttgccattctccatttgtggatccagatcctctttcctggtttatcttctcagttgatggatggtgtcctttattacagtttgggaaagggagcatagcaggattttgaagaccttatttttacccttacacttgatgaatagtgtggctaggaataagttgaatactttttcttagaattttgttgtttcttttcttattccaatgttccagttcccaatagctttgttttgctctctgaatgtttcttgttggaagtatctgatttttgttagtatttttaaagcaatgccgttgctctgttatagtactgaagttgtcctcgtcttcctccttcttcttctttcttcctccccgtgcccctttcccttccccttcttctttctttcttctgcttctgctgctgcttcattttcttcctgctccttgatccttctacttcttgcttttgctttttatggaatttttcttctacttcctgtattgtctgcatcctcaaagtcccttatctgttgtttattttggtctctatttgtcatattagagcctttctcatgatgataggtgatctttggtagaagctgtgtgtgtgtagtgtgtgtgtrtgtgtgtgtatgtgtgtgtgtggtgtgtgcaggcagggggttcccatatgtctgtatggtagtggtggtgatgttggagaagtgggcttcatcatagcatgatttggatgggaacgtattttggggaccttaatatgattaggtcttttctcttcattggatcacatttcccagagaaaatttttctagtatgctacctgggcagtatgtgcctggcagtcagagctctggaaaccaaaacaagggag

SEQ ID NO: 85396 - DNA, 2406 bp, Homo sapiens
  misc_feature (1)...(2406): n = A,T,C or G
cttggtaaaacacagactgaaggctcccagcctagaatttgtgattcagtagctctggcttgggggcctgagaatttgcatttctcaggggatcttacgtgatgttggtgctgttggtccagggatggcactttgagaactactgaaataaggaaaacttgctgtcttcctataacctgtaccttgggcccagcaggtgcttattattgaaagaatgatggctaccctctaataaaggaacacttttggaagtgtctactgtgttccagagaccatgattacctcctcataatcatcaggtggcaggctgtacgttttgaaagagattcacagaaaggtttgctcaaggcactcaagtcttattgcttacttctctgtattttaaagtattaattcataaattgtttagatctaggcaagtttgtgaaagaatatgtgatactagtacagaccatatgtactgtactgtatcatatcatatgtattgtatcatatatgacatatatattatatatatatacatacagaattgctgaaaactaaaatgttcaagagttaaaaaggcttttgacactgcaatggtggcatgaacgacaacaggactggtcatctggagtgggggctaggctttctctaacaccacaaaggaaatcatctatgccaaagacctggtctggacagcaatacagctttcaagcattaatgggaaaggcaagaatcaaggacaaacacacaggggacttttctgaaggtcaaaaaagcaacaataaataccaaacccagaaaagcttttaaatctgaccttttcctgtgctgaagccattcgccttccagcatcttcaatctaatagactgaagtgggctgaaatggctcttaggagagaactggggctagtcttttccttaatgctgcctcttcaccactactcaagcagcagcagcattactggtaattacatcattataccataatggaacacakgcggtgcaagtgaaacagcctggcggctccccagttgaggagagaagaaaaggactccactttcactgttcaatttctattaactctctaggttctggcttattttcaaaggcaaaccacctttatgacatttcacaatcttaaaacagagaccacagacgtggagcttacttaaagatcaggagtgaagttaatgcattagtgtaatagagatcctccacgggaatagggattaggagatgtgggtccagttctggctntgctaaaagcactttatgtgacttgagggaaaccatatttacatctttnnnnnnnnnnnnnnnnnnnnnnnnnnnnnnnnnnnnnnnnnnnnnnnnnnnnnnnnnnnnnnnnnnnnnnnnnnnnnnnnnnnnnnnnnnnnnnnnnnnnaaacatgtacaattatttgtcaaaagagaaatacaagttattcatattagtattcacagtcttccctttagtttctcaccgactcagtgtatctaccaagattcccttggtaatatctgtccctcaggtagtctgcttgcccagtggtaagtctttctagggtggaaggattctttcttactgggtcttcttccaggactctacttctttctaataggctgaatggagcgaaaatgtaaaaatagggaagacacgctgaatcttcttaataaagaatttttaagataaaggggaaaggggagaatgcaaatttgaaactggttttgaaggttgggagtggggtaggttggtgaatgagagacccttgagcaactatattatatgagagaattgattaagagataaaaagtgtgttacgattttgatttcttctcgtatccattgaggaaagcatgtaaagactggaattactgttttttcacttttgattgttggactttctacccaggacagccacttagattgctggggtttattcaggttatacataccatgcctctctattttaactggctttttgtccctttccttgctcagcagtttttctgcaagtagctgataaatcaggaattcttaaattcttttaaagggtttttcctgaaagataagtttttttagagaagtagagtgggcctagggaataataccaaccttagatgtggaacctctaggggctggtcaaatgtatttggcacacttactctttactatgtcatcaacaagacttggatgtctttcctatttactgcctttgtcgttggagctacgattcacatctgttccagaggtcatggaaactcttcatctctcagcatttctagtgggtatccttggcaggcttaaagcagagtcaggagggtgagagctcagagagaggctaaggtgaaagcactttgtaaacttatagaggatggtattttgtacaaagcctggcacacagcagacattcagtaaaa

SEQ ID NO: 85397 - DNA, 1692 bp, Homo sapiens
cactgctgtttctctgggtaaccttggatagattattcagcttcttcctttccattgtctgtctgtggaggggaaagactggtctatcacagtgaggtaaacaataacaaatgattgcaaaatacgtttgaaacattaaattctaatcataacatctggtcttatactatatatagatgatgattttctatttttgaaaaacaggtatctggaccttcgtcgatttggatctgtgccacatggaggttttgggatgggatttgaacgctacctgcagtgcatcttgggtgttgacaatatcaaagatgttatccctttcccaaggtttcctcattcatgccttttatagctggaagattggttaaggaaaagcaccccccatggcagagacactgcacatgattgtgcatacagcagaatgcatgtttggattttagaaatgcagatttcaatatgtaattgttgtgccataagatatcatagaaaaaatataagtggttgtgattttcttagaaagttgagggtatttcacgtaaggatgagctcccgcaagaagaggtacttatagcaaggggactctcaaatccattacctcaattaagaaatgaagaaattgaattagtctcaaagtttcttttaaactctaaaacagaatgagataatgtattttacgttgtctataatcattaaatcactccctgtgtaatttgtgagaaccatctagtagctcgaaataaaataatgttgcatcttttctcccttgccatatactttgtgataaatccttatctcattttcagtacttcattaaacattgcagaaaaaaatattccttaaggtcttaattgatttaaagaagtagctattctgaattgaaatctcctttcattgaactggatgaaaaaatcatgtttaataactgttgcttttcaattttcaaagctgttgagatattacattaagtatttcaactctttaatcactgttgttataatttgtttatatttgaygtttataatttgtctaataaaatagatttttttaatagacacctatggaaaaaaagttatatattttttaatttcatttggtcctttcccagtaaaatttggaagaaaggtattttcaatccaagatgaggatgggagtttggctgagcctaaaggatgggtaattctagagttaaaagtagtgtggtcagctgggcatggtggctcacgcctgtaattccagcactttgggagggtgaggcgggcggatcacttgaggtcagtagttccagaccagtctggacaacatggtgaaaccccatctctactaaaaatacaaaaattagccaggcgtggtggcaggcgcctataatcccagctacttgggaggctgaggcaggagaatcacttgaacccgggagccgaggttacggtaagcaaagaacgggccactgccctccagcctgggagacagagggagactccatctcagaaaaaaaaaaaaaaaaaaaaaaagtactgtggtctatgaaagtgaaaaaagcattgattggggagtttaaaacctgacaattctagcactttaaacaggctgcttactgtgtaggagctcaacatcattttcttcaaagttgataaaataattacatgtgtgtttgtgtgtgcgtgtgccgtgtgcacacacacacatgcatatgtttaa

SEQ ID NO: 85398 - DNA, 631 bp, Homo sapiens
tagttatcaagacaatacattgtggactttgttcctttgtatcttactggtcatgaaatttatttggtttatttgttataaaaattcaaagttccttttgggaggccaaggccggcagatcacaaggtcaggagattgagaccatcctggctaacacggtgaaaccctgtctctacaaaaaaaaaaaaaaaaaaaaaaaaaaaaaaattagccgggtgtggtggcaggcgcctgtagtcccagcttactcaggaggctgaggcaggaraatggcatgaaccccgggaggcgggaacttgcagtcagccgagatcacaccactgcactccagcttaggcaaaagagcgagactctgtctcaaaaaaaaaaaaaaaaaaaatcgaaagttcctaatactgagagaaagactgcaaataaaattcactgccctcagcttccagagaaaccaaaaaacataaaacctaataaccaaagaatcttgcatcttaagccccagagtttactgaatgtgtcgcaaaatactcaccttgaccttgttctacccagggtgaagggacaggagaatgtgaaggaagatgatgtttgatctcaaatacattggagtaaagagaaacactaaaaatggggtaaa

SEQ ID NO: 85399 - DNA, 937 bp, Homo sapiens
tggctcaaagctcaccaatcacaaattcagttaacaaaaaaccttgatatggaagttcatgaaaataaggagataatttgcatctgttcccttggtttacaaagggtttgaaataaatgaaaccaggcttggcgaggctattgctttatagcccacaccagcaagctataaacaaaggatttctcactaggtcaacccaacttatacagaggccttaaacagtctcataaaaagacttgttcctttgggaagccaaggcaggaggatcacttgagcccaggagtttgagaccagcctgagaaacatagtgagatcccgtatctacaaaaaagaaaataaaaattagctgagtatggtggcaggtgcctgtaatcctagctactcgggaggctgatgcacaagaatcacttgaaccagggaggcggaggttgcagcaagtcaagatggtgccattgcactccagcatatatagatatatataaagaaattgctaagagactggtggacctatagaggcctatggttgggacaagcagttctcagtgtatagagacttygagacagatgtccaataccgcgatctcctccaataatgggttcatgcacatcactccgaaagacagaataagtctcaacaggtgactcaggaatacatcagaaattagacactgaagtagaaaattccacagataccaatgtagatatcctcttctctctcacacagatacatagtaagcattacataatccgtgatatgtattaaacatcaacggtttgccagacactgttctagattgatgaggatctggagatcaataacgcagatgaaatccctgccttgaccaagtaagatttccagcagaaatagggaagtgggcggtactatgaaagcggaagtatttactcaaagagccctgattaggaagctgacctttga

SEQ ID NO: 85400 - DNA, 937 bp, Homo sapiens
tggctcaaagctcaccaatcacaaattcagttaacaaaaaaccttgatatggaagttcatgaaaataaggagataatttgcatctgttcccttggtttacaaagggtttgaaataaatgaaaccaggcttggcgaggctattgctttatagcccacaccagcaagctataaacaaaggatttctcactaggtcaacccaacttatacagaggccttaaacagtctcataaaaagacttgttcctttgggaagccaaggcaggaggatcacttgagcccaggagtttgagaccagcctgagaaacatagtgagatcccgtatctacaaaaaagaaaataaaaattagctgagtatggtggcaggtgcctgtaatcctagctactcgggaggctgatgcacaagaatcacttgaaccagggaggcggaggttgcagcaagtcaagatggtgccattgcactccagcatatatagatatatataaagaaattgctaagagactggtggacctatagaggcctatggttgggacaagcagttctcagtgtatagagactttgagacagatgtccaataccgcgatctcctccaataatgggttcatgcacatcactccgaaagacagaataagtctcaacaggtgactcaggaatacatcagaaattagacactgaagtagaaaattccacagataccaatgtagatatcctcttctctctcacacagatacatagtaagcattacataatccgtgatatgtattaaacatcaacggtttgccagacactgttctagattgatgaggatctggagatcaataacgcagatgaaatccctgccttgrccaagtaagatttccagcagaaatagggaagtgggcggtactatgaaagcggaagtatttactcaaagagccctgattaggaagctgacctttga

SEQ ID NO: 85401 - DNA, 596 bp, Homo sapiens
gcagtagcattagattctcataggagaacgaaccctattgtaaactgcataggcgagggatctaggctgcacactccttatgagaatctaatgcctgatgatctgtcactgtctcccatcatccccagatgggaccatctagttgcaggaaaactagctcagggctcccactgattctacatcatggtgagttggagaattatttcattatatattacaatgtaataataatagaaataaagtgctcaataaatataatgcacttgaatcatccagaaascatccccctccacagtctggggaaaaagtgtctttcatgaaaccagtccctggtgccaaaaaggttgaggactgctgctttgggttataaaccccaaatggcacctgtatgaaacgatagggaggtttatattattagtaatattaatttttatttcataaacagttgtcatcgagatatagccattattaatttttttaaaaaaaacttgacatctattttcaagttcttttaatgaggttactgcagaaaaaatgaggaatagacagagatggggtaaggggcagacagaggagagagagagagagagacactt

SEQ ID NO: 85402 - DNA, 596 bp, Homo sapiens
gcagtagcattagattctcataggagaacgaaccctattgtaaactgcataggcgagggatctaggctgcacactccttatgagaatctaatgcctgatgatctgtcactgtctcccatcatccccagatgggaccatctagttgcaggaaaactagctcagggctcccactgattctacatcatggtgagttggagaattatttcattatatattacaatgtaataataatagaaataaagtgctcaataaatataatgcacttgaatcatccagaaagcatccccctccacagtctggggaaaaagtgtctttcatgaaaccagtccctggtgccaaaaaggttgaggactgctgctttgggttataaaccccaaatggcacctgtatgaaacgatagggaggtttatattattagtaatattaatttttatttcataaacagttgtcatcgagatatagccattattaatttttttwaaaaaaacttgacatctattttcaagttcttttaatgaggttactgcagaaaaaatgaggaatagacagagatggggtaaggggcagacagaggagagagagagagagagacactt

SEQ ID NO: 85403 - DNA, 596 bp, Homo sapiens
gcagtagcattagattctcataggagaacgaaccctattgtaaactgcataggcgagggatctaggctgcacactccttatgagaatctaatgcctgatgatctgtcactgtctcccatcatccccagatgggaccatctagttgcaggaaaactagctcagggctcccactgattctacatcatggtgagttggagaattatttcattatatattacaatgtaataataatagaaataaagtgctcaataaatataatgcacttgaatcatccagaaagcatccccctccacagtctggggaaaaagtgtctttcatgaaaccagtccctggtgccaaaaaggttgaggactgctgctttgggttataaaccccaaatggcacctgtatgaaacgatagggaggtttatattattagtaatattaatttttatttcataaacagttgtcatcgagatatagccattattaatttttttawaaaaaacttgacatctattttcaagttcttttaatgaggttactgcagaaaaaatgaggaatagacagagatggggtaaggggcagacagaggagagagagagagagagacactt

SEQ ID NO: 85404 - DNA, 1983 bp, Homo sapiens
ccacgaattactccctcattcctctggaatctttgtcacaatcaatctttcttctagatttgcttgtacttctctttagctttcatttctcttgtctgcatattttagtggtttatcttctgctagagtggtagctccctgaaggtatggaagcaatgaccactgtgttccttctaggtgattcctgacttcctgtttgtgagtttgtaatgacattttatcttgggtgggccagaacgaaagaaagaaaaagaaaggggagggaggaatgattagcaaagtagtgggccttttcctagagataaatttattttatttaaaagactgttctttattcagatattgctattcttcctttttttggttgttagaatggcctttcttttatgaaatgatgaccatagtagataatttttacctttcacaatctgaatttaaaagttggcaccmccacccaccattgaggagtattctataaaatacttcaccagtactcttcaaaattatcaagctcatgaaaaacaaggaaagagtgagaaactgtcacagatggaagaaaccaaggggacatgatgacatggatcctgaaccaaaaatggatattcatagaaaaactggtgaaagccacataagtgatatactttagttaatggcagtgtatcaacattggtttcttagtcttggcaaatgttctgaggttatataatatgttaatggcaggagaagctgggtggactctccatactatctttacaattgttatgtaaacttaaaaattattccaaaatttaacttttatttttaaaagactaaggaaggcaaaaaattggcatccctctctcagacccctttattttaaaatgttttattgcttcttgatgtccaaaatcctggggcctggggcccaataacatcaagttcaatgatcacactcactcaaagtttgagaaattaaatctacagtgaattgaatcagggaatcataataataacgtacccataaaaaggtgtcagctgcttaattaaatattgttataatgaaattttaacaaaatattaaaaggaaaatcgacatgagtctctgaaacctcttcctctgtaagacccctgtgagtcccaaacctgcccaagaccatatgtgcaaacaagtgttttcaggcacttcattcttaggcatctgccttaacaacttttaactggagactgtactaagcagaagaacttccctctatgccacaacatagctgatcccttaatgactagatggcagcctgccacagtgacacacagtctttaagcagagacgccatgcatgtgctacaagacatatttagtaatcagtggatctgttggcgagacataggtctggtttggtgaggtttgattttaggaaaagaatgagcacacataatttgtgtcagcagagggctctcttaagcaacaatagttccgactacccgtttatgtggaaatttgggtagtcatagaagttagcaaaccattcccttcaggccccttcagtataacatggaaattaaaacaatggaaatgaacatcttgagcacagttttgccagatgtaggtggtgccagttaagaagttgggctgctgattacatggcgacccaggcatagcttgtctgaagagattccccaaaacatttattcctgatctgggtttgaaggagaaggggcatgcctggtcctggggttctagaagcagctggaagtttctgagggagtttgtaattcagctcttttgagtagttaggtttgggaatatgattatcatagaaccttgatgtccatgtcagaaattttaatcagagtgaaagaaaaaaataggtttgggagacttgagaatgggaacaacgtaaaaaaataagagacaaataagtcagttgttcttttctttgtagttagatggtaggtagaactctttgatacccacaccaaagaaggatttcatgatcacctcatctca

SEQ ID NO: 85405 - DNA, 732 bp, Homo sapiens
cgtaggagtctggaagracccagacataatctagatggggataaagatactttctggttgcttcgatgtaggtgatgaccggcctgtactgctttgagtattaagctcgtttctgcgccttgcaacctatcacccaataaatatttatcgattactattcagggaggatacattttagggtaggccttgactaagtggagggtattgtggagtagagcccttctgaataacagcagctaacattctcatagcactaactgcacccctttgaggtaggcggtcttatcattccattttacagataaaactgagccacagaaaacctcaggtcacacagctgatatgtggtgaagctgagatgcaaacctaggctgtctggttccagagtctgctttttgccaaagcacctctcttcgtttcagtaggaatctttgaaggaattgggtatatttcacttgaagaaaagatttaagggattgggggtactgtctgcaaacacttgaagtggaatagggatagattatattccttctgggatagtccattagaacctagacctcccaaagaggaaaagactttcgaataacaaactctggctataggtaagtcctgaaatatgagatacattgccaagaacagctggtccatgacttgcctatgctctaggagacttcatgagtaagctgaaagatttcttgcccaaaatgttggccctgaacttcaggaatagat

SEQ ID NO: 85406 - DNA, 732 bp, Homo sapiens
cgtaggagtctggaaggacccagacataatctagatggggataaagatactttctggttgcttcgatgtaggtgatgaccggcctgtactgctttgagtattaagctcgtttctgcgccttgcaacctatcacccaataaatatttatcgattactattcagggaggatacattttagggtaggccttgactaagtggagggtattgtggagtagagcccttctgaataacagcarctaacattctcatagcactaactgcacccctttgaggtaggcggtcttatcattccattttacagataaaactgagccacagaaaacctcaggtcacacagctgatatgtggtgaagctgagatgcaaacctaggctgtctggttccagagtctgctttttgccaaagcacctctcttcgtttcagtaggaatctttgaaggaattgggtatatttcacttgaagaaaagatttaagggattgggggtactgtctgcaaacacttgaagtggaatagggatagattatattccttctgggatagtccattagaacctagacctcccaaagaggaaaagactttcgaataacaaactctggctataggtaagtcctgaaatatgagatacattgccaagaacagctggtccatgacttgcctatgctctaggagacttcatgagtaagctgaaagatttcttgcccaaaatgttggccctgaacttcaggaatagat

SEQ ID NO: 85407 - DNA, 1193 bp, Homo sapiens
tacgctaaataccstaatttgatcactatacaacatatatgtatttaaacatcaaattgcacccccaaaatatgtacaattataatgtgtggagtataaaggtaacaacaaattttgaaaactaaagaaaaacctgggtttctactttataaataagacaaaagtgacctgataaaaatgggagtaggtgtcctagatgattttaaaacttttcataattatgtataaagaattatttaagatttcctttcagaatctttgatttagtggaaaaatgatgaaaaagcattctagcaataactattggaacaatgaaatacattttttaaaaaactcatctgataaagcagtatacacacacccacactcagacacatacaaatgtgtatatctgaataacatttagccacaactcatatattattcattaaaaatgattattattcttcccagagaagtaattcatttagaacaatttcattagtagttgattgaaaacttgcttaatatgcaatttaattaggattctaaaatgacccatgatattaaactaagctacatttttctacagacctattttttgttacgttattaggataagcttctctgttaattacatctttaaaataaatgcaagaaaaattatgccactcttctaaattgtttagttatcaaagggatatcaaatttcaaggatacagagagattacagagcaatttcattcctaatattatctttaaaatctgtattagtaatagtttatatttattggacacttaacattgggctaggtgcagttctaagtcctttacaagtattaactaatctagtcattatgacaatctattatccccatttcacagaggagtcaactaggcaaagcaagtaaagaaaatgggcagaattacatctgtaagcggcagatctggaattttaaacaaagcagtgaagttccatgctccatgctttacgtcattaaactgcattaagaatgaatggtaaaaatatctcatttcagtcctattttaacattttatattatcttaccaataagattttataaaaaataatgataaactatattaaactaaaaattctatgaaaaacattttttcttattaaaggttcatttataaataaaccttgatttgagtccttatcccttttgctttattatctagtgttttacctt

SEQ ID NO: 85408 - DNA, 1193 bp, Homo sapiens
tacgctaaataccctaatttgatcactatacaacatatatgtatttaaacatcaaattgcacccccaaaatatgtacaattayaatgtgtggagtataaaggtaacaacaaattttgaaaactaaagaaaaacctgggtttctactttataaataagacaaaagtgacctgataaaaatgggagtaggtgtcctagatgattttaaaacttttcataattatgtataaagaattatttaagatttcctttcagaatctttgatttagtggaaaaatgatgaaaaagcattctagcaataactattggaacaatgaaatacattttttaaaaaactcatctgataaagcagtatacacacacccacactcagacacatacaaatgtgtatatctgaataacatttagccacaactcatatattattcattaaaaatgattattattcttcccagagaagtaattcatttagaacaatttcattagtagttgattgaaaacttgcttaatatgcaatttaattaggattctaaaatgacccatgatattaaactaagctacatttttctacagacctattttttgttacgttattaggataagcttctctgttaattacatctttaaaataaatgcaagaaaaattatgccactcttctaaattgtttagttatcaaagggatatcaaatttcaaggatacagagagattacagagcaatttcattcctaatattatctttaaaatctgtattagtaatagtttatatttattggacacttaacattgggctaggtgcagttctaagtcctttacaagtattaactaatctagtcattatgacaatctattatccccatttcacagaggagtcaactaggcaaagcaagtaaagaaaatgggcagaattacatctgtaagcggcagatctggaattttaaacaaagcagtgaagttccatgctccatgctttacgtcattaaactgcattaagaatgaatggtaaaaatatctcatttcagtcctattttaacattttatattatcttaccaataagattttataaaaaataatgataaactatattaaactaaaaattctatgaaaaacattttttcttattaaaggttcatttataaataaaccttgatttgagtccttatcccttttgctttattatctagtgttttacctt

SEQ ID NO: 85409 - DNA, 1193 bp, Homo sapiens
tacgctaaataccctaatttgatcactatacaacatatatgtatttaaacatcaaattgcacccccaaaatatgtacaattataatgtgtggagtataaaggtaacaacaaattttgaaaactaaagaaaaacctgggtttctactttataaataagacaaaagtgacctgataaaaatgggagtaggtgtcctagatgattttaaaacttttcataattatgtataaagaattatttaagatttcctttcagaatctttgatttagtggaaaaatgatgaaaaagcattctagcaataactattggaacaatgaaatacattttttaaaaaactcatctgataaagcagtatacacacacccacactcagacacatacaaatgtgtatatctgaataacatttagccacaactcatatattattcattaaaaatgattattattcttcccagagaagtaattcatttagaacaatttcattagtagttgattgaaaacttgcttaatatgcaatttaattaggattctaaaatgacccatgatattaaactaagctacatttttctacagacctattttttgttacgttattaggataagcttctctgttaattacatctttaaaataaatgcaagaaaaattatgccactcttctaaattgtttagttatcaaagggatatcaaatttcaaggatacagagagattacagagcaatttcattcctaatattatctttaaaatctgtattagtaatagtttatatttattggacacttaacattgggctaggtgcagttctaagtcctttacaagtattaactaatctagtcattatgacaatctattatccccatttcacagaggagtcaactaggcaaagcaagtaaagaaaatgggcagaattacatctgtaagcrgcagatctggaattttaaacaaagcagtgaagttccatgctccatgctttacgtcattaaactgcattaagaatgaatggtaaaaatatctcatttcagtcctattttaacattttatattatcttaccaataagattttataaaaaataatgataaactatattaaactaaaaattctatgaaaaacattttttcttattaaaggttcatttataaataaaccttgatttgagtccttatcccttttgctttattatctagtgttttacctt

SEQ ID NO: 85410 - DNA, 766 bp, Homo sapiens
aacaggccgattgaattctgttaaaaaaaaaaaactttgtggtaaaagtcttcaacatatcacaaaagatttttgatcctcagtcaattacccatttatttgaaaacagtcaatacaattgaattccagtgaaataaaaggagttggatagtcccttggaggttgtgacaayagagggttaaatttttactctggggctcaaagtccagaataccatctgcttagtccacctctttctgttcctatttttaatgcattgttctttctgaacatgaataacatttctgtgctaataaatctgcattgctgcaggtaaatgattattagttcatcaaaagggagaaaaagcaccttagcaaagaagagagttttatttcatccaggttattcattattgatcagaaaacaagagctatcccattaattctgtgaaattccaactgatctctttgtttcaccgccaaagactgagagggagaagggcctttcctttcaaccttaatctcagtctcaagtcaatttgtttttaaattttaggaaaagccttttcagtcattaattgatctagtgaattggcggggggtggggtggggctctgtttccacctcattactcaacatctttgtttttctatgtgttttctttcattaaacataactgtgaaaagaattgactggttttgaccaatgtggtatgctataaagaatattaaaatataccttcattatttggtttaggttagatcattttgaatcaaaatggatcc

SEQ ID NO: 85411 - DNA, 1294 bp, Homo sapiens
tgaatatagcaaagcattccatgatgttctcttgaattcatttattctttggaatttggttatttttttttgtttttttggtgcagtggttatgtactactaggggtatgatatgggttcttcaataaatctcttcaaattataataaagatttagcgctaaccttctgctcactatctccctctaagtactacagatggatgtgattagcatgcaatttatcatcttgatggaattcatgtcttacaggcctatggctttcaaaattgaagtatctagatttatgttattttgtcaaataggaaatggttttactctattgagattcctacacttaaaaatttatatagaccttaaaaaaatcctaaagaagagtttgaaaagtatggttaggcattcttctagccatatagactatagaggagaataagtttaaggaaatcatcaagtaaagtcaagaacatagtaaaaatggtaacataccaccttcatgtaagataaaaccagataagattttaaaaagaagcatttatgctatgcttaggaagccaatcctgttgaaaaaactgatattgcagccatatctgtctgtgagtagttgtaacaatgctgtaggtaacatttctgagagcatgatacagtgtagggggaatcgatctgtggtcttggggtccttggggaaaagggtatatgaagagttcttccaaagtggcctctaaatccacctgtgtagtaaacagtgtctgacaactaaataaataatttccatgtgtacttacggctgtgttttaaatggatgcaagggctggagtgataactacagttcaatttgtgaaaagatttatagattttgtagcacttgcagattttatggactttctctgcaattaaatatttatagttcagtgctatggtttgagtgtgttttccaaaagttcatgtgttagaaccttggtcctcaggatggcagtgtcggcaggtgggcctagttgacggtgtttggtcatgggggctctgcccttatgaagagattaacgcagttctcatggaacttggttagttcttaaagagtgggttgtaaagcaggttggcacactgtctcccctctcctgcttctccacaatgctatgaagcagcacaaggccctcaccagatgcaaccccacaatcttggacttcccagactccagaatcatgagctaaatcaactwctttcctttcaagttatccagtttcaggtgttctattatagcaataaaaaacaaactaagacattcagctagcacagaagggtc

SEQ ID NO: 85412 - DNA, 639 bp, Homo sapiens
ttctgctattaaacagcagagagcagcagtcccagacttgcttaattcttaagtaatgaacttctgtgttttggggggagaaacttggctgctgatagagtgactgttctttagtgcatgtgagcccatggacctaggagaacatctttctgaagataccgacactggtgtgctctttctttgctagagacagatggtacccccttcaccctcctgactgaatgttcctgtaacctgaagatctcaggaacagtcaagagaaaggsttttgctggagtgaaagtgtgaatcttctgagtaacccgagagaggaggaaatgaaggggaaagaactaacagcaaaaagcagggctaggacaagtgatcctcccggtgcctgcagcctttatcccttcttcccagaaggcaagatgcataaggagataacctcaacttttaggacagcattccagcattctcctgaagctttccctgcaataaaccagcactgccccagaagcagttaagcgtatgatctagcctaatctctgttagtgaaaaaccaaagtttaatgatatgggtccatacaacgaaggagtatgttctaatgcctggatatctgtgaacttgtcatgttgcttaaactccctctgattgtt

SEQ ID NO: 85413 - DNA, 639 bp, Homo sapiens
ttctgctattaaacagcagagagcagcagtcccagacttgcttaattcttaagtaatgaacttctgtgttttggggggagaaacttggctgctgatagagtgactgttctttagtgcatgtgagcccatggacctaggagaacatctttctgaagataccgacactggtgtgctctttctttgctagagacagatggtacccccttcaccctcctgactgaatgttcctgtaacctgaagatctcaggaacagtcaagagaaaggcttttgctggagtgaaagtgtgaatcttctgagtaacccgagagaggaggaaatgaaggggaaagaactaacagcaaaaagcagggctaggacaagtgatcctcccggtgcctgcagcctttatcccttcttcccagaaggcaagatgcataaggagataacctcaacttttaggacagcattccagcattctcctgaagctttccctgcaataaaccagcactgccccagaagcagttaagcgtatgatctagcctaatctctgttagtgaaaaaccaaagtttaatgatatgggtccatacaacraaggagtatgttctaatgcctggatatctgtgaacttgtcatgttgcttaaactccctctgattgtt

SEQ ID NO: 85414 - DNA, 702 bp, Homo sapiens
acagaactataagcaaataaaatgtttattgtattaagtcagtctaagtttaggttggtttgttaggcaagaatagataactgagaatggttgactagagtttattacctaggaaaactctgtgcatagttgttgaaaacacatgccttagcatgataccacccaaggatgagggagctgggtattcattcaccaactcctgagagccattgttggagatctgctcatgggtggaggatgttagtttcccagcacagctggcctcctagagttgtgggcaaaggagacttccaaggttccagaaaatgtttgcaggcacaggatgcaggtgcagcagttgtaagtcaaccaaagcatgccaaaatgcttcaagagatatgggagaacattgagaaccacagttactgcatatttattaaatcactctttacaaaagtgtggtcacagtataggaaaaccatgaggaatagtattagtatcaagagtatcactatccactsttatacccaaagaggcaagaggagaggatggtcaccagaacccaatgagagaagggctgcatggagtggctacctgtcaggagctgaaaccatgggtcaagagaagcagccatcccacagtggacctgttagggaaatgagatctgaaaagagaactgtcttgacccttaaggactccatccagtcctctgcacgaagagat

SEQ ID NO: 85415 - DNA, 1100 bp, Homo sapiens
ttccaacctcaatattgtgttccaggcaggaaaataaaatgaaatggaggcaagcacaacaaacacaacacgaaaaagaggaaaagaaaacaaaaacatttctcagaaatccttagtggacttctccctatatctaattatctggaattctatcacatactcatccctagcttcaatgcagattagaaaaatatatcaccactctgacccaaattgacattttgttaggaagaaaggaagagtgaaaactgagtagacaactggaggtgtctgacacatatgtataatttccagtggagagttcataaacaatgtgtttatctatagctctctatagctattatacagggattctgatcacaaaagtttgtttccatgtgatatcaaacatctagctatattacttccatctgaaatatgttcacattcagcagatgtttggtatcttgacaccccaatctgcttgtgctgattttaacccagccatccttaaaacaatggttctctagttactgaattaaaatgaagtgtaaggcttgcattatattagaaccagtgaattatgccaaaatatggaaagaatgtatggaatgatctgtgaaagtaaaacaaatgttttttgttttgtgtgtgatataatgagactttctctgaacttgttgccaaagctgaaatttctgctagtggaaggttgattcattcattgtttttgaaacttctagtttaggcatgcttgcccacctcttcacatcttgggattataaattgccaaatcttaaggaaaagaatttcagatccatatggaagccaactgaaaatccaatcttctctaaggacgaggtttggctgactggatttgctgtgcctttacaaaataatttttattctgttacctccagatttgcttgagtctgtgaaattctgattgcaaaygaagttcacgcagctggcattcatttccagttactaagttaaacaacatcactacctgctaccttttcttttatgtagaatagaagtgaatatattcagatgaaatgaaatttttaatgggtcctggagaagaaaaccaaattttattgaatacctaccatgagcca

SEQ ID NO: 85416 - DNA, 2331 bp, Homo sapiens
ggatccattttgggtccctatggttttcatttctctcatctcttatttttgctgactttatagtttttttgtaagacaatttaaatccgttttgaaataatgtggggtataaatatataaatgacatatgtatgtcaacatttatttataaaaagtattaaatgtgtatagttacctgattaataagtcattttttaatacaaaacaaagtctggagatctaaattttaatcaacaggtaaaattactatattaacctaaggggaaatttgcctccatggtgagatttcatattctctaatagggcagtgaggaagatacatttttggcagtgagtagaggccacctaagtccattctcacatatacctgctcatatgtatcagttctggttttattcatttcaatataggtggctatggaatatcatttacgtgtcaaagaagaaaaaacaagaacgcagaaaggcctctggcatgtctgctactctggacaaggaccatcatgacattgccgggtgtgggttgatcgggtgctgtgcgggcagtggggaaggattttggacaaaatacaagtccattttgagtttctccctttcaaatttgagaggtttgtgattttgttgcatgcatraaagggtggtattctatcctgattttcctagaggattacaggtttatctacgtcctattcaaatatctctgatacctgggacattcttacgcctggttattagaaatttagtggaaaacaagaccgtcttagtgcatgtcatattctgtcacgtagcacgttatcatggagaaagatgacctgtatcaatatctactacatcaaaatgcctagaaagtgaaagattttagagacacctttatgtaggtgtagctgtttccatcttcaaaataaatgaatggtttataatatgatatagttatttctaaaaattaacagtgcctcaggtatttatcttcatctctttctctcgaggtctctattgaagagaccgtttcaaaaccacttgtatgcttctcttcgctctttatttacacagcagaggtagagacaatgggccatgtattttaccaattcatatagcatttcttccctccccaggtgcccatatggaaaacctttacaaagagccccgtccccaccccgatcaccatcattagaagtgtgcgatttatattacagaaggacagaaaattaaaggatggcaatttaagatgagaaaactcaaacacaatttttaaaattccatcgttcatctgattatctgctttgtaacttatccagacagcttagctcttttctcacttgttgccaataatgtggatattgaagacagcaaaagaatcaacagtcgtatttcccaaatgttagaggggtcaaggaaaatgtagcaaaagaaacagattaacattttttttgtttaagtattccttatgcttttttataactacaaccattgataatcaagaattctttagtgatatttagaaaatgcatatttaaaaattaaaaaaaaagctattcctgggcttgccggtagatttcatattcgagatgagatttattcaactttcatagctcatgaacttgccattgataagtatatagaaattttcactacaaacattttgcaaaacgtttctcacatttactaataaatttatgatatgcatagaaaaccatgacaaaaaatccacagatgagtcccgttttttcactttaataataaaaattctaacacagtgatagccttctatctatctgggtagcagattcaggcatttatttttgactgccattatcttaatctgtagctgcatggtctaatatggtaaccacgtggctatttaaattaaaattaattaaaattaaataaaattaaaaattgagttcctcagtctccgtaggcacatttcaagtgcttaatcaccacatatggccaattgtaccatattagacggtgcagatgtagaacatttccaccactgcagactgttggatcagacactgctgcaatcttcagagatgccacaagaaagagacgaagctgcagagacgatgacacgcagcctgccacgttgttttggcatctggaactaatgaccacttccatgtgcatgaaactggtactgagagcagggcgtgggctgagaaacctaagcatgcaaagacatctgtctgtctctaactcttgcttctactttctgatgttaccatagagtgcctttgttatttcaagaacacacaatggttcctaacctggtgaagatcaggtcagctaatccagaacaaatagaagaggagtctgaggacctggggag

SEQ ID NO: 85417 - DNA, 775 bp, Homo sapiens
ggatccacactcatccatcttccttcttagagtgatagccaggggtctgttcacaggagggcaagaaaccagtggcaaacagaatgccagccaattcaccagactgggaaatgcctagtcagcttcaaagccagatctcctgggaggtcgcagatggaagcacgtgacctgcaccacaaggctgtttgcctctttccctcaaatctctgcctgatggacaccccccaatgtggcgattagattttatcacatcagtgtggggggaggccagtcagaatcatccacaagtaccagggcacagagagaggaaatgaggcatggctcctacatgcatagacacacatgcattcacacacttacatatacattcacacactcgcacacacttattcccacatcacacacaaagtcacattcatacgactcgcacacattcacactcacattcacatcattcacacagattctcacactcacacacccattaacacacttacataaacattcacacagttacacattcatatacacacacacatacactcacacagtcacatgcctccrgtcacacacatttacacacattcatacgcccacatacattcatacacatgtatgtattcacacatatgtatattcacacatgctttcacactcacacatgcattcacaccctcacacattcattcatgtgctcacacacatttgcacactcacccatacatagtcatgcacattcacacgcagacattcacacacagatgcacagacagac

SEQ ID NO: 85418 - DNA, 669 bp, Homo sapiens
catgcttatgtgaagataagatttcatctttcttggttaagggatgcctagtagcagaatcttttggtcagatggtaagcatatgtttaactgaataagaaaccaccaaactgtttcccaaactggtttaccatttttcactttcgccagcaacgcgtatgrgagttttggttgttccgtgtcctcttcaacactgggtattgccagatgttttcattcccgttttagccattctaataggactgcagagccccttgtaactgaatttgaatttctgaaatgatgaatgacatttaacagccttccatgcgcctatctgccatccacatatcttcctaggtggaggtttatttgctcacgaaatattcaaacatgcagatgtaacaggttctcctccgcccactcaccactgatgtctggaggagggagtctttgtctggctgttggtgtgcagcattcccatggatgctcttgattatttgttacttatgtcggtcaccacaaacaatatagcttgagaggcagcatgaacatagaatatttctggaaaagcacaatggaaatggagattcctacccatcttcaacatctgactgttttggcagtagtagacactgggggctactaggtcggggagagagtggggtaagggttgaaaactacttattg

SEQ ID NO: 85419 - DNA, 669 bp, Homo sapiens
catgcttatgtgaagataagatttcatctttcttggttaagggatgcctagtagcagaatcttttggtcagatggtaagcatatgtttaactgaataagaaaccaccaaactgtttcccaaactggtttaccatttttcactttcgccagcaacgcgtatgagagttttggttgttccgtgtcctcttcaacactgggtattgccagatkttttcattcccgttttagccattctaataggactgcagagccccttgtaactgaatttgaatttctgaaatgatgaatgacatttaacagccttccatgcgcctatctgccatccacatatcttcctaggtggaggtttatttgctcacgaaatattcaaacatgcagatgtaacaggttctcctccgcccactcaccactgatgtctggaggagggagtctttgtctggctgttggtgtgcagcattcccatggatgctcttgattatttgttacttatgtcggtcaccacaaacaatatagcttgagaggcagcatgaacatagaatatttctggaaaagcacaatggaaatggagattcctacccatcttcaacatctgactgttttggcagtagtagacactgggggctactaggtcggggagagagtggggtaagggttgaaaactacttattg

SEQ ID NO: 85420 - DNA, 533 bp, Homo sapiens
cgaaacattctgattttttmaatgaaaacttgtccatggcataaattggtcttttgccattgcgtgactacgtttcttgttctttatctcccgacttcactgtggtctactaccttttgaatcttcgtgggtccaatgctgcaaagcagtgttctttagctgtcgactagttcctcttgaagaatcgagggagaccgagggccctggggggaaagcacccaaaggaatgcatacatgctattttgtatctgagatgttcacatcaagagccccactcagcggagtaagagtgctcattcctcttgcagtgttcagaatcacagtaagctcttgcttcctgtttaacctggtgtgttcggtgatgagggtttctgaacatggtctctttcttgtgggcttctacagagctgcaagcgtttgctcaccacggccgctccctgccaagattccaggtgactctatgctttggagaggagtttccagaccctcagaggcaaagaaagctcatcacagctcacgtgagtcctcagtta

SEQ ID NO: 85421 - DNA, 547 bp, Homo sapiens
aaccacaggaagccaggcagaagtgctgcagccagggcgtgctgtgggagaagggctgggaggatgcagctcgctcgcacactgcgtcagaaaccttcacatagtgcttgtcctcagtacgagccaaggtgggggtgaggaacggcccacttaccaaaactctcagagaccccttggggaatttgtgcttcttgtttctgcaagtttccaggagacacagaaagggtgccactagactctaagctgtgggaggcctctgggaggctccttgggtggagcttagcagcaagaaggcatgttgaccttggtcatcaggaggtgtggagctgctgctatacaatggggcaggaccccggcaacccatccgggcacctcttggctctccctgtgtgtactgatggaaaatggtatgtggaggtgcagcacccctggaccaggaagggcaccgtgaccagttcaaagccctcaaggatgaaggcttgggtmtggccactgagctgtagttgaaaggtgggagcatctagaaaggacagagcaggaggcgctc

SEQ ID NO: 85422 - DNA, 628 bp, Homo sapiens
ccttccaaatcttagttgattacattattttcttttcttgagacatactctcactctgtgttgtggccttgsgtcactgcaacctccacctcccaggttcaagcgattctcctggctcagcctcccgagtagctgggattacaggcacgtgccatcacacccagctactatttgtatttttagtagagacagggttttgttatgttggccaggctggtcttgaactcctgacctcaagtgattcactggcctcggctcccagagtgctaggattacaggcatgagccactgcgcctggcctgattacattattatcatttattgagtttgctggttaatacactattctctgacttttgttatatttcatagtattatatatttgtttgggggtttttcttcctatacccattatttttatttctgaatattatttccattgtatgtatggaccatggtttgtccatttacctaattaaatggagtcttgtttgcttctaagtcttggtaattatctgccataaacaatcacatgttgttcttttctttgtttctgttaacataagattttagtcagttctacatctacctagtgtgcaattcttatttcacagggtaagaatgtgtt

SEQ ID NO: 85423 - DNA, 628 bp, Homo sapiens
ccttccaaatcttagttgattacattattttcttttcttgagacatactctcactctgtgttgtggccttgcstcactgcaacctccacctcccaggttcaagcgattctcctggctcagcctcccgagtagctgggattacaggcacgtgccatcacacccagctactatttgtatttttagtagagacagggttttgttatgttggccaggctggtcttgaactcctgacctcaagtgattcactggcctcggctcccagagtgctaggattacaggcatgagccactgcgcctggcctgattacattattatcatttattgagtttgctggttaatacactattctctgacttttgttatatttcatagtattatatatttgtttgggggtttttcttcctatacccattatttttatttctgaatattatttccattgtatgtatggaccatggtttgtccatttacctaattaaatggagtcttgtttgcttctaagtcttggtaattatctgccataaacaatcacatgttgttcttttctttgtttctgttaacataagattttagtcagttctacatctacctagtgtgcaattcttatttcacagggtaagaatgtgtt

SEQ ID NO: 85424 - DNA, 1001 bp, Homo sapiens
ctcttttattttagttcaatgatgcaatgttggtgtggtgataaattgtgggagagggggtgtatcttataactttccaattaaatctctggcctagatttttacagagctttttctttatagctcccaccctttccgcttcaggccgtgacaagatgacaagaggagtctgtaatgggaggaatgtccttcttccatggctctaagatgtggctgtattacagtatttccctcctggaaaattgattgttcataatgatgggattagccattcatcttgcattatattgaggtacattggcattaccttggtggaaaatttatatgagagttatgtattatactcaaagacagaaagatacagtacaactaaatttttggaaatttatttacattgttcttctatctgatcagccactacccattttataagaaataatttgagattcatctccctaaggaagcctagctaaaacaaagtgcaattatcatatgacactatatatattaatccagctattgccactgttatatgtaagtccctaggggcagagtccatctattatcatttattatagtgtccacagagtcaaacacaggatttgttacaccataatttttcaatacatgtatgttacattaatgtctaaatattttttctttttctttagaattttctgtgcatttcaaatttttcacaaacataggttaaatatattttataatcagaagaaaacaatatagaacaatgaaaacctctacttagaaactgayctattctcacttgctgtttcttctggcattatcccttcttttgacgagatttttattgcatatcttattttaccttatctccttagatgctaatcttccttttagtacataaacttttcaagtaagagaacaaaattgtttttgcagagttttgaacgaaagttataaacattggaaaatttctctcagtggtagactgttactaaataattagatgcagtgcacat

SEQ ID NO: 85425 - DNA, 1071 bp, Homo sapiens
tctctgaaaactataatcaataacattccaaaatattgcactctaatatgacaagcctgttcttagcttgtgccactccatcatatttaaatctataaactccacttattatttcaactactaacatttattccagaaatggtagtagaggacaaaaaaatgacagtttagcgttcacaaggatattaatgcttacaacagcattttgaatgtayaaatttgttcaaacttattcatgtatttttttctactgtatattatttgacaattatcaaattaaaatcctgatagaataactctactaaaattacagaaataataattcatatactattagtactactaatacatgtattatcacagcctttaattatattaatgagaataaaatgaaaatactaaacaaaaatttataaaaatatgtaattaaatacatatttttaaacactgttcacttcaacatatagctgaaaaatgaaaagatgtaattgggccactgagctgctgttaagcagatactattctatttgaaaggctaaaatgactttaatacagagctgtttttgaggagtacaggacaacttttataaagacagtcactacaggggttaagaacacagactatggagtaaaatccagattcaaattcttaatattctgttcaccagtggggagtatttggaacatttatttaacctttctgaactttggttttcttgttctacaactggaaaaaatttcccattggttttaagttccaaaagttatgagaaataataaaaatgtttttttagcagaatattttacatactgcatttattaccaattagatagggagtatgactttcagcttctcaagtgagagtaagttagtttaaaatcttgttctgtacataccccatttgagacaattgaggtcatagaaagctccctgaacctcattttgtcctctataaaatggggccaatgatagtatcaatgtgttttgagaagttgctgcatggaacaggaatggtgttactgctattgctaacaaagcattttttgagaagacaaatttatgattactgc

SEQ ID NO: 85426 - DNA, 1071 bp, Homo sapiens
tctctgaaaactataatcaataacattccaaaatattgcactctaatatgacaagcctgttcttagcttgtgccactccatcatatttaaatctataaactccacttattatttcaactactaacatttattccagaaatggtagtagaggacaaaaaaatgacagtttagcgttcacaaggatattaatgcttacaacagcattttgaatgtataaatttgttcaaacttattcatgtatttttttctactgtatattatttgacaattatcaaattaaaatcctgatagaataactctactaaaattacagaaataataattcatatactattagtactactaatacatgtattatcacagcctttaattatatyaatgagaataaaatgaaaatactaaacaaaaatttataaaaatatgtaattaaatacatatttttaaacactgttcacttcaacatatagctgaaaaatgaaaagatgtaattgggccactgagctgctgttaagcagatactattctatttgaaaggctaaaatgactttaatacagagctgtttttgaggagtacaggacaacttttataaagacagtcactacaggggttaagaacacagactatggagtaaaatccagattcaaattcttaatattctgttcaccagtggggagtatttggaacatttatttaacctttctgaactttggttttcttgttctacaactggaaaaaatttcccattggttttaagttccaaaagttatgagaaataataaaaatgtttttttagcagaatattttacatactgcatttattaccaattagatagggagtatgactttcagcttctcaagtgagagtaagttagtttaaaatcttgttctgtacataccccatttgagacaattgaggtcatagaaagctccctgaacctcattttgtcctctataaaatggggccaatgatagtatcaatgtgttttgagaagttgctgcatggaacaggaatggtgttactgctattgctaacaaagcattttttgagaagacaaatttatgattactgc

SEQ ID NO: 85427 - DNA, 1071 bp, Homo sapiens
tctctgaaaactataatcaataacattccaaaatattgcactctaatatgacaagcctgttcttagcttgtgccactccatcatatttaaatctataaactccacttattatttcaactactaacatttattccagaaatggtagtagaggacaaaaaaatgacagtttagcgttcacaaggatattaatgcttacaacagcattttgaatgtataaatttgttcaaacttattcatgtatttttttctactgtatattatttgacaattatcaaattaaaatcctgatagaataactctactaaaattacagaaataataattcatatactattagtactactaatacatgtattatcacagcctttaattatattaatgagaataaaatgaaaatactaaacaaaaatttataaaaatatgtaattaaatacatatttttaaacactgttcacttcaacatatagctgaaaaatgaaaagatgtaattgggccactgagctgctgttaagcagatactattctatttgaaaggctaaaatgactttaatacagagctgtttttgaggagtacaggacaacttttataaagacagtcactacaggggttaagaacacagactatggagtaaaatccagattcaaattcttaayattctgttcaccagtggggagtatttggaacatttatttaacctttctgaactttggttttcttgttctacaactggaaaaaatttcccattggttttaagttccaaaagttatgagaaataataaaaatgtttttttagcagaatattttacatactgcatttattaccaattagatagggagtatgactttcagcttctcaagtgagagtaagttagtttaaaatcttgttctgtacataccccatttgagacaattgaggtcatagaaagctccctgaacctcattttgtcctctataaaatggggccaatgatagtatcaatgtgttttgagaagttgctgcatggaacaggaatggtgttactgctattgctaacaaagcattttttgagaagacaaatttatgattactgc

SEQ ID NO: 85428 - DNA, 1071 bp, Homo sapiens
tctctgaaaactataatcaataacattccaaaatattgcactctaatatgacaagcctgttcttagcttgtgccactccatcatatttaaatctataaactccacttattatttcaactactaacatttattccagaaatggtagtagaggacaaaaaaatgacagtttagcgttcacaaggatattaatgcttacaacagcattttgaatgtataaatttgttcaaacttattcatgtatttttttctactgtatattatttgacaattatcaaattaaaatcctgatagaataactctactaaaattacagaaataataattcatatactattagtactactaatacatgtattatcacagcctttaattatattaatgagaataaaatgaaaatactaaacaaaaatttataaaaatatgtaattaaatacatatttttaaacactgttcacttcaacatatagctgaaaaatgaaaagatgtaattgggccactgagctgctgttaagcagatactattctatttgaaaggctaaaatgactttaatacagagctgtttttgaggagtacaggacaacttttataaagacagtcactacaggggttaagaacacagactatggagtaaaatccagattcaaattcttaatawtctgttcaccagtggggagtatttggaacatttatttaacctttctgaactttggttttcttgttctacaactggaaaaaatttcccattggttttaagttccaaaagttatgagaaataataaaaatgtttttttagcagaatattttacatactgcatttattaccaattagatagggagtatgactttcagcttctcaagtgagagtaagttagtttaaaatcttgttctgtacataccccatttgagacaattgaggtcatagaaagctccctgaacctcattttgtcctctataaaatggggccaatgatagtatcaatgtgttttgagaagttgctgcatggaacaggaatggtgttactgctattgctaacaaagcattttttgagaagacaaatttatgattactgc

SEQ ID NO: 85429 - DNA, 545 bp, Homo sapiens
tgccgtccccgccccgctgtgccctcacggtgggtcagagtctgggctcagcctaactgccgggcgctgagggtgtgagttggcttggaagtggcttttggggctcctgtatttttacccgcctctttccctcaccagtgtgctgcctagaaaatactccttcctcggaacgcggtgtttttcaacttacttgagaaacattcagagcaagtctccactcttgtggttttggctccaggactatttcatctcttttggggggaaggggcagaaaagtaggcaaagagaagaatgcatggtattgaatagttctcgttgacaagtacttggggatttcatttgttgatttgctctcccttcaaaaataaaaaattagggagaaaaacagtgtaattcttgcctgcgaactagactcagtttttctctaacttacagaaagtgggcgtktccagctcaaagctcaggttttcactgcaagggtaaccgcgcaagagatgtcaaagtcctcaattctctgagtcccttccttgttttagtctcaggtt

SEQ ID NO: 85430 - DNA, 1489 bp, Homo sapiens
ggggtgtaatggttaaattgctaccagctgattaaacagcagcagtcgaagctgtaatcctcagcgttcaggaacctgggaaggcagggacgagtgccctgaccgcttagcccctgctgacccccctgccaggcgcccgcccagtttcacccctttcatttgtcccgggttgcttaatagaatctgctgggaaggggcgaggggctgagaaggaagaggaaggaggagggaagagggaacaggcaagaggggaggaggagagggtccctccaccagctctggttcaacctccaaggaatgttgctcccacccctgtcccttcctgcccccctgtaaaaccacacacacacacacacacacactctcacacatgcacatacattagcgtacacactcacatgttcacacacttacagatacttgcatatactcacagccacacacacacacccacatgctcccttgttcatacacacagccacgcacacactttctcaaactcatacatacagacacacatacacactcatgctcacacacagtcacatatgcataaacgcatgatcacacacacacagccacacacattcacacactttgataccccccagagccagtctctttctcattctctgcagaatgaagaccacatgaaggagaaatcccacctgccctgctgctcctcctgggaaagcttcctccccgcacctgccccccatatagggaagggtcagaaagatgggaactgtgagatcagagaccggtctgggaagcgggaaagtgcaggctttgggtgcaggcagccagctgcaggatcctggagtcaggacttcctttcttcctgcctctctgaggatcgagtgggaaaaacacccagcccagtcaggcaggcacaaaacatgtgttacctcgatgatctgtgctgggtgctggggtgcagtgcagctggcatagccttctgcacccttgaaagcaacgtgtcccttgggctccttgatggacacttcccacccttggctcttcacctgcaaactgacctgtgaccatcatatgagaccctgggtgtgcaaaggtgtggccacaacttagcacatgccagggtcccacgacgatggttttcctgtatgattaacgttgctgtcgattcaggctctggactaagaatagcagggggcagccagcctccttgggaaagtttatttcygtggaaagtatagttcagatgagtgaggatctggcctcgattcatcctccctccctcacacttagtcagaaaccagggaagggcctactggatggagggggaattggctcacaagcactggaagtttgccactgctccaagtacgctgctctctgaagcaacctttctttttcccctgggagaaaaaagcctccaagcagggtgtaggagagggcagagggaatggctgccgagggccctaggccagccttatttctgtgcagcgggttgaatggtgtctcccat

SEQ ID NO: 85431 - DNA, 677 bp, Homo sapiens
gcctcccaaagtgctgggattacaggccaccatgcccagcctacccctctaaattttattaagctccctgaggacaggaaccatgttactcttgttctctgtttaatccgcactgtctagaacggtgcttggagcttagtagatgttcagttacatggtttcaataagtatatttttgtaaattactttaaaacatcaatgcctccaatgcctacagaagtgtccaaattacttaatgtgatgcacaagctccttgctgttatttatttttttaattctattttattttacatatttatttttagagtccggcttttccttggtcacccaggctggagtgcaatggcaccatcacagctcactgcaacctccaacttctggtctcaaacgatcctctggcctcacctcagcctcctgagttgctgggattacagtcaagagccactgcacccagccccctcactgttgcatgaatggatgaatgagttgattatgaaccgttttggtaaggcaagatgatcattgcattttgggtaacaacatttgacctgtagatagtctgcactcccagaaattatgacatgyctgcaaatacttggcattgttatttaagacatctattgacagggtaataagagttattgaccaagcacccaccttgggtcaggcaccaagct

SEQ ID NO: 85432 - DNA, 659 bp, Homo sapiens
caaatagagttttgatttatttggttatgttcaggtctctctgattctgggatattgagataattctttatatatttttctagaacaaaatcaaccagtattatcagttcaccttgccccaatatgtaaaagctgtttatcaatatcacaaaattatgaaaccatggaaaaacatgaagacaaatgcttaccaagttatccccactctggtgagtgctctctttttatttgcaacttaaaaatagttatcttttgtgctaaaagtaagctagggggatgaaactgacataatcccaataaactcaagtagaagctgaaacaaataaaaatgcctaagctaraaattaaataataaatcatatgcaaatacagcataataaataaaaataataatgttacaaaagtagatgaaattgtaaaaagtagctggaccaagttctagttaacatttatcctttatcttatttaaaaaaaaaaaaaagagatttgacctagggaacatttcttctaacatgaagaatgaatgagagaacaggacattgaacccacagaactaaaatgtattataaacaacatgggttttggaatcagaagacctaatataaataggcttttgaacataggcaagtcacatcatttctctggaattttttaatatg

SEQ ID NO: 85433 - DNA, 1377 bp, Homo sapiens
ttaggtttccatttcttcctccccttatcatttactaacctactgtaggtggaccagacttcaaaaactgtattctcatggcgactgcatggaaacttgagcacattttatggaaaattattgagcacagtcttttcatgatccctgtatgctgtgtgtcctgagggcactaactcagagtgtcctgttactccctcatcagtgtgtcacctggacaattcactgagctcgttctctctctctstgtgtgtgtgtgtgtctgtgtgtgtgtgtgtgtgtgtgtgtgtgtgtgtgtgtctatctgtctttctctttcattcttttccatttggccctgttctgtcccaacatgaaggcaataatttgttacctcattaatggatctatccttttagttttttaaccacttccctatgctacccatgaaacctagttggggctctgttgtgtctgatttcccctggcttattctttactttttcctccttttccaggctcagcagggagctgctggaggtagtagagcctgaagtcttgcaggactcactggatagatgttattcaactccttccagttgtcttgaacagcctgactcctgccagccctatggaagttccttttatgcattggaggaaaaacatgttggcttttctcttgacgtgggaggtgagtacctttctatgaaggtgataaggatccactgagtcttccatataaagatcatattcctgctccaagtggccattactgagctgagagatgtcattgccacagggaggacctataggcacatgtaggttgaatgaaactctagttctacctggaagcccaggcaagggatgggtcagtgagcaagactctcttcctagtctcaggccatacctgtggcgccctgatcctattctcatgacattggacctgggcagatgtgacaaattcagagaactatgattttgactcaagggtttgtagatttcctttttcactctaatttcagtgtctaaagtcctcacaaccatgaacaatctgagtatttgatgagacagggctaaatattgcagtttttctcctagaaatcatttgagggtatttgctttaagttgattggaaaaatatggcataactgtttgcacaaacttgggacaaatgatattgggataacgatctactagaatagggacattttacccacagtttctgggagaaaaaccgaggaagttctatcatgaacagccttcaggcctcctgaaatatatctctcaaagtgtcctattcttatgctggggagcctgaggtccctgtgtgaggattagacagtggattgttatgtgtgtaggggaatcagcttaatgtgtctgtccatgtctgaatttatt

SEQ ID NO: 85434 - DNA, 1377 bp, Homo sapiens
ttaggtttccatttcttcctccccttatcatttactaacctactgtaggtggaccagacttcaaaaactgtattctcatggcgactgcatggaaacttgagcacattttatggaaaattattgagcacagtcttttcatgatccctgtatgctgtgtgtcctgagggcactaactcagagtgtcctgttactccctcatcagtgtgtcacctggacaattcactgagctcgttctctctctctgtgtgtgtgtgtgtgtctgtgtgtgtgtgtstgtgtgtgtgtgtgtgtgtgtgtctatctgtctttctctttcattcttttccatttggccctgttctgtcccaacatgaaggcaataatttgttacctcattaatggatctatccttttagttttttaaccacttccctatgctacccatgaaacctagttggggctctgttgtgtctgatttcccctggcttattctttactttttcctccttttccaggctcagcagggagctgctggaggtagtagagcctgaagtcttgcaggactcactggatagatgttattcaactccttccagttgtcttgaacagcctgactcctgccagccctatggaagttccttttatgcattggaggaaaaacatgttggcttttctcttgacgtgggaggtgagtacctttctatgaaggtgataaggatccactgagtcttccatataaagatcatattcctgctccaagtggccattactgagctgagagatgtcattgccacagggaggacctataggcacatgtaggttgaatgaaactctagttctacctggaagcccaggcaagggatgggtcagtgagcaagactctcttcctagtctcaggccatacctgtggcgccctgatcctattctcatgacattggacctgggcagatgtgacaaattcagagaactatgattttgactcaagggtttgtagatttcctttttcactctaatttcagtgtctaaagtcctcacaaccatgaacaatctgagtatttgatgagacagggctaaatattgcagtttttctcctagaaatcatttgagggtatttgctttaagttgattggaaaaatatggcataactgtttgcacaaacttgggacaaatgatattgggataacgatctactagaatagggacattttacccacagtttctgggagaaaaaccgaggaagttctatcatgaacagccttcaggcctcctgaaatatatctctcaaagtgtcctattcttatgctggggagcctgaggtccctgtgtgaggattagacagtggattgttatgtgtgtaggggaatcagcttaatgtgtctgtccatgtctgaatttatt

SEQ ID NO: 85435 - DNA, 2103 bp, Homo sapiens
aggatcagggcgccacaggtatggcctgagactaggaagagagtcttgctcactgacccatcccttgcctgggcttccaggtagaactagagtttcattcaacctacatgtgcctataggtcctccctgtggcaatgacatctctcagctcagtaatggccacttggagcaggaatatgatctttatatggaagactcagtggatccttatcaccttcatagaaaggtactcacctcccacgtcaagagaaaagccaacatgtttttcctccaatgcataaaaggaacttccatagggctggcaggagtcaggctgttcaagacaactggaaggagttgaataacatctatccagtgagtcctgcaagacttcaggctctactacctccagcagctccctgctgagcctggaaaaggaggaaaaagtaaagaataagccaggggaaatcagacacaacagagccccaactaggtttcatgggtagcatagggaagtggttaaaaaactaaaaggatagatccattaatgaggtaacaaattattgccttcatgttgggacagaacagggccaaatggaaaagaatgaaagagaaagacagatagacacacacacacacacacacacacacacacacacacacacagacacacacacacacacagagagagagaacgagctcagtgaattgtccaggtgacacactgatgagggagtaacaggacactctgagttagtgccctcaggacacacagcatacagggatcatgaaaagactgtgctcaataattttccataaaatgtgctcaagtttccatgcagtcgccatgagaatacagtttttgaagtctggtccacctacagtaggttagtaaatgataaggggaggaagaaatggaaacctaaatatctactgcaatgaaaaccaacagcaatgttagtaggaataattcaggcttgctggaaaagatgtaatcgataatgtcagcccgctctgttttccctgaaccaggagtctccagatgtcaacacagaagtagctgttcacaattgctcagttacctggggcatggtgggccttggtcttcttcctcttcttggtcctttttagttcctgcaatacattcagacagggacagacaaaataagccaattcacctacacccataacagtccactgtctaatccccacacagggatctcaggctcctcagcatgagaacaggacaatgtgagagagatacttcaggaggcctgaaagctggtcatgatattctttggtttgcatctcagaaccaagggtgaaatatccccattctggtagatcgttatcccaaaatcatttatcccaagtttgtgcaaacagttatgccttattgttcccatcagttcaaagaaaatgccccagatgatttctaggaggaaaactgcagtattcagccctgtctcatcaaatgcccagctcgttcatggatgcaagaattttagacactgaaattagaatgaaggaggaaatctacaaacccttcagtccaaatcatacttctgtgaattttttacatctgcctgggtccaatgtgctgagagcgggctcagcttgccacaggcatggctggagactaggaatagagccttgctcactgacccatttcatgtctaggcttccaactgagactacagtttcattacaacctatatgcgcccataggtcctgcctgcggcaatgacatctctcgggtcagtaagggccacttggaacaggaatatcacccctatctggaagaccaggtggaggcttatcaccttcacagtaaggtactcactgtccacgtcaagagccaagccaaggtactgttcctccaatgagtaaacagcactgctgtagggctggcctaagtcaggcagttcaagataayctgaaggagtcgaataacatctatccagtgagtcctgcaagacttcaggctctttctcatccagcagctccctgctgagcctggaaaagtaggaaaaagtaaagaataagccagggggaatcagaaaccacacagccccagctagatttcatggctaacataaggaactgtttaaaaagaaaaaggac

SEQ ID NO: 85436 - DNA, 2103 bp, Homo sapiens
aggatcagggcgccacaggtatggcctgagactaggaagagagtcttgctcactgacccatcccttgcctgggcttccaggtagaactagagtttcattcaacctacatgtgcctataggtcctccctgtggcaatgacatctctcagctcagtaatggccacttggagcaggaatatgatctttatatggaagactcagtggatccttatcaccttcatagaaaggtactcacctcccacgtcaagagaaaagccaacatgtttttcctccaatgcataaaaggaacttccatagggctggcaggagtcaggctgttcaagacaactggaaggagttgaataacatctatccagtgagtcctgcaagacttcaggctctactacctccagcagctccctgctgagcctggaaaaggaggaaaaagtaaagaataagccaggggaaatcagacacaacagagccccaactaggtttcatgggtagcatagggaagtggttaaaaaactaaaaggatagatccattaatgaggtaacaaattattgccttcatgttgggacagaacagggccaaatggaaaagaatgaaagagaaagacagatagacacacacacacacacacacacacacacacacacacacacagacacacacacacacacagagagagagaacgagctcagtgaattgtccaggtgacacactgatgagggagtaacaggacactctgagttagtgccctcaggacacacagcatacagggatcatgaaaagactgtgctcaataattttccataaaatgtgctcaagtttccatgcagtcgccatgagaatacagtttttgaagtctggtccacctacagtaggttagtaaatgataaggggaggaagaaatggaaacctaaatatctactgcaatgaaaaccaacagcaatgttagtaggaataattcaggcttgctggaaaagatgtaatcgataatgtcagcccgctctgttttccctgaaccaggagtctccagatgtcaacacagaagtagctgttcacaattgctcagttacctggggcatggtgggccttggtcttcttcctcttcttggtcctttttagttcctgcaatacattcagacagggacagacaaaataagccaattcacctacacccataacagtccactgtctaatccccacacagggatctcaggctcctcagcatgagaacaggacaatgtgagagagatacttcaggaggcctgaaagctggtcatgatattctttggtttgcatctcagaaccaagggtgaaatatccccattctggtagatcgttatcccaaaatcatttatcccaagtttgtgcaaacagttatgccttattgttcccatcagttcaaagaaaatgccccagatgatttctaggaggaaaactgcagtattcagccctgtctcatcaaatgcccagctcgttcatggatgcaagaattttagacactgaaattagaatgaaggaggaaatctacaaacccttcagtccaaatcatacttctgtgaattttttacatctgcctgggtccaatgtgctgagagcgggctcagcttgccacaggcatggctggagactaggaatagagccttgctcactgacccatttcatgtctaggcttccaactgagactacagtttcattacaacctatatgcgcccataggtcctgcctgcggcaatgacatctctcgggtcagtaagggccacttggaacaggaatatcacccctatctggaagaccaggtggaggcttatcaccttcacagtaaggtactcactgtccacgtcaagagccaagccaaggtactgttcctccaatgagtaaacagcactgctgtagggctggcctaagtcaggcagttcaagataacctgaaggagtcgaataacatctatccagtgagtcctgcaagacttcaggctctttctcatccagcagctccctgctgagcctggaaaagtaggaaaaagtaaagaataagccagggrgaatcagaaaccacacagccccagctagatttcatggctaacataaggaactgtttaaaaagaaaaaggac

SEQ ID NO: 85437 - DNA, 2171 bp, Homo sapiens
tggtttccctgaatctgttgcctccaggtgttaacacagaattaagcatccacaattgctgaaagtcacctggggcatggtgggttttgatcttcttccccttcttttcttccccttcttctttccttctttgatcttcttccccttcttttcttccccttccccttcttttcaatttctgcaataaattcagacatggacagacacattaagctgattcccctacacacataacaatccactgtctaatcctcacacagggacctcaggctcctcagcataagaataggacaccgtgagagatatatttcaggaggcctgaaggctggtcatgatagaaattcctcggtttttctcccagaaactgtgggtaaaatgtccctattctagtagatcgttatcccaatatcatttgtcccaagtttgtgcaaacagttatgccatatttttccaatcaacttaaagcaaataccctcaaatgatttctaggagaaaaactgcaatatttagccctgtctcatcaaatactcagattgttcatggttgtgaggactttagacactgaaattagagtgaaaaaggaaatctacaaacccttgagtcaaaatcatagttctctgaatttgtcacatctgcccaggtccaatgtcatgaggataggatcagggcgccacaggtatggcctgagactaggaagagagtcttgctcactgacccatcccttgcctgggcttccaggtagaactagagtttcattcaacctacatgtgcctataggtcctccctgtggcaatgacatctctcagctcagtaatggccacttggagcaggaatatgatctttatatggaagactcagtggatccttatcaccttcatagaaaggtactcacctcccacgtcgagagaaaagccaacatgtttttcctccaatgcataaaaggaacttccatagggctggcaggagtcaggctgttcaagacaactggaaggagttgaataacatctatccagtgagtcctgcaagacttcaggctctactacctccagcagctccctgctgagcctggaaaaggaggaaaaagtaaagaataagccaggggaaatcagacacaacagagccccaactaggtttcatgggtagcatagggaagtggttaaaaaactaaaaggatagatccattaatgaggtaacaaattattgccttcatgttgggacagaacagggccaaatggaaaagaatgaaagagaaagacagatagayacacacacacacacacacacacacacacacacacacacacagacacacacacacacacagagagagagaacgagctcagtgaattgtccaggtgacacactgatgagggagtaacaggacactctgagttagtgccctcaggacacacagcatacagggatcatgaaaagactgtgctcaataattttccataaaatgtgctcaagtttccatgcagtcgccatgagaatacagtttttgaagtctggtccacctacagtaggttagtaaatgataaggggaggaagaaatggaaacctaaatatctactgcaatgaaaaccaacagcaatgttagtaggaataattcaggcttgctggaaaagatgtaatcgataatgtcagcccgctctgttttccctgaaccaggagtctccagatgtcaacacagaagtagctgttcacaattgctcagttacctggggcatggtgggccttggtcttcttcctcttcttggtcctttttagttcctgcaatacattcagacagggacagacaaaataagccaattcacctacacccataacagtccactgtctaatccccacacagggatctcaggctcctcagcatgagaacaggacaatgtgagagagatacttcaggaggcctgaaagctggtcatgatattctttggtttgcatctcagaaccaagggtgaaatatccccattctggtagatcgttatcccaaaatcatttatcccaagtttgtgcaaacagttatgccttattgttcccatcagttcaaagaaaatgccccagatgatttctaggaggaaaactgcagtattcagccctgtctcatcaaatgcccagctcgttcatggatgcaagaattttagacactgaaattagaatgaaggagg

SEQ ID NO: 85438 - DNA, 2171 bp, Homo sapiens
tggtttccctgaatctgttgcctccaggtgttaacacagaattaagcatccacaattgctgaaagtcacctggggcatggtgggttttgatcttcttccccttcttttcttccccttcttctttccttctttgatcttcttccccttcttttcttccccttccccttcttttcaatttctgcaataaattcagacatggacagacacattaagctgattcccctacacacataacaatccactgtctaatcctcacacagggacctcaggctcctcagcataagaataggacaccgtgagagatatatttcaggaggcctgaaggctggtcatgatagaaattcctcggtttttctcccagaaactgtgggtaaaatgtccctattctagtagatcgttatcccaatatcatttgtcccaagtttgtgcaaacagttatgccatatttttccaatcaacttaaagcaaataccctcaaatgatttctaggagaaaaactgcaatatttagccctgtctcatcaaatactcagattgttcatggttgtgaggactttagacactgaaattagagtgaaaaaggaaatctacaaacccttgagtcaaaatcatagttctctgaatttgtcacatctgcccaggtccaatgtcatgaggataggatcagggcgccacaggtatggcctgagactaggaagagagtcttgctcactgacccatcccttgcctgggcttccaggtagaactagagtttcattcaacctacatgtgcctataggtcctccctgtggcaatgacatctctcagctcagtaatggccacttggagcaggaatatgatctttatatggaagactcagtggatccttatcaccttcatagaaaggtactcacctcccacgtcgagagaaaagccaacatgtttttcctccaatgcataaaaggaacttccatagggctggcaggagtcaggctgttcaagacaactggaaggagttgaataacatctatccagtgagtcctgcaagacttcaggctctactacctccagcagctccctgctgagcctggaaaaggaggaaaaagtaaagaataagccaggggaaatcagacacaacagagccccaactaggtttcatgggtagcatagggaagtggttaaaaaactaaaaggatagatccattaatgaggtaacaaattattgccttcatgttgggacagaacagggccaaatggaaaagaatgaaagagaaagacagatagatacacacacacacacacacacacacacacacacacasacacagacacacacacacacacagagagagagaacgagctcagtgaattgtccaggtgacacactgatgagggagtaacaggacactctgagttagtgccctcaggacacacagcatacagggatcatgaaaagactgtgctcaataattttccataaaatgtgctcaagtttccatgcagtcgccatgagaatacagtttttgaagtctggtccacctacagtaggttagtaaatgataaggggaggaagaaatggaaacctaaatatctactgcaatgaaaaccaacagcaatgttagtaggaataattcaggcttgctggaaaagatgtaatcgataatgtcagcccgctctgttttccctgaaccaggagtctccagatgtcaacacagaagtagctgttcacaattgctcagttacctggggcatggtgggccttggtcttcttcctcttcttggtcctttttagttcctgcaatacattcagacagggacagacaaaataagccaattcacctacacccataacagtccactgtctaatccccacacagggatctcaggctcctcagcatgagaacaggacaatgtgagagagatacttcaggaggcctgaaagctggtcatgatattctttggtttgcatctcagaaccaagggtgaaatatccccattctggtagatcgttatcccaaaatcatttatcccaagtttgtgcaaacagttatgccttattgttcccatcagttcaaagaaaatgccccagatgatttctaggaggaaaactgcagtattcagccctgtctcatcaaatgcccagctcgttcatggatgcaagaattttagacactgaaattagaatgaaggagg

SEQ ID NO: 85439 - DNA, 2171 bp, Homo sapiens
tggtttccctgaatctgttgcctccaggtgttaacacagaattaagcatccacaattgctgaaagtcacctggggcatggtgggttttgatcttcttccccttcttttcttccccttcttctttccttctttgatcttcttccccttcttttcttccccttccccttcttttcaatttctgcaataaattcagacatggacagacacattaagctgattcccctacacacataacaatccactgtctaatcctcacacagggacctcaggctcctcagcataagaataggacaccgtgagagatatatttcaggaggcctgaaggctggtcatgatagaaattcctcggtttttctcccagaaactgtgggtaaaatgtccctattctagtagatcgttatcccaatatcatttgtcccaagtttgtgcaaacagttatgccatatttttccaatcaacttaaagcaaataccctcaaatgatttctaggagaaaaactgcaatatttagccctgtctcatcaaatactcagattgttcatggttgtgaggactttagacactgaaattagagtgaaaaaggaaatctacaaacccttgagtcaaaatcatagttctctgaatttgtcacatctgcccaggtccaatgtcatgaggataggatcagggcgccacaggtatggcctgagactaggaagagagtcttgctcactgacccatcccttgcctgggcttccaggtagaactagagtttcattcaacctacatgtgcctataggtcctccctgtggcaatgacatctctcagctcagtaatggccacttggagcaggaatatgatctttatatggaagactcagtggatccttatcaccttcatagaaaggtactcacctcccacgtcgagagaaaagccaacatgtttttcctccaatgcataaaaggaacttccatagggctggcaggagtcaggctgttcaagacaactggaaggagttgaataacatctatccagtgagtcctgcaagacttcaggctctactacctccagcagctccctgctgagcctggaaaaggaggaaaaagtaaagaataagccaggggaaatcagacacaacagagccccaactaggtttcatgggtagcatagggaagtggttaaaaaactaaaaggatagatccattaatgaggtaacaaattattgccttcatgttgggacagaacagggccaaatggaaaagaatgaaagagaaagacagatagatacacacacacacacacacacacacacacacacacacacacasacacacacacacacacagagagagagaacgagctcagtgaattgtccaggtgacacactgatgagggagtaacaggacactctgagttagtgccctcaggacacacagcatacagggatcatgaaaagactgtgctcaataattttccataaaatgtgctcaagtttccatgcagtcgccatgagaatacagtttttgaagtctggtccacctacagtaggttagtaaatgataaggggaggaagaaatggaaacctaaatatctactgcaatgaaaaccaacagcaatgttagtaggaataattcaggcttgctggaaaagatgtaatcgataatgtcagcccgctctgttttccctgaaccaggagtctccagatgtcaacacagaagtagctgttcacaattgctcagttacctggggcatggtgggccttggtcttcttcctcttcttggtcctttttagttcctgcaatacattcagacagggacagacaaaataagccaattcacctacacccataacagtccactgtctaatccccacacagggatctcaggctcctcagcatgagaacaggacaatgtgagagagatacttcaggaggcctgaaagctggtcatgatattctttggtttgcatctcagaaccaagggtgaaatatccccattctggtagatcgttatcccaaaatcatttatcccaagtttgtgcaaacagttatgccttattgttcccatcagttcaaagaaaatgccccagatgatttctaggaggaaaactgcagtattcagccctgtctcatcaaatgcccagctcgttcatggatgcaagaattttagacactgaaattagaatgaaggagg

SEQ ID NO: 85440 - DNA, 2171 bp, Homo sapiens
tggtttccctgaatctgttgcctccaggtgttaacacagaattaagcatccacaattgctgaaagtcacctggggcatggtgggttttgatcttcttccccttcttttcttccccttcttctttccttctttgatcttcttccccttcttttcttccccttccccttcttttcaatttctgcaataaattcagacatggacagacacattaagctgattcccctacacacataacaatccactgtctaatcctcacacagggacctcaggctcctcagcataagaataggacaccgtgagagatatatttcaggaggcctgaaggctggtcatgatagaaattcctcggtttttctcccagaaactgtgggtaaaatgtccctattctagtagatcgttatcccaatatcatttgtcccaagtttgtgcaaacagttatgccatatttttccaatcaacttaaagcaaataccctcaaatgatttctaggagaaaaactgcaatatttagccctgtctcatcaaatactcagattgttcatggttgtgaggactttagacactgaaattagagtgaaaaaggaaatctacaaacccttgagtcaaaatcatagttctctgaatttgtcacatctgcccaggtccaatgtcatgaggataggatcagggcgccacaggtatggcctgagactaggaagagagtcttgctcactgacccatcccttgcctgggcttccaggtagaactagagtttcattcaacctacatgtgcctataggtcctccctgtggcaatgacatctctcagctcagtaatggccacttggagcaggaatatgatctttatatggaagactcagtggatccttatcaccttcatagaaaggtactcacctcccacgtcgagagaaaagccaacatgtttttcctccaatgcataaaaggaacttccatagggctggcaggagtcaggctgttcaagacaactggaaggagttgaataacatctatccagtgagtcctgcaagacttcaggctctactacctccagcagctccctgctgagcctggaaaaggaggaaaaagtaaagaataagccaggggaaatcagacacaacagagccccaactaggtttcatgggtagcatagggaagtggttaaaaaactaaaaggatagatccattaatgaggtaacaaattattgccttcatgttgggacagaacagggccaaatggaaaagaatgaaagagaaagacagatagatacacacacacacacacacacacacacacacacacacacacagacacacacacacacacasagagagagaacgagctcagtgaattgtccaggtgacacactgatgagggagtaacaggacactctgagttagtgccctcaggacacacagcatacagggatcatgaaaagactgtgctcaataattttccataaaatgtgctcaagtttccatgcagtcgccatgagaatacagtttttgaagtctggtccacctacagtaggttagtaaatgataaggggaggaagaaatggaaacctaaatatctactgcaatgaaaaccaacagcaatgttagtaggaataattcaggcttgctggaaaagatgtaatcgataatgtcagcccgctctgttttccctgaaccaggagtctccagatgtcaacacagaagtagctgttcacaattgctcagttacctggggcatggtgggccttggtcttcttcctcttcttggtcctttttagttcctgcaatacattcagacagggacagacaaaataagccaattcacctacacccataacagtccactgtctaatccccacacagggatctcaggctcctcagcatgagaacaggacaatgtgagagagatacttcaggaggcctgaaagctggtcatgatattctttggtttgcatctcagaaccaagggtgaaatatccccattctggtagatcgttatcccaaaatcatttatcccaagtttgtgcaaacagttatgccttattgttcccatcagttcaaagaaaatgccccagatgatttctaggaggaaaactgcagtattcagccctgtctcatcaaatgcccagctcgttcatggatgcaagaattttagacactgaaattagaatgaaggagg

SEQ ID NO: 85441 - DNA, 747 bp, Homo sapiens
ggatccactgagtcttctggttagggtcatattcctactgcaagtggcccttactgagctgagagatgtcattgccacagggaggtcctataggcacatgtaggttgaatgaaactctagttccacttggaagccyagacaagggatgggtcagtgagcaaggctctcttcctagtctcaggccatgcctgtggcgccctaatcctactctcatgacgttggacctgggcagatgtgacaaattcacacaactctgattttgtctcaattttgtagatcttgtagatttcatccttcactctaatttcagcgtctaaaatcctcgctaccgtgaacaatctgagtatttgatgagacagggctgaatagtgcagtttttctcctagcaaccatttgggggcatttgctttaaatcgattggaaaaatatggcataaccatttgcacaaacttgggacaaatgatattgggataacgatctaccagaatagggaattttacccacagtttctgggacaaaaaccaaggaatctctatcgtgatcagccttcaggcctcctgaagactatctctcacagtgtcctattctcatgctgaggagcctgaagtccctgtgtgaggattagacagtggattgttatgtgtgtaggagaaccagcttaatatgtctgtccatgtctgaacttattgcagaaattgaaaagtaccaagaagtggaagaagaccaagacccatcatgccccaggta

SEQ ID NO: 85442 - DNA, 747 bp, Homo sapiens
ggatccactgagtcttctggttagggtcatattcctactgcaagtggcccttactgagctgagagatgtcattgccacagggaggtcctataggcacatgtaggttgaatgaaactctagttccacttggaagcccagacaagggatgggtcagtgagcmaggctctcttcctagtctcaggccatgcctgtggcgccctaatcctactctcatgacgttggacctgggcagatgtgacaaattcacacaactctgattttgtctcaattttgtagatcttgtagatttcatccttcactctaatttcagcgtctaaaatcctcgctaccgtgaacaatctgagtatttgatgagacagggctgaatagtgcagtttttctcctagcaaccatttgggggcatttgctttaaatcgattggaaaaatatggcataaccatttgcacaaacttgggacaaatgatattgggataacgatctaccagaatagggaattttacccacagtttctgggacaaaaaccaaggaatctctatcgtgatcagccttcaggcctcctgaagactatctctcacagtgtcctattctcatgctgaggagcctgaagtccctgtgtgaggattagacagtggattgttatgtgtgtaggagaaccagcttaatatgtctgtccatgtctgaacttattgcagaaattgaaaagtaccaagaagtggaagaagaccaagacccatcatgccccaggta

SEQ ID NO: 85443 - DNA, 747 bp, Homo sapiens
ggatccactgagtcttctggttagggtcatattcctactgcaagtggcccttactgagctgagagatgtcattgccacagggaggtcctataggcacatgtaggttgaatgaaactctagttccacttggaagcccagacaagggatgggtcagtgagcaaggctctcttcctagtctcaggccatgcctgtggcgccctaatcctactctcatgacgttggacctgggcagatgtgacaaattcacacaactctgattttgtctsaattttgtagatcttgtagatttcatccttcactctaatttcagcgtctaaaatcctcgctaccgtgaacaatctgagtatttgatgagacagggctgaatagtgcagtttttctcctagcaaccatttgggggcatttgctttaaatcgattggaaaaatatggcataaccatttgcacaaacttgggacaaatgatattgggataacgatctaccagaatagggaattttacccacagtttctgggacaaaaaccaaggaatctctatcgtgatcagccttcaggcctcctgaagactatctctcacagtgtcctattctcatgctgaggagcctgaagtccctgtgtgaggattagacagtggattgttatgtgtgtaggagaaccagcttaatatgtctgtccatgtctgaacttattgcagaaattgaaaagtaccaagaagtggaagaagaccaagacccatcatgccccaggta

SEQ ID NO: 85444 - DNA, 747 bp, Homo sapiens
ggatccactgagtcttctggttagggtcatattcctactgcaagtggcccttactgagctgagagatgtcattgccacagggaggtcctataggcacatgtaggttgaatgaaactctagttccacttggaagcccagacaagggatgggtcagtgagcaaggctctcttcctagtctcaggccatgcctgtggcgccctaatcctactctcatgacgttggacctgggcagatgtgacaaattcacacaactctgattttgtctcaattttgtagatcttgtagayttcatccttcactctaatttcagcgtctaaaatcctcgctaccgtgaacaatctgagtatttgatgagacagggctgaatagtgcagtttttctcctagcaaccatttgggggcatttgctttaaatcgattggaaaaatatggcataaccatttgcacaaacttgggacaaatgatattgggataacgatctaccagaatagggaattttacccacagtttctgggacaaaaaccaaggaatctctatcgtgatcagccttcaggcctcctgaagactatctctcacagtgtcctattctcatgctgaggagcctgaagtccctgtgtgaggattagacagtggattgttatgtgtgtaggagaaccagcttaatatgtctgtccatgtctgaacttattgcagaaattgaaaagtaccaagaagtggaagaagaccaagacccatcatgccccaggta

SEQ ID NO: 85445 - DNA, 747 bp, Homo sapiens
ggatccactgagtcttctggttagggtcatattcctactgcaagtggcccttactgagctgagagatgtcattgccacagggaggtcctataggcacatgtaggttgaatgaaactctagttccacttggaagcccagacaagggatgggtcagtgagcaaggctctcttcctagtctcaggccatgcctgtggcgccctaatcctactctcatgacgttggacctgggcagatgtgacaaattcacacaactctgattttgtctcaattttgtagatcttgtagatttcatccttcactctaatttcagcrtctaaaatcctcgctaccgtgaacaatctgagtatttgatgagacagggctgaatagtgcagtttttctcctagcaaccatttgggggcatttgctttaaatcgattggaaaaatatggcataaccatttgcacaaacttgggacaaatgatattgggataacgatctaccagaatagggaattttacccacagtttctgggacaaaaaccaaggaatctctatcgtgatcagccttcaggcctcctgaagactatctctcacagtgtcctattctcatgctgaggagcctgaagtccctgtgtgaggattagacagtggattgttatgtgtgtaggagaaccagcttaatatgtctgtccatgtctgaacttattgcagaaattgaaaagtaccaagaagtggaagaagaccaagacccatcatgccccaggta

SEQ ID NO: 85446 - DNA, 747 bp, Homo sapiens
ggatccactgagtcttctggttagggtcatattcctactgcaagtggcccttactgagctgagagatgtcattgccacagggaggtcctataggcacatgtaggttgaatgaaactctagttccacttggaagcccagacaagggatgggtcagtgagcaaggctctcttcctagtctcaggccatgcctgtggcgccctaatcctactctcatgacgttggacctgggcagatgtgacaaattcacacaactctgattttgtctcaattttgtagatcttgtagatttcatccttcactctaatttcagcgtctaaaatcctcgctaccgtgaacaatctgagtatttgatgagacagggctgaatagtgcagtttttctcctagcaaccatttgggggcatttgctttaaatcgattggaaaaatatggcataaccatttgcacaaacttgggacaaatgatattgggataacgatctaccagaatagggaattttacccacagtttctgggacaaaaaccaaggaatctctatsgtgatcagccttcaggcctcctgaagactatctctcacagtgtcctattctcatgctgaggagcctgaagtccctgtgtgaggattagacagtggattgttatgtgtgtaggagaaccagcttaatatgtctgtccatgtctgaacttattgcagaaattgaaaagtaccaagaagtggaagaagaccaagacccatcatgccccaggta

SEQ ID NO: 85447 - DNA, 610 bp, Homo sapiens
agttagaggacagaataagagtacctattcttctggatgtccttttggacatcaaatatgtgaggcgttgggtcttttcwcaggattttctagtcccttccatctttccttctcttttttttttttgagacggagtctcactctgtcgcccaggctggagtgcagtggcgcgatctcggctcactacaaccgccgcctcctggcttcacatctttccttctctttagtgtgtagtgaaggtctgagaaaaatgtctcattagatgaagagctgaactggatgctttcagagctcctcccaagattacacacacgcaaaacagaacttccctaggaaatgtatggagattatttcttgagagagaaagtttttttaccagcttctctgctagtgctaaacataactctatacactaggccttgggctaagttgtttattatcaagaggaagtggattaagcaaataagtttattttcatgacagcggcatgatatttatattggctgaagttcaaaggactgactgtctggcacttatttatcctcttcctctgaggaagcagttttaatgttggctgcaggaagagaggctactacggacaggctccttt

SEQ ID NO: 85448 - DNA, 946 bp, Homo sapiens
cccccgagtgtgcagtggaagcaaaggggcctcacagttgccaacagtaagaacaacaataattataatgattgaagctaataggttgaacacttacatttgtgagacaccattctaaggacttctataactgacactactggatcttcatggtagcactggaggctagaaactaagagtgcctccacgggacagagctgaaggtagtacacagacaggttaagctgaccaaggtcacacagccaggatgcaacaaagccagatgacttccaggtcactggcttccataatctttcttaaagacactagcgctggggagcaccctccaaattatcttattttatccactgtgacagacagatgttatcctttctgattatgccttcagacaaacagaattttcagaagtaaaaacatttcaattcttgccccttggcacaactgggcaaatggaagaccataaagtttcagtactttcccaaagttccagacaagtgacagggcataaattaaaaccttgtgcaaggactatggtatttactttataccmtgtgtcctcccatcccataaggttgtgtccataaccccaaatttttgtaaaccagccctatgttgaaaagaaactatatttcacagagatttataaaaatacagcacaatgataaaatggacagtgatgcagttggcattgccttagcagttatgaatttatctgacagcacccttaatagacaaggatttctatgacgacctttaatttttgcatttgtccttccaatacaacgagtcacattctcaggatcccatagcagaatttacatttctgaaagtccacgttttctctgttaagagttagcccttggaagaatccttcccaggccaattaattgagtatactctgactgtttacagctttgaccactttgaatcataagctgtatgtact

SEQ ID NO: 85449 - DNA, 461 bp, Homo sapiens
agaacttgtcaaaaatccctctgtcttggtgaataagtcaaacagttcatcatttctttccaaaagccaatttgagcatgaaagagcaatatattctttttaaatagtagttttaactattttaagtcctggcctaattttcctctccaactgcaggaagacatcttcaaatggcatcaatgatgcaaattttgctcccccaccccccgccccatctcaccccacgctctctacttcagtcctgtgtacagaaccaccctctggtggatgaaattcttcctttcgcacagaaggccaarcagggatctaccccatggtaaaaattcataaggtttgcagctttccattcttcttcattaaaaaccctcagtcaaataatccagatccattctgcaattcatcttcaacacatgtctattccgagctggcagagcaatgctgtacaaagatggtccacaatg

SEQ ID NO: 85450 - DNA, 659 bp, Homo sapiens
tgcagtatttgttcctatagcaatgttcttataacatgaacacaattttctgttttcttttagccacctgtatagtcaaagctttttccctgttgcttcacagtgcatcctctgtctctgcatgagaaagtaaagtgacttgagaacacgtggatgtgtctgggtcccttgtgcccttccttgtaaccattgaggtactggcaggtgtggatgtaccaggctgtccctggccacagctgccaaggactggggcctggtgttgatgcctactcaagagagctcttggttaaggtggtactaatcccatactgggttagtcacctcttctgtgttgttctcttgctgatggtcctgtacctgtttttgttagggtctaatgctttctggagtatggcttggacattaagcacggaccaagggtatgacttggtgttgccttgccttaataagctctaaggagtggaaagggaaccgtaagtattcaygttctcctgtgttcctggccctgtgctcagaacttaagggatgtcatctcctgaggctttcctaatgacccagggcagtggagaataagggttaagaatggagatttgggcgccaggccatcttgtgtcccagtgccatctctatcacatacttgctgtgaaatacttagactg

SEQ ID NO: 85451 - DNA, 505 bp, Homo sapiens
ctaatatttacatagtgcttcctggactgtttgaaatgttctcacatactaattcacctaatcctcacagccactatgcagtaggtgctatttctccccatttcacagaggagaaaactgaagaacagagagggtaagtaacacgtcccaggatgtacataacatcaatggcaggggctggggttccaccagactatctggccccaaagtcygtgctgctgacttcctaggtcacacggggctcacactcagctgagggtggaatgcaggcctcctctggctttagagagttttaatcagcctaccaatctgaaacagcaaggtagagttggtagaggagctgacttaagggcaggctaggtgaaggtacagctcacatcctggtggccactaggggaatggaaaactacacaaactacaggcctagaatcctgtgttagtctgctctcacgctgctaataaagacatacccaagatggggcaatgtataaaggaaagaggttta

SEQ ID NO: 85452 - DNA, 563 bp, Homo sapiens
tactaactttataacttttatgggaactatcttttgaagatcactcatcatttctccaggaaatgttggtaaaattaatacatttttatatttaaatgatttgtctttttaaaaaataaagtaacagtatatccttttttaaaataaagggcgtgttaaagtatttcttcacttgttcaaacaattgaatcttaataaaaggaagggttcctaacaattgtccttaataaaaggaagtgtatgaataaatgcactttgcactggaatccataaatgtaaaaaaaatagtgacaaaaagctgatctatataatttggtgataaagagttctgcctaggctggcgcggtggctcatgcctgtaatcccagctctttgggaggttgaggtgggtggatcaygaggccaggagatcgagaccatcctgactaacacggtgaaaccccgtctctactaaaaatacaaaaattagtcaggtgtggtggcaggcgcctgcagtcctagttactcgggaggctgaggcaggagaatggcgtgaacccgggaggcagagcttgcaatgagct

SEQ ID NO: 85453 - DNA, 764 bp, Homo sapiens
tgaattccatcaccctaaacctcaactgtcctatcaaaatggttccccctatcacttacgctcttttgtataaggatttataataaacatattttctttattacatttatttaattgtgtaattgtgtgctattgtacaccaattatattttagtactctgtatagatgtgtgtcctggacaagtggctggctgtcttccttctactatattttgacctttggagaactctcaggtcctgaaaacaatcattgcaaaaaatatctcaaggctttgaagcaaaatacattatgtcataagtaattacatgtttttcatttctaccaacttaataaatacctattctgggaaaaagaagatgagtttagtaaacatctgaataagatatctaatgataaagagtgatggaagagaaaaccaatttaactttgatgagtgccaatttatcaccttccttaacaagctatagaccaagcttggtatatctcctcatttcagttttattatacactgtggtaggtacgtttctggtcatgaactattaataatgccaatgttacttataaataatcaactattctgaaattttttttaacatgcacacatactaaggatgtttgtttgaattagtgtattcagtatttgtgataygatagaaggatgaaaatagttcagattaatgactctctcattgcccattttgacagcccctttttcaaagcaccagtattacccacttagaaagtggattgatgccaatgctta

SEQ ID NO: 85454 - DNA, 939 bp, Homo sapiens
tagctttcatttaaatatcatggatataatttaaatagcaaatggttcttgaaggcactactgtttctctctccctggtttatcacttgattattatttaacagggtttccccagggactaaaacaactagattcaatctgccatgctaaactagaaatcatgtcatattttctagctcagataaaacggtcaccattcttaggctgtgttatgttacctgagcctggtttctttcttccattataccgtgtagttccagcattcgcttcctctccgaatgctgtatgattgttgttttgtgtgtgtctcttgtaagaatagaggcgttctctaggccctaatattttggtggaaagagcaccttccatgctgaaatcagtactccattggttggaaatggccaatacatgctattattaagtacctggttggagtcaccctttcagtgcaagccatcagggcattgggggaatgctggttctgctctgtaatataaattacttcttccagttttactttattgcattcagtagatcaatttaaattattgccaaaactgtattgaacaggcttctcattagactgcaaaatccttgagggcaaggattctttcttcaaaactattttaattgcaggtctagtacgtgttaggtgcttgattgctgtagaatcaacaatcaaatcattgttgattcaatgtacaaatttatagagctaaaatctatcctgtttcatatttcatatttccctctccatctttggacagaggtttcctaccagttactaatccattctattttcctcacttgtcgccatatgtcttcccattttgatttcagaatattatgaaagaagtaagctctttcttgtcccctaaacctgycataccctgtgggagctgtgcaatccaggaacactaaattgcttgtagttcatat

SEQ ID NO: 85455 - DNA, 1010 bp, Homo sapiens
ttaacttaaaatataaaacacgtgttttatatcggctgacatgtttgtaaaaggtactatatagtcatgaactttgaggacactgagattatagctacttacaactaacacattagccagccatagttcatggatgccagccaaagacaggagactctcggcccagacacaagtgacattgtcagtcacagcagcagcagagccagagtgtaagcacctgtgcaggttccccaggactygccatggtagacaggatagcaaccctccccaaaacgcgtgctttccttggagacatttatctaaaatctatctgagcaagacatttggctaataggaagaacaagaattctctggagatctgaaggccaagggtgctccttttgatgaaatccactttctctgcttcctagaacatcacctgcacccactcgagggctcacctgtctcatcccttcttttgcctggcacccatgggacaacacaatctgggcccaaaaggggtacgtcaggaaagcaggggtctgggaaactgagctcagctcttgacagtgacgtggagggtatcacccagtggatcccccggataggtccccaggccatgctgcccatgccagcccttcctgtccctgcaactgccgtgtagctcagaggactctcccttgctggctggtcactttcccgtcatgtccatgttctgcagagcccagcctgtggggagctcagttcaggagagcctggaaaggtgcttcaaccaccccacaagccacagtctgctctgttcatctgctgctatttcccaggggccccagccatgggtcattccgaatgcagacagtttgcagcccagcccagggctgcatgttactttaagacctcagcttcagaacataagcaaggtattaataggtgacactttcaggctcttaattgcagcaaaatatctgaaaatcaaactcaaattagggaaactttgactctagctggtttcgcattcttaatgtgaagagccc

SEQ ID NO: 85456 - DNA, 1010 bp, Homo sapiens
ttaacttaaaatataaaacacgtgttttatatcggctgacatgtttgtaaaaggtactatatagtcatgaactttgaggacactgagattatagctacttacaactaacacattagccagccatagttcatggatgccagccaaagacaggagactctcggcccagacacaagtgacattgtcagtcacagcagcagcagagccagagtgtaagcacctgtgcaggttccccaggactcgccatggtagacaggatagcaaccctccccaaaacgcgtgctttccttggagacattwatctaaaatctatctgagcaagacatttggctaataggaagaacaagaattctctggagatctgaaggccaagggtgctccttttgatgaaatccactttctctgcttcctagaacatcacctgcacccactcgagggctcacctgtctcatcccttcttttgcctggcacccatgggacaacacaatctgggcccaaaaggggtacgtcaggaaagcaggggtctgggaaactgagctcagctcttgacagtgacgtggagggtatcacccagtggatcccccggataggtccccaggccatgctgcccatgccagcccttcctgtccctgcaactgccgtgtagctcagaggactctcccttgctggctggtcactttcccgtcatgtccatgttctgcagagcccagcctgtggggagctcagttcaggagagcctggaaaggtgcttcaaccaccccacaagccacagtctgctctgttcatctgctgctatttcccaggggccccagccatgggtcattccgaatgcagacagtttgcagcccagcccagggctgcatgttactttaagacctcagcttcagaacataagcaaggtattaataggtgacactttcaggctcttaattgcagcaaaatatctgaaaatcaaactcaaattagggaaactttgactctagctggtttcgcattcttaatgtgaagagccc

SEQ ID NO: 85457 - DNA, 1010 bp, Homo sapiens
ttaacttaaaatataaaacacgtgttttatatcggctgacatgtttgtaaaaggtactatatagtcatgaactttgaggacactgagattatagctacttacaactaacacattagccagccatagttcatggatgccagccaaagacaggagactctcggcccagacacaagtgacattgtcagtcacagcagcagcagagccagagtgtaagcacctgtgcaggttccccaggactcgccatggtagacaggatagcaaccctccccaaaacgcgtgctttccttggagacatttatctaaaatctatctgagcaagacatttggctaataggaagaacragaattctctggagatctgaaggccaagggtgctccttttgatgaaatccactttctctgcttcctagaacatcacctgcacccactcgagggctcacctgtctcatcccttcttttgcctggcacccatgggacaacacaatctgggcccaaaaggggtacgtcaggaaagcaggggtctgggaaactgagctcagctcttgacagtgacgtggagggtatcacccagtggatcccccggataggtccccaggccatgctgcccatgccagcccttcctgtccctgcaactgccgtgtagctcagaggactctcccttgctggctggtcactttcccgtcatgtccatgttctgcagagcccagcctgtggggagctcagttcaggagagcctggaaaggtgcttcaaccaccccacaagccacagtctgctctgttcatctgctgctatttcccaggggccccagccatgggtcattccgaatgcagacagtttgcagcccagcccagggctgcatgttactttaagacctcagcttcagaacataagcaaggtattaataggtgacactttcaggctcttaattgcagcaaaatatctgaaaatcaaactcaaattagggaaactttgactctagctggtttcgcattcttaatgtgaagagccc

SEQ ID NO: 85458 - DNA, 1010 bp, Homo sapiens
ttaacttaaaatataaaacacgtgttttatatcggctgacatgtttgtaaaaggtactatatagtcatgaactttgaggacactgagattatagctacttacaactaacacattagccagccatagttcatggatgccagccaaagacaggagactctcggcccagacacaagtgacattgtcagtcacagcagcagcagagccagagtgtaagcacctgtgcaggttccccaggactcgccatggtagacaggatagcaaccctccccaaaacgcgtgctttccttggagacatttatctaaaatctatctgagcaagacatttggctaataggaagaacaagaattctctggagatctgaaggccaagggtgctccttttgatgaaatccactttctctgcttcctagaacatcacctgcacccactcgagggctcacctgtctcatcccttcttttgcctggcacccatgggacaacacaatctgggcccaaaaggggtacgtcaggaaagcaggggtctgggaaactgagctcagctcttgacagtgacgtggagggtatcacccagtggatcccccggataggtccccaggccatgctgcccatgccagcccttcctgtccctgcaactgccgtrtagctcagaggactctcccttgctggctggtcactttcccgtcatgtccatgttctgcagagcccagcctgtggggagctcagttcaggagagcctggaaaggtgcttcaaccaccccacaagccacagtctgctctgttcatctgctgctatttcccaggggccccagccatgggtcattccgaatgcagacagtttgcagcccagcccagggctgcatgttactttaagacctcagcttcagaacataagcaaggtattaataggtgacactttcaggctcttaattgcagcaaaatatctgaaaatcaaactcaaattagggaaactttgactctagctggtttcgcattcttaatgtgaagagccc

SEQ ID NO: 85459 - DNA, 1010 bp, Homo sapiens
ttaacttaaaatataaaacacgtgttttatatcggctgacatgtttgtaaaaggtactatatagtcatgaactttgaggacactgagattatagctacttacaactaacacattagccagccatagttcatggatgccagccaaagacaggagactctcggcccagacacaagtgacattgtcagtcacagcagcagcagagccagagtgtaagcacctgtgcaggttccccaggactcgccatggtagacaggatagcaaccctccccaaaacgcgtgctttccttggagacatttatctaaaatctatctgagcaagacatttggctaataggaagaacaagaattctctggagatctgaaggccaagggtgctccttttgatgaaatccactttctctgcttcctagaacatcacctgcacccactcgagggctcacctgtctcatcccttcttttgcctggcacccatgggacaacacaatctgggcccaaaaggggtacgtcaggaaagcaggggtctgggaaactgagctcagctcttgacagtgacgtggagggtatcacccagtggatcccccggataggtccccaggccatgctgcccatgccagcccttcctgtccctgcaactgccgtgtagctcagaggactctcccttgctggctggtcactttcccgtcatgtccatgttctgcagagcccagcctgtggggagctcagttcaggagagcctggaaaggtgcttcaaccaccccacaagccacagtctgctctgttcatctgctgctatttcccaggggccccagccatgggtcattcckaatgcagacagtttgcagcccagcccagggctgcatgttactttaagacctcagcttcagaacataagcaaggtattaataggtgacactttcaggctcttaattgcagcaaaatatctgaaaatcaaactcaaattagggaaactttgactctagctggtttcgcattcttaatgtgaagagccc

SEQ ID NO: 85460 - DNA, 1427 bp, Homo sapiens
tcttgtccccgtgtgcagagaggcctggtgctggatatcgtttatgtgagttgagcggatagctgaggctatgtggatgcatgtaactagttagagcattttactaagttaatgaccgaaatcagagctctcaggtcactactggaatcagctcctctccctgtgaagtagttaactgtggtcatgatctgccctctgcacttcccagttaattgcacctgcttcctgttttcacgtggggagagcatcctcacccagccttggaagcactgacattcgagttgtgcgtgggctgctgatgaatcctggttcagtgagcttagctgcctaggcagggtggtaattagagtacggagttttacaggagaatctactgcataattcatgaggaaactgaaacgcaaaaaagatgtgtagttaaagccatgtgctcctgtgagtgggtgggcacgtgcagtcactctgcctgcaatagcagaggcggaagagccgcagagacccgtgggctcaagaaaagtacattcattaattaattaatcttataacataaaaacttttgatgttcaatcggcctactcagacattcctcaccaaatagaagtaggaaggacacggggaaatgcaacttttcaatgaagcatccatcagcaatttaatgccttgttttgtccacttttccttcttgtgaagagtgtaatgtcgaagttagagccacatctccacctttagaaagacgtggctgaaatgtctgaagggcaggagaggtgacccttggtgagaagatggctctttgctgatataagtcacccccgatggcatgggtccctggtcaggaggctgttttacatccttagcttgtagaaacgcaaagcacaggggaatggtgtccccagagtccatgagaggagcttcgcacagggacagactgcggtccccagagtccatgagaggagcctcacatggggacagactgccgtccccagagtccatgagaggagcctcgcacggggacgtgactgctgtccccagattccagactcctacctcctactcagaaaaactggagccattaaaatggttactgctgaatgtggagctttttgtggtgtgagagagccccatgtttatttcctgaatttcaattaacaaaaaccctcctgtatttgtctttagttttatctgactcatataaactgggaaattacctacctgagtttgaacaaagctgaataatttttcaaattttacaggggaatttaattaagtttgaatgacagcattttattttccaratttgttttaaaatgaattgagctgtaataagagttggaagataacacagagctcccaaacctccttcacccacctgctcagtgttaactctatgcacggccacagcacagcaaccaggaccagggagtggacgt

SEQ ID NO: 85461 - DNA, 1541 bp, Homo sapiens
aggctccccctggaccacacacggtcaccgtaagcacatggtgctccggggggtcctgcttggtgggtggctcacccttatgtgtcaggcacccattttatagatcaaaacgtagaggtctggaagtctcagaagcagcaaggctgtggccgctcagtctcacagtctcacgtcccaggtctttacagagaaccaacacacatcctcatacttgaagctcgatgataagtactcagcgaaaagtatcaggccagtgccgtgactcacatctgcaatcccaacacagtatcatcaggccagtgccgtgactcacatctgcaatcccaacacagtatcaggccagtgccgtgactcacatctgcaatcccaacacagtatcatcaggccagtgccgtgactcacatctgcaatcccaacacagtatcaggccagtgccgtgactcacatctgcaatcccaacacagtatcaggccagtgccgtgactcacatctgcaatcccaacacagtatcatcaggccagtgccgtgactcacatctgcartcccaacacagtatcaggccagtgccgtgactcacatctgcaatcccaacacagtatcaggccagtgccgtgactcacatctgcaatcccaacacagtatcatcaggccagtgccgtgactcacatctgcaatcccaacacagtatcaggccagtgccgtgactcacatctgcaatcccaacacagtatcaggccagtgccgtgactcacatctgcaatcccaacacagtatcatcaggccagtgccgtgactcacatctgcaatcccaacacagtatcaggccagtgccgtgactcacatctgcaatcccaacacagtatcatcaggccagtgccgtgactcacatctgcaatcccaacacagtatcaggccagtgccgtgactcacatctgcaatcccaacacagtatcaggccagtgccgtgactcacatctgcaatcccaacacagtatcatcaggccagtgccgtgactcacatctgcaatcccaacacagtattaggccagtgccgtgactcacatctgcaatcccaacacagtatcaggccagtgccatgactcacatctgcaatcccaacactttgggaggccgaggcgggaagatcacttgaggctaggagttcaagaccagcctgaccaacatggcaaaaccccatctctactaaaaatacaaaaaaaaattagctgggcgtggtggtgcccacctgtcatcccagctactcgggaggctgaggcacgagaatcagttgaacccaggaggtggaggttgcagagtcgagatcacaccactgcactccagtctaggtgacagagtgagaatccatctcaaaaaaaaaaaaaaaagagagagagagaaaaaaagaaaagcatcagtcctggatagagtttaggttgtatcaacttgcctgcaaactgtaggaaggtgagaataagaagggaaagatcttggctggtgctcagactgggtgggtgcaggagagactcttgttccagagcagg

SEQ ID NO: 85462 - DNA, 1541 bp, Homo sapiens
aggctccccctggaccacacacggtcaccgtaagcacatggtgctccggggggtcctgcttggtgggtggctcacccttatgtgtcaggcacccattttatagatcaaaacgtagaggtctggaagtctcagaagcagcaaggctgtggccgctcagtctcacagtctcacgtcccaggtctttacagagaaccaacacacatcctcatacttgaagctcgatgataagtactcagcgaaaagtatcaggccagtgccgtgactcacatctgcaatcccaacacagtatcatcaggccagtgccgtgactcacatctgcaatcccaacacagtatcaggccagtgccgtgactcacatctgcaatcccaacacagtatcatcaggccagtgccgtgactcacatctgcaatcccaacacagtatcaggccagtgccgtgactcacatctgcaatcccaacacagtatcaggccagtgccgtgactcacatctgcaatcccaacacagtatcatcaggccagtgccgtgactcacatctgcagtcccaacacagtatcaggccagtgccgtgactcacatctgcaatcccaacacagtatcaggccagtgccgtgactcacatctgcaatcccaacacagtatcatcaggccagtgccgtgactcacatctgcaatcccaacacagtatcaggccagtgccgtgactcacatctgcaatcccaacacagtatcaggccagtgccgtgactcacatctgcaatcccaacacagtatcatcaggccagtgccgtgactcacatctgcaatcccaacacagtatcaggccagtgccgtgactcacatctgcaatcccaacacagtatcatcaggccagtgccgtgactcacatctgcaatcccaacacagtatcaggccagtgccgtgactcacatctgcaatcccaacacagtatcaggccagtgccgtgactcacatctgcaatcccaacacagtatcatcaggccagtgccgtgactcacatctgcaatcccaacacagtattaggccagtgccgtgactcacatctgcaatcccaacacagtatcaggccagtgccatgactcacatctgcaatcccaacactttgggaggccgaggcgggaagatcacttgaggctaggagttcaagaccagcctgaccaacatggcaaaaccccatctctactaaaaatacaaaaaaaaattagctgggcgtggtggtgcccacctgtcatcccagctactcgggaggctgaggcacgagaatcagttgaacccaggaggtggaggttgcagagtcgagatcacaccactgcactccagtctaggtgacagagtgagaatccatctcaaaaaaaaaaaaaaaagagagagagagaaaaaaagaaaagcatcagtcctggatagagtttaggttgtatcaacttgcctgcaaactgtaggaaggtgagaataagaagggaaagatcttggctggtgctcagactgggtgggtgcaggagagactcttgttccagrgcagg

SEQ ID NO: 85463 - DNA, 582 bp, Homo sapiens
cgggtccaggattagggccccggcggggcgtgggcggggcctgggagtttattgcccgccccccgccccaagtctccgcccccgactccccacaccccttcctcagagcctccagtctggggacctttccgagactgtaaaggcggggccgcagtttggctccgcctgagaggggagggccgggggcggaggacccactygaaggctgcggaagccgccagcgggagggagcgccgagggctctggcgggcgctgcgctgtccccggaggagtccggagtccggctgaaagcaaaggttctcgaggctaactgtagcccccgcgctggtaacccgacacccctttcccagcgccgcacgcggggccgggagcgggcgcgccagggcagggactgaggagcaattccctttctcaaggcctgcggggtctttctgcgggaccctctttggctgtgagtgatggggaggaaacttgtgagactcggcctctccctcaggcgggccctgacccggtcggcccctggtccccggcccaccaggccaggggccccgcgggggtcccgccggccgagaggtcgccccc

SEQ ID NO: 85464 - DNA, 591 bp, Homo sapiens
ctttatagagtgatgtactgaaactgaacaacagaaagactggattgaagtaactcagcaggtcagagacaaagctgtctaagaccagatgtcctggtctgaaggtgaggtcttggtgggtaatgggtcttccaagggctggggagaggttaggggcttagattgaatgtaagaagggaggggacccacagggtcaagggcttagacagaagggtgctcaggaccaaggcctgagagggtctcgagggcaggaaaaggagttgcttagggctggtcagggagacctagaggtggcagggcaagagaaaaggacagggaggggatataggtggggcccagctgacccgcttctggttgtagttgacagccagtcgcagcctcaccaggytggggatgccttcctcaaaggccaggcccaggccttcagcctcgggctcagtctcgctgtcctcggccaggtcgttgagcactgcagtgacctcactctggttccagcacatgcccagcagctgaaagccatagtcctggctcagtgactccagagcaatgtactcaggctgtagagaagcaggtccgtgtatgcctaccacc

SEQ ID NO: 85465 - DNA, 712 bp, Homo sapiens
ctgtaatagtttccgtaacgaatctcagagtaataaaaaaaaagttaccattttttcaagcttatatgacagatattaggctaaataacttatatagattatttccttcaaaacaaccctgaaaagcagggagtatatttttcaaaaagctcagagcattttaaaacttgcccaaggtgccacagctcctgaatggtaggaacagaagttcaaacctatatttaagcccctgttcttcccaggatgatgaactccaaggtcttaggcgtctattaaataataagactttaactcttgtgctctaagagatgtcagggttgcaacactgaraagcaaaatagtatgtctaggtccttcattttcaacgatttaggtgaaaagaactaatcagtatcaagctggggagtgaacttagaatcaagtaaccaaaaataatcagcgaaaataaatcaacacggaccgaggtacgagtgttatgttaaagagccttaattcctttttttgatacggagtttcgttctgttgcccaggctgaagtacagtggcacaatctcggctcactgcagcctctgttcaagtgattctctcgcctcagcctcccaagtagctgggactacaagggcacgccaccaggcctggctaatttttgcatttttagtagagatggggtttcacaatgtgcccaggctggtcacgaactcctgacctcagg

SEQ ID NO: 85466 - DNA, 650 bp, Homo sapiens
ctcctccatgcccccgatacctctcaccaggccccatctccaacattcgggatcacatttcaacgtgagacttggaggagacaaatatccaaactatatcatttctctttttgccttgtcctaataaaggaaggaagttacttgtggtgataaaggccttggttttcactttgttgtctgctgcctgttgaaatgggtcagaatataaaagggtttttctgaggaaaagtaaatgcttggaaaagttcttgttactgggcctattatattagttcccaataagaatttgagctacactgtgctaatagagtccatgagcccsctggtgtcccatctctcagtagaggacagggcagcatattccactccagtagtcgttgtataaaatatatttgaagcacaactctcattacaaggtacgcaatacatttttagtgtgtcattgagaaacatccaggaaatcactcagagaagctttcctgtattctctgagcatattccctttaaaggcttctcaaagtcagatgactcatttatgctacagatttgtgtgtgaggaccatagttacttgcctacgtctcatttcagccacgtctttcttccttcctcctcctccccttcttcttctcctcctacttctacttcttct

SEQ ID NO: 85467 - DNA, 622 bp, Homo sapiens
taaaacacagattgctaggcctcgccagagcttcttagtggttctagagaagcctgataatttgcatttctaacatgttcccaggtggtgctgatgctgtgagtacagagattgcattttgagaaccactattctaattacagtgttacagtatgataattatacaaggtgctttaaatcagtttatattttcattctctacttctgcaagagaaactgaaagattaatgtggaaatttacaattttgataaagaatatgtactgagaaaaattatatttttaaaaacctagtatctcctatgacttcagcatatccaatacatctgaggctaagaagccaaatcatcttttgctcactggcatgctgctaggggatatatttctggtttcacctttgygaatggaccaagagatggctctcgctgaggctggaggtgttggtatacactcaggagtccagctgcatcttcagtctggtgggtctatttaacctcaccatatttaatgaaccatcatctacccggacgaaaggattgcatcagtgcattctgctgcagccaaagtacaggaccctatgtgtctttctctgaacatgttacctttggaattcaaacacaacta

SEQ ID NO: 85468 - DNA, 622 bp, Homo sapiens
taaaacacagattgctaggcctcgccagagcttcttagtggttctagagaagcctgataatttgcatttctaacatgttcccaggtggtgctgatgctgtgagtacagagattgcattttgagaaccactattctaattacagtgttacagtatgataattatacaaggtgctttaaatcagtttatattttcattctctacttctgcaagagaaactgaaagattaatgtggaaatttacaattttgataaagaatatgtactgagaaaaattatatttttaaaaacctagtatctcctatgacttcagcatatccaatacatctgaggctaagaagccaaatcatcttttgctcactggcatgctgctaggggatatatttctggtttcacctttgcgaatggaccaagagatggctctcgctgaggctggaggtgttggtatacactcaggagtccagytgcatcttcagtctggtgggtctatttaacctcaccatatttaatgaaccatcatctacccggacgaaaggattgcatcagtgcattctgctgcagccaaagtacaggaccctatgtgtctttctctgaacatgttacctttggaattcaaacacaacta

SEQ ID NO: 85469 - DNA, 622 bp, Homo sapiens
taaaacacagattgctaggcctcgccagagcttcttagtggttctagagaagcctgataatttgcatttctaacatgttcccaggtggtgctgatgctgtgagtacagagattgcattttgagaaccactattctaattacagtgttacagtatgataattatacaaggtgctttaaatcagtttatattttcattctctacttctgcaagagaaactgaaagattaatgtggaaatttacaattttgataaagaatatgtactgagaaaaattatatttttaaaaacctagtatctcctatgacttcagcatatccaatacatctgaggctaagaagccaaatcatcttttgctcactggcatgctgctaggggatatatttctggtttcacctttgcgaatggaccaagagatggctctcgctgaggctggaggtgttggtatacactcaggagtccagctgcatcttcagtctggtgggtctatttaacctcaccatatttaatgaaccatcatctacccggacgaaaggattgcatcagtgcattctgctgcagccaaagtacaggacmctatgtgtctttctctgaacatgttacctttggaattcaaacacaacta

SEQ ID NO: 85470 - DNA, 2490 bp, Homo sapiens
tacttctatctcccattgttatgattggcaaagcacaaagccatactcaaattggaatgcttgggcacattgcagtatttatcacagggtggactggatactgagtttcttaatttataaatatttctttccaatgcaaaattcatgaaggcttaatgttgggaaatgtctgaatggctataaattcccttcctaattccctcccctcaatgcatacccatttttttttggctcattcttagaactgtagctgttcttgaatctttgatgagttgaagctaatccacattcggattttacaatctcatataattgccaaaattctacccttcaaaacacttgtttctttcttttttttctcttacatttcctcaaagaaaattagtgaaaaaacaattttttatttggtctgaaactttatggtggaaatctgaggacaggaagaaatttagggacttgttcatgcacttttgatttggygaatgcctggaatatatttttttctctctgcacaatgcaaagtagttgcactcacaaagtatcaattagaaaaagaaattctttccacatttcatcagagttttaagtggttacaccacaataatccccagctatttgggaaatggtaaaaaaaaaaaaaaacaactttgaagatcaagccatcattattattttcactaaaacctaaaaattcagccacaatatgtcaaaccagttgggacaggacttccttccactaatttagtttttactgctggatacctgatgggctacttactatatcaggtgtctcatagggcaaattgtacctggagataaaaaaaagaagaaaaaaacaggctccaccccctagcagcagaatacagcagaacatttaggtacccacagaacataaaccaaaatggactgtatcctggattttaacaaacattaagaattttttaaaaactgaaatcctgtagaatgtatcctccagccaaaatggcatcaaattaaaaatataaaagtaaaataacagcagaatcttaaatacttgaaaaataaacagcatacttttttagttcttttttttacatttttatttattttaagttctggggtaggtgtgaaggatgtgcaggtttgttacataggtaaatttgtgccatggtggttttccctacctatcaacccatcacctcggtttaagcccagcatgcattagagatttttcccaatgctcttcctctccctcccccatccacaggccccagtgtgtgttgcttacttccctgtgtccatgtgttctcattgttcagctcctacttataagtgagaacattagatgtttggctttctgtttctgcattagtttcctgaggataatggcttcctgttccatccatgtccctgcaatggacatgatctccttcatttttatgggtgcatagtattccatgttgtatgggtactgcattttcttcatccagtctattaccaatgggcatttaggttgattccatgtctttgctattgtgaatagtgctaaacagcaagcacacttctaaggagaacgtctcaagggaaacaattaaatatattaaactgaataaaaataaaaatacaacatatcaaacttgatttaacacagttgacgtcagtgctgagaggaaaatgtatttcactaaatatatataatagaaaagtagaaatctctcaaataaaaattcaagctatcacatcaagaaagtagaaaatagtagcaaaataaaatcaaaacaaatataagaaagaatataataaggataagagcagaaataaatgaaacagccaaaagaaaacaacaaagaaaagcaaagaaataaagctggttctttgaaaatatctataaaattgacaaaccttaactaataatgataaagaaaaaagggatgtcataaattaccagtttcatgaatgcaatgggctaacattagcagtagaactcagcaatgtacacaaagaattacacagcatgtcccagtgacgtttactccagtgactgcacacctagacattcatcccactgaaataaaaactttttttttgcacttgcaattggcttcccctctgcttttgttggcaagagcaggtcggtgtcccaggcttagaatccatttttctctctctccgtctgtctctctgtctccgtctctgtctttgtctctgtctctctctctctctctttctttttttgacagagtcttgctttgtcacccaggttgcagtgatgcgatctcgggctcactgcaagctccgcctcccaggttcacgccattctcctgcctcccgagtagctgggactacaggcgcccaccaccatgcccgctagtattttgtatttttagtagagatgaggtttcaccgtgttagccaggatggtctttatctcctgaccttatgatccgcccgcctcagcctcccaaagtgctgggattacacgcgtgagccacagtgcccggccagaatgca

SEQ ID NO: 85471 - DNA, 1165 bp, Homo sapiens
atccatawctccttccaacatggaaggatattccaagactcagtataaacaagtaccaagtgaagactttgaacgcactcctcagagtccgactctcccacctgctaaggtagctgcccctaatctaagtcgaatgggcgcgattcctgtgatgattcccgcacagagcaaggatgggtctatagtatagagcctccatacatctcatctgtgctctccgtgttcctttcctttttttgatatatgaaaacctattctggtctaaattttgttactagcctcagaatgtatcagaaaataagttaatcaggagctgtaaggaatatatttttaaaaatttttgtttggttatatcgaaatagttacgggcattaaagttagtaaagacaagtttaccatctgaaaaggctggattttctttaagaggctgattataaaggtttctaaatgttatcagtacctaagtaagatgtagcactttgagtatgaaatcataggtgaagaaatcggtgaacttacttgcataccaagttgatacttgagtaaccatctgaaagtggtacttgataatttttaccattatttttaggatgtgtatctcatttatttatggcccacaagtctcccccaaattagtacagaaacatccctgacaaaattacttatgtacgtttgtacttgttttcacagctcctcggaaaactctgtgttaggaatatctctaaaaacatagaaaacactacagtgatttagaaattactaattttacttctaagtcattcataaaccttgcctatgaaatgacttcttaaatatttagttgatagactgctacaggtaatagggacttagcaagctcttttatatgctaaaggagcatctatcagattaagttagaacatttgctgtctgccacatattgagatggcactaggtgcaatagcagggatagattttgttggtgagaggtctcatgccttgagatctgtggtggtctttaaaatggtggccagccagaccaaggatgtagtatctcatagtccccaactaaatgctggctttccactttaggtgatatttttctaattagaaaaatattataactcacttattgtttgacaattatagattgaaatttcctaattctaaattttaagtggctctt

SEQ ID NO: 85472 - DNA, 1165 bp, Homo sapiens
atccatatctccttccaacatggaaggatattccaagactcagtataaacaagtaccaagtgaagactttgaacgcactcctcagagtccgactctcccacctgctaaggtagctgcccctaatctaagtcgaatgggcgcgattcctgtgatgattcccgcacagagcaaggatgggtctatagtatagagcctccatacrtctcatctgtgctctccgtgttcctttcctttttttgatatatgaaaacctattctggtctaaattttgttactagcctcagaatgtatcagaaaataagttaatcaggagctgtaaggaatatatttttaaaaatttttgtttggttatatcgaaatagttacgggcattaaagttagtaaagacaagtttaccatctgaaaaggctggattttctttaagaggctgattataaaggtttctaaatgttatcagtacctaagtaagatgtagcactttgagtatgaaatcataggtgaagaaatcggtgaacttacttgcataccaagttgatacttgagtaaccatctgaaagtggtacttgataatttttaccattatttttaggatgtgtatctcatttatttatggcccacaagtctcccccaaattagtacagaaacatccctgacaaaattacttatgtacgtttgtacttgttttcacagctcctcggaaaactctgtgttaggaatatctctaaaaacatagaaaacactacagtgatttagaaattactaattttacttctaagtcattcataaaccttgcctatgaaatgacttcttaaatatttagttgatagactgctacaggtaatagggacttagcaagctcttttatatgctaaaggagcatctatcagattaagttagaacatttgctgtctgccacatattgagatggcactaggtgcaatagcagggatagattttgttggtgagaggtctcatgccttgagatctgtggtggtctttaaaatggtggccagccagaccaaggatgtagtatctcatagtccccaactaaatgctggctttccactttaggtgatatttttctaattagaaaaatattataactcacttattgtttgacaattatagattgaaatttcctaattctaaattttaagtggctctt

SEQ ID NO: 85473 - DNA, 1165 bp, Homo sapiens
atccatatctccttccaacatggaaggatattccaagactcagtataaacaagtaccaagtgaagactttgaacgcactcctcagagtccgactctcccacctgctaaggtagctgcccctaatctaagtcgaatgggcgcgattcctgtgatgattcccgcacagagcaaggatgggtctatagtatagagcctccatacatctcatctgtgctctccgtgttcctttcctttttttgatatatgaaaacctattctggtctaaattttgttactagcctcagaatgtatcaraaaataagttaatcaggagctgtaaggaatatatttttaaaaatttttgtttggttatatcgaaatagttacgggcattaaagttagtaaagacaagtttaccatctgaaaaggctggattttctttaagaggctgattataaaggtttctaaatgttatcagtacctaagtaagatgtagcactttgagtatgaaatcataggtgaagaaatcggtgaacttacttgcataccaagttgatacttgagtaaccatctgaaagtggtacttgataatttttaccattatttttaggatgtgtatctcatttatttatggcccacaagtctcccccaaattagtacagaaacatccctgacaaaattacttatgtacgtttgtacttgttttcacagctcctcggaaaactctgtgttaggaatatctctaaaaacatagaaaacactacagtgatttagaaattactaattttacttctaagtcattcataaaccttgcctatgaaatgacttcttaaatatttagttgatagactgctacaggtaatagggacttagcaagctcttttatatgctaaaggagcatctatcagattaagttagaacatttgctgtctgccacatattgagatggcactaggtgcaatagcagggatagattttgttggtgagaggtctcatgccttgagatctgtggtggtctttaaaatggtggccagccagaccaaggatgtagtatctcatagtccccaactaaatgctggctttccactttaggtgatatttttctaattagaaaaatattataactcacttattgtttgacaattatagattgaaatttcctaattctaaattttaagtggctctt

SEQ ID NO: 85474 - DNA, 555 bp, Homo sapiens
gggttcagggacctccagcgctccgcggtgcaggctgcaggcgacctcaacgtggagctgctgccagcgccacaggccccaggggaggcccaggatgctgcttccccgccccaagaagggcagtttggaggaaagtctttggcctgatggaaggcggcgcccatcgggggcggggctgagaactaggccggcgccgctgcctggtaagcggggaccaagaggcccacggcctccatcaggaaccaggtgcttctccaaatcccggacgtccaggaggaacaacggcgtcaagctggctgacaccaggaacacccagaagtccccgctcctgtctgtccttccgcactcaggagcggggatggccacagggacaccatctgcccacaaaccgctggcgtttgctgccatggtgcgcggagatgcggtccccgaggaggccactttcggccaggacgccgggatcgtatcagcrgcagcatcccgcgctgacactcagtattgacttttcccggacattgctggattttttcctttttaaaacaattttgcagtggg

SEQ ID NO: 85475 - DNA, 555 bp, Homo sapiens
gggttcagggacctccagcgctccgcggtgcaggctgcaggcgacctcaacgtggagctgctgccagcgccacaggccccaggggaggcccaggatgctgcttccccgccccaagaagggcagtttggaggaaagtctttggcctgatggaaggcggcgcccatcgggggcggggctgagaactaggccggcgccgctgcctggtaagcggggaccaagaggcccacggcctccatcaggaaccaggtgcttctccaaatcccggacgtccaggaggaacaacggcgtcaagctggctgacaccaggaacacccagaagtccccgctcctgtctgtccttccgcactcaggagcggggatggccacagggacaccatctgcccacaaaccgctggcgtttgctgccatggtgcgcggagatgcggtccccgaggaggccactttcggccaggacgccgggatcgtatcagcagcagcatcccgcgctgacactcagtattgactttycccggacattgctggattttttcctttttaaaacaattttgcagtggg

SEQ ID NO: 85476 - DNA, 975 bp, Homo sapiens
taaacccaaagaaatacatttcttaaaatgtagctcatattttacctaatttggttcatagggttcctaactcacattgcttaaatgtattccaaagtatatgaaccataagattttgtatacattacacaagttggaaaaaaaattaaaagatgtctaaattttgcaaaaaatattcacaagatctaaaatttctacaatattctagacattttttttttttttttttttgaaatggagtctcgctgtgtcgcccaggctggagtgcagtgacgatctcggctcagtgcaagctccgcctcctgggttcacaccattctcctgcctcagtctcccgagtagctgggactacaggcgcccgctaccacgcccagctaatttttttgtatttttagtagagacggggtttyaccgtgttagccaggatggtctcgatctcctgaccttgtgatccgcccgccttggcctcccaaagtgccaggattacaggcgtgagccaccgcgcttggcctattctagacatatttttaaagttttttctaaaatgttttatttttccttattttttatattctattagccttgactaaaacatgaatacacttttttagatagacttcatcaatttccagttccctgaccaaagaaacctactgtttgaaaaagacaagttccctaaagatgactgctaaaaacaaaaagtgagagaaaaaactcgagggaaaaaaatcttaacttttatactgtattttattcccaagcattaatatggtatacatttgctgatcttttttcactagggtacagcttaaaataaactaaaagaattaaagagaaaaatatttccacaaatatgattctttttgtcatcaacaaagccaagaagatgctcatccaacatgtcaattcaatgacctctgcatttaaacgcaggccaataattaaaggaaataggtggagcaaataaggactgct

SEQ ID NO: 85477 - DNA, 975 bp, Homo sapiens
taaacccaaagaaatacatttcttaaaatgtagctcatattttacctaatttggttcatagggttcctaactcacattgcttaaatgtattccaaagtatatgaaccataagattttgtatacattacacaagttggaaaaaaaattaaaagatgtctaaattttgcaaaaaatattcacaagatctaaaatttctacaatattctagacattttttttttttttttttttgaaatggagtctcgctgtgtcgcccaggctggagtgcagtgacgatctcggctcagtgcaagctccgcctcctgggttcacaccattctcctgcctcagtctcccgagtagctgggactacaggcgcccgctaccacgcccagctaatttttttgtatttttagtagagacggggttttaccgtgttagccaggatggtctcgatctcctgaccttgtgatccgcccgccttggcctcccaaagtgccaggattacaggcgtgagccaccgcgcttggcctattctagacatatttttaaagttttttctaaaatgttttatttttccttattttttatattctattagccttgactaaaacatgaatacacttttttagatagacttcatcaatttccagttccctgaccaaagaaacctactgtttgaaaaagacaagttccctaaagatgactgctaaaaacaaaaagtgagagaaaaaactcgagggaaaaaaatcttaacttttatacygtattttattcccaagcattaatatggtatacatttgctgatcttttttcactagggtacagcttaaaataaactaaaagaattaaagagaaaaatatttccacaaatatgattctttttgtcatcaacaaagccaagaagatgctcatccaacatgtcaattcaatgacctctgcatttaaacgcaggccaataattaaaggaaataggtggagcaaataaggactgct

SEQ ID NO: 85478 - DNA, 770 bp, Homo sapiens
ctagaagcagacgttgagacaggatttcagttgcccatatttattgayggtattttctcaagataaagggagtgagggaagtgagaaagttcaggggaattcactaaagcaagaaggtggttttcactgcagtctagattcagccatatctcatggggataagaaggagcatgacttttaccatataattgtccccaccttgaggcaaaggggctggcattttgtacctccatgtattctttatcgatgttggaaaagcaggttagcaatctgttaggggaaagaacttctggtaggcaaagggaaattctccaaagaagggggcaactatgaactatcagcagccaacactcacagcagctggatcaaataaagagagtgtggccagaacacttaaactgttcagtagatattattggttaatcaagaccatagacatatttaatttaatttcacaatgttcaatcattaaactgtcactgagtacctgttagctactgaaaagtaatagtgaactattattaatatatttaaaaaaaatacatgccctcctcctttatccaggaagaggtcaaaatctctgggggcaagagtcaagtataccaatacagtcataccttagagatactgagaatttggttccagatgccacagcaaagcaaatatcttaataaagtgagttacacacaatgtttggtttcccagtacatgtaaaaattatgtttatagtatgctgcagcctattaagtctgttataaaattatgtctaa

SEQ ID NO: 85479 - DNA, 770 bp, Homo sapiens
ctagaagcagacgttgagacaggatttcagttgcccatatttattgacggtattttctcaagataaagggagtgagggaagtgagaaagttcagsggaattcactaaagcaagaaggtggttttcactgcagtctagattcagccatatctcatggggataagaaggagcatgacttttaccatataattgtccccaccttgaggcaaaggggctggcattttgtacctccatgtattctttatcgatgttggaaaagcaggttagcaatctgttaggggaaagaacttctggtaggcaaagggaaattctccaaagaagggggcaactatgaactatcagcagccaacactcacagcagctggatcaaataaagagagtgtggccagaacacttaaactgttcagtagatattattggttaatcaagaccatagacatatttaatttaatttcacaatgttcaatcattaaactgtcactgagtacctgttagctactgaaaagtaatagtgaactattattaatatatttaaaaaaaatacatgccctcctcctttatccaggaagaggtcaaaatctctgggggcaagagtcaagtataccaatacagtcataccttagagatactgagaatttggttccagatgccacagcaaagcaaatatcttaataaagtgagttacacacaatgtttggtttcccagtacatgtaaaaattatgtttatagtatgctgcagcctattaagtctgttataaaattatgtctaa

SEQ ID NO: 85480 - DNA, 590 bp, Homo sapiens
tcctaacattgggtatatactctaggcaaaatataaaaataactgtatgaaagcatggagactgatcaagagttagaaacctacagggagtatagtcctcaaaaaaaggaagyccaccaagtgacttatacatgtataggcttttcctctgaagatacttcagagttcactgcagtacacagggaaacagctctgtcagcaactggcagtcttactaaggaaacagcttttggagtacagagatgccagagcatctggaaattgaggaagaaatttagaaaatgaataaattacagagagaggaactcaaaatctgcatcctaactcccctccaattcttagctatcttctaaatggcacttgcgcagggtgagatttcaaggaacctagtgaaaaagtcaaatatctgaacagagattttggcagctgtcacagtgttagggtgactgagtttggagttcaggacccgtaaaatagagagttttggtaaatgactttgggttatgttgaaatccaaaaaggaccacaccttagccataagcaccatatcccaggactaagagatacaggctagaattgagaataggatg

SEQ ID NO: 85481 - DNA, 686 bp, Homo sapiens
cacactcgagaactcctgcgcagagcgcatggggaagagagcgcaaactcctagtctgtcgccccctctccctgatttttggttttagaggccaatgcagcggattcaggaacaactgtgggaggaggcctggtggcaatgagaggatgagggacgtggggaaggaccgccaagccttgcggagatgtctcgcccacattccgcccagcgccgccgccacgctggcctccccacctctcagcaccacggacagcgccaggcgcgctccgggtccacgccgagcccgagcgggtcaccactccttcccaccagtcctgggaacgctgcctcagagaatcagctccccttcccgaagctctttcccttctcctcagggtgttggaggttccactacttccttaaggaggctttctcatccccaaatgtctctacttaaaactttgtcacgcttacccccaggaaatyattagacatccatttgactgggtaggagaattccctttttctaaagacctgtccagaatggctcatggtaactacactatagcaaaaaacagactgtcctccagccctatctcactgatctggaagaaggaaggtgtgcatagcattaggggttctcttccccaacccgtccttcctctcatgcacagttgggcaaactgtgggcttcaggaaaaggatcc

SEQ ID NO: 85482 - DNA, 1331 bp, Homo sapiens
atcatgaactggagataagcaaaatgtcttaccaacaggagaatgactagaaaataataccgtattcataatattgaattctactcagacataaaaagaatgaactactcgtaaatgcaacaatatatatgaatctcaaaaacattatgttgagtaaacaaagccagacacaatagtgaacatattgtataattctgtttagctgactattagggctagcaaaactatcctattatgacagaaatcagaatagtggtctcctctgtaggttccctctgctttacctacaaaggagctcgaggaaacgttttgaggtgatgaaaatattctttatcatgattgggacgttggttgtgtggatgtatacatttgtcaaaacactgggcatcacttttcagcatgactcattttgagaagattccagatcaccttcatctcttggaatccacatctcccatcttcccttcttatttgtgggacttcagcttgctcccaatacatccctctcttcactctgctgatggcaaggtgctcacctttaactaatcagatgaggttaatacacaagtttcccagttcctcaaacttctgagtgcccttagagcctcctcacgaggcttgaggtgaaggaaatcaacctctttccttccccacaaaggatttgcaaaagggagatgcatgacacaccaactattctctccaaagaatcctccctcactagccttttccatatcaactcttccatgctctcagattgtgtcccttagcatgccctgtgtaaatgggctggtgccttgctctgcgacagcggcgtcaccctcaggtacttggcatctatctggttgctttcaaagtaagacagcaaagtcccattttaacattcccttgcataattaatctctttcctctgctcatctctcttagmttgttcctgttggcttttgtcactttcaaccttgtgttccagttattgatggacatatctgttttcccccactagactattggtttcttgagaatagggttcaagtctaatttaatgttgtatctctcacagaactgaatggagttctggtacagacttggggcttaatccgtatcaagggaatggacagataaataattaattagaactgcttcttcaggattgatgactttgggcagggcttagcctgactttttgttaagtaccgcggggtttcctgattccttagtccatgttgaaaactcattcattcttttgttattcactcaacaaatattttttgagaatttattttatgacaagtactgggtaagtaactggaaataaaacagacatggcctctccc

SEQ ID NO: 85483 - DNA, 548 bp, Homo sapiens
tctgaatccaaaatcatcccaataagcaacagtgtgttccaggggcagaacatttgcctttggaacaattcatttcattgcctttcatttttatttactgagactctgctgtgggggaagccttgtgccagctttgcgggctcatgcaaagatgtatacaaggcagtgtttgccaggagcttcccctctaaaaagaaacatgggtgagtatagtggcccagctggatccagcttcacagagagtgagcctttggctggagggcagatggagtggagcatgaagagacaggtcagctgaccacctccttttttatgggtctygtggactgaccatagacataaggtcatatttccttttgcttcctccaaggtgtttttgttttttgtttttttgtttgttttatcagagtgctacgtctttggaagaaggaactctccacctagcactgcttctggcctcagtgtcgaacctgagaaaggaatgaaggcacaagctgaagcaagcactgggagggtggtaactgcctggggctctgggaaaagctgcc

SEQ ID NO: 85484 - DNA, 791 bp, Homo sapiens
taaggtcagtgatggcygaggagagtctggaacccagtactcttaattcttgaactttttatcctggacaatctcatttgctcttctttatctttgcccactacagatcatttctctttattttcaaatttcagaaaatttgatggggaagagtcagagaagggtatgtggatacatccagtaaacaagttttaattagaaagtaataaaataataatgaaattgtcttcgatttattcatttcattgttttaagtttttttgttcatctaggattccagtgattttaaggttttttcatagatatcttactttctacaactatttgattaaaatatctcttttccattgctggtgaggagctgcgttcctttggaggaggagaggcactctgacaaacccgcagccaatatcatactgagtgggcaaaaactggaagcattccctttgaaaactggcacaagacagggatgccctctctcaccactcctattcaacataatgttggaagttctggccagggcagtcaggcaggagaaggaaataaagggtattcaactaggaaaagaagaagtcaaattgtccctgtttgcagatgacatgattgtatatctagaaaaccccattgtctcagcccaaaatctcctcaagctgataagcaacttcagcaaagacgcaggatacaaaatcaatgtgcaaatatcacaagcattcttatacaccaataacagacaaacagagagccaaatcacgagtgaactcccagtcacaattgcttcaaagagaataaaa

SEQ ID NO: 85485 - DNA, 791 bp, Homo sapiens
taaggtcagtgatggctgaggagagtctggaacccagtactcttaattcttgaactttttatcctggacaatctcatttgctcttctttatctttgcccactacagatcatttctctttattttcaaatttcagaaaatttgatggggaagagtcagagaagggtatgtggatacatccagtaaacaagttttaattagaaagtaataaaataataatgaaattgtcttygatttattcatttcattgttttaagtttttttgttcatctaggattccagtgattttaaggttttttcatagatatcttactttctacaactatttgattaaaatatctcttttccattgctggtgaggagctgcgttcctttggaggaggagaggcactctgacaaacccgcagccaatatcatactgagtgggcaaaaactggaagcattccctttgaaaactggcacaagacagggatgccctctctcaccactcctattcaacataatgttggaagttctggccagggcagtcaggcaggagaaggaaataaagggtattcaactaggaaaagaagaagtcaaattgtccctgtttgcagatgacatgattgtatatctagaaaaccccattgtctcagcccaaaatctcctcaagctgataagcaacttcagcaaagacgcaggatacaaaatcaatgtgcaaatatcacaagcattcttatacaccaataacagacaaacagagagccaaatcacgagtgaactcccagtcacaattgcttcaaagagaataaaa

SEQ ID NO: 85486 - DNA, 2287 bp, Homo sapiens
attatcatgtcaggtagtttaattatattaacccaggatttctcaaaagaatttcccatagtaccctctttgttctggttccttgacacctgttgctaagggcaggtggtatatcatggccggtaagagcaaagccatagaaaatgaagaacctgatttcaaatcctggttcttctacttaacaagtgaaatctcttttggcttcacttcccttgtctataaaagagagacaataatcatgatcttgtggaatttttgtatttacaggcagtaacacatctaaagaacacagctctgtaccagccatgtgcaaagggatcagaaatagtagctaaaagaatatgtagtgattctcgaggttaaattgataataataataaaaacccaaaaacaacaaaaacacctggaagcctagagagttgtaaatattaatatatggataattttgttcttccttccattggtcctagaaaaatgttagaatgagaatagagacctggaaaaagctttgctgtagagagacagatttttaagtacttcttaaagttagtttttattattgccccttcagtggagccctttctgcacctgtgtcctttccaccaaggtccatctgacaggatatttcctgtttcctttctgccatttttttttttttttttttgagatggagtctcaatctgtcacccaggctggagtgcagtgatatgatcttggctcattgcaacttctgcctcccaggttcaagtgattctcctgcctcagcttcccaagtagctgggcctacagatgtccatcaccacacccagctaatttttgtatttttagtagagtcggggttttgccatgttggccagacagggtttaaactcttgacctccagtgattcacctgccttgacctcccaaagtgctgggattagaggtgtgagccaccatgaccggccctctgccatttacttttacacctaccacaacacaggagttgctttctataacctctgtgtccttcttgtcccactgtctctttctcagtgatgaactcttaatgtcctcacacataaccactgctctgtgtagctgaagaggccccagaggagcctgaggagagactcacattttggccatacgttgaacctagggtgaaatttgaagtgagagttttcagcagccatgttttcacagaacagctgaccctagcagggggtagtaggtttgaattttgctgttagtttctttattgctagattagggggaaaaaaaataaaacaaaacgaagaaacgaaacattcaaatgcatttggcaggtggtcttataactccagcatgggtgctcagaatttcaatgttaaacttggttaattatgattcagaattcaaggaaaggaatatggtggagtacagagatagagtccatgagctttggtgctaaaaactgggatcaggcmgggcgcggtggctcacgcttgtaatcccagcactttgggaggccgaggcgggcagatcacaaggtcaggagatcgagaccatcctggctaacacggtgaaaccccgtctctactaaaaatacaaaaaaattagccaggcgaggtggcgggtgcctgtagtcccagctaatcgggaggctgaggcaggagaatggggtaaacctgggggacggagcctgcagtgagcagagatcccgccactgcactccagcctgggtgacagagcaagatccgtctcaaaaaaaaaaaaaaaaaaaaaaaaaactgggaactttgggaggccgaggtgggcggatcacgaggtcaggagtttgagacgagcctggacaacatggtgaaatcccgtctctactaaaaatacaaaaattagctgggcctggttgtgggcatctgtaatcctagctactcaggaagctgaggcaggagaattgcttgaactcaggaggtggaggttgcagtgagccaggatcaagccactgcactccagcctgagcgacagatcaagatgctatctcaaaaaacaaaacaaaacaaaacaagacaaaacctgagatctgcttatgtgtggataaaatgcttctacaggcctcatttttcttatctgtaactttcaaaaataaaatgatatccaaatcttaagatttctgttaagtttaaatgaaataatgcagagtatttggagtatttgctattctgtcggtttaggaagctgttagctttcaggaaaacgtgtaggttgatagatttagcagtttttgtgtgagttagatttctaccctaaaatgggaattttgctctcaa

SEQ ID NO: 85487 - DNA, 690 bp, Homo sapiens
tgttgatctgtgaccttaccccccaccctgtgctctctgaaacatgtgctgtgtccactcagggttaaatggattaagggcggtgcaagatgtgctttgttaaacagatgcttgaaggcagcatgctcgttaagagtcatcaccactccctaatcttaagtacccagggacacaaacactgcggaaggtcgcagggtcctctgcctaggaaaaccagagacctttgttcacttgtttatctgctgaccttccctccactattgtcctatgaccctgccaaatccccctctgcgagaaacacccaagaatgatcaataaatcaataaatcaataaaaaaaaattttacatttctttactgtatttcatttgaattgttaaacacatttcattagagaatagagttcactgcagtttgttggagtatttgtactttcttamaataaatatatattattgatataatgtaaaattttgatttaacatgtaaaaagaaagaagaattattacgtaaataggaagtaaaaatggaaatgataatttcagtttagttacaacatgaagagctacgtgtaaaatctaaaattcggtttcagtctagagctggcagggatgtccacaaagtgactggtaaaagattttgcaaaaatctgccttaaattaccacttataatttgaatatatggactttt

SEQ ID NO: 85488 - DNA, 684 bp, Homo sapiens
ctatactttgaggtaatcttatttgacctcctatgctgtgcttatctttgtaaatctcatcttwcatacaaaatgctcatgcattattagagtgctgttctacagtgaaatttacaaggggatcaggacaatgctggatcaattaaatattcaaatagacataactgaatactgacccctacctcaaaccatacacagtgcatttccacatggattcatgttctgaaggtgaagggaacacaataaaatattttcacacagaaagatttcctaaccaggacaaaaaagtaacaattaagaagaaaaatttagttagtttgtatcaaaaatgatgacttctgtgtttcaaaatacaccatccaagaattaaaatgcaaaccaagagtggagaaacatatttatcccaacatatatgcaataaaatacaatacatgtgattaatgaatgtaataaacaaaagaaaatgaacccaatataaacttgggaaaatatttgaacagccggcctctggggctggaaggtgggcacgggcgccttgctgaggcggacccggggcaccaccacgccgggccgcaagctgctccgctgcaggcgctgcaggggcaggaggctggccttccgcggggcggggtcgccagagccccaggaccctggcagcggggcaggtgggaggccggctcttag

SEQ ID NO: 85489 - DNA, 684 bp, Homo sapiens
ctatactttgaggtaatcttatttgacctcctatgctgtgcttatctttgtaaatctcatcttacatacaaaatgctcatgcattattagagtgctgttctacagtgaaatttacaaggggatcaggacaatgctggatcaattaaatattcaaatagacataactgaatactgacccctacctcaaaccatacacagtgcatttccacatggattcatgttctgaaggtgaagggaacacaataaaatattytcacacagaaagatttcctaaccaggacaaaaaagtaacaattaagaagaaaaatttagttagtttgtatcaaaaatgatgacttctgtgtttcaaaatacaccatccaagaattaaaatgcaaaccaagagtggagaaacatatttatcccaacatatatgcaataaaatacaatacatgtgattaatgaatgtaataaacaaaagaaaatgaacccaatataaacttgggaaaatatttgaacagccggcctctggggctggaaggtgggcacgggcgccttgctgaggcggacccggggcaccaccacgccgggccgcaagctgctccgctgcaggcgctgcaggggcaggaggctggccttccgcggggcggggtcgccagagccccaggaccctggcagcggggcaggtgggaggccggctcttag

SEQ ID NO: 85490 - DNA, 718 bp, Homo sapiens
tgtcaccttagtagtcagcatagtacccaataggtagtttttaaaaaatatatcrtaatcatttattaatgtggaggagatccttccaaagacagctccaatgtccttgtcacacagaggcagcagtggtcaggagctctgctgaccaatgcttttggtgcctgtttaaaaggaagacattctggagaaaaaagtcaggaaacttcataaaataaacaacaagaacaacaaacaccttttcttccagaataagtattttctgacactcacaccttcaggctgttgcccctgttggaagtgagagaatgactagtttctggcagtgtgacaccatgagcatgctcctaggctaatggagcagatggaagagctccctccaagagaggctccctgcagccctccccttttttcttctgaaaatgtgtgtctttcttttcaagccacgacttaaagtcttattttgttcctactcttagaaacagtcaaaaagagccccataccgtaccggccattttatgaatcaatgtaattttaatgcagagggatagtaaagcattatttgtctctccggccttggttccttttctgcatactgcaaccattcaactacatcttacactctaccatgtccacgacactgcttatgactagtgactagaagactgaacatcatttgtgcctgcgtgcagatagggagaatgttgtctggtcacattac

SEQ ID NO: 85491 - DNA, 718 bp, Homo sapiens
tgtcaccttagtagtcagcatagtacccaataggtagtttttaaaaaatatatcataatcatttattaatgtggaggagatccttccaaagacagctccaatgtccttgtcacacagaggcagcagtggtcaggagctctgctgaccaatgcttttggtgcctgtttaaaaggaagacattctggagaaaaaagtcaggaaacttcataaaataaacaacaagaacaacaaacaccttttcttccagaataagtattttctgacactcacaccttcaggctgttgcccctgttggaagtgagagaatgactagtttctggcagtgtgacaccatgagcatgctcctaggctaatggagcagayggaagagctccctccaagagaggctccctgcagccctccccttttttcttctgaaaatgtgtgtctttcttttcaagccacgacttaaagtcttattttgttcctactcttagaaacagtcaaaaagagccccataccgtaccggccattttatgaatcaatgtaattttaatgcagagggatagtaaagcattatttgtctctccggccttggttccttttctgcatactgcaaccattcaactacatcttacactctaccatgtccacgacactgcttatgactagtgactagaagactgaacatcatttgtgcctgcgtgcagatagggagaatgttgtctggtcacattac

SEQ ID NO: 85492 - DNA, 778 bp, Homo sapiens
ttcttggctagttatagaaaagtttacttgaaccattcctatgatacttgaattggaccctcattgtagtttatgagtggcaaagaagggtctgagtattccagcaaagaagtatgtaaggaacaaattatgagaaaacatttaggaatagggaaaaagggctaggtgcgctggctcacgcctgtaatcccagcactttgggaggtccagggaggcggatcttctaaggtcaggagttcgagactagcctggccaacatggtgaaacccctctctgctaaaaatacaaaaaattagctgggcatggtggcgggcgcctgtaactccagctactcaggaggctgaggcaggagaagtgcttgaacctgggaggcggaggttgcagtgagccgagattgtaccattccactccagcctgggtgacagagcaagrttccatctcagtaaataaataaataaataaataaataaataggaatatggaaaagaggcagatgaagattcataaaccaggagcatactgaaactgttctgatgtatttgcatatgctggaatgatgattgtgagcttgtctagagacttcaatgattactctccttataacaaagcagaaagccttccttagaattatctgggctgacatcattccttgtccagacctgttaacagacgtctgcaacccagtgctgtgagtctcagtcccaacaatgcagaaggcctgagatcctacagaaattatccctgaatttctgaagacttttaaggcacaataattcat

SEQ ID NO: 85493 - DNA, 778 bp, Homo sapiens
ttcttggctagttatagaaaagtttacttgaaccattcctatgatacttgaattggaccctcattgtagtttatgagtggcaaagaagggtctgagtattccagcaaagaagtatgtaaggaacaaattatgagaaaacatttaggaatagggaaaaagggctaggtgcgctggctcacgcctgtaatcccagcactttgggaggtccagggaggcggatcttctaaggtcaggagttcgagactagcctggccaacatggtgaaacccctctctgctaaaaatacaaaaaattagctgggcatggtggcgggcgcctgtaactccagctactcaggaggctgaggcaggagaagtgcttgaacctgggaggcggaggttgcagtgagccgagattgtaccattccactccagcctgggtgacagagcaagattccatctcagtaaataaataaataaataaataaataaataggaatatggaaaagaggcagatgaagattcataaaccaggagcatactgaaactgttctgatgtatttgcatatgctggaatgatgattgtgagcttgtctagagacttcaatgattactctccttataacmaagcagaaagccttccttagaattatctgggctgacatcattccttgtccagacctgttaacagacgtctgcaacccagtgctgtgagtctcagtcccaacaatgcagaaggcctgagatcctacagaaattatccctgaatttctgaagacttttaaggcacaataattcat

SEQ ID NO: 85494 - DNA, 778 bp, Homo sapiens
ttcttggctagttatagaaaagtttacttgaaccattcctatgatacttgaattggaccctcattgtagtttatgagtggcaaagaagggtctgagtattccagcaaagaagtatgtaaggaacaaattatgagaaaacatttaggaatagggaaaaagggctaggtgcgctggctcacgcctgtaatcccagcactttgggaggtccagggaggcggatcttctaaggtcaggagttcgagactagcctggccaacatggtgaaacccctctctgctaaaaatacaaaaaattagctgggcatggtggcgggcgcctgtaactccagctactcaggaggctgaggcaggagaagtgcttgaacctgggaggcggaggttgcagtgagccgagattgtaccattccactccagcctgggtgacagagcaagattccatctcagtaaataaataaataaataaataaataaataggaatatggaaaagaggcagatgaagattcataaaccaggagcatactgaaactgttctgatgtatttgcatatgctggaatgatgattgtgagcttgtctagagacttcaatgattactctccttataacaaagcagaaagccttccttagaattatctgggctgacatcattccttgtccagacctgttaacagacgtctgcaacccagtgctgtgagtctcagtcccaacaatgcagaaggcctgagatccyacagaaattatccctgaatttctgaagacttttaaggcacaataattcat

SEQ ID NO: 85495 - DNA, 778 bp, Homo sapiens
ttcttggctagttatagaaaagtttacttgaaccattcctatgatacttgaattggaccctcattgtagtttatgagtggcaaagaagggtctgagtattccagcaaagaagtatgtaaggaacaaattatgagaaaacatttaggaatagggaaaaagggctaggtgcgctggctcacgcctgtaatcccagcactttgggaggtccagggaggcggatcttctaaggtcaggagttcgagactagcctggccaacatggtgaaacccctctctgctaaaaatacaaaaaattagctgggcatggtggcgggcgcctgtaactccagctactcaggaggctgaggcaggagaagtgcttgaacctgggaggcggaggttgcagtgagccgagattgtaccattccactccagcctgggtgacagagcaagattccatctcagtaaataaataaataaataaataaataaataggaatatggaaaagaggcagatgaagattcataaaccaggagcatactgaaactgttctgatgtatttgcatatgctggaatgatgattgtgagcttgtctagagacttcaatgattactctccttataacaaagcagaaagccttccttagaattatctgggctgacatcattccttgtccagacctgttaacagacgtctgcaacccagtgctgtgagtctcagtcccaacaatgcagaaggcctgagatcctacagaaattatccytgaatttctgaagacttttaaggcacaataattcat

SEQ ID NO: 85496 - DNA, 1419 bp, Homo sapiens
gttagcatgggaaaaaatatgcagaattctctccatgtgcgcaaataaaacaaacaaaatgtcaaagtagttataatacctaggttttaaatggtatttatcatagaatggcatttttataaaaatttaaaaatttccagaattaaataaagtcagatttctacatatgttaaggaacgagaaatagatcaccaactttcatacaaagattttccaatgagttttagaacccagatgaacaaaagagtctattaccagattctcaaaaatagatgtgtaattcaacagaaaactttgtggtagaggtaggtttcagatgctagaatggaaacagtctcatgtacaaaaaagtatcttttttattaaaaggagaagcactgggaaataaggaaatattccaaattggctggagtgtcctttatccacatcacggattgttcttgcctatacccacctctactctctcttctggattgggtaggacttttggaacctacaaaatgccaactctaaagagaattactttcttatatttgtttcatggtctgagactcaagtaggaaaataggttgtttccttgataatgccacagtagacagaggtaggtctgtaattgaaagctcctaatttccagtgctctaggcttcaactgcctaaagctgagtgtttgaataagtgaatgatgtggtgcaaaaagtggttgaaataaaatcagaagctacctaccttcctttctctccttgccttaattccttcctgatacacagcatcatcagaccttgtaatggagtaccagggccccgccacggagctccagaatttaagcagagaatgtccacaggatcaagtccatgacccagggtttcacaagtttcccactctggagtccaggactgagccaagagggcccccacacacaaccagcacagatcttacttctgtgtggacactttggttaattacttagatttattgaggtacagaatgtgcatacagggtggtcagtcagttggtggtcttggatagtaaactgacaatagaacaagaaaatctattgttcaattccttctatttaattaaatataaactctggatgattttatgatgtgtcaacttgagtacatgtatgtacaaagagggaaatgagggcagtagccattttgtggcatagacataccttattattcttcaatgaaacacttacttargacctgctggaaaggcattttgcagatgcgagcaaaggtcctaatcctgtaactaggaagtgtacccaagtaagcctgacttcatcagtgaaagtcctttaaagaaacacataggcattccttgaacaacattttaaatggcaaatgggactctaatcttccagttgccccctattgactttaaaccaaagctttgattcatgaccactgg

SEQ ID NO: 85497 - DNA, 844 bp, Homo sapiens
ttgtgaaatgcactaaatctttcttctttttttttttttcaggcttttggagacatattacacaggtgagtgtgtacctagattttagcatatgttctttaagattccacgactatcaaagcaggctctattaaagtcatggcataaataattaagatattgataccacttttttttgcatctactttcgttcccacaccttaaaagacaaggccacgaagtaaataaatgaataaaagaagagtgaactaaaacaaacaatttgattcctgsttttgtttttttttgagacgctgtctggctctgtcgcccaggctggagtgcaatggcgccatctcggctcactgcaagctccgcctcccgggttcacaccattcccctgcctcagcctcccgagtacccgggactacaggcgcccgccaccacacccggctaattttttgtatttttagtagagactgggtttcaccatgttagccaggatggtctctatctcctgaccccgtgatccgcccgcctcggcctcccaaagtgctgggattacaggcgtgaaccaccgtgcccggcccctgattttgttttattgcttgaaagcctgcacaggagaaagataagagttttgttttgtgaatggtgagaaagtcaccagaggaagcaggagagaagaggaggaagtattttagcagcgaaaaagtgttgatgttttgttttttatacatatatacatatcagttaacagttctgaaaaatagattgaaaaaaactgtggagtgttagaactgtataagtctctagggaagttctttgctaaaaggggagagaacaagtttccattctttatctt

SEQ ID NO: 85498 - DNA, 844 bp, Homo sapiens
ttgtgaaatgcactaaatctttcttctttttttttttttcaggcttttggagacatattacacaggtgagtgtgtacctagattttagcatatgttctttaagattccacgactatcaaagcaggctctattaaagtcatggcataaataattaagatattgataccacttttttttgcatctactttcgttcccacaccttaaaagacaaggccacgaagtaaataaatgaataaaagaagagtgaactaaaacaaacaatttgattcctggttttgtttttttttgagacgstgtctggctctgtcgcccaggctggagtgcaatggcgccatctcggctcactgcaagctccgcctcccgggttcacaccattcccctgcctcagcctcccgagtacccgggactacaggcgcccgccaccacacccggctaattttttgtatttttagtagagactgggtttcaccatgttagccaggatggtctctatctcctgaccccgtgatccgcccgcctcggcctcccaaagtgctgggattacaggcgtgaaccaccgtgcccggcccctgattttgttttattgcttgaaagcctgcacaggagaaagataagagttttgttttgtgaatggtgagaaagtcaccagaggaagcaggagagaagaggaggaagtattttagcagcgaaaaagtgttgatgttttgttttttatacatatatacatatcagttaacagttctgaaaaatagattgaaaaaaactgtggagtgttagaactgtataagtctctagggaagttctttgctaaaaggggagagaacaagtttccattctttatctt

SEQ ID NO: 85499 - DNA, 844 bp, Homo sapiens
ttgtgaaatgcactaaatctttcttctttttttttttttcaggcttttggagacatattacacaggtgagtgtgtacctagattttagcatatgttctttaagattccacgactatcaaagcaggctctattaaagtcatggcataaataattaagatattgataccacttttttttgcatctactttcgttcccacaccttaaaagacaaggccacgaagtaaataaatgaataaaagaagagtgaactaaaacaaacaatttgattcctggttttgtttttttttgagacgctgtctggctctgtcgcccaggctggagtgcaatggcgccatctcggctcactgmaagctccgcctcccgggttcacaccattcccctgcctcagcctcccgagtacccgggactacaggcgcccgccaccacacccggctaattttttgtatttttagtagagactgggtttcaccatgttagccaggatggtctctatctcctgaccccgtgatccgcccgcctcggcctcccaaagtgctgggattacaggcgtgaaccaccgtgcccggcccctgattttgttttattgcttgaaagcctgcacaggagaaagataagagttttgttttgtgaatggtgagaaagtcaccagaggaagcaggagagaagaggaggaagtattttagcagcgaaaaagtgttgatgttttgttttttatacatatatacatatcagttaacagttctgaaaaatagattgaaaaaaactgtggagtgttagaactgtataagtctctagggaagttctttgctaaaaggggagagaacaagtttccattctttatctt

SEQ ID NO: 85500 - DNA, 844 bp, Homo sapiens
ttgtgaaatgcactaaatctttcttctttttttttttttcaggcttttggagacatattacacaggtgagtgtgtacctagattttagcatatgttctttaagattccacgactatcaaagcaggctctattaaagtcatggcataaataattaagatattgataccacttttttttgcatctactttcgttcccacaccttaaaagacaaggccacgaagtaaataaatgaataaaagaagagtgaactaaaacaaacaatttgattcctggttttgtttttttttgagacgctgtctggctctgtcgcccaggctggagtgcaatggcgccatctcggctcactgcaagctccgcctcccgggttcacaccattcccctgcctcagcctcccgagtacccgggactacaggcgcccgccaccacacccggctaattttttgtatttttagtagagactgggtttcaccatgttagccaggatggtctctatctcctgaccccgtgatccgcccgcctcggcctcccaaagtgctgggattacaggcgtgaaccaccgygcccggcccctgattttgttttattgcttgaaagcctgcacaggagaaagataagagttttgttttgtgaatggtgagaaagtcaccagaggaagcaggagagaagaggaggaagtattttagcagcgaaaaagtgttgatgttttgttttttatacatatatacatatcagttaacagttctgaaaaatagattgaaaaaaactgtggagtgttagaactgtataagtctctagggaagttctttgctaaaaggggagagaacaagtttccattctttatctt

SEQ ID NO: 85501 - DNA, 844 bp, Homo sapiens
ttgtgaaatgcactaaatctttcttctttttttttttttcaggcttttggagacatattacacaggtgagtgtgtacctagattttagcatatgttctttaagattccacgactatcaaagcaggctctattaaagtcatggcataaataattaagatattgataccacttttttttgcatctactttcgttcccacaccttaaaagacaaggccacgaagtaaataaatgaataaaagaagagtgaactaaaacaaacaatttgattcctggttttgtttttttttgagacgctgtctggctctgtcgcccaggctggagtgcaatggcgccatctcggctcactgcaagctccgcctcccgggttcacaccattcccctgcctcagcctcccgagtacccgggactacaggcgcccgccaccacacccggctaattttttgtatttttagtagagactgggtttcaccatgttagccaggatggtctctatctcctgaccccgtgatccgcccgcctcggcctcccaaagtgctgggattacaggcgtgaaccaccgtgcccggcccctgattttgttttattgcttgaaagcctgcacaggagaaagataagagttttkttttgtgaatggtgagaaagtcaccagaggaagcaggagagaagaggaggaagtattttagcagcgaaaaagtgttgatgttttgttttttatacatatatacatatcagttaacagttctgaaaaatagattgaaaaaaactgtggagtgttagaactgtataagtctctagggaagttctttgctaaaaggggagagaacaagtttccattctttatctt

SEQ ID NO: 85502 - DNA, 753 bp, Homo sapiens
tccgatctctgcctcccaaacattgaaattacttgcttagctcttactggatctgactaccaagtctacccttacatatacgatattttttccatagctccacttatacatttagttaaatagttttcaaaataataacrttttaaagctaaatgaagtcaatatgattttcagttacaaagcaacacaaaataaaaaataaacatatccaaataaaaattaaacaaaaacaataaaatatctttaaaagaacagtatttctataattttccttcttaatttttaaacaacagagtaaaacagatcaacttcacaatttaactgaaagatgatttacaaattgtctgaaaacactaactaaagccaataaaactttctctagccacagatatgacagccgtgaacactttagggtaaccaacaattgttttgtctattctcaggttagagcagaaggaccctcagctgccgaccagtgggacatgacaatgccaagaaatctgggccacaaaccaggccattcccctgaaaatttgctgtagcttccttggagctaaaaagccaagattcccaacagtacccatgggcagagggcttaggtacctggtcagttacctctctaaccactcactgctgcatcaagcaagaaaataaccaagaatctcagtcacaggagagctgttgtgtatagatgtctgtttgtggcagggggtcaaggtattcatgctgcagaagacaagctggaatctccct

SEQ ID NO: 85503 - DNA, 753 bp, Homo sapiens
tccgatctctgcctcccaaacattgaaattacttgcttagctcttactggatctgactaccaagtctacccttacatatacgatattttttccatagctccacttatacatttagttaaatagttttcaaaataataacgttttaaagctaaatgaagtcaatatgattttcagttacaaagcaacacaaaataaaaaataaacatatccaaataaaaattaaacaraaacaataaaatatctttaaaagaacagtatttctataattttccttcttaatttttaaacaacagagtaaaacagatcaacttcacaatttaactgaaagatgatttacaaattgtctgaaaacactaactaaagccaataaaactttctctagccacagatatgacagccgtgaacactttagggtaaccaacaattgttttgtctattctcaggttagagcagaaggaccctcagctgccgaccagtgggacatgacaatgccaagaaatctgggccacaaaccaggccattcccctgaaaatttgctgtagcttccttggagctaaaaagccaagattcccaacagtacccatgggcagagggcttaggtacctggtcagttacctctctaaccactcactgctgcatcaagcaagaaaataaccaagaatctcagtcacaggagagctgttgtgtatagatgtctgtttgtggcagggggtcaaggtattcatgctgcagaagacaagctggaatctccct

SEQ ID NO: 85504 - DNA, 2175 bp, Homo sapiens
tctcagggccagatctaacactaaaaagtcagattttgtactcttttaactccaaaaagtaattcataataatgataatagtactacattcttagcaaagcaaaataaaactaatcctttttatctaattatagacggtgcaatgaataagtcacacttatcattgagttatttgttctgcttccttaataactgaatattttaataccacaacaattagggcacagcattgttggaggaagttaaacaaacttattcatgtagctttcttcttttctacaagttaagtgatggtctttcattaagactatcagttcagaactgaaggggtccgtagactctttgactcagttttcattaacttatcctttcaaaatatgtactgacctactacatacgaagagttttgctagccaccagagctttgataaggggccaaataccatttcttctctctcaaaacttatatgtaagtgtatggctggggtgtgttgcctgcaggggagttgggggggtggtgctcacagataagtaaacataaaattatagtagaaagtattgtggtaagaagaataatctttactccaccaaaagaagtttacrttccaatttctggatcctagtaacacgttaccttacatggcaaagggaaattaaggcgggagacagaattaagattgttaacttctgactttacaataggaattggattgtccagatgggtacagatgtaatcagaagaacgtttaaaagtagaagaaagatacagaagaggcgttaagacaagaagaagagaaactgaaaatgacatgatgtgagaaggacttggcctgatgttgatggcttttaaggtggtggaaggagggcatgagtcaagcaatgcagtcagcctctacgtgctggaaagggaaggctcttctagagcctccagaaagaatgcacccctgttgacaccttgatttcagctcaatcagacctatgccacaattttgatctccagagctgtaagacaattagtatctagtgttttaagctaatatgtgtgtagtaatttgttatggtagcaagatgaaactaatacaaatgttaaatgcactgaatgagaaataatgagatgcatttgagcaagaacatggtgtgatgtgtgttgagtgtgaggggaggcaccagtcagggaaatctttccagattaattaaattctaagctggattctgaaggacacaaaactgttgatcacacaaagaaccctggaatagcattccaggtgaaatgaatagaataaagtcctggcgataaacaagagtgtgcttcttgtgagctatattaagtttctcaggttagacaggaaagatagagcagcagagatcaataaaagtcagatgattgagctctgcagaacaatttgcttagtctagatttgattctaaaagcaattgttagttaacaaagacctttaaatagaggaatggcatgactgaatttgaggggaaaaattctctagttgctgcatgaagaatgggtgggagcaagacaaaagtggaagcagggagaacagtttggaggcatttgcagccatccctgggtaaatggtcattcactcagagccagagcaatggaggtggatagaggtgaatgagttaagaaaggtagaatcaataaagattggttaaaacaaataaacaaacaactagatggtggtggtgatgaagagaggagaggcaagaatgaaacctaggtatctagtttagacaactggattgatgggaagcccttctctagaacacaaaatatgggcagtgggggtttccttcacaaaattaattggtttcaaacaggcttatactacaggacttgaggaacatctgagtggactagaatgccagaaaagtgatttgcaggcttccacggatctgtagtttcttatatatattcctgggggactttttgctagtgactgaattctaggtggtcgaggggaggttagagtatggaagatttaccatgcttgacagtatgttccttttaatgttgaaattggccttaatgtaatcagccagtagttgttaataaatataatatagaaacaaataagcaaacaaaatttatcttctaaaacgtttattttctgagtcaaaagcttctttaaaaatagtgagctgcagtattcattatgt

SEQ ID NO: 85505 - DNA, 730 bp, Homo sapiens
tataaatattgttaaggtggccagacaatatggtacatgagatgaaaaatgtttcccttttatttccaccaatggtwtcctcaacatatttcacagaaactggccaaacaataaatattggtgtttaataaatacttatgaaataaatttaataatctctcctataaagtagatattgtgattatttctattttggggatgaaggaatggaatcttaaagagtgtcttaatcttttatacttcaagtctttatgataacacttttctctgagttcttcctgttctgaatgtctacatagtaaatgaaattaatgctcacagttattgcttagtggagacatcattgctttctttctacggaattttacttagaaagagagagcttttcatgttccaaaacatctttacaatgagaactacggaatgttgttcaaagaaatcagagattacacaaagaaatggaaaaacattgcatgttcattaagagaaacaatcagtattgctaaaatgaccatactggccaaagcaatttatagattcaatgctattcctatcaaactaccaatgacattcttcatagaactagaaaacaactattttaaaaatcatatggaacaaaaaaggagcccaaatctccaaggcagtcataagaaaaaagaacaatacctgacttcaaactatactacaaggctgcagtaaccaaaacagcatggtactggtacaaaaacag

SEQ ID NO: 85506 - DNA, 1413 bp, Homo sapiens
tatgcatatgttatttgcatgcccacttgacacacatgaaaacagaagcctagagaatttcagtaccatgtccaaagacatccataagcaagcaatggcaagaaacaaggcctcatctgatgctacagaccatgcttttaaccactctgctatgcttgctttcaaccaaaagcaacttttaatcccattgtaaaagtagaaagacacacacacacacacacacacaccttttacgtgcttataagcatcaagtttttttttaagtagttagctgtttattaaagaagagatggttgcaatgctcaaggttgaagataagtcatatcacttgttgctaaaacttggctgacataacatattgtcaaaagaatgtaactttggaatcaagagtactgattttaaatgctgagataactgtgtattctcaatgaaattaggcaatttattaaacgctctgaatctcagttcctacatctataaatggaaataataatacatgcataagaaattttaagtgctaaattaagaaatgcatagaggatgcctggacacaatctctgtcatacatttttcaaatcaatattagtctcctctagtttctagttctattattatctacagaataataaacaaatgattctttttatttttttctcttgtaaccatcaccaaggaccactagatgcccttagagatagctgccaattactttactgactccatttcctactcagtcaactttcagcttcactgaccacctgcttgttcttttactgcactagaaacattcaagttttaggggcctttgcactggcgattccttttgcctggtgttatattccttagacatctgcttgactttctcccgcatcatcttaaagtctttgttcaatgtcacctctcaatgagggcaatgagggcatttctgaccatctaattaagaattgtacgtatgcacccctcactctctctgaatgcctcctgggcttgattcttcttaatgaattatgtgatttaattgttttatttattgtatgtcttcctcatccactggaatataaactctatgagaatagaaatgtttgttttgttcgctggtttattccctgtatcttggacaataactcgtatgtaatagatgttcaataaatatttattaaatttatgaataattttgaatgaatattttcaataaaattaagaaagatcattatggaatgtgttgaactaaacacttcatggcatcagatgtaagactgaagtatcagtataattggagaaatgttattcagatacagtatgtttgactgttcattatctccacgtttttataaagccattctttttgaagacttcattttctggagctgctttaggtccatggcaaaattaaragaaatgtgcaaagattta

SEQ ID NO: 85507 - DNA, 1118 bp, Homo sapiens
gtgcttggaacatatagttaagtgttccataaacagaagataatacacaaaacaagtggacaaaaatttaaaaccagtaaaaatagtttcggatttaaataacttttcttaaaatctaaaaaaaaaaacccacttattagcatgcagtatgttatctctaccatctagcaccakacctacaaaatggtagatattagagaaattttgttgcattactaaataatgaccatcaacaaaataaatcatgaagttcatgaagagtttgtagactgcttatttcctcttcgtatccccagtgcctggcagattatctgacataaagtatttgtttaatttcatcttttcccactcaaccaaaaagtacatttatttgaatttttaaaactttttctttgtaattttaaactcagcatgagggttttgtgattacactataacatatacgagggtaagctgtataacatatacagctccgtgtgtgtgtgtgtgtgtgtgtgtgtgtgtgtgtgtatgtacatatagatataaaaaccatatatatggttttttttggagacagattctcactctgtcaccaggctacggtgcagtggctcaatctcaggtcactgcactctggctcccgggttcaagcgattctcctgcctcagccccccaagtagctgggattacaggagtgccaccatgcccagctaattttttttttttttttggtattttttgttagtagagatttgtttttaccatgttggccaggctggtctctaactcctgatctcaagtgacccacctgccctggcctcccaaagtgcagggactacaggcgtgagccaccgtgctggacctgtacagttttttttaactacatttccaatatatagtcaatgcttaacctaaatgcatgcattttttcatgttctgtaaaagagggaaattcttatgatatcaacatcataatctcttatcagagttcataccaaatacatgcacgatgaggccatataatgaaaaattgctgctggggagctctattttaagaaacagtctcagatgtgacaagtagaagcagcagcagagtaaggtgatcacagtaaagggactaacatcaatgttatttt

SEQ ID NO: 85508 - DNA, 1118 bp, Homo sapiens
gtgcttggaacatatagttaagtgttccataaacagaagataatacacaaaacaagtggacaaaaatttaaaaccagtaaaaatagtttcggatttaaataacttttcttaaaatctaaaaaaaaaaacccacttattagcatgcagtatgttatctctaccatctagcaccagacctacaaaatggtagatattagagaaattttgttgcattactaaataatgaccatcaacaaaataaatcatgaagttcatgaagagtttgtagactgcttatttcctcttcgtatccccagtgcctggcagattatctgacataaagtatttgtttaatttcatcttttcccactcaaccaaaaagtacatttatttgaatttttaaaactttttctttgtaattttaaactcagcatgagggttttgtgwttacactataacatatacgagggtaagctgtataacatatacagctccgtgtgtgtgtgtgtgtgtgtgtgtgtgtgtgtgtgtatgtacatatagatataaaaaccatatatatggttttttttggagacagattctcactctgtcaccaggctacggtgcagtggctcaatctcaggtcactgcactctggctcccgggttcaagcgattctcctgcctcagccccccaagtagctgggattacaggagtgccaccatgcccagctaattttttttttttttttggtattttttgttagtagagatttgtttttaccatgttggccaggctggtctctaactcctgatctcaagtgacccacctgccctggcctcccaaagtgcagggactacaggcgtgagccaccgtgctggacctgtacagttttttttaactacatttccaatatatagtcaatgcttaacctaaatgcatgcattttttcatgttctgtaaaagagggaaattcttatgatatcaacatcataatctcttatcagagttcataccaaatacatgcacgatgaggccatataatgaaaaattgctgctggggagctctattttaagaaacagtctcagatgtgacaagtagaagcagcagcagagtaaggtgatcacagtaaagggactaacatcaatgttatttt

SEQ ID NO: 85509 - DNA, 1118 bp, Homo sapiens
gtgcttggaacatatagttaagtgttccataaacagaagataatacacaaaacaagtggacaaaaatttaaaaccagtaaaaatagtttcggatttaaataacttttcttaaaatctaaaaaaaaaaacccacttattagcatgcagtatgttatctctaccatctagcaccagacctacaaaatggtagatattagagaaattttgttgcattactaaataatgaccatcaacaaaataaatcatgaagttcatgaagagtttgtagactgcttatttcctcttcgtatccccagtgcctggcagattatctgacataaagtatttgtttaatttcatcttttcccactcaaccaaaaagtacatttatttgaatttttaaaactttttctttgtaattttaaactcagcatgagggttttgtgattacactataacatatacgagggtaagctgtataacatatacagctccgtgtgtgtgtgtgtgtgtgtgtgtgtgtgtgtgtgtatgtacatatagatataaaaaccatatatatggttttttttggagacagattctcactctgtcaccaggctacggtgcagtggctcaatctcaggtcactgcactctggctcccgggttcaagygattctcctgcctcagccccccaagtagctgggattacaggagtgccaccatgcccagctaattttttttttttttttggtattttttgttagtagagatttgtttttaccatgttggccaggctggtctctaactcctgatctcaagtgacccacctgccctggcctcccaaagtgcagggactacaggcgtgagccaccgtgctggacctgtacagttttttttaactacatttccaatatatagtcaatgcttaacctaaatgcatgcattttttcatgttctgtaaaagagggaaattcttatgatatcaacatcataatctcttatcagagttcataccaaatacatgcacgatgaggccatataatgaaaaattgctgctggggagctctattttaagaaacagtctcagatgtgacaagtagaagcagcagcagagtaaggtgatcacagtaaagggactaacatcaatgttatttt

SEQ ID NO: 85510 - DNA, 1118 bp, Homo sapiens
gtgcttggaacatatagttaagtgttccataaacagaagataatacacaaaacaagtggacaaaaatttaaaaccagtaaaaatagtttcggatttaaataacttttcttaaaatctaaaaaaaaaaacccacttattagcatgcagtatgttatctctaccatctagcaccagacctacaaaatggtagatattagagaaattttgttgcattactaaataatgaccatcaacaaaataaatcatgaagttcatgaagagtttgtagactgcttatttcctcttcgtatccccagtgcctggcagattatctgacataaagtatttgtttaatttcatcttttcccactcaaccaaaaagtacatttatttgaatttttaaaactttttctttgtaattttaaactcagcatgagggttttgtgattacactataacatatacgagggtaagctgtataacatatacagctccgtgtgtgtgtgtgtgtgtgtgtgtgtgtgtgtgtgtatgtacatatagatataaaaaccatatatatggttttttttggagacagattctcactctgtcaccaggctacggtgcagtggctcaatctcaggtcactgcactctggctcccgggttcaagcgattctcctgcctcagccccccaagtagctgggattacaggagtgccaccatgcccagctaattttttttttttttttggtattttttgttagtagagatttgtttttaccatgttggccagkctggtctctaactcctgatctcaagtgacccacctgccctggcctcccaaagtgcagggactacaggcgtgagccaccgtgctggacctgtacagttttttttaactacatttccaatatatagtcaatgcttaacctaaatgcatgcattttttcatgttctgtaaaagagggaaattcttatgatatcaacatcataatctcttatcagagttcataccaaatacatgcacgatgaggccatataatgaaaaattgctgctggggagctctattttaagaaacagtctcagatgtgacaagtagaagcagcagcagagtaaggtgatcacagtaaagggactaacatcaatgttatttt

SEQ ID NO: 85511 - DNA, 588 bp, Homo sapiens
ggagagtggccgggccggcagagcagggggccgaggacaccaggtgagccggggatctggccttatggcgtggaggaggacgctgcgggtcgtctgcctcgccgcgcagctttgtcctgccctgcactgagctggcggaaagctgcccacacccgggagtggcttcagccttcggacccgggagctagctgacggtggggcgggggcgcccggggcgcgattgcagggctggcggggagcggtgccctccacctgacccgcctggcgcctcccatgagagggataccgcttggaatcctcccagagcaggaacgctgcgcagcgccccctccctaggatcgtgccaaccccctacccctccgcgcaaggacaatttccccgtctcgtaggacagtgacacccctttgtgccgccgccttgcaccgtgacaggtctcacgccatgcggcaccccctcctcttagttcagtggcaccccgcggctcttcttccttagacctgtgacagcccccgcacccccatggcaccatcttttcccacaatgtcctccccaaggcgaaaagcctascaccctctcattactctgcac

SEQ ID NO: 85512 - DNA, 642 bp, Homo sapiens
tcctgggcaagaatgggtagcacaattccatggccccttggtacttctccctcctttgtgacttctgaagccatgctggctttgtctaacatctggaggagtcggccctccccactggtgggatcactagcgggaggactgaagaagcagkgtctctttctgtcctggacctgggagcttacagggaagctagataaagctgggaaattagggccagccctgggagtaaggaatatctgtctctaaacctgatgaacctcactttattaaggttacatcagccttaatagttgacttccctatttcttgtggcctttagacactagcccagctcaggcactcttcccatgcctccacagggagtcataagaagggaaccactccagtggtttaggcattggctttctttggagtgtgtgtgtcagacttctgcagaaaggagggtggggctgttagcagctgtggttgatccttatggggtaaggttcacctgggtgctgagcaggccctatgcactcttttcccccaggaggaacgcagtggatgcctttcgggtcaatgttatccatgcccggcagcaggtgcgcagccccgtcaccaacattgctcgcaccagcttcttccacgttaagcggtccaaca

SEQ ID NO: 85513 - DNA, 1016 bp, Homo sapiens
attatcaataatgaatgagaatgagctctgccaggtatgaaagcacattatagccattaaagcagcttggtactacagatggaatatacagcttgatgatataaaataagctagatttataaacaaatatgggtgaaaattaggtatattataagctagtgttttgtatcaatggacaataaacaatacaaaaacaaccagcttttaaaaagtaagctggattctaactcacctcttcaaccaagatacaaatcccagaagaatcaaagatttagatgtgaaacacacacacacacacacacacacacacacacacacactctctctctctctctctctctctttctctctctctcataaaatccttgagtaaataattttttttttttgagacagagtgtcactctgtcacccaggctggagtgcagtggcgcaatctcagctcactgcaacctctgcctcccaggttgacacaagtctcatgtctcagcctcctgagtaggtggaattacaggcatgtacctccatactcagctaatttttttgtatttttttgtagagatggagttttgccatgttgcccaggctgctcttgaattcccggcctcaaatgatccacctgcctcggcctcccaaagggctgggatttcaagtatgagccaacacatctggcccaagaattttattccaatgagaaccaaaacctaataccttaaaaattaaaaaagattgaaaccataaagagattcataagaatgaaaattttttaactaaaaataataccattaacaaagtcaacagtccggagaatatgtgcaaccaaggacaaagtgctaatttccttaatatatgaaaaaatataaatattaattaaattaagagataagttattctatggaaaaattgacaaagaccaaggaaagtagttcacgtagctaataaayatctgtcagtctatgttaaattggtatcaccttcttaaagggcaatttggcaacatctggcaaattttaaaa

SEQ ID NO: 85514 - DNA, 1081 bp, Homo sapiens
tctacagttaagatgaggcaacaatttcagctgtatttgagttgaaaagaaggtcaaaagcaaaggttattctaggagacttttagatagcttcttttgctatttctactgaacagaaggtgtacaaatcctaaggattcacaattcaatgtaaaatgaatacacttgtgtaaccaacacttatgtctgagaagagaatattactgacaccccagtagttttttcccaacatttatcccttcttcaacattaccccactctccttctcaaaggtaaccactattctgactctattagttttgcctgttttacaacttcgtgtagatgggatcgtataatgtgcattcctttgtctgrcttctgtattcagcatatatgcttgttagacacattcatgttattgcatgtagctgtggttttatcactttcattactgtatagtatattccattgcatgaatataacacaaatttgaatgtttgggttattttcaattttggctgttgtgcatttcttttgttgcacctgtgtgcacatttttattgaataaatatctaagagtagaattgctgaatcaggtcaagcacagtggctcacgcctgtaatcccagcactttgggaagctgaggcgggtggatcatgaggtcaggagtttgagaccagctgggccaacatggtaaaaccccgtatctaaaagaaatacaaaaatcagccaggtgtgatgacagatgcctgtaatctcagctactcaggaggctgaggaaggagaagtgcttgaacccaggaggtggaggttgcagtgagccgagatggtgcctcaaaaaaaaaaaaaaaaagaaaaagaaaaaaaagaattactgaatcataggaaacatttatgtccaaatttagctgatactatgcaacagttttcttcttcttcttttctaagaaatgtcaggctataaaccattcttagtgctcactggtttgtgaacactgagcatagaaatagccactttttctttgctccaatagtacaggcacagcacagcaactgtgtctatggggctggcaagtccaggatagcatctgcagggca

SEQ ID NO: 85515 - DNA, 1081 bp, Homo sapiens
tctacagttaagatgaggcaacaatttcagctgtatttgagttgaaaagaaggtcaaaagcaaaggttattctaggagacttttagatagcttcttttgctatttctactgaacagaaggtgtacaaatcctaaggattcacaattcaatgtaaaatgaatacacttgtgtaaccaacacttatgtctgagaagagaatattactgacaccccagtagttttttcccaacatttatcccttcttcaacattaccccactctccttctcaaaggtaaccactattctgactctattagttttgcctgttttacaacttcgtgtagatgggatcgtataatgtgcattcctttgtctgacttctgtattcagcatatatgcttgttagacacattcatgttattkcatgtagctgtggttttatcactttcattactgtatagtatattccattgcatgaatataacacaaatttgaatgtttgggttattttcaattttggctgttgtgcatttcttttgttgcacctgtgtgcacatttttattgaataaatatctaagagtagaattgctgaatcaggtcaagcacagtggctcacgcctgtaatcccagcactttgggaagctgaggcgggtggatcatgaggtcaggagtttgagaccagctgggccaacatggtaaaaccccgtatctaaaagaaatacaaaaatcagccaggtgtgatgacagatgcctgtaatctcagctactcaggaggctgaggaaggagaagtgcttgaacccaggaggtggaggttgcagtgagccgagatggtgcctcaaaaaaaaaaaaaaaaagaaaaagaaaaaaaagaattactgaatcataggaaacatttatgtccaaatttagctgatactatgcaacagttttcttcttcttcttttctaagaaatgtcaggctataaaccattcttagtgctcactggtttgtgaacactgagcatagaaatagccactttttctttgctccaatagtacaggcacagcacagcaactgtgtctatggggctggcaagtccaggatagcatctgcagggca

SEQ ID NO: 85516 - DNA, 647 bp, Homo sapiens
tcacaaatggcttgaaaggcagtgtatgtggaggattttattgggcaatggaagtggctctcagcgggatagggagttggaaagaggatggtgcccaaagaaggtgatgtttccctgaagcctggctgtttccagccagacccctctccaaagctgcaccggctgaagttagccatatctttccatagtctctgatgctcagttgcttctctgcttgccattaaatcacttgaatccctgatgcttagcagcttgtatcccgagcactcagccgcttgtgttgctctgccagctgaagtctttttatgggcacaggatggggcatggaaggccaaaaaggcgtcatttgggtggaaaaacagggtcagctgttttcacttagggccacagttccaggctcaagggtggggtttagtcgggagcccagtccttctgtatcaataccaaagactgccataatggaaatgccaaaactgctatagtaaaataccaaagactggatggcttataaccaacrtttatttctcaccgttctggaggctgggaagtccaaggtgctggcaggtgcggtgcttggtgagggccagcttcctagttcagacttggttcagttttttggtttgtcctcatataatggaagagttaag

SEQ ID NO: 85517 - DNA, 533 bp, Homo sapiens
aatttttcagtgaaagtttctttaaattccctacccattccatttgtacatatttgatttgcacagattagattcaatttggcagacattcactgagcgctggagamatatgatgactaggacagagtttctagctgtgaagcgctcactttccagtcaaagagaaacagagagcagaacttactttttgtttggtggttggaattacaaggtaaaacaaaatttcttcacatttcttttttttcttcctgaagtatctataaccagttttctggtttctatattgtctaaacaattataaatctttttaactttatattgagtcaaataccataatttgctaaatcaaatttggattcatttagggccttgagattttttccaattgctcctaatagttaacacaacaatgacaatttctagtatgtggattttatatttcttctagagtattttcttaaagtaacacccagagtgggattgctaagccaaataatgtgaacatttttatagcttttaaagtatcctatttt

SEQ ID NO: 85518 - DNA, 533 bp, Homo sapiens
aatttttcagtgaaagtttctttaaattccctacccattccatttgtacatatttgatttgcacagattagattcaatttggcagacattcactgagcgctggagaaatatgatgactaggacagagtttctagctgtgaagcgctcactttccagtcaaagagaaacagagagcagaacttaytttttgtttggtggttggaattacaaggtaaaacaaaatttcttcacatttcttttttttcttcctgaagtatctataaccagttttctggtttctatattgtctaaacaattataaatctttttaactttatattgagtcaaataccataatttgctaaatcaaatttggattcatttagggccttgagattttttccaattgctcctaatagttaacacaacaatgacaatttctagtatgtggattttatatttcttctagagtattttcttaaagtaacacccagagtgggattgctaagccaaataatgtgaacatttttatagcttttaaagtatcctatttt

SEQ ID NO: 85519 - DNA, 641 bp, Homo sapiens
aaaatacaaaattagccagggatggtggcgcgcgcctgtaatcccagatactcgggaggctgaggcaggagaatcacttgaacccgggaagcagagatcgcagtgagccgagatcgcgtcactgcactccagcctgggtgacacagcgagactctgtctgggaaaaaaaaaaaaatgcaatagggaataaaagcaagtggtaacacacagcatgattcaaaaacaatacaaagctcaaaaccaagcaaaactacaaatattcaataattgtggtaaaggaaaagcaagaaaataaacacaaaattcaggatgatggcyacctttttggagaggtggctacttgtatgagactgggaaattggcatcaagagcatgaaaatatacattttaaaaagctaagtggttaagcgttttcataaaatatatcttacattgtaagtttattttgtgtttaataatttataaaaagttttcgaagtattccgagaaataactaaggagtgagaaaaactttcttaaacaagactgaaaacccagatgtcataaacgataccaaaatgtttaagtgtcaaaaacatttatttagctcaagatgacacaaaaagggagtcaaatgagggaaatcagaactcctgccccca

SEQ ID NO: 85520 - DNA, 601 bp, Homo sapiens
tcacctgtcaggctctcttcccaatagcaatcagtcccagtattttagagtgattatcatattctatacacacgtatacaaatacctatatagatagcccttgttaggcaaacgcttttctgaatttgccaactgaatatatttggatgagttccttgctctccaaacttgccaggagctaggagaatttggttaacatggtgtcccttgctctcttarcttgctgtctctcttcaggcagcagctgggtgcggagagtgaggagtgcttctgggtctttttttaagtggagtcaccctgcagaagatgccagcttccatcacagggcagcacaagtatctcctcccgctgctcattctctggaggactcttgttgagaagggctgacctcatgggccctgcctccctcctctgtggggtgtcgaaggccggggcagcctcggggtgaggtgggcctaggaagttggccacaccgtcgtccccatgccggatctggggtgtagtctcagccgtctgctccatagaggagagcatagcactcgggaaccacagagtacaccccatttccatcactgtcatcaagtgtcatgggttgcctggg

SEQ ID NO: 85521 - DNA, 668 bp, Homo sapiens
ccatgactgaggtcatgagggagcagccagacccccaagcccacatccctccccctcccatccccagggagcctggagtgcctgctccagagggattcgtatccagagggccccaggccaagtgcagttgggcagtgggggaggtctcatctggagcacagaagcagccccagtccccaccccccacagcacacctgcccagcttaagagactgggggctttttccaggaaaccatgctccctgcccctcacccctcaacacaccgagcagaggtttgaacagatcccaagagaccaaaacgaacagagaaaagtcgtgcacaactgkgtggaaggagcaggctttctgagaccagaggctgcagccccaaaaccagacgcatcactgtggaagggaagcgtctggagaatgaggctgggcctcgggagtgtcaacccaggagggccggcgctgcacagtgaggcagggaggcggaccgggcagcgctggcagtggaccgaggtgagcaggatgcgctgggtggacaaacgctgcaggccacgtgcagagactgcagggcacagcatggctaaatcattaatgatggaaatgcacaacctgctataccaaattggatttcttcatccaaaaggagcagtcttatgaaatttaacctcctgaacagagg

SEQ ID NO: 85522 - DNA, 651 bp, Homo sapiens
tctgctcatctctcttagattgttcctgttggcttttgtcactttcaaccttgtgttccagttattgatggacatatctgttttcccccactagactattggtttcttgagaatagggttcaagtctaatttaatgttgtatctctcacagaactgaatggagttctggtacagacttggggcttaatccgtatcaagggaatggacagataaataattaattagaactgcttcttcaggattgatgactttgggcagggcttagcctgactttttgttaagtaccgcggggtttcctgattccttagtccatgttgaaaactcattcattcttttgttattcactcaacaaatattttttgagaatttattttatgacaagtactgggtaagtaactggaaataaaacagacatggcctctcccctttggagtttagaattgaagcttcatggtgtgaatttgacattgagagatgartaagctttggctaagtgagaaggaagaaggcgagtcaatccatgaagggtagtagctggcaactgctcttgactcagagacaagggtcatgtgtggatacacccaggggaagatagagacagtatgtataaatcagccaacctgtaacaggacagtttggaagagcctatgg

SEQ ID NO: 85523 - DNA, 651 bp, Homo sapiens
tctgctcatctctcttagattgttcctgttggcttttgtcactttcaaccttgtgttccagttattgatggacatatctgttttcccccactagactattggtttcttgagaatagggttcaagtctaatttaatgttgtatctctcacagaactgaatggagttctggtacagacttggggcttaatccgtatcaagggaatggacagataaataattaattagaactgcttcttcaggattgatgactttgggcagggcttagcctgactttttgttaagtaccgcggggtttcctgattccttagtccatgttgaaaactcattcattcttttgttattcactcaacaaatattttttgagaatttattttatgacaagtactgggtaagtaactggaaataaaacagacatggcctctcccctttggagtttagaattgaagcttcatggtgtgaatttgacattgagagatgaataagctttggctaagtgagaaggaagaaggcgagtcaatccatgaarggtagtagctggcaactgctcttgactcagagacaagggtcatgtgtggatacacccaggggaagatagagacagtatgtataaatcagccaacctgtaacaggacagtttggaagagcctatgg

SEQ ID NO: 85524 - DNA, 864 bp, Homo sapiens
caacacagtctgggccacagagtaagactctgtctcaaaaaacaaaaacaaacaaacaaacaaacaaaaacaaaaaagggaggggaaatgtgcaataaagcaaatcttttaaagggctggtttctgtttaactcttaggaaaaaagtcttatagtggttagcaagggagaggggtccccttggctaagaaggggttgattcagttgggtggggggcttagagttttatttttgtttctcatatctaaaaccaaccctttctctcacccaatatgaaccctttctgagtcaccttgtgcttacctccctggtttagatctctttgtttccttggtgatttcccttttttttgagattagttattgctatgaactgaattgtgtccctcaaaattcttacatcgaagccctaaccctcaatttgatggtgtttggagatggggcctttgagaagtaattaagtttttatgaggtcatgatggtcaagccttcatgatgagatcagggtttttataagaagggacagcagagagcttgcttctctgtctctctctcccctctccccacttccatcccttccatgtgagaacatagtgagcaagtgacagtttgcaagccaggaagtgaggcctcaccagggaactgcataggctagtatctttatcttggacttctcagactccagaactgtgaggaataaatttctgtcatttaagctatagagtctatggtattttgttatggcagcccaagsagaataagacagattttggtagcaaggagtgcagtgctgctacaatacctatctaaagatgtggaagtggctttgaaactgggtaataggtagaggctagaagagttttgag

SEQ ID NO: 85525 - DNA, 771 bp, Homo sapiens
atccaattttgttacacatttcccttctcatctaatcatcacaagtaacctaaaatagatcatgcattaaaaatgtatatacgtaagattggtacctagagcttcacgctgtatgtaatggttcttcaagagttcagaatagatatttgagacatataatcatgtgtttcctctgatgtagattatggggaaaatagcaacacttgtgtactatgtgtacattacagtgatcctgtttcattgccaaaaatgtaagtggcatgttagatctaattatttaacgtgtgagtacatctatcacgcataaacatgttttatttgatatgaattcataagcacacacatattttttaatatattagccaatgataaaatcacctagactccttttgagaatgttccttatgagagtaartcaccctaactgttctagattggaatctcaaggaggcaaggagaacatttacccaaggatgaagaggggtgggcacagaaccagcccctgagctcttactgctgtctcaatgccaccatgacactcagtagatgtatttgtaaacagaaaaaactgtcttatgagaacctaggtgaaaggcagccatactcagccaccttgagccatgggagaattagactgtgccacacactgtgcagcagcaagaggctatgacagtgataagctgatcctggattttctcagcatttgatttgggaagctaaaatgaaccccctgttaaactgtgtaattgcttgaagtactgggagagagtt

SEQ ID NO: 85526 - DNA, 771 bp, Homo sapiens
atccaattttgttacacatttcccttctcatctaatcatcacaagtaacctaaaatagatcatgcattaaaaatgtatatacgtaagattggtacctagagcttcacgctgtatgtaatggttcttcaagagttcagaatagatatttgagacatataatcatgtgtttcctctgatgtagattatggggaaaatagcaacacttgtgtactatgtgtacattacagtgatcctgtttcattgccaaaaatgtaagtggcatgttagatctaattatttaacgtgtgagtacatctatcacgcataaacatgttttatttgatatgaattcataagcacacacatattttttaatatattagccaatgataaaatcacctagactccttttgagaatgttccttatgagagtaagtcaccctaactgttctagattggaatctcaaggaggcaaggagaacatttacccaaggatgaagaggggtgggcacagaaccagcccctgagctcttactgctgtctcaatgccaccatgacactcagtagatgtatttgtaaacagaaaaaactgtcttatgagaacctaggtgaaaggcagccatactcagccaccttgrgccatgggagaattagactgtgccacacactgtgcagcagcaagaggctatgacagtgataagctgatcctggattttctcagcatttgatttgggaagctaaaatgaaccccctgttaaactgtgtaattgcttgaagtactgggagagagtt

SEQ ID NO: 85527 - DNA, 421 bp, Homo sapiens
  misc_feature (1)...(421): n = A,T,C or G
gataatccacatatsctaaaaccattagagaaattcttgtttgaaaatttgtaagggatggatctgctaggtggatacttgatggatcctgaatcaatgaactaatcttatcactaagcacgggccattcatttttacattccctcttgcataatgccatagacagtgtatagcaccaccaatggtcatacacaaacacacacacacatactgtaaatgaacaggaatctaactaagtcccaagacacaaataatagctgacaggcaatataaggtacatagaaataagaggaatgacatcacaagaaagtaatcagccannnnnnnnnnnnnnnnnnnnnnnnnnnnnnnnnnnnnnnnnnnnnnnnnnnnnnnnnnnnnnnnnnnnnnnnnnnnnnnnnnnnnnnnnnnnnnnnnnnna

SEQ ID NO: 85528 - DNA, 1293 bp, Homo sapiens
gcatgtacatatatttatcctatttggagaacattgagtttcttgtgtctcttattctaatttgtatcaattttggactgtttttactattatttcttcaaataattttctgcctctacccttcttggggttgcaatttaacttatatttgccatattaatatgatctcacaggtcattaaggctgaattaaagttttctattttttttctccatctgcatctgcttctctagtatctatgtctgtgtctttcttttcattatgyaatatattaaatttttcttaacaccacttagtgaagtattaatttcaggtattatgtttttcatttctgttagttttttttttacttttttattgtagcccctttatctccacattttatttttattttattataatatttgtacaaagttattatagttgttttaaatatttttagataactcttaaccttttcccctaggcactaaacatttagaataataattcaattgttctttacctaaactacaattattttaaattcatctaatattatattagaaacttactttattttccttgttctcaatattgtaaaagtaaaaattcatgaagaatttttttgtttgtttgttttttgtttgttgttttgtttttttgagacagagtctcactctgtcacccaggctggagtacagtggtgttgtgatctctgctcactgtgaccactgcctcccaggttgaagtgattcctactgcttcagcctcctcagtagctgggattacaagcacccaccacaacaccctgctaatatttttatttttattttttagtagaaatggagtttcaccatgttgcccaggccggtatcgaactcctaacctcaggtgatcggccagccttggtctcccaaaatgctgggattacaggcaacaaaatttatttataaggaaataacatagcctccttacaaaattatcctttctttgtctttttatatcatcaaagtgtaaattacatccttctttcgaaattcagtcacaatttaaaactgtatttactaaacatggttaagcactagaattagcttgagaaacataataaaatactatttcaaaagtctttcataggtaggccggtggtaattctgattttatacgtctggagtagtgcctgggaatttgaatttatatcagtacttcaagaaagattatcaattatgctcatatatttacatgttaattactaaatttgctttaaatgtgtttatccattcttaacactctgtacaatacactagagcttgg

SEQ ID NO: 85529 - DNA, 647 bp, Homo sapiens
gaattcttgtagcatgtaagccagggtttgccaaactacagcctgcgggccacatccggcctggaatctatttttttgtacagcctttgagttaagagtggattttacatttcttaaggattgtaaaacacacacacacacacacacacacacacacacacacacacaccgaaaaggaggaggaatggaggagggagaaggagaagagcaagagcaaggtggccagaggccgtatgtggctcatggagcctgatatttactgtttgattttttatttttatttttttttgagacagagtctcactttgtcacccaggctggaatgcagtggtgtgatctcagctcactgcagcctctgcctcccaggttcaagcgattctcctgcctcagcctcctgagtagctggtactacaggcagctgccaccgcgcccagctaatttttttttgtatttttggtagagaaggagtttcaccaagttgaccaggctgatcacaaactcctgacctcaggtaatccacccacctcggcctcccaaagtgctgggattacaagcgtgarccaccgtgcctgggtgctgtttgttctcttacagaaaaaattcccaagtcccagcatgagctgttgtcttctgtgtcacgctgtccc

SEQ ID NO: 85530 - DNA, 649 bp, Homo sapiens
gctggaaaagcccgggtgtctgaggatgcacgggctaccagtatgactgaggtcagtgatgggggaggggccggatagggaaaggccccgctgacggcatgcagagaggtcagtttgttttgagatccagaagccaccagccgacgttaagcagcagtgactggtccagtgtgctcgctttggggacaggcctggcaagaggctggaagtcggggaggcgagtggaagggggtgggtttgaccagggtgccaatacggasatggggaggaggagactgcagcactggccagaggctgagagaagaaggggtgaaggaaagcaaactctagaaaagaaggtttgggatgagtttgaaaaccctcaagagaggcaggggaaagggacgaggaggccagtgagggtggaggatcgggggaggggagaggagatggcggccacctgggtcaagctcctgggggtcggccagcacgacttccacggaggagccaccgagtcaggagcatgggccctggggagccgtggagagggaggagcttccctgtggtgggagaagagcactggcaggaggatgagggggacagggaaggtcacaggtggcagcaagaggaggtggctagccaggctggaggggcagatggggtatggagg

SEQ ID NO: 85531 - DNA, 541 bp, Homo sapiens
tctgaaccctcaaagggttaatgatcaaggtggctcttttaaaatttaaattcagagtgttaatcaaggacttctatgtgaaaactgtaaaaagctacagttcaggaaaagactcctgaattgggagacaagaaaactcaagcgctggtcccagccgtgctatggctggatgactcgtggtacctgtttctctgctgagtcaacacagctgaccctgatgcaaaatggcgactaaaataaaacagatgacactccaacaacagatgtggcagatgccggggtggccccccaacagggcccgcgcctcctcaaactctccttcactgccattggcaggagggtttatctccaccttcccccacacttccgggctcacctgtggcatgcggtttcttgccaggatttatcttccttactgcaacatccaggtcatcatgatgaccccggccctgctagactctggcagaacttcagcatccacaccccrtttgtgcaaccactgtagagtgccaggccagctccgaaatgccaagcaggtgcc

SEQ ID NO: 85532 - DNA, 1162 bp, Homo sapiens
tcttgtgtgtttcttttgacaggcattacgagattggacgaccaaatatttctgaacaggaaccccggcgtcccctctgtggtgaaattccaccccttcacgccgtgcatcgcygtagccgacaaggacagcatctggtatgcaccgcgctggtcaggcctcccttccggctgaccgacagccccagcgatgccctgttctcccccgatcaccactcctcttccttgaaaagcagatacaaggcactcaccccgaggcccttagcactgtttcctgagaaacggccctactcaccttctcctctttgaccgagccccacccacacctgccccgggcctggccctgtccttgtcactgaaggacagtccagagtcctgcctgcaggtcagaggcgagtggcagggactccccagtcacacttgtaatagaggcgtacacaggggggccggcttgctgccctgcccgcagaagcaagcatgtgatagacaagcagtaagaagatgctaggtgccccaggagagaagtgagtttaactcacagcaaatatcgcccttagagatggagagagtacccacttcatgggggagggcagtgggagggggttccttttagagtttagagtttataaaatctctgtggttcacacctccatttctttttcctctttttaaaaattgtggtaaaacatacatagcctaaaatttgccattttaaccgttctgagtgcacagccagtggcattcagcgtattcacattgttatgcaaccatcacccccattggtctccagaaccttctcatcacacaaaaccaaaacttggtccccatcagacaccagctccccattcctgcatccgcctgagccagtgtttcactttctgtctctctgaagtggcgcacgctaggagcctcataccagtggagtcacccgggatttggccctttgtgcctggcttattcggctcagcgcagtgtctttaaggttcctccaagctacagcacgtcagaatttccttttcatggctgagtaatattccactgtgtggatggaccacactttgtcttatcattcatctgttcatggacacctgggttgcctccaccttttgtctattgtgaataacactgctgtgaacattggtgtacaagtatctgttcaagtt

SEQ ID NO: 85533 - DNA, 1597 bp, Homo sapiens
cctccccagacgatggtgccatcagggtctggaagaattttgctgatttggaaaagaacccagagatggtgaccgcgtggcaggggctctcggacatgctgccaacgacgcgaggtgggtccgcccggctcctccccagagcagaatgtgttcccggggctgcggacgcactcggaattccaaggcccttctggggctgtctctaaacaggctgctccacctcagagtccccagaatcctaaagcaacagctccccgccaatgtccccgaaagcgtgagagccccaggtccctgagtgcactgcctggctggagtcccagccctgggcatggtctcagccactcgtgggtgcccctgtccccaaccttcatccttggcttgcagacatgtgctgcttgggacagcatcactgctggcagggcctaaagggcccgcatcacggggtccttctttggacctaaaattaggtctgctctttggacctaaatttaactcctccttgggggtcggggtgcacatggccatctggggcctcacgcgctcgctggcatgcctgggctggtgggacggagtggctgcagtgccggctctgggyacagttctgcgtgttgcctgcaccgctgcacggcctgggtgcggggcgaggcgcaggcccacaggtccttctggaaggactcaggcaggagttaggaggctcccggggtcaggcttctgggtctggatttccagaggcccctctgcagcaccaggcattcgcctctaggagtcatcgctcttcagcggatcctgcagcccttggcgatgctcagagtgaacgcgttaccccgccagcccccgtctgccggctcctgccggtttgtgatttctgtgtcttcgtctgtggcctgtggatgtggccttacacctcgtggtcagccttccgtgtggggcctgccctggttctgccctaggttgcatggctctgtctccgcccttctgtctgagcacctgtcccgggagatgccaaccctcacgtgcctcgggacgtcatgggggcagctccagggtggacattgcctcgaacgttggatttttttttttaatgtagccatgttcttaagtttcatccagcaaaaaaaatcatccacaccccgcactccgtgggggccctttcctgttgcttctgtcctgatctctgggctctgcttcccctgcgaggcaaccctcttctggggtatgacagcttccctgggacagggcaggaaaagtgagccccagcccggggccctggtccaggaggggtcccgggagacagctggatggccagcctgggggtcaggccactcaccggccattgtgtgtctctccaaaagaccaattttggtgacactgtgtcatttgctagagaggaaagatcactgtttgataggctttccaggctgtttttctggggtcgctcagaggcagtggtgccatggaaggagctgggcttcagcacgggagcgcctggctgagccctggctctgccttgccctttctcttgtttgcttttgtgaaaacttccctccctgtccaaggctcggacctgccggaaatgcagtgctggaaggacacaccc

SEQ ID NO: 85534 - DNA, 606 bp, Homo sapiens
taagcaaaattaattattctcccacctgtwttttgttacacgtttgctaccatacatgtaacctgtaatctgattctgttttcaatgtgtttgcctaaccaggctttgggaccctggagggcaagagctcaatggcaccacaccacccttcggtgcttggaacgttgcagagaggcaaggagggtctatctggcgtgtgaggtcacaggaaagctgacgagccagttacccgacgtgaccccgaggccgcaggcaggggactttacctgcacggcaatcacagacaagacttccactgagatgcgattaaactcgtcaaagcagccccaggctcccgtctgggccaggcccttgtagatatttccacaggactggaaagggcgagatggagaaaggaagagctgggagggtgacagggagggcgggcgctgcaggggcctccccctgcctcttcggctgtgttttctcttcccaaagcttgctcaggccccggtgcattggagccttccgcaggccagcaggcaggtcagcttactgcccagggtaacaccgtggagggctggacacgaggaagagccatcctttcacccttgcctcccagacccc

SEQ ID NO: 85535 - DNA, 1027 bp, Homo sapiens
agggtttccagcatgttatacccatgtcttagagagctgcccctgggattctgccccatttcggctgctccgccagatgcctgagagggataaacatgcattgcagagtgtgaccctcttcctaccacccccaccagcaagactgtgcacagagcctccatttcctcagctatggggaaaaaaggcagacattggcatatagggaaaaaaacaatagcaatagtgaggaaaagacaagaaaactgggctgctgatgccaaaacaaatgatccctaatgaatcttctttctccctgagaaaggcattgccagccgggcgcagtggctcacgcctgtaatcccagcactgtggaaggctragacaagtggctcacaaggtcaggcattcgagaccagcctggccaacatggtggaaccccatctctactaaaaatacaaaaattagccaggcgtaatggtgcatgcctgtaatctcagctactagggaggctgaggcacaagaatcatttgaacccgggaggcagaggtagcagtgagctgagatcgtgccactgcactccagcctgggcaacagagcaagactctgtctcaaaaaaaaaaaaagttgccaacaagcaggaactctgacaatcaacacaaggctaagggccgggcgtggtggctcacacctgtaatcccagcactttgggaggccaaggcaggtggatcacctcaagtcaggagttcaaggccagcctgaccaacatggagaaacccaatctctactaaaaataaaaaattagtcaggcgtggtggtacaggcctgtaatcccatctactcggaaggctgaggcaggagaatcgcttgaacccaggaggaggaggttgcggtgagccaagatcgcaccattgcactccagcctgagcgacaagagtgacattccatctcacagctaaggcatgttcctctccatctcttaggagaggttatgtcaccacatctttaccacagccaccaaataatgtgaccatatacagtctttgatgca

SEQ ID NO: 85536 - DNA, 1027 bp, Homo sapiens
agggtttccagcatgttatacccatgtcttagagagctgcccctgggattctgccccatttcggctgctccgccagatgcctgagagggataaacatgcattgcagagtgtgaccctcttcctaccacccccaccagcaagactgtgcacagagcctccatttcctcagctatggggaaaaaaggcagacattggcatatagggaaaaaaacaatagcaatagtgaggaaaagacaagaaaactgggctgctgatgccaaaacaaatgatccctaatgaatcttctttctccctgagaaaggcattgccagccgggcgcagtggctcacgcctgtaatcccagcactgtggaaggctgagacaagtgrctcacaaggtcaggcattcgagaccagcctggccaacatggtggaaccccatctctactaaaaatacaaaaattagccaggcgtaatggtgcatgcctgtaatctcagctactagggaggctgaggcacaagaatcatttgaacccgggaggcagaggtagcagtgagctgagatcgtgccactgcactccagcctgggcaacagagcaagactctgtctcaaaaaaaaaaaaagttgccaacaagcaggaactctgacaatcaacacaaggctaagggccgggcgtggtggctcacacctgtaatcccagcactttgggaggccaaggcaggtggatcacctcaagtcaggagttcaaggccagcctgaccaacatggagaaacccaatctctactaaaaataaaaaattagtcaggcgtggtggtacaggcctgtaatcccatctactcggaaggctgaggcaggagaatcgcttgaacccaggaggaggaggttgcggtgagccaagatcgcaccattgcactccagcctgagcgacaagagtgacattccatctcacagctaaggcatgttcctctccatctcttaggagaggttatgtcaccacatctttaccacagccaccaaataatgtgaccatatacagtctttgatgca

SEQ ID NO: 85537 - DNA, 537 bp, Homo sapiens
tgttcagtgcataacctgctcagctgtccaaggccaacctgcagctgtgtccaggccgcatctggctctggggtccccgttatctccctgtcgcccccaccacttccccactcatgagcagtagactcctgaggccctgcagactggccacggctgctactggaacggctgcttccttccgggcccagccagtcaccctrctggagatgagtggcctccaagccccataaaacttgctgctgatctcttggttccagtgactttcctcctgtagcctcaggactttctggagctcatttgtctaaagaaagaagggcaggctttgtccctcctgggcttattctcaccgagtactcagcccacctttccagcagctgccatcaaggctgtggtgtgaataggcctcctctttccccctccctcgtagggagggctgggagcagctcacccacacagggatggtggcagagtctcagccagccattgagtgacactgggcacttgttgagggcctccccattctgtctgcctgtctca

SEQ ID NO: 85538 - DNA, 537 bp, Homo sapiens
tgttcagtgcataacctgctcagctgtccaaggccaacctgcagctgtgtccaggccgcatctggctctggggtccccgttatctccctgtcgcccccaccacttccccactcatgagcagtagactcctgaggccctgcagactggccacggctgctactggaacggctgcttccttccgggcccagccagtcaccctactggagatgagtggcctccaagccccataaaacttgctgctgatctcttggttccagtgactttcctcctgtagcctcaggactttctggagctcatttgtctaaagaaagaagggcaggctttgtccctcctgggcttattctcaccgagtactcagcccacctttccagcagctgccatcaaggctgtggtgtgaataggcctcctctttccccctccctygtagggagggctgggagcagctcacccacacagggatggtggcagagtctcagccagccattgagtgacactgggcacttgttgagggcctccccattctgtctgcctgtctca

SEQ ID NO: 85539 - DNA, 580 bp, Homo sapiens
ttcaaatctaatctccagaatagaaggcagtcaggcctagactctccagccctttccaatgatggtgagtgcctctatcagggcccattccaaggaccagagccagacaaatatgccggctccattattcttgagaggtaaagggtcagacggggaagcccactcatgtaactaagaaggtaagagaagacgtcccagggaatatgctggtcttagaggaatgaaagagcaacttagcttttccagggtaccccttgcctgttcatctggaattctaatggaatgttagtcctgctccctccaatccaacttttatgggtcaatatgatcsctgtaaagcatagactgatcagtttaaccttcatttaaaatgtgttgatgggttgccattattgccaaagtaggtgaagcccaaatcccttatcatgatgtaaaatatcctctatggcctgccagctgcattcctctctagaatctgggtgtcatgatttggcttctctttatacataactgcacacacctctgcatgcttgttcatgctatgtcctctgtctttgccatcagtcacctggctggatct

SEQ ID NO: 85540 - DNA, 2272 bp, Homo sapiens
ggctgtgaagggttaatcgaaatggccctggctgctgctgggtgagcaggagccgccagccaaggacagaccatattccatcgggcccagccagggtgaacatcaggaagcatggtgggcctcgcctgggcctgcatgttggtctctgtttctacattgctcctggacccctggctgcctctggtgggtgcagatgcagctggagcacctggctgggggctgtagggaagggaccctgtggccctatgaaagacagcttagcaccgcagccagactccgtagaagcacatccgccaacgtgacgtggcacagttgactgccaggaacgaaagatgttgtggataaatcatctgaatgctctcaggcaatgcttttttaaaacaccagggcgctttgctgtaaaatmttatactgactttcccaaataaaaaccaaataagaacagggctgcttccataggagacaaaagtggggtaacggcaacctctctcgtgctccacctttgatgaggagcacagcttggaaagtaatgctttagcttgagcccaggagttcaagaccagtctgggcaacatagtgagacccccacctctacaaaaaaaaaaattagccaggcatggcggcactcgcctgtagtcccagctactcgggaggctgaggtgggaggattgcttgagcccaggaggtagaggctgtagtgagccatgatcatgccactgtattccagcctgggccactgagtgagaccctgtctcaaaacaaacaaacaaacacaaaaactagtgctttagagcacccttaggtgtagcaaaaccaggggttttatctgggctgttggttttgggcttctgacaacatagctctcctattctaatgttccaacacctgcaaacatgggctttaggactggggatttctgtggttgaaaacaaaagttgccctcctgcctcaatttacttgcctgtataatgaacataaaacaatatatggcttcctgggctcataaactttaagaagtgatgcataaaggctgcttccctgtctgtcataaactctttggggaaggtgatcagcctacttcttgagggtgtctttgtgtttttgtaaacacagtgctcagaatatcatccttccacctcttctcttacagatgggcagtaaggttgctgtttgaggctattacttcactcttgggcttctaccgagacctgtctaggagcccgaggatctgcaccatctgattctggtcttgtttctaacttactgtgagacaggagaccgcccctccggtctctggcctgtgatttcttcctcactcagtgaaggagttactgtcaatgatctcctaggttcctccgcagctgtggcatcctctcatttgaataccatcaataaaaatagcaatgcaatgccttatgtttaaaaggcaaccgagcaattactctaaagtttatttcctgctccctccaatgttgcaaatctcctcagttttaaaattaagttgtaaatgagatttgagttccacatcacttgctttgttctctctccaagagaaagagttgaatcaccagttcaaagcaaacttacacataactgaaattcaaaggcggttggagggattttctttctcctaatcttggttactgggttcgccatgtgattaaccttccacagccaccactgtgaagaagtgagtccctgatccaacactggcagtcaccgccccagggtttaaaggacaaagtccagcatcagctccatcaccttcaatgtcctagaaataatagaaaacagtttaaaaagtgctcactgtgggccaggtattttacatatatgacatttttaaagacttctctggactattctttgaggtagatatttttacacccactttactgatcatgaaactgaggcacagatagtttaagtaacttgctcaagatcttacaatttcaccagatcttgtaaatctggtgggtgatggaccaggggtccagcccaagctgtctgcttcctcagtgctttgctcttgatccctgaacttgactcacatataacccctgtggaaaagaaagggctgagagatcttctggtcgtacttcccttgtgatgctcgaatctcctgcaaggcctcctgcatggacatactcccagagatgaggaatcccttccctttgaagacaatcagtcattcattcagttgacaaacaggcacaggccccatgtgaggtccagaccctgtgctcagtactgggccataaggatgaatgca

SEQ ID NO: 85541 - DNA, 2272 bp, Homo sapiens
ggctgtgaagggttaatcgaaatggccctggctgctgctgggtgagcaggagccgccagccaaggacagaccatattccatcgggcccagccagggtgaacatcaggaagcatggtgggcctcgcctgggcctgcatgttggtctctgtttctacattgctcctggacccctggctgcctctggtgggtgcagatgcagctggagcacctggctgggggctgtagggaagggaccctgtggccctatgaaagacagcttagcaccgcagccagactccgtagaagcacatccgccaacgtgacgtggcacagttgactgccaggaacgaaagatgttgtggataaatcatctgaatgctctcaggcaatgcttttttaaaacaccagggcgctttgctgtaaaatcttatactgactttcccaaataaaaaccaaataagaacagggctgcttccataggagacaaaagtggggtaacggcaacctctctcgtgctccacctttgatgaggagcacagcttggaaagtaatgctttagcttgagcccaggagttcaagaccagtctgggcaacatagtgagacccccacctctacaaaaaaaaaaattagccrggcatggcggcactcgcctgtagtcccagctactcgggaggctgaggtgggaggattgcttgagcccaggaggtagaggctgtagtgagccatgatcatgccactgtattccagcctgggccactgagtgagaccctgtctcaaaacaaacaaacaaacacaaaaactagtgctttagagcacccttaggtgtagcaaaaccaggggttttatctgggctgttggttttgggcttctgacaacatagctctcctattctaatgttccaacacctgcaaacatgggctttaggactggggatttctgtggttgaaaacaaaagttgccctcctgcctcaatttacttgcctgtataatgaacataaaacaatatatggcttcctgggctcataaactttaagaagtgatgcataaaggctgcttccctgtctgtcataaactctttggggaaggtgatcagcctacttcttgagggtgtctttgtgtttttgtaaacacagtgctcagaatatcatccttccacctcttctcttacagatgggcagtaaggttgctgtttgaggctattacttcactcttgggcttctaccgagacctgtctaggagcccgaggatctgcaccatctgattctggtcttgtttctaacttactgtgagacaggagaccgcccctccggtctctggcctgtgatttcttcctcactcagtgaaggagttactgtcaatgatctcctaggttcctccgcagctgtggcatcctctcatttgaataccatcaataaaaatagcaatgcaatgccttatgtttaaaaggcaaccgagcaattactctaaagtttatttcctgctccctccaatgttgcaaatctcctcagttttaaaattaagttgtaaatgagatttgagttccacatcacttgctttgttctctctccaagagaaagagttgaatcaccagttcaaagcaaacttacacataactgaaattcaaaggcggttggagggattttctttctcctaatcttggttactgggttcgccatgtgattaaccttccacagccaccactgtgaagaagtgagtccctgatccaacactggcagtcaccgccccagggtttaaaggacaaagtccagcatcagctccatcaccttcaatgtcctagaaataatagaaaacagtttaaaaagtgctcactgtgggccaggtattttacatatatgacatttttaaagacttctctggactattctttgaggtagatatttttacacccactttactgatcatgaaactgaggcacagatagtttaagtaacttgctcaagatcttacaatttcaccagatcttgtaaatctggtgggtgatggaccaggggtccagcccaagctgtctgcttcctcagtgctttgctcttgatccctgaacttgactcacatataacccctgtggaaaagaaagggctgagagatcttctggtcgtacttcccttgtgatgctcgaatctcctgcaaggcctcctgcatggacatactcccagagatgaggaatcccttccctttgaagacaatcagtcattcattcagttgacaaacaggcacaggccccatgtgaggtccagaccctgtgctcagtactgggccataaggatgaatgca

SEQ ID NO: 85542 - DNA, 1158 bp, Homo sapiens
ccaaatatataaagtaaaagagaattttcatgaaagttccctctccaaaccttacatgtctggattcaccagcctcatccattccttctgtgaattattatgagtttttaaaaatattaagtgctattcaatgaaaaaagtgtgtaaaaatgtagattatcatctcatttatataataataagacataggtataaaaacaaataaaataaatattttctgagggctaaaactatgaatatttttggtcccttgaaaatgatattgattgctaatcataaagtaataaaaaatatatatttttattataaaattaaaatacaaaactcaaaactttaaaaattttaggaaaaaacataggattatatattagtggaattaggaattaggaaggatttcataaacaagttcccaatatcataaaccaaaaaataatattattgaaaattttgacttcattaaaatttaaarcttatttatgaaaggacactgtgaatctaaaattaagtcaaagagaggaagaagattcttcctacacaaattaataatgaataataaaagttatgtctaaaatttataatgaacttctaaaaataatgagaaattgtcaaataatctaatataaacacatgttatatacaggcatttcaaagaatgagaaatctgaaagactgtatatgaaaatatatgaaatctcaataacaaccagataaatgtttattaaaatcacaaagaaatgccattcacattcattatatatgcaaatttaaaacttggcaaatatcaagggctgttgaggatagagtcaaaaggctcatatactgctagtggaagggtaaattagaaaagtaacttgggagctcaatttgacaatatcaggtaaatttgaaaatgccgtatcttatgattcagaaatttcatttccaggaatattccttatgggaactctcacatatctacatgaataaatgtctataagaatgatcattatgacagtttataagactaaagttgggataatttatatgttcttcaaaggaaaaagaatatataaacacagtgaaattctaggaagcaactaaaataaactcgatcttcatgtatcaagatagataaattagataaatatcagatcccataatgttgaatgtaaaaataca

SEQ ID NO: 85543 - DNA, 934 bp, Homo sapiens
tgcatttatacccttcctgtgactccgtgtagagggaagactaactcacagtccataagaatccaaaagtgagcggcgacttcactcagcaacccatcctgcctccaagctgacttggctatagagtatcttgcgtccttttgttctcttctgactacctgtcactcatgttttaaataatcttcttttgaaataataagccttagctggctttgcaggcaactaggcacttccagcaggacatgagaatgtaagatggccactaccggaacttacaggtgccaaaagaagaaagggtataaacggagaccacctatcactcatcagaacctaggatcatcacattcctttaaatggaaaagcccaccctacaactttctttttaatgttctaaaaagtgacacctaggtttcctcaacagaaagctgtgcttcaatcccaaatccccttgagaccaacatgccttaaagggggtttgggtttaaagaccaatgtatctttttttttttttttttttttttttttttttttttttttgagacaaaatttcgctctcgttgcccaggctaraatgcaatggggggatctcggctcactgcaacctctgcctactaggttcaagtgattctccttcctcagccttccgagtagctgggattacaggtgcctgccaccatgtccagctaatttttctatctttagtagacatggggtttcagcatgttagtcaggctggtcttgaactcctgatctcaggtgatccacccatctcagcctcccaaagtgctgggattacaggcgtgagccactgcgcccagccccaatatgtcttaaagggggtttgggattaaagtacagttttccgctgaggaaacctaaggtcttaaaggggttttgggatcaagtgtcctgttgaggaaaactaggtgtcacc

SEQ ID NO: 85544 - DNA, 934 bp, Homo sapiens
tgcatttatacccttcctgtgactccgtgtagagggaagactaactcacagtccataagaatccaaaagtgagcggcgacttcactcagcaacccatcctgcctccaagctgacttggctatagagtatcttgcgtccttttgttctcttctgactacctgtcactcatgttttaaataatcttcttttgaaataataagccttagctggctttgcaggcaactaggcacttccagcaggacatgagaatgtaagatggccactaccggaacttacaggtgccaaaagaagaaagggtataaacggagaccacctatcactcatcagaacctaggatcatcacattcctttaaatggaaaagcccaccctacaactttctttttaatgttctaaaaagtgacacctaggtttcctcaacagaaagctgtgcttcaatcccaaatccccttgagaccaacatgccttaaagggggtttgggtttaaagaccaatgtatctttttttttttttttttttttttttttttttttttttttgagacaaaatttcgctctcgttgcccaggctaaaatgcaatggsgggatctcggctcactgcaacctctgcctactaggttcaagtgattctccttcctcagccttccgagtagctgggattacaggtgcctgccaccatgtccagctaatttttctatctttagtagacatggggtttcagcatgttagtcaggctggtcttgaactcctgatctcaggtgatccacccatctcagcctcccaaagtgctgggattacaggcgtgagccactgcgcccagccccaatatgtcttaaagggggtttgggattaaagtacagttttccgctgaggaaacctaaggtcttaaaggggttttgggatcaagtgtcctgttgaggaaaactaggtgtcacc

SEQ ID NO: 85545 - DNA, 556 bp, Homo sapiens
gcagggctggggactggaccctggggagggaggtgcgggttcagcgccgggggacgggcccctggggaggggtgcggggccgggggaccagaccctggggaggggcttacggggctggaggacgggaccctgggaagtggggtacagggctagaggtcgggactctagggagggagcctgggtcgggcgcacgggccgggcggggcgcgcggtgggggagcgacgggtggagggtggggtgggatgacagcggcgacgcagccccggctgtttttgaagcggggcccgggcctcaccgggctgcggcgtccgactcgagtgagactctcccctgcggccccgccggaggyagggggctggcagggctgtcctggcgtggtcttctccgtttccttcctagcgattcctctcgagcctcctctccccctggccgcccctcgtctctcttctcttgggcgcattacctctctggcctatcttactgcgttcccgggtcattcatcacccatttgctcggttccattaagaaccagcttggagattaggtatttctgtc

SEQ ID NO: 85546 - DNA, 556 bp, Homo sapiens
gcagggctggggactggaccctggggagggaggtgcgggttcagcgccgggggacgggcccctggggaggggtgcggggccgggggaccagaccctggggaggggcttacggggctggaggacgggaccctgggaagtggggtacagggctagaggtcgggactctagggagggagcctgggtcgggcgcacgggccgggcggggcgcgcggtgggggagcgacgggtggagggtggggtgggatgacagcggcgacgcagccccggctgtttttgaagcggggcccgggcctcaccgggctgcggcgtccgactcgagtgagactctcccctgcggccccgccggaggcagggggctggcagggctgtcctggcgtggtcttctccgtttccttcctagcgattcctctcgagcctcctctccccctggccgcccctcrtctctcttctcttgggcgcattacctctctggcctatcttactgcgttcccgggtcattcatcacccatttgctcggttccattaagaaccagcttggagattaggtatttctgtc

SEQ ID NO: 85547 - DNA, 494 bp, Homo sapiens
cttgaggccaggagctagagaccatcctgggcaacatagtgagaccccatctctaccaaaaaaaaaaaaaaatcaaaaaaaacttgctcagcctggtggtgcatgcctgtagtcccaggattgcttgagcccaggaggtcgaggctacagkgaactatgatcttgccactttgagctatgattaaagctgcaataacagagccagaccctgtctcttagaaaaaggataaagaaaatcagcagaaactaattaatttctgtatgacgttgatgacataacctcactggcagaaaaagaataaaacgatctgagtaattatagagctgggttgtccaggggtacctccttagtggagtacactctaagaactgggaggcctgtgacagaaccccaaacctcactagtgactttgttattggcagtggggagggcggagccattgtgaagcaactttgggttatcctaggattggtggtaccagaacccagattct

SEQ ID NO: 85548 - DNA, 1120 bp, Homo sapiens
gccctggcatttgataatgccatgtgctttatgtgatggctttatgttactattataattatactaacaactaccaactattaagcatttctcatatactattaatattattttaacataacccccaaaataacatagggagataggtcatcttatcctcattttatagatgcacaagtagacttttagaagcaaagtaacttaccttaatttataccatgaccaaggaactgatttgtaatcagagctcaggttctgagtccaaagagtcactgctttcatactaattttatgcaagcctgcattcgttgatgaaaatgatcagagaactatacttatttaggtaattatacagctcagaaattaattattgctgatgggttttctggaaatttaatatgtttaatgatgaagtaaaaacaatatagttttcaaaataattcacttacacctctgaaagttctatttaacgtttcttttaccttttgagacttcatcatattttattggggtaaatgtgtcaaattctgaaataaataaaatatttttgacctcctttgaaatttggaagacaactagatataatttaggcatactcyacccttaccccaagctcagagcccagtgtggctaccgcagttctatccaaaggacagattggtgacctacctaacacagaagataacgttcattaagtccttaataaattattgctgaataaaaaatatggcgttatattcctaaattttgtctcttatagagagcaagagatgttcttcattttcatttatttattttttttgagacagagtctcagactgtcacccaggctggaatgcagtgccgcgatctcggctcactgcaaccttcacctcccaggttcaagcgattcttctgcctcagcctctgggatagctgggattacaggcatgcgccaacacacccttcttatttttgtatttttagtagagatggggtttcaccatgttggtcaggctggtctcaaactcctgacctcagatgatccaccgccttggcctcccaaagtgctgggattacaggtgtgagccactgcacctggccaagaggtgttctttaaaaagctagctcaatttcctaa

SEQ ID NO: 85549 - DNA, 1120 bp, Homo sapiens
gccctggcatttgataatgccatgtgctttatgtgatggctttatgttactattataattatactaacaactaccaactattaagcatttctcatatactattaatattattttaacataacccccaaaataacatagggagataggtcatcttatcctcattttatagatgcacaagtagacttttagaagcaaagtaacttaccttaatttataccatgaccaaggaactgatttgtaatcagagctcaggttctgagtccaaagagtcactgctttcatactaattttatgcaagcctgcattcgttgatgaaaatgatcagagaactatacttatttaggtaattatacagctcagaaattaattattgctgatgggttttctggaaatttaatatgtttaatgatgaagtaaaaacaatatagttttcaaaataattcacttacacctctgaaagttctatttaacgtttcttttaccttttgagacttcatcatattttattggggtaaatgtgtcaaattctgaaataaataaaatatttttgacctcctttgaaatttggaagacaactagatataatttaggcatactccacccttaccccaagctcagagcccagtgtggctaccgcagttctatccaaaggacagattggtgacctacctaacacagaagataacgttcattaagtccttaataaattattgctgaataaaaaatatggcgttatattcctaaattttgtctcttatagagagcaagagatgttcttcattttcatttatttawtttttttgagacagagtctcagactgtcacccaggctggaatgcagtgccgcgatctcggctcactgcaaccttcacctcccaggttcaagcgattcttctgcctcagcctctgggatagctgggattacaggcatgcgccaacacacccttcttatttttgtatttttagtagagatggggtttcaccatgttggtcaggctggtctcaaactcctgacctcagatgatccaccgccttggcctcccaaagtgctgggattacaggtgtgagccactgcacctggccaagaggtgttctttaaaaagctagctcaatttcctaa

SEQ ID NO: 85550 - DNA, 1120 bp, Homo sapiens
gccctggcatttgataatgccatgtgctttatgtgatggctttatgttactattataattatactaacaactaccaactattaagcatttctcatatactattaatattattttaacataacccccaaaataacatagggagataggtcatcttatcctcattttatagatgcacaagtagacttttagaagcaaagtaacttaccttaatttataccatgaccaaggaactgatttgtaatcagagctcaggttctgagtccaaagagtcactgctttcatactaattttatgcaagcctgcattcgttgatgaaaatgatcagagaactatacttatttaggtaattatacagctcagaaattaattattgctgatgggttttctggaaatttaatatgtttaatgatgaagtaaaaacaatatagttttcaaaataattcacttacacctctgaaagttctatttaacgtttcttttaccttttgagacttcatcatattttattggggtaaatgtgtcaaattctgaaataaataaaatatttttgacctcctttgaaatttggaagacaactagatataatttaggcatactccacccttaccccaagctcagagcccagtgtggctaccgcagttctatccaaaggacagattggtgacctacctaacacagaagataacgttcattaagtccttaataaattattgctgaataaaaaatatggcgttatattcctaaattttgtctcttatagagagcaagagatgttcttcattttcatttatttattttttttgagacagagtctcagactgtcacccaggctggaatgcagtgcygcgatctcggctcactgcaaccttcacctcccaggttcaagcgattcttctgcctcagcctctgggatagctgggattacaggcatgcgccaacacacccttcttatttttgtatttttagtagagatggggtttcaccatgttggtcaggctggtctcaaactcctgacctcagatgatccaccgccttggcctcccaaagtgctgggattacaggtgtgagccactgcacctggccaagaggtgttctttaaaaagctagctcaatttcctaa

SEQ ID NO: 85551 - DNA, 550 bp, Homo sapiens
tccccagccatacagaactgtgagtcaattaagcttgtttcctttataaattacccagtcttaggcagtyctttatagcaatatgagaacagactaagatacatgctctagtttgaactcttccattgactagttatctcactttggacaagtcacaagtgctcatttaagggctgagaacattttcattgttgcataaatatttgaaggccaatggcctttgcttctcttctgaaacactgttttctatgtttgtgtataatgtgataaagctttgtataacatttacgcacctcatttttcctggtcataatggacaaggtatgaacttcagagtaaaacttctgggttcccaaaccaactctgaccattattagctatgaacttgggcaagtcacttaacctctctgtgcctctgtttcctcatttataaaataagctttcacaccaatctcatagaattgttgtgaaaataacataagctcatttctgtgaagtacttagcacattacctggcacataattatgctcaacaatgtctatttatgca

SEQ ID NO: 85552 - DNA, 1852 bp, Homo sapiens
ttcttccaccatttgctatcttgggtaaattactcaaattctctgagcctaagtttcatccaatgtaaaattagatgttatatataactttttagcattgttcgaagtctaacaaaatcatgtgaattgaactcttaacacagtgcctgacccaaaagtgtgcctggtaaaggttgttattactgttgctgcaaatttttaaatattttcccaaatatatacatttacaaattgcataatgtcctcatatatggctacatttgcttcttgaagaaccacatgatattgatgaaataataacttttaacatctatacatgaatagaaattttcagagagattaaattaattagctaagaccattgcagaagtgaggagaaagatcttaaatcccagacagataatccaagttctaaactcttttattactacttttatgatattcaaaattagactagtattaaaatcaggaatcatacgattctcattatagttgtatataaccttagaaataattcagagagttaagtgacttgactaagttctacagggccacagccagtcctagaagcctcgtctgctaaatccaagtgcaggactagaagatgctcatcctatgacataaaagcataagatacaaatgttcttatccagtaacggtgggtgaggagcagtcacgagatgattgcaaatatattcataaggaagttatcatctcctttctagttggttaggaaaaacctttataaaacaaatgaaggttccagagtacctgagattacaattccaatggaaaaaggagtctgagagcacagaagagagagtcccagcctgggaatcatcatttcactctccaacttgtgacagagtccccacataccagaaaacaacctactccctgtgctccttctctttcattcttttttcttgttatttccccatctctcctctagcccacagcaacagataatattcctccttctttatgttaaacacacagttgtagcattatgccaggcctactaggaggtaaactgaacaagcagtatccttgctttatagaataatttaaagtaagaaagccaccagaaaactgagaaagcaagagtaacatagacactgccactgtgggaagctagaacagctgtggggctaggaactggttggcattttggatccagagatttgtaggctcttggcttggagaacaaagacttcattgcctagttgatgacaatatasaaacacatctgcagagtatattctttggcatcagcaaatgccagcagtatttagtgaacctctatgtttctagtccccattcacgtctcctttttatctgttatttttctccatgtttttcctcattggaaatgtttccaaattgaacattaattttgaagaaaaatgggttgaggggagattcttagacttacagatgttatgagaatttaaaataagggaaaatgaaactaaaatatcctgtaccctgttcgtcttgtaatgagcgcccaagtgccattgtttagaaacaagtcttggaacatcctccaggcccaccataaacataagcacattacagattactgatggataacagcaaactaaaactcatacttcatctttgcctctctccctaaaatttcttctcacacaaaagaatcattctagatataaaatattttaagactttctgtatagcctcacctgttatgtttcaaatcttagtgtatgatctagtgtcaaattatggtgagtaggggaaaaatgaaggcagagggattttttttctggagttataccttatagaaaatggatagaggcaataatggaagaaagagcttggtaataat

SEQ ID NO: 85553 - DNA, 1852 bp, Homo sapiens
ttcttccaccatttgctatcttgggtaaattactcaaattctctgagcctaagtttcatccaatgtaaaattagatgttatatataactttttagcattgttcgaagtctaacaaaatcatgtgaattgaactcttaacacagtgcctgacccaaaagtgtgcctggtaaaggttgttattactgttgctgcaaatttttaaatattttcccaaatatatacatttacaaattgcataatgtcctcatatatggctacatttgcttcttgaagaaccacatgatattgatgaaataataacttttaacatctatacatgaatagaaattttcagagagattaaattaattagctaagaccattgcagaagtgaggagaaagatcttaaatcccagacagataatccaagttctaaactcttttattactacttttatgatattcaaaattagactagtattaaaatcaggaatcatacgattctcattatagttgtatataaccttagaaataattcagagagttaagtgacttgactaagttctacagggccacagccagtcctagaagcctcgtctgctaaatccaagtgcaggactagaagatgctcatcctatgacataaaagcataagatacaaatgttcttatccagtaacggtgggtgaggagcagtcacgagatgattgcaaatatattcataaggaagttatcatctcctttctagttggttaggaaaaacctttataaaacaaatgaaggttccagagtacctgagattacaattccaatggaaaaaggagtctgagagcacagaagagagagtcccagcctgggaatcatcatttcactctccaacttgtgacagagtccccacataccagaaaacaacctactccctgtgctccttctctttcattcttttttcttgttatttccccatctctcctctagcccacagcaacagataatattcctccttctttatgttaaacacacagttgtagcattatgccaggcctactaggaggtaaactgaacaagcagtatccttgctttatagaataatttaaagtaagaaagccaccagaaaactgagaaagcaagagtaacatagacactgccactgtgggaagctagaacagctgtggggctaggaactggttggcattttggatccagagatttgtaggctcttggcttggagaacaaagacttcattgcctagttgatgacaatatagaaacacatctgcagagtatattctttggcatcagcaaatgccagcagtatttagtgaacctctatgtttctagtccccattcacgtctcctttttatctgttatttttctccatgtttttcctcattggaaatgtttccaaattgaacattaattttgaagaaaaatgggttgaggggagattcttagacttacagatgttatgagaatttaaaataagggaaaatgaaactaaaatatcctgtaccctgttcgtcttgtaatgagcgcccaagtgccattgtttagaaacaagtcttggaacatcctccaggcccaccataaacataagcacattacagattactgatggataacagcaaactaaaactcatacttcatctttgcctctctccctaaaatttcttctcacacaaaagaatcattctagatataaaatattttaagactttctgtatagcytcacctgttatgtttcaaatcttagtgtatgatctagtgtcaaattatggtgagtaggggaaaaatgaaggcagagggattttttttctggagttataccttatagaaaatggatagaggcaataatggaagaaagagcttggtaataat

SEQ ID NO: 85554 - DNA, 650 bp, Homo sapiens
tgattgactgattgattcccatttcattcctttatagttttgagctatttcacaagaatctgtgaaataaaacaataatgatgattaataaccttatgaagtgcacttaataactagggtttcrtagagtgctgtgtgggtgaaagaagaaacatgaaactagactttatattctaaagcaataaaaagatgtaaggtattgagtttgagaaaacagtagttgctttttggagaaacaatagtctctctgagtgacttaggactagatcagagtaccccaaatcgaatatgagtgcccaatctgtatgcaactgatctgaatttaacaattggccttgccgcctctattcgctgaaagggagagggaaacaagctgagatcaactaaccttcaggaacagctggaagagagaatgaaatgtgaacaacaaatagccagaaaatgagtgtctcttttgtagatgacatttttatattactgaagttcaggaggattatagagacttccccaatttctatcgtatcaacttgcttagtcttctgatttgtttttaacttaaggaagtgcttattaccctgttacataagtatatatataataggttatgtatatttgaaaaataccatcatagacagccaatgcacattggt

SEQ ID NO: 85555 - DNA, 1199 bp, Homo sapiens
tgcatttgggatttttaactttggtagacgctatcactcaccatcgaggaaggccttgtcccctctgaatctgctgtagatgaactcagatttgattcctgccagatcaataagtagaagctgagcttatattgaatattctgggctggcataataaccataagctgttaattaattcatgcttcaaagacataacaatcgacacacatgcacactcacgcacgcacactcaggcatgtacgttcacgcacatccgctcaatttcatgaactatttccgattaaatccacaaaccccctatcccccatctctgactttaccatcaacctaggtaaatgtacccctgccaaaccccaaaaacaagagacctggaacccagaaaattaaaaagagagaaattatcccaggacttgagacctaattgaattggtttgaggggctttgccctccaaatttgtattaaagttttactttttatataacagaatttgaatgacaaaaaaaattaaakttttttgtgatcgtcaactttctttgaataaatttggaaaatgactaatatgtatatgtaataatagatatttttataaaggtttcttctttaacattttggggcatattttgcctttttatcctaatgactagactaccagggaccaaaaggtttctgaggcagacagaatttgacattttctaagtgtgtctgtgactatctactaccacctttggaagctaataaatattgcgtgattaatctaaattacagatgttacatctgtccctttatgccagcattataaagagattttactgctgctcctgcgatgagaaagttacttgtgttctgtctttgcttttattttcttaatttaataattaaagtcatccaaattattagctatgaagggactctttttatggatgagagattttaggacttcctatttatatgacatcatatgtttatctggtaattaagcacctgaatcaatatatcttttagtgagaaacagaagtttaaatacttctaccagaatgagatcaacactgtcgttgtttgtttcccaatctcaggatattgccattagctagggtggtctctctaagagtgcgttcgcatatcccacagttggatcataaattcgttcaataaatttatagaaggctagaaagaccctccctcccaaccttccttcccc

SEQ ID NO: 85556 - DNA, 971 bp, Homo sapiens
tccatgtttgggagaactgtgttcggacccaatctagtgctaggtgtgctaactgctgctgggcgacagagcacgcagggccctctcagcaggcagcgcgcgtagggactcactcacacctcagtatctctgtatgagtttacacttgaataatcatgagtctatactgagacctcagatcccaacatcacaaggtgtattttagtcttcctctttccttgtttttattaaatatctttctaacagtgggaaacctggttcctattatctacagtatcttttctcatttgtttaattccggtacacacacaaagtcatttcagaatcgctaacctctacacatgagaaacacattcacaagaccaccatttatacacgattctcctygttctcagccttaccgtatccaggtaagacactggtttccaaagttatcaggtgagtgcatttgtaagagagttaaattccttggttagcatatgtatttcatgttgagttccccacatactggttggttttagtcatttgtttattttttggatatgtaaaaagtacaaatattttaagtaaaaaaaaagtgttttcatattgatatttgcaatttaagatttcacaggttttaacatgaatttctctttaaaaacaaagcttttatattatgaaaacttcaaacatatacagagtaaagagaactgtgtgacagcccacggcatctagcttcaacgccagccaacaccctggcattcacgctgcgtcggtacctccttccacctacactgaaacgtccgaaagttaacggcactattttgaaaatgcatatacccatgtaactctattaccatgtgagttcctcctcacttttacacgcacagccaagctaatgggaaacatgtttcacatgatgtggccagaatccggctgtgtcatgaacaagagggcttctcagaatcttgtgtcctctgcgctgaggg

SEQ ID NO: 85557 - DNA, 1955 bp, Homo sapiens
cagcagctgctaaagccaagagaatacctttcattataagagctaatggttttctttcaattagtttgcattcatagccaaaggtattcctttttaaatacctatgagttttcctaggaaatatgtagaaattggatgcttattaacactgtgtttctcagtgacttgttgattcagtagggtttgtgaaatgctgttggagtttcaggcaaggatgtggagtctgttctgagcacactcagggtttccatgtgttgtcctgaaagcctttctcacctcttcacatctagggtaaggccgtattgaggggaagttcctccctccctgttaggtagtgtgatgcagaattcttgacactctttgttttcacatggactgaatccaaatcaggtggggctgattcttccagccctgtctcctcatcccggtctgacactgcacaacacaaaccttcctgctgcaggctcaccgaggtgctgcctggccctgtctttgcctgaacacctgcagtctcaatgtggctgtgcgggagcaaaggcggccttcgccccacgtctctctcatgtgcttccatagcactgccttgtttttgtgaaaggatcggggagggaggaaggcaaggttaattttttctttctgatgtactagtggataaaaagagttctagaacatttgaggaggccctaggggaaactggagacatggaaagcagaggttttcgttggtaaaccagagagatgaggagttttagtttttgtagtgcccgatgcattgtacgtgttgaaagccgagtccttgatggtaatggtggctctgatgatggtggagatgggaggttaggatccccttagagatgtttagtgggtgctgcagtgagcccagttttctgagtgacagggactagggtgtgactgctgaagagggggccagatcttcagtgccctttatctctggtgggcttctcatccttggtcttgcagcatcaggatggggccagggtgcctggcctggaggggtggacttgggccgaggactgcagggcacagatgtcctctcagtgtggccctcagcacggggagccctgtggctttgaagcagatgcttcattcaaggcaggtggttcttttctgaacacaaacatacacgtgagcatccccaaaggctgtttttgagagatggtgtgtgtctccatgtccaggctgttgtaacagaatgataaggtgcagaggccatctgacagctggaagggtacagaggcatctctaagcagcagcaccgatggagtacccagcctggaagtgctgacaccccaccatggtcctcctctgtcccatgcagcccagcctttaggagatgcaccaacaggcatttgggtggcagactggagctcagtggggctgcccccactggggcccctctgtagcttctgagaacagttgaattgtctatctgccttcacatctatctgtgatttggttcccttttgttcttcgccagtcctcagtaggatttggtaagacgtaatttctcgatggttcaggaagacgggtggggctgtgtccatgcttgcacagcctactgtgaacagctgagctcactgccctgtgactggcttggtgyagctgaggctcagggaagagctggggtgtcctggggtgagggagcagcagcaccagcaggaccccatgccccaactgctgcagggaccatcctggcctgaatgtgttagaaactaggagggtatctggggtggggacacatcccactcttcttgctttgtgttcaggcccccagcctctttctgtcatgatgtcttgatgtctccctactcagctgctagcacttctgctgagggaagcagtcacaaaggccggtggccctggcctgagcatggatgtggctttcttggttcttggctgcggtttccttgaactctctgtggtctgcaggacctg

SEQ ID NO: 85558 - DNA, 562 bp, Homo sapiens
ccaaccgctctaagcctcggttttcttctccacacgatcagaattgcagtatccctgccctggctgaattgttttgggtataaagcgtattgtccctgtcagctggggcacaaggctggcacagatgctgcctgaagacaggctggagctttctctggtcacagagtgctgtgcctcgtcctgtctctaggctggagggagaggcagagaacctcaaacctgcacacctctaagaggaggtttcttccaggcgaaggtggggggttttgtaaagtaaggggtgggaggctctcctgggcattgcgttggtggyggccggccctgtggtcctggccaggcacgcagcggcgggactgaggctggaagtggcctcctggcctgggtgcaccgggggatcttctggccactctccagcccctgctgcagccattctggtgcttgtgggcccgcggctgcttcagtgggtgaccccatccaggccacttgtgagcagtcccctcttctctgtctttagctcccactgaagttctaggactgcagccctagtgagtgttcttcctcc

SEQ ID NO: 85559 - DNA, 597 bp, Homo sapiens
attttctgtaaagggaaagaaaattcctcaaataaacaatgatcactttttatttgaaatagtaaaaaaaaatgctatagcgattatattaatcccaaacaatttaaaaactcatcacattgatgaacacttcgatatttagtgatctcacctgttttcatctatatataatgtaccagagatgagaactaccaagggaatattttctggtttgagagaattaaattcattatcaaacaaaagccaatgaaactggaatagaaagtaggcataggaaattgaggcctgctctgctgttgctgagagtatcatcaggctagagatcatctaaagggaacttgttttctggctgtgttttgaagcaagttcagtyggaaagaatgtctgttttctctgtccttgttttttttgccttacgtatccgtcctcggaaagatgtgtttttaaatttaaaaagatgaccttttaaactatggcatattgtttgggagtaggggttgttgaaattatccaatgaattaaaacataggaagcattatgactagtaacagcataaaatatgcacccaataaatgttagttatttttaatattaact

SEQ ID NO: 85560 - DNA, 1037 bp, Homo sapiens
tgcatatgcaagcactattcataataacagaaatggaaataattcaaatgtccactagcaatagagtagaaatataaatccatgtatattcataaatgatataatacagagctatgaaagaagcacactatagtaacatgcaagacaatggatggatctcacagacaatattgtacgaaacaagtcaaacacaagagaaggcatatgtataatttcatccatgtaaagttkaagaatagacaaattttacctatggtgttagaagttagaaaatgtctcttgggggctttggaaatatgaattgggatgggttatgatgaaatgtctgggatgctggaaatgctgcctttattaatctctgtgctgcacgtattggtaaaaattcacaagttgcatactcaggagttgtgtgtgttagtgtagtacttgaatacctaattaaattaatttaatcacagctcctaattttgtaattctatattagagagaataattccgtagatttagtgctaacttatgattttaagaagcctgtgaatgggcaatccagggtaacctagtttatatttcctatgactagctccacagtaactagtagatagaactagggtttccagctttcctgtaaactataatagttggctagcagtaaagttgaaactaattttcatgcagatttataataataagatatttttgaatttcattccagttattacactgttgaaagaaattatatactcaccactgtctttattagaaaagtactgttgagttattttagttaatacagctttcttctatctggaatggatttttaatctacaattatactccaacaatattaatgattaaaatatgactatttaggtacaattaacgttgcattgcgggctacttttttaatttttacagaaagaataataagaagttctttcttattgcatttatgaaaacattgacttttatgtaggttattttgtattcagtttgtcatgcatggtgtgcccagagatctttgaaccaggcaagatttc

SEQ ID NO: 85561 - DNA, 1037 bp, Homo sapiens
tgcatatgcaagcactattcataataacagaaatggaaataattcaaatgtccactagcaatagagtagaaatataaatccatgtatattcataaatgatataatacagagctatgaaagaagcacactatagtaacatgcaagacaatggatggatctcacagacaatattgtacgaaacaagtcaaacacaagagaaggcatatgtataatttcatccatgtaaagtttaagaatagacaaattttacctatggtgttagaagttagaaaatgtctcttgggggctttggaaatatgaattgggatgggttatgatgaaatgtctgggatgctggaaatgytgcctttattaatctctgtgctgcacgtattggtaaaaattcacaagttgcatactcaggagttgtgtgtgttagtgtagtacttgaatacctaattaaattaatttaatcacagctcctaattttgtaattctatattagagagaataattccgtagatttagtgctaacttatgattttaagaagcctgtgaatgggcaatccagggtaacctagtttatatttcctatgactagctccacagtaactagtagatagaactagggtttccagctttcctgtaaactataatagttggctagcagtaaagttgaaactaattttcatgcagatttataataataagatatttttgaatttcattccagttattacactgttgaaagaaattatatactcaccactgtctttattagaaaagtactgttgagttattttagttaatacagctttcttctatctggaatggatttttaatctacaattatactccaacaatattaatgattaaaatatgactatttaggtacaattaacgttgcattgcgggctacttttttaatttttacagaaagaataataagaagttctttcttattgcatttatgaaaacattgacttttatgtaggttattttgtattcagtttgtcatgcatggtgtgcccagagatctttgaaccaggcaagatttc

SEQ ID NO: 85562 - DNA, 1037 bp, Homo sapiens
tgcatatgcaagcactattcataataacagaaatggaaataattcaaatgtccactagcaatagagtagaaatataaatccatgtatattcataaatgatataatacagagctatgaaagaagcacactatagtaacatgcaagacaatggatggatctcacagacaatattgtacgaaacaagtcaaacacaagagaaggcatatgtataatttcatccatgtaaagtttaagaatagacaaattttacctatggtgttagaagttagaaaatgtctcttgggggctttggaaatatgaattgggatgggttatgatgaaatgtctgggatgctggaaatgctgcctttattratctctgtgctgcacgtattggtaaaaattcacaagttgcatactcaggagttgtgtgtgttagtgtagtacttgaatacctaattaaattaatttaatcacagctcctaattttgtaattctatattagagagaataattccgtagatttagtgctaacttatgattttaagaagcctgtgaatgggcaatccagggtaacctagtttatatttcctatgactagctccacagtaactagtagatagaactagggtttccagctttcctgtaaactataatagttggctagcagtaaagttgaaactaattttcatgcagatttataataataagatatttttgaatttcattccagttattacactgttgaaagaaattatatactcaccactgtctttattagaaaagtactgttgagttattttagttaatacagctttcttctatctggaatggatttttaatctacaattatactccaacaatattaatgattaaaatatgactatttaggtacaattaacgttgcattgcgggctacttttttaatttttacagaaagaataataagaagttctttcttattgcatttatgaaaacattgacttttatgtaggttattttgtattcagtttgtcatgcatggtgtgcccagagatctttgaaccaggcaagatttc

SEQ ID NO: 85563 - DNA, 1037 bp, Homo sapiens
tgcatatgcaagcactattcataataacagaaatggaaataattcaaatgtccactagcaatagagtagaaatataaatccatgtatattcataaatgatataatacagagctatgaaagaagcacactatagtaacatgcaagacaatggatggatctcacagacaatattgtacgaaacaagtcaaacacaagagaaggcatatgtataatttcatccatgtaaagtttaagaatagacaaattttacctatggtgttagaagttagaaaatgtctcttgggggctttggaaatatgaattgggatgggttatgatgaaatgtctgggatgctggaaatgctgcctttattaatctctgtgctgcacgtattggtaaaaattcacaagttgcatactcaggagttgtgtgtgttagtgtagtacttgaatacctaattaaattaatttaatcacagctcctaattttgtaattctatattagagagaataattccgtagatttagtgctaacttatgattttaagaagcctgtgaatgggcaatccagggtaacctagtttatatttcctatgactagctccacagtaactagtagatagaactagggtttccagctttcctgtaaactataatagttggctagcagtaaagttgaaactaattttcatgcagatttataataataagatatttttgaatttcattccagttattacactgttgaaagaaattatmtactcaccactgtctttattagaaaagtactgttgagttattttagttaatacagctttcttctatctggaatggatttttaatctacaattatactccaacaatattaatgattaaaatatgactatttaggtacaattaacgttgcattgcgggctacttttttaatttttacagaaagaataataagaagttctttcttattgcatttatgaaaacattgacttttatgtaggttattttgtattcagtttgtcatgcatggtgtgcccagagatctttgaaccaggcaagatttc

SEQ ID NO: 85564 - DNA, 2214 bp, Homo sapiens
tttgtcccagggtttacccaaactgtatagaacaatactgccagcaaacaaccaagatgctccctttccctttaaagttttgaaatcgtaaagaagttttgtaatttaggggccatctaaggtgtaaaaatcataacagaatttaaagtgatacactcgaacttgcctttttctccagttctgagagaatcactctttcatctgcctttagaataaaagggaacatggcaatcatccgtgaaacactgtttattgtttcaatttaagcaacctgaaaataaataactgcctttttacattgttaaaaacaatacaatttttttttttgctcaccaagatttgtcaatttacgatacatggctgctaaggctgctaactcctctccagtacagcaccatggaaagtcaaattgtaatgaaaattgctttagcaaatgtagcatcgaacttggacgagttagttaaaatttaaacatctgattatataaggtaaaaatctaccatctatatctagataagtcattggaggtttttagatcgagtgctcaatgccctacattggacttgataaatactgccatcatttgcccctgtgacctgcctttatccatgctgtcctagctgctgacatttcctctacctgattgaagagtctttcattagcaacgytaacactcaaaatgactttattaagctattttaggcttggagtcatttggtctctttaaaacaatatttcatattacgtgttaagtactgacttaaaagttcaattctctcaaggaacactaactaccttatattcaaatacttgaggtgcaactcaccataacaacattctataatcatgcagacaaggaatattattctcacaataaagtgaatcaagtatgctcaacaatccaaatttcagcccatagaaaaatgtattacaacatttaatagtcctatatatttttctttgaataattatctaattttatatttctatatatctacataaaaatttttaatctcttaaaaatgctaatttataaaaaggcagaggatcatataaccattctaacgtgtggaaccatatgcttacaagtccctccttctggggtgtcctttccacagactccactgctcttttcttttcttttttcttttctttgtttaaggagaatttgtcatatctcctaaataaaattttccccaacttctctcaaactacatgactaatctgtcctctaaagctccatgttattaacctctttcatttgacatgtagcctacactacttcacatggacacctttctttttatgtacatgacctctaaatgcataatattttatttgaacttctattatgtccattcaccatttacaaacttgtttcataacattcatgtatgttttgtgtcttaacctgtaaattcctcaagagaatggatttctaatttgaatatataaacattcaacaaatgtttgatgaacaaaggaatggaagacttgtttcctctacaagattatctcctctatgagattctgccctcctgaggcagaaaccatattttatgcttcttgaaagtcacagaattgcgtatataagagctcaataatacttatttactttttaaaatgatgacaatattaatttttaatttttgtgggtacacagtagttgtatatattcatggggtacatgagatgttttgatataggtacacaatacataataacattatagaaaatgggctacccatcctgtcaagcatttattctatgtgttacaaacaacccagttatactcttctagttattttttaaggatttaaattattttgactatagtcactctgttgtgctatcaaatactaggtcttattcattctttctatttttttttttgcacccattaaccaacgtcacccccaccccacccccacctacccttcccagcctctgataaccatccttctactctctatctccatgtgttcaaggcaatattaaattttatagccatgggaaaatagtgtctaattttctaaataaaatccaaaactttctagggaatacaactgttgggttatatctgtaaatgagcttttgattttcttgatgtataatgaaagtttatacttatatctcactgcatcatatttgactgcagaaattaaagcacaattcaaaagatatgtatgtacctatatgtacatatatagtgtc

SEQ ID NO: 85565 - DNA, 2214 bp, Homo sapiens
tttgtcccagggtttacccaaactgtatagaacaatactgccagcaaacaaccaagatgctccctttccctttaaagttttgaaatcgtaaagaagttttgtaatttaggggccatctaaggtgtaaaaatcataacagaatttaaagtgatacactcgaacttgcctttttctccagttctgagagaatcactctttcatctgcctttagaataaaagggaacatggcaatcatccgtgaaacactgtttattgtttcaatttaagcaacctgaaaataaataactgcctttttacattgttaaaaacaatacaatttttttttttgctcaccaagatttgtcaatttacgatacatggctgctaaggctgctaactcctctccagtacagcaccatggaaagtcaaattgtaatgaaaattgctttagcaaatgtagcatcgaacttggacgagttagttaaaatttaaacatctgattatataaggtaaaaatctaccatctatatctagataagtcattggaggtttttagatcgagtgctcaatgccctacattggacttgataaatactgccatcatttgcccctgtgacctgcctttatccatgctgtcctagctgctgacatttcctctacctgattgaagagtctttcattagcaacgttaacactcaaaatgactttattaagctattttaggcttggagtcatttggtctctttaaaacaatatttcatattacgtgttaagtactgacttaaaagttcaattctctcaaggaacactaactaccttatattcaaatacttgaggtgcaactcaccataacaacattctataatcatgcagacaaggaatattattctcacaataaagtgaatcaagtatgctcaacaatccaaatttcagcccatagaaaaatgtattacaacatttaatagtcctatatatttttctttgaataattatctaattttatatttctatatatctacataaaaatttttaatctcttaaaaatgctaatttataaaaaggcagaggatcatataaccattctaacgtgtggaaccatatgcttacaagtccctccttctggggtgtcctttccacagactccactgctcttttcttttcttttttcttttctttgtttaaggagaatttgtcatatctcctaaataaaattttccccaacttctctcaaactacatgactaatctgtcctctaaagctccatgttattaacctctttcatttgacatgtagcctacactacttcacatggacacctttctttttatgtacatgacctctaaatgcataatattttatttgaacttctattatgtccattcaccatttacaaacttgtttcataacattcatgtatgttttgtgtcttaacctgtaaattcctcaagagaatggatttctaatttgaatatataaacattcaacaaatgtttgatgaacaaaggaatggaagacttgtttcctctacaagattatctcctctatgagattctgccctcctgaggcagaaaccatattttatgcttcttgaaagtcacagaattgcgtatataagagctcaataatacttatttactttttaaaatgatgacaatattaatttttaatttttgtgggtacacagtagttgtatatattcatggggtacatgagatgttttgatataggtacacaatacataataacattatagaaaatgggctacccatcctgtcaagcatttattctatgtgttacaaacaacccagttatactcttctagttattttttaaggatttaaattattttgactatagtcactctgttgtgctatcaaatactaggtcttattcattctttctatttttttttttgcacccattaaccaacgtcacccccaccccacccccacctacccttcccagcctctgataaccatccttctactctctatctccatgtgttcaaggcaatattaaattttatagccatgggaaaatagtgtctaattttctaaataaaatccaaaactttctagggaatacaactgttgggttatatctgtaaatgagcttttgattttcttgatgtataatgaaagtttatacttrtatctcactgcatcatatttgactgcagaaattaaagcacaattcaaaagatatgtatgtacctatatgtacatatatagtgtc

SEQ ID NO: 85566 - DNA, 729 bp, Homo sapiens
gtgttgttaagaaaaagaaaaaaaaaaaaaagattagaagccagaaggaaagaagtgactttgtatagcaaacaaaacccagacataaaagaagggtaaagagacaggcaaatacattgtgctgccatcataawcatgaattataccatcctaaatcctcttatttggaatcactccattctattttgaaccatctctcttattttgaatccaccccacccctaatttgaacctaatagattgctatttgtttcaaaagtagatgttctacttgaatcaattaattttaccttgcaatgaatagaagtttttcttaaatgacttcatgatagaaaagaatgcaaataataaaaacatggacatatttaaaatggacaaataatggaaaatatttaaatatcttgccttatgcagaccacgtcagtcacaaatataagaaccaaatgtagttaccagtccctctcttagtagactcaacctgataaacgtttaaactgtatatgaaaaaactatctcttttgtcatatgtaagatatataccatttctatgtaaagcatttttaaacatcaactcatatttggatgtagtttttcatcaaaagtatatatgccatattataagtaaattactgccagtcaaattgaactaaaagtagccaaaatactaagcatttattggcatgtgtaattcaaaattcaaattaatttattttcaaactatttataggg

SEQ ID NO: 85567 - DNA, 701 bp, Homo sapiens
cacatatttaaagatgctgaaactctgaatagttctatgatttgttttctcaacagatgtgcatccttcaagccctgaattcaccagatgcatattaaattaatctgtacttttagtttttacataacactctactctagttttataaatacaccacatgaaagcagaattccattgttgctttatggcattaaatattaacagattatctccgctgtgcaaaaaatacattaagattcattttaatgcagccaaatgtgtgctcattaaatataggctataataacttcaccactatttttaaattggctgatttctatctggaacgtgaaacataacaaatttgctcataraaatccagtgacacctggtacctgaaagaaatatacacatttcaattataagaaatacttaatttaagtccacttaaacctcctggaaaatttacttcttataaatccataatttcttcactaactgcaatgaaaaaattagcacagttatatcagaaataagactacactgaattccagtgtgactcattaattagctgtacaatcttgagcaagtcacttagcctctctgcacttaagtagtctcagctgtaaaatgaaagggtctaactagaccatctccatattttcttttagctttatgatttcataatctatgaaactcaagaaacacagcattaaccagat

SEQ ID NO: 85568 - DNA, 629 bp, Homo sapiens
ttccacctcagcctcccaagtagctaggactacaggaacatgcctccatgcctggctaattttaatttttcttctagagacaaggtctccctatgttgcccaggctggtctcaaactcctgggcccaagtgatcctccagcttcagcctcccaaattgttgggattacaggcatgggctcccgaacccagacagaatattctcttagtgaggcccaaaggcacaaatttgtttacctctagagcataattctgcaattccaccattacactgtgaaaagaatgcartacatacgataccaatcataggacaatttcataatttttaaaaagttaaaggatatagcactatggtaataatttttcttgcattccatatcattgtgtctgaattacagtttctgtgctgttttcagtgtcttgtatgttaattttttttttttttttttttgagaggaagtctcacttgcccaggctggagtgcagtggcacgatctcagctcactgcaagctctgtctcctgggttcacaccattctcctgcctcagcctcccgagtagctgggactacaggcgcctgctaccatacccgcctaatttttttttgttttttttttttagtagagacaggg

SEQ ID NO: 85569 - DNA, 706 bp, Homo sapiens
tgcatgaattttaggtagaaaaagttacatatactcctttctatatggtagattttttgtttggcaacctgattagtattataaagacatctttgcttttttttttttttttccccaagacagagtcttgctctgtttccagtctggagtgcagtggtgcgatctctgctcattgcaacctccgcttcctgggttcaagtgattctcctgcatcagtctcccgaatagctgggactacaggcatgcgccaccatacccagctaattttcttttttttttttttgagacagagtctcgctctgtcgcccaggctggaatgcagtggtgtaatctcagctcaccacaacctctgcctcctgggttcaagcgattctcctgcctcagcctcccaagtagctgggactgcatgcgcacactgccacgcccagctaatttttcgtattttagtagagatggggtttcaccgagttgcccaagctggtcttgarctgctgagctcaggcaatccacccaccttggcctcccaaagtgctaggattacaggcgtgagccaccgcgcccagccctgtttttgaactttaaattaatggagctaaatagtgtgtactcttgtatctagctgcttttttttttttttttttttttttttttgagacggagtcttgctctgtcacccaggctggagtgcagtggcgcaatcttggcc

SEQ ID NO: 85570 - DNA, 675 bp, Homo sapiens
tggatccagcctgcaagtggctcttaaaccgtccggactaattcagtgagtgtgagtccttggagccctccaagacctgcaaagcccctcctttcactctgtgtcctcaaacctcctttctagacaaaagagatagaaaacatactcaccggttcctgaacaaaggctgagccagcttcgaggtggagacccatgttttgtcaggactgaattcatgcttgacctctgcggtggtggcaccctgcctggacytccagccacatgccaatgccacaggcctctctaatcagacacacaggtctccgtcctgctttgcccagttgccatctcaacatggaaggcttctccccgactcagccccagtcttaatttctgcagctggacctgtctgcacagaaaaccaaggcgctctcagccctgccaatttgctccccgtccaacacaggtcccctgggcgctgtatatttgaaggcacagacttcgcagccgccgctcacactgcatttccttgttggtggttggttccttcttggattttccattcctgagtgcccatttgcgccctggaatgggctcccacactgctggctgccctggaggtgccgtccctcctttccaggaaagcaacaccacagagaccccggcctctgcaatcccagcagccagcagcagccc

SEQ ID NO: 85571 - DNA, 561 bp, Homo sapiens
tacaatgatgaagggaaatgcgtagttagtgtttaataggtgtgaaatttcagtttggaaagttgaaaaacagttctgaaaatggattatggtaatggttgcagaataatgtgaatgtcagaacattacatttaaaaatgatgaaaatcacagactttatgtatctttcaccacatacacaacatgattgcttagggtaccattcactgagaaggtgacaaacaaatatttgataaagatgaggcacctaggccttttgatatcccacaagaaagaaagcctatgttactagagtagattaaaaacaagtgargtaagtaatgaagtcagataagtaatggtatgaaggggacagattgagacagacttgaaagctgagaactgaaaatagacattggatttagcaatatactgttctctgtagttagtactaattagaaaagggtagttttcgtggctgatgtgctgaaaatgtatattgagaaggaatacaaaagaattggaggaaagcatatcctaaaatattaaatacaatgagagtcacacatttttgagttaaaa

SEQ ID NO: 85572 - DNA, 534 bp, Homo sapiens
cctttcgggcctgcgcgcctacaggtttcagaggccagcgggaacggtggcctcgggtgtgtgggggtgaggggtgtggtgtgtgtgcacgtgttcacgcgcgactagaagcggttccttgtgcatttctagaatcttgtagatgtgttttctcgtgagaatgatgcagacttactgctgacttaaggtcagtttgtttgaaaagggagaacgtcagtccgatggtcggtggttgtgtctctcctgagcattcgtacaaagtgaagccacctcccctccgccatgcagtctcccagaccgggtcaaaggacccaggctccaggtcgctgaggcctggagggctgaggcccttgctgtgcgccctggtsctctgatcccaaggcccaagctgccccggtacccacttagggtcagggtggaaagcctacgtgggaaagggggacctggaggactacccccacgcccatggcagggtggagtcccgaccttggcatattggacctactcacttggcatctccctgccccgaccccg

SEQ ID NO: 85573 - DNA, 1225 bp, Homo sapiens
tagttgacctgtctgtgcagcagggactctgtagccactccctgggaaaccctcaacttgctcaaagagacaatcgtccttggttgccagtcttgtcacacttcctgaagtgctgatgaaagacagtgagggcctaggcgtggtggctcacgcttgtaatcccagcactttgggagaccaaggcaggcgggcaacttgagaccaggagctcacgaccagcctggcgaacatggcaaaacctcgtcaataataacaataataataataataataataataataataataataataaaattagttaggcttgctggcacgtgcctgtaatcccagctactcaggaggctgaggcacaagaattgcttgaacctaggaggcagaggttgcagtgagccaagatcacatcactgcactctagcctgggcaacagagccaaactccatctcaaaaaaaaaaaaaaaaaaaaaaaaraaagagagaaagagaagatcagacaggagaggagaggaggggttgggccagagggatgaaattttgttcccaggacacagaactaatcccaaaatcaagtttcataaatgacctgcccactctctcctttagacaataagcaatatagatgatttaataaggatccctaataaccaaccagaggactccctcctatttcagaaaatggccttagttatgaaatagccatagataacatatttggagggccggccccttttctgggaactaaattctgcccacagtccctctgcaggggcaggtttagatggccatgacttgccttaggttattttcccctcccctccagctgcagttgattggaccaggggtggtcacctgatttcagagaagctaatataagttggtgagttcagccaatcagattctcccttgcatatgcaaaatgagagtatttggtggtgggcatttgagaaaggcctcacagaatgggagttagagttaatgacagggaaaacccaagccacatgcaagacaaaattggaggggagagagtggccagaggaagtggaacaagatggtttgcaaagagaataaagcagaccaggcgagaaaagccaaggttgaggaaaaatgggaagcgagaagaagcgggaaagaggatggaaagaaggaaagagaaatgcaaagagacagagatatgggaggtggtggaggagggaaagaaatcttcttggcttcttgtggcttctcc

SEQ ID NO: 85574 - DNA, 1225 bp, Homo sapiens
tagttgacctgtctgtgcagcagggactctgtagccactccctgggaaaccctcaacttgctcaaagagacaatcgtccttggttgccagtcttgtcacacttcctgaagtgctgatgaaagacagtgagggcctaggcgtggtggctcacgcttgtaatcccagcactttgggagaccaaggcaggcgggcaacttgagaccaggagctcacgaccagcctggcgaacatggcaaaacctcgtcaataataacaataataataataataataataataataataataataataaaattagttaggcttgctggcacgtgcctgtaatcccagctactcaggaggctgaggcacaagaattgcttgaacctaggaggcagaggttgcagtgagccaagatcacatcactgcactctagcctgggcaacagagccaaactccatctcaaaaaaaaaaaaaaaaaaaaaaaaaaragagagaaagagaagatcagacaggagaggagaggaggggttgggccagagggatgaaattttgttcccaggacacagaactaatcccaaaatcaagtttcataaatgacctgcccactctctcctttagacaataagcaatatagatgatttaataaggatccctaataaccaaccagaggactccctcctatttcagaaaatggccttagttatgaaatagccatagataacatatttggagggccggccccttttctgggaactaaattctgcccacagtccctctgcaggggcaggtttagatggccatgacttgccttaggttattttcccctcccctccagctgcagttgattggaccaggggtggtcacctgatttcagagaagctaatataagttggtgagttcagccaatcagattctcccttgcatatgcaaaatgagagtatttggtggtgggcatttgagaaaggcctcacagaatgggagttagagttaatgacagggaaaacccaagccacatgcaagacaaaattggaggggagagagtggccagaggaagtggaacaagatggtttgcaaagagaataaagcagaccaggcgagaaaagccaaggttgaggaaaaatgggaagcgagaagaagcgggaaagaggatggaaagaaggaaagagaaatgcaaagagacagagatatgggaggtggtggaggagggaaagaaatcttcttggcttcttgtggcttctcc

SEQ ID NO: 85575 - DNA, 696 bp, Homo sapiens
tcttcttgttggaaactagaggctcgttggtaatgaccaagcaatgcacagcgtgtccatttttattagtatccttactcgtatgggcaccacccaatctcctcagtggccacaaaatccatccccctgatgctacacctaaacttagttgcaagaacacgaggtggagcaaatcattacccatcatactttttgtgcttctaactttttgtgtgattctcagtggaggaataaaaaacgagtagaggaagctttcatttcatattgcatttgtattatatgtgtgtgtgtctctctstgtctctctctctctctctgtgtgtgtgtgtgtgtgtgtgtgtgtgtgtatgagtatatgagagaattcctcttatttttgttctctataccaaatccagttcatttttatccatgcgcatctggataggtctacatgttttcttttcaacaatcaaatgcaaaacatatttattagctcttgattctaaaagaacgccaaagccacatgtggtgggctcatgcctgtaatcccagcactttcggaagctgaggtgggaggattatttgagcccaggagtttaagaccagcctgggcaatacagtgaaaccccatctctacaaaatatttttaaaaattagctgggcatgggggcaccaccttttgtcccagctacttgggaggctgaggctgaggat

SEQ ID NO: 85576 - DNA, 898 bp, Homo sapiens
gaaagaaaaatgttctcagttaactacagttcccagaataccttgtagaacattctgtctctattgatcataaactggcatagccactgtgcttcctctggcagaactcaggggaaagcaagcaactgcattatatcatgtgacaaactttatggaaaatactagtgtgcagttttatcagtatttgcattctgtcagtacaagatagatctgaaatctatttttatccaacagttcttattaaaccaagaagattgcctgttactatatgtagttgtttcaagcagtagtgcctgatgatactttttgtaaacaattgagaataaatccaaacaagctaaaaaatgtttattgcaaaatactgtagttcaagaaaaattacatctgcatggrctgcatattttacatgaaatttatggtgcagtttctcttcattaaccacatctcagagaattttcaaagcatcagcttgcatattattaacatgtacttaaaataacaatatcgaaagcttcaagattaaaataaaaggtgaaatgtaaaatgtaaggtgccttcagtgtgtttgtatacatgtaatttgctttttaattaaagtgaactagaccttacctagcccagagagattaataagtatctcattctagtacaactattctccttaataaaagcagatggaattcattttcaaaagaaaaaaaattagtattaactatcattgcttcttttatgtggttaaacacatataattattctaccacatttttcatggaaaggaacagtgacaaaaaggcaattacagcatgtgaattcaatcgaatttttttctattactctgtgttatggatatgtgttttgtggggtgtttgattggttttgtttactttttgccacttgt

SEQ ID NO: 85577 - DNA, 1283 bp, Homo sapiens
aaaatacacgaacactaacaatagctgatgagctaaaataaaaaaaaatcacaaaaaacttataatgttttgagaaagtttatgaatttgtgtttggctgcactcaaagccctcccagccacatgcggcctgtggggtgtgagttggacaaacttaaccctagtggctatattgaaaaataaaaaataaaaaaaaaacagatggctttggacacttagaatcaatgtgtgaaactggttggtatatgcagtaatgaaaggtaaacattaaagatttctttgaggttccatatttaggtggcamtaatacaggagaacaattgggaaagagatgcagaagataataaggtaaatttctggacacccttaatgtgagaggctgcgatatttggttgcagaggtctaccaagcagttataaagaaaggatgtctatgccaaaagaatgaataagcaattgagcattcatttgccacagtatgtgaagtactacattaaatacttataggatcacaaaatttacttttttgaatgtttcacatttgtagcttgcattgtttgtgcaaaaactctaattcctttgccagaattatggctcatttttgtgattttgtgagtttatgagaagggctaatgaatgattgaaaagcactttgaactatatttaaaatctagcctttcgaaagattttcattgatttcttgtttaatccatagtctccaaaatttggcatggcaaaaggaaaactttatgaattaattttcacaattctacagtgttcaaaacagaataattggaagttgtcaaagctgcaatacaatcatatgaatacctctaaaaccaggtgaaggaattaaagcaaatttaagtgaaagagttggggaacaggaaactcatgaaacctcattcatttcctggaagtagaccacagatatggctctaatgattttggtagccaatgcaaaaaaagaaatgcaatcagtattgattaggtaaaatacaactttgtcccccaggcagagaaatgttttctcctgactcttaaatagagatgactgtatgatatggagttgatagcaaaaacagctccaagttttatagcaacattttaaagatcccctccagataagtgaatagtatatctacaaaagtaaaattagtaggaaaccaatttaatattttgaagcacatagctttccaaagaacaagcttaacaccaaaataaatttcagaacatcaaaaagtatccttatattcaagatcgttcttgacaagttcaagggtga

SEQ ID NO: 85578 - DNA, 589 bp, Homo sapiens
ctcatttattaatgtgcataagaatcagatggggagtgtgttaagcatgtaaattccaggagtccatcattccctcaggtccaggggtacagccagcatctgtagcagtggaactttttgtgaagatgggaatgttctattctgtgttgtcctaaagaggagctactagccacaaatggcgattgagcacttgaaatgtggctaacgtgactgagaaactgaattattcattttattgcattttgattaaatttaaatagccacatgtggcttgtgactttcatattgaccagtgcagatctataggtttagcaagcatcacagctgactctratgaacaatagtgtttaagactctaacaagccgtccaggtgatccttatgctcacttactggcaagtagtagtaggtaatcaacaaatgtttgttgagtgggtgaatgagtggaggaactaataaatgaatgaaccagactataatttccttgtggtttaaggctgtctctcctgaaaaagaaaatgtgggggactgttccagattaaagaggctaaaaagacttggcaatcgaatggaacaaattgacattaaaa

SEQ ID NO: 85579 - DNA, 555 bp, Homo sapiens
tcggcctcccagagtgctgggattacgggcgtgagcyactgcgcctggctcacccagttaatttttgtattttcagtagagacggagtttcactgtgttggccaggatggtcttgatctcctgacctcgtgatctgcccgccttggcatcccaaagtgctgggattacaggcgtgagccaccgtgcctggcccacttatttttctttttaagaaaatattttatctactttaaggagaacttttctgttgtcattaggtgttaccaacagttacagtgagtggtgatgggaaagtaaataaagaatctctacattaagattctaagaacatttaaaaaaatgagaatgaaatagcttgctttattttatattcagagggcttgcatgttttatttattttttttttaattgtttttttgagatggagtctcgctctgtcgcccaggctggagtgcagtggcgtgatcttggctcaccgcaagcttcgcctcttgggttcatgccattctcctgcctcagcctcccaagtagctgggactacaggcgcctgccacc

SEQ ID NO: 85580 - DNA, 1237 bp, Homo sapiens
ggtggtctccaggggccgccagctggcagtttggatgtgctactgagatcgtaacacttacttttgcatccactcgagaaacttcttctttgtcctgagcacaggcactgcgtatttctctccattcttaaaatacttcaacgtaggaaactctgagatgtggaatctttctgccagggccttgttgacagtggcatcgacagctgcaaggacaccagagctctgggatgggggaaaggccaaccatgcattacagcctcagatgcggtgctggtggaacacaggagcccagacgctgcccccacaacccatcctggacctgctggaatttaactggggtggctagcccrgtgggctccccatatcccagggaacaactgaacattggcacggccataatttctcatttatgagctgagatgaggcttttgaatctgccccaccagccacgttgagtagattggcacctgttcctgttagccagggtcccagagaaaagagggagcaggcagaggtcacctggatgggcacgggaacatggcccagtagtctttctgccccctctaggatcccatctaagatgttctacttgggcacacagaggtactgctggcctccacggaccacgggagctgcagcagggcttgcaggggaaagtcataatgattccacctgtcagtgattctttcaaagagaacggtgagggggaaggaaaggaagcttacatctgcttctccatggagggcttctgctgccttctcaaactccggcttcattttcttacagtggccacaccctgtggggagagatcaagagaaaccattcttatggcacagaggccctcgggatgctcccctgcgccgcctctgtaaggcagctcagtcccattcccagacacctgagaaaagcagcagcagcaccagctcaaagaaaagaaatattttgcataatccaccagaagtgggttggggtagtgggaaggtaccccagacacaaaaataaaacaactgcataaataatacgggcaactggtgtgccaggtactgaccagtgccttacagcctcataactaccccacaaagtaggaactgacattatctccattctatggattagacaattgaggcaccaagagggcaggtgactgcccaaggccatatacacagccatggtcacagagctgggttgaaaacccaaccatctggtgagaggccctagctgcaggcagcgtgtaggt

SEQ ID NO: 85581 - DNA, 1237 bp, Homo sapiens
ggtggtctccaggggccgccagctggcagtttggatgtgctactgagatcgtaacacttacttttgcatccactcgagaaacttcttctttgtcctgagcacaggcactgcgtatttctctccattcttaaaatacttcaacgtaggaaactctgagatgtggaatctttctgccagggccttgttgacagtggcatcgacagctgcaaggacaccagagctctgggatgggggaaaggccaaccatgcattacagcctcagatgcggtgctggtggaacacaggagcccagacgctgcccccacaacccatcctggacctgctggaatttaactggggtggctagcccggtgggctccccatatcccagggaacaactgaacattggcacggccatmatttctcatttatgagctgagatgaggcttttgaatctgccccaccagccacgttgagtagattggcacctgttcctgttagccagggtcccagagaaaagagggagcaggcagaggtcacctggatgggcacgggaacatggcccagtagtctttctgccccctctaggatcccatctaagatgttctacttgggcacacagaggtactgctggcctccacggaccacgggagctgcagcagggcttgcaggggaaagtcataatgattccacctgtcagtgattctttcaaagagaacggtgagggggaaggaaaggaagcttacatctgcttctccatggagggcttctgctgccttctcaaactccggcttcattttcttacagtggccacaccctgtggggagagatcaagagaaaccattcttatggcacagaggccctcgggatgctcccctgcgccgcctctgtaaggcagctcagtcccattcccagacacctgagaaaagcagcagcagcaccagctcaaagaaaagaaatattttgcataatccaccagaagtgggttggggtagtgggaaggtaccccagacacaaaaataaaacaactgcataaataatacgggcaactggtgtgccaggtactgaccagtgccttacagcctcataactaccccacaaagtaggaactgacattatctccattctatggattagacaattgaggcaccaagagggcaggtgactgcccaaggccatatacacagccatggtcacagagctgggttgaaaacccaaccatctggtgagaggccctagctgcaggcagcgtgtaggt

SEQ ID NO: 85582 - DNA, 1237 bp, Homo sapiens
ggtggtctccaggggccgccagctggcagtttggatgtgctactgagatcgtaacacttacttttgcatccactcgagaaacttcttctttgtcctgagcacaggcactgcgtatttctctccattcttaaaatacttcaacgtaggaaactctgagatgtggaatctttctgccagggccttgttgacagtggcatcgacagctgcaaggacaccagagctctgggatgggggaaaggccaaccatgcattacagcctcagatgcggtgctggtggaacacaggagcccagacgctgcccccacaacccatcctggacctgctggaatttaactggggtggctagcccggtgggctccccatatcccagggaacaactgaacattggcacggccataatttctcatttatgagctgagatgaggcttttgaatctgccccaccagccacgttgagtagattggcacctgttcctgttagccagggtcccagagaaaagagggagcaggcagaggtcacctggatgggcacgggaacatggsccagtagtctttctgccccctctaggatcccatctaagatgttctacttgggcacacagaggtactgctggcctccacggaccacgggagctgcagcagggcttgcaggggaaagtcataatgattccacctgtcagtgattctttcaaagagaacggtgagggggaaggaaaggaagcttacatctgcttctccatggagggcttctgctgccttctcaaactccggcttcattttcttacagtggccacaccctgtggggagagatcaagagaaaccattcttatggcacagaggccctcgggatgctcccctgcgccgcctctgtaaggcagctcagtcccattcccagacacctgagaaaagcagcagcagcaccagctcaaagaaaagaaatattttgcataatccaccagaagtgggttggggtagtgggaaggtaccccagacacaaaaataaaacaactgcataaataatacgggcaactggtgtgccaggtactgaccagtgccttacagcctcataactaccccacaaagtaggaactgacattatctccattctatggattagacaattgaggcaccaagagggcaggtgactgcccaaggccatatacacagccatggtcacagagctgggttgaaaacccaaccatctggtgagaggccctagctgcaggcagcgtgtaggt

SEQ ID NO: 85583 - DNA, 1237 bp, Homo sapiens
ggtggtctccaggggccgccagctggcagtttggatgtgctactgagatcgtaacacttacttttgcatccactcgagaaacttcttctttgtcctgagcacaggcactgcgtatttctctccattcttaaaatacttcaacgtaggaaactctgagatgtggaatctttctgccagggccttgttgacagtggcatcgacagctgcaaggacaccagagctctgggatgggggaaaggccaaccatgcattacagcctcagatgcggtgctggtggaacacaggagcccagacgctgcccccacaacccatcctggacctgctggaatttaactggggtggctagcccggtgggctccccatatcccagggaacaactgaacattggcacggccataatttctcatttatgagctgagatgaggcttttgaatctgccccaccagccacgttgagtagattggcacctgttcctgttagccagggtcccagagaaaagagggagcaggcagaggtcacctggatgggcacgggaacatggcccagtagtctttctgccccctctaggatcccatctaagatgttctacttgggcacacagaggtactgctggcctccacggaccacgggagctgcagcagggcttgcaggggaaagtcataatgattccacctgtcagtgattctttcaaagagaacggtgagggggaaggaaaggaagcttacatcygcttctccatggagggcttctgctgccttctcaaactccggcttcattttcttacagtggccacaccctgtggggagagatcaagagaaaccattcttatggcacagaggccctcgggatgctcccctgcgccgcctctgtaaggcagctcagtcccattcccagacacctgagaaaagcagcagcagcaccagctcaaagaaaagaaatattttgcataatccaccagaagtgggttggggtagtgggaaggtaccccagacacaaaaataaaacaactgcataaataatacgggcaactggtgtgccaggtactgaccagtgccttacagcctcataactaccccacaaagtaggaactgacattatctccattctatggattagacaattgaggcaccaagagggcaggtgactgcccaaggccatatacacagccatggtcacagagctgggttgaaaacccaaccatctggtgagaggccctagctgcaggcagcgtgtaggt

SEQ ID NO: 85584 - DNA, 972 bp, Homo sapiens
taagctattttcccctaactcccaaaaaatgacttaagaatgcttatactaaaaatatttatacaataaggcagctaagaataacaatttttaaaagaaaaagggacaatatatagaaaacyttataccaggaaatcacataaaaagggtttttacctattgactgaacattacatttatgctctgagcttgccagctgctagtgcctgagggaaaacctatcaattataactttattaacatgaaggatgtgcctcctaggattctgccacaaatgacaaagcaatgaaaaatatttgattgcctttttttaaaaaatcacttgctttttcaagagctgatttatgagaactgctgcaatatggtactgctccctaaagagcttctgtcttctcaccttctccttccaacctaggggtttttcttcaccacacttcaaattcttgagcaaggccacattcagttatatgagcaactgaaactggtggttctgcaagctggtccatggtgcagattcaggctgtgaacttggacaaattgagcagctcttcatgttgcctgctcattcaagatgaccatgcttctctccccaaggactgatcactttgattgatgaccgattgaatttgccttatgtacagggtgactcagagacctccaagtattagaaaatgtgtccttagtttagatccaaatctatcttctgctcatcaagtgatatatctatggccatagaaatcagacaaaattcctttccagatggattttttcagatatttttgttaacttgttaaattgaggtaaaacatacatgaaatgcacaaatcataggtgtacaactccattaacgtttacaaagtacacatacctgtataaccatgacccagatgaagaagtaggacattcgctgccacctcaaaacctctcccctgcctcctcccagctgagagtccccaaaaggtaaccactgtt

SEQ ID NO: 85585 - DNA, 972 bp, Homo sapiens
taagctattttcccctaactcccaaaaaatgacttaagaatgcttatactaaaaatatttatacaataaggcagctaagaataacaatttttaaaagaaaaagggacaatatatagaaaaccttataccaggaaatcacataaaaagggtttttacctattgactgaacattacatttatgctctgagcttgccagctgctagtgcctgagggaaaacctatcaattataactttattaacatgaaggatgtgcctcctaggattctgccacaaatgacaaagcaatgaaaaatatttgattgcctttttttaaaaaatcacttgctttttcaagagctgatttatgagaactgctgcaatatggtactgctccctaaagagcttctgtcttctcaccttctccttccaacctaggggtttttcttcaccacacttcaaattcttgagcaaggccacattcagttatatgagcaactgaaactggtggttctgcaagctggtccatggtgcagattcaggctgtgaacttggacaaattgagcagctcttcatgttgcctgctcattcaagatgaccatgcttctctccccaaggactgatcactttgattgatgaccgattgaatttgccttatgtacagggtgactcagagacctccaagtattagaaaatgtgtccttagtttagatccaaatctatcttctgctcatcaagtgatatatctatggccatagaaatcagacaaaattcctttccagatggatkttttcagatatttttgttaacttgttaaattgaggtaaaacatacatgaaatgcacaaatcataggtgtacaactccattaacgtttacaaagtacacatacctgtataaccatgacccagatgaagaagtaggacattcgctgccacctcaaaacctctcccctgcctcctcccagctgagagtccccaaaaggtaaccactgtt

SEQ ID NO: 85586 - DNA, 972 bp, Homo sapiens
taagctattttcccctaactcccaaaaaatgacttaagaatgcttatactaaaaatatttatacaataaggcagctaagaataacaatttttaaaagaaaaagggacaatatatagaaaaccttataccaggaaatcacataaaaagggtttttacctattgactgaacattacatttatgctctgagcttgccagctgctagtgcctgagggaaaacctatcaattataactttattaacatgaaggatgtgcctcctaggattctgccacaaatgacaaagcaatgaaaaatatttgattgcctttttttaaaaaatcacttgctttttcaagagctgatttatgagaactgctgcaatatggtactgctccctaaagagcttctgtcttctcaccttctccttccaacctaggggtttttcttcaccacacttcaaattcttgagcaaggccacattcagttatatgagcaactgaaactggtggttctgcaagctggtccatggtgcagattcaggctgtgaacttggacaaattgagcagctcttcatgttgcctgctcattcaagatgaccatgcttctctccccaaggactgatcactttgattgatgaccgattgaatttgccttatgtacagggtgactcagagacctccaagtattagaaaatgtgtccttagtttagatccaaatctatcttctgctcatcaagtgatatatctatggccatagaaatcagacaaaattcctttccagatggattttttcagatatttttgttaacttgttaaattgaggtaaaacatacatgaaatgcacaaatcataggtgtacaactccattaacgtttacaaagtacacayacctgtataaccatgacccagatgaagaagtaggacattcgctgccacctcaaaacctctcccctgcctcctcccagctgagagtccccaaaaggtaaccactgtt

SEQ ID NO: 85587 - DNA, 972 bp, Homo sapiens
taagctattttcccctaactcccaaaaaatgacttaagaatgcttatactaaaaatatttatacaataaggcagctaagaataacaatttttaaaagaaaaagggacaatatatagaaaaccttataccaggaaatcacataaaaagggtttttacctattgactgaacattacatttatgctctgagcttgccagctgctagtgcctgagggaaaacctatcaattataactttattaacatgaaggatgtgcctcctaggattctgccacaaatgacaaagcaatgaaaaatatttgattgcctttttttaaaaaatcacttgctttttcaagagctgatttatgagaactgctgcaatatggtactgctccctaaagagcttctgtcttctcaccttctccttccaacctaggggtttttcttcaccacacttcaaattcttgagcaaggccacattcagttatatgagcaactgaaactggtggttctgcaagctggtccatggtgcagattcaggctgtgaacttggacaaattgagcagctcttcatgttgcctgctcattcaagatgaccatgcttctctccccaaggactgatcactttgattgatgaccgattgaatttgccttatgtacagggtgactcagagacctccaagtattagaaaatgtgtccttagtttagatccaaatctatcttctgctcatcaagtgatatatctatggccatagaaatcagacaaaattcctttccagatggattttttcagatatttttgttaacttgttaaattgaggtaaaacatacatgaaatgcacaaatcataggtgtacaactccattaacgtttacaaagtacacatacctgtataaccatgacccagatgaagaagtaggacattcgctgccacctcaaaacctctcccctscctcctcccagctgagagtccccaaaaggtaaccactgtt

SEQ ID NO: 85588 - DNA, 645 bp, Homo sapiens
atgaggtcggacacacgcgtccaagagaaggttaacgtggtttcctgaggccgctgccaactcagcctgagctggaaagaggagcctggcaggggggaggcgagggagtccctgctgagactggcaagctgtgagggcggggggcacccaggctcagggggaggggtgtggcccctcgggaggaggcaggtggtgagggcgggggcacccaggctcagggggaggggtgtggccccgcaggaggaggcagacaggctgattacattcttcttgccagttttccaaaggtagccctactgctaccttttttgctgcctctgaaagctcctttcttctgggaaagatcttgaaacagaaccactttaactgagggtggggaaagcctccacttttcattctgcaaagcgctgtggttgstgggatattttgtttgtgtttaaaaagtgaagtcttcctcccggcccgtgtttcaggcacggcaacctcacgtgctggttcatctacatttttaagctgaataaactcggcatcctctctgctgtctccagaagaggctcccagtgaactcagaagctggaattaccctgcacccccacagacatctgggggtttcactgttgctatgggaactctcacaagaacccg

SEQ ID NO: 85589 - DNA, 3300 bp, Homo sapiens
tgaccaccttttacaacttctcagatgtccccttcctccttattttatttccccagtcttttyagcactgtgtttttttcccaaagcatttctcatttagatgcgccaaatcttttacttttttctaacattttaaaaattggggtgagatttacataacatacaattaactattttagagttaacatttcgccagcaacaatggtataacaaatggccaaaaagcccatgaaagggcattcagcattcttagccatcagggagatgcaaaggaaatagggtatatacatacaatggaatattattcagcctgaaaaaaggaagggaattctaccacttgcaacagcgtggatagacctcaaagacattacgctaagtgaaataagccagttgcagaaggacaaatactgtaacactccttttatataaggcctctaaacagtggcagttaacaggggatgtaagagggggatgtggggagttgtggttcaatggggttcaagttcactgatatacaagatgcattagttccagagatctgctttgcaaccctgagcctacagttaataaggtactctgcacttaaattgtgttaagagggtagactcaatttaagtgttcttaccacacacacacagaacaacaaggaaacccaagaaaacttttggaggtgaagagtgtgtttattaccttgatcacagtgataacatgaatgtgtacatatgtccaaactcaaactgtataaattaattatgtacagtttttggtatccaattataccaccataaagcagcagggggaaggaaatgtaagtcaaaaccacaatgaaatattacttcctgccctttatgatgcctataattttatttttatttatttttttgagaactctgtcacccaggctagagtgcatggtgtgatcatggctcactgcagccttgacctcccaagttcagatgcctattatttaaaataatttttttaaaaaatggaaagttacaaatgttgtcaaggatgtggagaaattggaactcaacccttgctggtagggatgtaaaatgggaaacagggtatggaggattttaaacacagagtcagctatgacccagcacttccactctcaaactaggtatcatatcattgtcagctgtctctccccaatggatcatgagttccatgcatcaatgatgttgtttcatttgatgctggatcctagcacctacggtagtgcctggaaaagaggtgggctcaaactatgtgtcaattaagtggatacacatgtggttgcttccttattctcagaaaagaactaagccattccccattttatcactatttctaggataaccatgagctcccttaactccgagattcctgctagtatcccaactacaaagcccactccttgtcccctctttttaaaattattttgtagctcagtaacatgtttggggtctttctttgtagatctttttatttattaccatcacatttgttcacacagcagcacaaagggtgatatgaaaaacactgttaacgaaataaatagaaagcagtgatttcagggctgttgccacacagcatcccaattttgctggagatggaagagggaagagccaatttattgccatattccattgtctttaaaataatattgtttctactcccaaaaatgaatggtgagaatgtgaaaacctgtatcagagatgatgcattttcttcctagcaggcttgtcaagtatcagttcctaacgagaactatgcgatggaacttgtcattgataaagagggtcaaatctgtaatctgcctgcccaaggtcaaaggctgtaatctgccagcccataggctgaattcattttgctcagtctgcatagtgtttaactttttaaatttgttgccaatttatacacacatgcacacacatacacacacacacacactcactcaacagtcctagcttctaaaacatagcaggtgtttgggccaattctgggccccacttcctgtaaggcaataatagagaaagtggagctgctattgcccctctagacaagaggtgcaaggtggcttgaaaaatatgtccacaaattacctgatgctctatctttaaggaggcggagattaacttgattatgggctaaacttagtggctcacttctaacagaatagagaagctgtgatacgtcgcttctgaggttaggttataaaagacacagtggtccctctctcatgagttgttctagaagcagcaagctaccattttatgaacagcctatggagaggtccatgagctgagggtcaaagcctccagccaatgaccagcaaggagctgaacctgccagcaaccgcaccagacaagttggaagtgatccatcaccagcttcagctgagcctccggactctgcagccccagccgacagcttgactgcacatctcgtgagaagctgaagccagaccaggcagccaggctgcttctaggatcctgaccctcagaaatggtgagataaccagagtttgttcttttaaaattgctaagtttggggataatttgttacacagcacttgataactgatacaacacaataactaagcaataccatgctgctcaatgtctcctagggctgcattaagggattatcactccagccttcatgtttttcagctccctttaatgggcagagggcagctgtgcctacagcttcgatggttagggtgggcttaaatgcacaggaaagaggggagtaggaaatgctttcaaaggcagagtcagaagaaaggcatagcgaagatgaaagaggtgaaggaagttggtataaaaagctctgaccagaccaaactcagggaaagtcaaatacaaaatacagccagggaaaattaaaattctttataagcaaggaagcttttgagatgtccagatgggtgaaatctttataagtattcacataatcatcatctatggattcagaagaagcaaccgtggattaaagacacagaacatgtttgcagccccaggtttccgcatggtctggcagctggcgtatgcaccacaagaaggcagagtcccttgtcccaccacaaactgattactagaaaggctgatgcttattagtttgcatatgttctgaaaaatgcgagttcatgacatcaccatgttaggattgcgctcatgtgcactctgatgtactttccagcctggagcgtgtcttgcctcctctggaacccacccttctatcccccactctgcctgaagggacactagagggagacagaacgggggagagggaggagggagggtccct

SEQ ID NO: 85590 - DNA, 1541 bp, Homo sapiens
tgcatctcaacccagacccaccagggcaaaagcagaatctgtccccgaaggtcaacgacatcatcactgacattgagtctagctcaggctctggagctggtctgcctgggcttgaatcctagctctgatgctcgctagctgattggccttggcaagttatttaacctcttcatatctttgtttcttcctctgtaaaacagaaataatgatgcctgcatcagggttattatgaggcataaacaacttaatatatgtggaagaggagcttaataattgctagtgattaaagttgatatcatcattttcaagctctgcttagggacctgaagaaatgctcattccctacctaatgcagcggggcttaaaacctagatgacgggttgatgggtgcagcaaaccaccatggcacgtgtatacctatgtaacaaacctgcatgttctgcacctgtatcccagaacttaaagtaaaatttttaaaaaatgttcattcccccggaagtagccccaaccttgccatgccctaaatccgctgctctaaaatccctaacacaagcaagaagtattgcctcttcttgaccaactgcaaggaagtgcctgcttctccaggacacctacaagggcagctcacagagccatgcccctcgggggacttcttgaccttggtggtggaggccttggcagacgctcaggtgtttggttccatatttgcttccagataagactgtttagtagacatgcaactgcttagctatgccccaaggcatggggcaagccaccagccagggagggcccacttcctctgactcatctgcacacatgacaggccaccagccccatccgccaatagcaaggcaaagctgactcaggcaacatgagattacgagagcatctccctcccctcctacttcagtccacagcaatctgtgcctccaaccttctttgtgctacaaagataactcactggtccaggattatcatggtacctctgtgacaggctcatcagcagggctgctcttgccaatctcttactgctcagagcctggcccttgtagctctgcccgctcttccctggtcctraaccttgcttctgctccttggactcccaggttgggcttcttcctggtcagtcttatgcaggtctgaccacaactagtcccactatgaagcccatcagaaatgaggtcaatgcatcactggcccagtttcacagaaagatggacgggggcacaaatggctgctggaatccaggtcctgacaaatagagacttgatagagcatggttgaatatttctcatatagggacacaagtccagaaggcatatggcatctctgagtactggatgtcataccaggagagtctcatctcaaaaggaggtgatgatcatgtatttggccttcaaagcccatgctgctataattttctaagatctgaaatctgagtaatacaacagcagtcagcttcatgaccaagagcccatccttgagggaaactgactcttcctcctctgatgagtgacttgactttccaggcaagtaaagca

SEQ ID NO: 85591 - DNA, 542 bp, Homo sapiens
tgaccctcactgtgcatatccatagctgccctcactgagccgcagcctcgggctgccccaaaaggtaagcggagtacaagggtggaggctctctctctctctagcacagaatctctttcttccagagtcrgccagcggtgctgtctcttttctgctgggaaagataggaatggagattccttgaggtcagacacagtagatcctagtcagaaactcccattggctaagtgagagaagccagacacaaaaggccacatattgtgtgattccacttatatgaagtgtccagatcaggcacatccagagagcccacacagagtagaccagccagggactgggagcagagggaatagggagtgactgcttaatggtacgggacttccttttggggtgatgaaaatgtagataataatgatggttacacaactttgagaataagctaaaaaactaccgaactgtatgtacactttaaaagaaggaattttatctcaattaaaaaaacaaaaaagcacttattgaaaaatgccatggagtggttagca

SEQ ID NO: 85592 - DNA, 542 bp, Homo sapiens
tgaccctcactgtgcatatccatagctgccctcactgagccgcagcctcgggctgccccaaaaggtaagcggagtacaagggtggaggctctctctctctctagcacagaatctctttcttccagagtcggccagcggtgctgtctcttttctgctgggaaagataggaatggagattccttgaggtcagacacagtagatcctagtcagaaactcccattggctaagtgagagaagccagacacaaaaggccacatattgtgtgattccacttatatgaagtgtccagatcaggcacatccagagagcccacamagagtagaccagccagggactgggagcagagggaatagggagtgactgcttaatggtacgggacttccttttggggtgatgaaaatgtagataataatgatggttacacaactttgagaataagctaaaaaactaccgaactgtatgtacactttaaaagaaggaattttatctcaattaaaaaaacaaaaaagcacttattgaaaaatgccatggagtggttagca

SEQ ID NO: 85593 - DNA, 1224 bp, Homo sapiens
atggtgaactgctgtttatcccagggatgtaagaatggttttaacatatgcaaatcaagaaatgtgtacatcatatgaacagaatgaaggacaaaagccataggtttatctcaatagatgtaaaaaagaaaaaaagcacttgagaaaattcaatgtgcctttatgataacaactctcaacaaattagtcctatttttagttttttgagaaatctccatgttgtttttcataatatctgtactaatttatattcccactaacagtgtataagagttcccttttcttcacatccttgccagcatttgtaattttttgtctttttgataatagccattttaaggggtgagaatgatatctcattgtggttttgatttccatttccctaatgattaacgacgctgagcattttttatatacctgttggccacttgtttttcgttttttgagaaaacgatttctcatttttttaatgtgcatatgttggtattaaccacataattaccacatgagattatgactaatttgacagtttccccattcacctgcataatcccattctcaattctttcagataacacaagttaataagttagtgggtatccttccttaatttacccccatgttcatattatctagataagatgtagatacagacttattatacacaggtatattgtaataggctttgtyataattgctcttttcaaaccagagttatattttacacacggttttgcattttgcttttcgttataagattttgcaaattctgacctacccccatgcccagtctgtttacttgttgagtcctaattcattcttgttaatagttatatattattccatggtggatatgtaatatacaatgtatttaattacttctcatcactaatcatccattttatttcagttattttgccataataggcaaaaatccttgaatatataaccgtttcaactggggcatttatttctaaaggataggtttccacaagtgagatttttgtgttaaagaaataagaattgttttttcttaaaaaattttgcaagaataccttcataaagaagtataaaattgtagtttctattaagggtatatgatagtgcattttcccctacattattaactacattcattttaaactttttttctaaactagaagatataaagaaatatctcattaatttcaattccttttttttaaattctagtgactttatgca

SEQ ID NO: 85594 - DNA, 512 bp, Homo sapiens
gcacccccactccagctcatgctatttattctacttttaatgatatactgcctgctcgattcccattcccagctccaacattcacactcttcatcttgcccatctttcagaactcagcttcactatctcttaggtgaccttgaataagatcttaatacttttcctttccaacaaataacccagttttaattatctaattgattatgatatcacttattcatcactgtgtatcaactcatcccagattcaatggcttcaaacagagaaacaaaaaaatacattttactgcttacattcagtaggttggccaggtattacatcagctgctctctcctgggttcactcaactggaaggatgaaaatggctttattcacatgtctggcagttggtgcttttgctgattgatggcctcycattctccagtacgttagacaagttttcttatgttgtagtctcaggacattattacaactggcaaaaacagaaactgtaaggtgtctaaaacctagga

SEQ ID NO: 85595 - DNA, 856 bp, Homo sapiens
tgtatctctaataaaaatttttgacctctaggttaattatgtaacatatctcaattgttataaagatacaaggtcagagttgagtattttttttaatagtctagaagaagacattaaactagggttggtattagaaaagggtgagtatattttaatcaaaaatgccaaattacatacacatatatataattatatacatgtacatatatgtgtgtgtatacatatgtgtgtatatgtatatatatggaaagagagagacatgaagagtttgtgttttttgctatagtatatctttgtgatttagtcagaatatataagaaggtcattcaaactgagcttcagtggtaatataaatgagaaaatctgagttcctgaaagtaagtagaatgaagctttgtgttttaagaattttaggggaattttaatgtagtttgttaagaagattatgtttttctaacatttcacttgtgaaatccaatcagaaattgaggcctaaagtctatatagatccttagaataagatttttggcagctgattgttctctgaaagcaggaattcatgtgtgctatctgtgttattctaaattcacttgcatttatttttctctaatggttgtatgtgcagcatgtagtgactctgtggtaatcgcccttttccataactcttgtttcttcacggttggaggggatttaactamctatcagtagtgattttgatgtttcctcaagaacaaaaatggtctcattagaaatctagaatccaaggaaaattttataacttatttggatcagagagttgtctgtgatgagagaagatataaacagataatttgtccattattttcctaattggctt

SEQ ID NO: 85596 - DNA, 973 bp, Homo sapiens
tagaaatatacaatacattgttgataactacgtttttcatcctgaacatctctcctgaggcaggagagatgagatctatatcttcctgtagatatagatctcattttaaaatataattacagaattttcacggtatagaggtaccataattttttcaatcattctcttttgatggactttcaggttgttgtcagggtatggtttctttctccactacatctcatatatgttgcctttcatgctggtgttgagagagcggaattcctaagtcaaaaggtggatgtctatatagaatattaatagacactgttaaatttcgctcccagaaaggtgtcgccaatttgctctgatataattctgatcctaagtctcagttgcctggctttgccctctagttgctaaatagctactctgcaaagaggggaagtcacacctataaaaagagatgtccctggaatccttcatcccgtgggaaggtgtgtggccttttggcatgtgctgctgggaacaatatcattcgctcttttttggagcttgtatttgatggctgtgacgtcaaaatagccaagaagatgaaaacacagctgttgctgtgttatttgcattatggctaattttccatatgtttaaaataagcacaacaccaaggaactgcatggaaacagattcacaccttgtcgaacattggattgtgttcctgtagcatcttaaggataatgcttccccatagcatcccttcttgtgcgcatgtaaatcctggtacaacctctgtgggtatgcgcttgattgccagttcccccaacccccaatctccggatgttatggagcaggatcgtgtaaactttggggtagacttttcatctgtttagtagmcaaatgtatttgtgtgatttgtactgttggacatttaggccatgtcccatctgttgcacttcaaacaatgaataatcttgtgtatgagtctttttatgca

SEQ ID NO: 85597 - DNA, 1052 bp, Homo sapiens
ttccccttctgttttaagaaggaccacttttgtaatataatttaaaatgaatttttctcatttcttacctgtaagctaatgtaatggctatatatatatatatatgtatatgtattttaatttttttagcactaaggtattttaaacactcccttttctagtttctaactcctccttttttcacaatatattttattttttaatttttgctcttcttttcattktcaaaccaagacagctttcccaaaaattatgtagctttctttaaggaagaaaaaaatatgttttttttttgctttttaatgaaatatactgaatatgtaatgaatcaaattgcaaaaaaacatataaatatttaaattactttttctgaaataattctttttctggtctctgctttttcctcaaataaaaataatacacaattttgtcccctgaatgagggtcctattcaattatatcagaaaaaatatattgaaattgaacagcagtggtgtgtgcaatttactgttaataatcaaacactgttattgaatacaattccattttaggaatttgatggtattggggcattaagttattttatttttttatggatgaaattaccacagtctcgaagtttatgagtcagtgaagaaagctatgaagcctcttctttaaaatcattgtaacacaaaaattttatgggccccctcaaatctacccaactttgcttgataaatactgtacattttagaatgcaagagtggcttaaataaatggaagatgtcaaaatgcactgttccaaaactatccgtaaagcatttactaaagaaatttcaccaccaaaaataaaacatggattacaataaacaaaaaattcagtttcattgtacattctacacataaaaggaatgcccactttgcaaagtaaatgattcctttaatatctatatggattagacctttcaaacaactctataattttaaagactaagcaggtacaactgaacacttaggacaagtattaactcatagaatgacccagtggattggtcaaattttacatatca

SEQ ID NO: 85598 - DNA, 2060 bp, Homo sapiens
  misc_feature (1)...(2060): n = A,T,C or G
ttgaaaagccattcgtgacatttatgtacatttgtatatggaattttgtatgtgttatgtatttttgataatgcattcaaatttccttcttctctgtacctcttccttctactacaaataaaaaggatgaataaaaataaataaaaatgttataaatagtctaatatttcacaaaggcaatgggagaaggctgctatgacagatgagtaaaaaatatctaaacctctttaatcaaagagtacatttgtccttcttaaccattttttaaatttaaagatttatttagtatttaaaattcttacctagtcaatcagttttcttttgagagaatcttaaatcaaaaggtctgtataaagtgcttcaatacccagatgacaagtctgggtcttaattgatcatcttcacaaacattaatgacattttctactggataagtatgatttccttgaatgtctggatccatgtatatgaaacatgttctagattatctttaatgtcatgagaatatactctcttactctgaaataagtgtgtatttttaagtaaaggctctccataggctatgctatttgctattaatagttgtgttttggctattactaaaaagccaaaagataacagatgctggcaagattgtgaagaaaagggaatgcttagacactgttggtgggagrgtaaattagttcaaccattgcagaagacagcatgacaattcctcaaagacctacaatcagaaataccatttgacccagcaatcccattactgggtatatatccaagataatatatattttctttttctttttttcttttttttttttttttgagatggagtctcattctgttaccagactgaagtgcagtggtgcgatctcagctcactacaacctctgcctcctgggttccagagattctcctgcctcagcctcctgagtagctgggactacaagtgcaccaccatgtctggctaatttttgtattgtttttagtacagatggggtttcaccatatagatcaggctggtctcaaactcctgaccttgtgatccgcccacctcagcctcccaaagtgctggaattacagacatgaaccaccgtgcctggcctgagaatataaattgttctattaaaaagacacatgcatgcctatgtcactgcagcactattcacaatagtaaagacatagaatcaacctaagtgcccatcagtgatagactggataaatggtacatacacaccacagaatgctatgcagccatgaaaaagaatgagatcatgtcctttgcaggaacatggatggagctaaaggccatttgcaaactaacacaggaacagaaaatcaaatactgcatagtctcacttacaagtgggagctaactgattagaacacatggacacatagaagggaacaacgactctaaggcctatctgaagttgaaggatggaaggtgggagaggatcaggacaaacagctaatgggtactaggcttaatatctgggtgacaaaataatctgtacaacaaacccccatgacacaagtttacctatataacaaacctgcctctgtaccccaaacttaaaatgaaaaagaataagttatattttgctactgattgtaagtggaatttcagagaacatgatgttaacattgtataagatttagataccttctgtctcagtctgtttgtgctgctataacataatagtggtgactgggtaataatttataaataatagaaatttctttcttaagtttctggaggcttggaagtaccatattaaagtgtcaacatttgatgtcttgtgagggccttcttgctgcatcctcacatgacaaaagcagcaagcactgtgtcctcacgtggtggaagagcagaaaagcaaaaagggcctagctagttttctccaacccttttatatggcactaacccattcatgagggttcttagtcacttctgaaaggccctgcctcttantatcaccataataagaattaagtttcaacgtatgaattttgggagatattcattgcaccttctttgctgcantttctgccatttg

SEQ ID NO: 85599 - DNA, 2060 bp, Homo sapiens
  misc_feature (1)...(2060): n = A,T,C or G
ttgaaaagccattcgtgacatttatgtacatttgtatatggaattttgtatgtgttatgtatttttgataatgcattcaaatttccttcttctctgtacctcttccttctactacaaataaaaaggatgaataaaaataaataaaaatgttataaatagtctaatatttcacaaaggcaatgggagaaggctgctatgacagatgagtaaaaaatatctaaacctctttaatcaaagagtacatttgtccttcttaaccattttttaaatttaaagatttatttagtatttaaaattcttacctagtcaatcagttttcttttgagagaatcttaaatcaaaaggtctgtataaagtgcttcaatacccagatgacaagtctgggtcttaattgatcatcttcacaaacattaatgacattttctactggataagtatgatttccttgaatgtctggatccatgtatatgaaacatgttctagattatctttaatgtcatgagaatatactctcttactctgaaataagtgtgtatttttaagtaaaggctctccataggctatgctatttgctattaatagttgtgttttggctattactaaaaagccaaaagataacagatgctggcaagattgtgaagaaaagggaatgcttagacactgttggtgggagggtaaattagttcaaccattgcagaagacagcatgacaattcctcaaagacctacaatcagaaataccatttgacccagcaatcccattactgggtatatatccaagataatatatattttctttttctttttttcttttttttttttttttgagatggagtctcattctgttaccagactgaagtgcagtggtgcgatctcagctcactacaacctctgcctcctgggttccagagattctcctgcctcagcctccygagtagctgggactacaagtgcaccaccatgtctggctaatttttgtattgtttttagtacagatggggtttcaccatatagatcaggctggtctcaaactcctgaccttgtgatccgcccacctcagcctcccaaagtgctggaattacagacatgaaccaccgtgcctggcctgagaatataaattgttctattaaaaagacacatgcatgcctatgtcactgcagcactattcacaatagtaaagacatagaatcaacctaagtgcccatcagtgatagactggataaatggtacatacacaccacagaatgctatgcagccatgaaaaagaatgagatcatgtcctttgcaggaacatggatggagctaaaggccatttgcaaactaacacaggaacagaaaatcaaatactgcatagtctcacttacaagtgggagctaactgattagaacacatggacacatagaagggaacaacgactctaaggcctatctgaagttgaaggatggaaggtgggagaggatcaggacaaacagctaatgggtactaggcttaatatctgggtgacaaaataatctgtacaacaaacccccatgacacaagtttacctatataacaaacctgcctctgtaccccaaacttaaaatgaaaaagaataagttatattttgctactgattgtaagtggaatttcagagaacatgatgttaacattgtataagatttagataccttctgtctcagtctgtttgtgctgctataacataatagtggtgactgggtaataatttataaataatagaaatttctttcttaagtttctggaggcttggaagtaccatattaaagtgtcaacatttgatgtcttgtgagggccttcttgctgcatcctcacatgacaaaagcagcaagcactgtgtcctcacgtggtggaagagcagaaaagcaaaaagggcctagctagttttctccaacccttttatatggcactaacccattcatgagggttcttagtcacttctgaaaggccctgcctcttantatcaccataataagaattaagtttcaacgtatgaattttgggagatattcattgcaccttctttgctgcantttctgccatttg

SEQ ID NO: 85600 - DNA, 2060 bp, Homo sapiens
  misc_feature (1)...(2060): n = A,T,C or G
ttgaaaagccattcgtgacatttatgtacatttgtatatggaattttgtatgtgttatgtatttttgataatgcattcaaatttccttcttctctgtacctcttccttctactacaaataaaaaggatgaataaaaataaataaaaatgttataaatagtctaatatttcacaaaggcaatgggagaaggctgctatgacagatgagtaaaaaatatctaaacctctttaatcaaagagtacatttgtccttcttaaccattttttaaatttaaagatttatttagtatttaaaattcttacctagtcaatcagttttcttttgagagaatcttaaatcaaaaggtctgtataaagtgcttcaatacccagatgacaagtctgggtcttaattgatcatcttcacaaacattaatgacattttctactggataagtatgatttccttgaatgtctggatccatgtatatgaaacatgttctagattatctttaatgtcatgagaatatactctcttactctgaaataagtgtgtatttttaagtaaaggctctccataggctatgctatttgctattaatagttgtgttttggctattactaaaaagccaaaagataacagatgctggcaagattgtgaagaaaagggaatgcttagacactgttggtgggagggtaaattagttcaaccattgcagaagacagcatgacaattcctcaaagacctacaatcagaaataccatttgacccagcaatcccattactgggtatatatccaagataatatatattttctttttctttttttcttttttttttttttttgagatggagtctcattctgttaccagactgaagtgcagtggtgcgatctcagctcactacaacctctgcctcctgggttccagagattctcctgcctcagcctcctgagtagctgggactacaagtgcaccaccatgtctggctaatttttgtattktttttagtacagatggggtttcaccatatagatcaggctggtctcaaactcctgaccttgtgatccgcccacctcagcctcccaaagtgctggaattacagacatgaaccaccgtgcctggcctgagaatataaattgttctattaaaaagacacatgcatgcctatgtcactgcagcactattcacaatagtaaagacatagaatcaacctaagtgcccatcagtgatagactggataaatggtacatacacaccacagaatgctatgcagccatgaaaaagaatgagatcatgtcctttgcaggaacatggatggagctaaaggccatttgcaaactaacacaggaacagaaaatcaaatactgcatagtctcacttacaagtgggagctaactgattagaacacatggacacatagaagggaacaacgactctaaggcctatctgaagttgaaggatggaaggtgggagaggatcaggacaaacagctaatgggtactaggcttaatatctgggtgacaaaataatctgtacaacaaacccccatgacacaagtttacctatataacaaacctgcctctgtaccccaaacttaaaatgaaaaagaataagttatattttgctactgattgtaagtggaatttcagagaacatgatgttaacattgtataagatttagataccttctgtctcagtctgtttgtgctgctataacataatagtggtgactgggtaataatttataaataatagaaatttctttcttaagtttctggaggcttggaagtaccatattaaagtgtcaacatttgatgtcttgtgagggccttcttgctgcatcctcacatgacaaaagcagcaagcactgtgtcctcacgtggtggaagagcagaaaagcaaaaagggcctagctagttttctccaacccttttatatggcactaacccattcatgagggttcttagtcacttctgaaaggccctgcctcttantatcaccataataagaattaagtttcaacgtatgaattttgggagatattcattgcaccttctttgctgcantttctgccatttg

SEQ ID NO: 85601 - DNA, 2060 bp, Homo sapiens
  misc_feature (1)...(2060): n = A,T,C or G
ttgaaaagccattcgtgacatttatgtacatttgtatatggaattttgtatgtgttatgtatttttgataatgcattcaaatttccttcttctctgtacctcttccttctactacaaataaaaaggatgaataaaaataaataaaaatgttataaatagtctaatatttcacaaaggcaatgggagaaggctgctatgacagatgagtaaaaaatatctaaacctctttaatcaaagagtacatttgtccttcttaaccattttttaaatttaaagatttatttagtatttaaaattcttacctagtcaatcagttttcttttgagagaatcttaaatcaaaaggtctgtataaagtgcttcaatacccagatgacaagtctgggtcttaattgatcatcttcacaaacattaatgacattttctactggataagtatgatttccttgaatgtctggatccatgtatatgaaacatgttctagattatctttaatgtcatgagaatatactctcttactctgaaataagtgtgtatttttaagtaaaggctctccataggctatgctatttgctattaatagttgtgttttggctattactaaaaagccaaaagataacagatgctggcaagattgtgaagaaaagggaatgcttagacactgttggtgggagggtaaattagttcaaccattgcagaagacagcatgacaattcctcaaagacctacaatcagaaataccatttgacccagcaatcccattactgggtatatatccaagataatatatattttctttttctttttttcttttttttttttttttgagatggagtctcattctgttaccagactgaagtgcagtggtgcgatctcagctcactacaacctctgcctcctgggttccagagattctcctgcctcagcctcctgagtagctgggactacaagtgcaccaccatgtctggctaatttttgtattgtttttagtacagatggggtttcaccatatagaycaggctggtctcaaactcctgaccttgtgatccgcccacctcagcctcccaaagtgctggaattacagacatgaaccaccgtgcctggcctgagaatataaattgttctattaaaaagacacatgcatgcctatgtcactgcagcactattcacaatagtaaagacatagaatcaacctaagtgcccatcagtgatagactggataaatggtacatacacaccacagaatgctatgcagccatgaaaaagaatgagatcatgtcctttgcaggaacatggatggagctaaaggccatttgcaaactaacacaggaacagaaaatcaaatactgcatagtctcacttacaagtgggagctaactgattagaacacatggacacatagaagggaacaacgactctaaggcctatctgaagttgaaggatggaaggtgggagaggatcaggacaaacagctaatgggtactaggcttaatatctgggtgacaaaataatctgtacaacaaacccccatgacacaagtttacctatataacaaacctgcctctgtaccccaaacttaaaatgaaaaagaataagttatattttgctactgattgtaagtggaatttcagagaacatgatgttaacattgtataagatttagataccttctgtctcagtctgtttgtgctgctataacataatagtggtgactgggtaataatttataaataatagaaatttctttcttaagtttctggaggcttggaagtaccatattaaagtgtcaacatttgatgtcttgtgagggccttcttgctgcatcctcacatgacaaaagcagcaagcactgtgtcctcacgtggtggaagagcagaaaagcaaaaagggcctagctagttttctccaacccttttatatggcactaacccattcatgagggttcttagtcacttctgaaaggccctgcctcttantatcaccataataagaattaagtttcaacgtatgaattttgggagatattcattgcaccttctttgctgcantttctgccatttg

SEQ ID NO: 85602 - DNA, 2060 bp, Homo sapiens
  misc_feature (1)...(2060): n = A,T,C or G
ttgaaaagccattcgtgacatttatgtacatttgtatatggaattttgtatgtgttatgtatttttgataatgcattcaaatttccttcttctctgtacctcttccttctactacaaataaaaaggatgaataaaaataaataaaaatgttataaatagtctaatatttcacaaaggcaatgggagaaggctgctatgacagatgagtaaaaaatatctaaacctctttaatcaaagagtacatttgtccttcttaaccattttttaaatttaaagatttatttagtatttaaaattcttacctagtcaatcagttttcttttgagagaatcttaaatcaaaaggtctgtataaagtgcttcaatacccagatgacaagtctgggtcttaattgatcatcttcacaaacattaatgacattttctactggataagtatgatttccttgaatgtctggatccatgtatatgaaacatgttctagattatctttaatgtcatgagaatatactctcttactctgaaataagtgtgtatttttaagtaaaggctctccataggctatgctatttgctattaatagttgtgttttggctattactaaaaagccaaaagataacagatgctggcaagattgtgaagaaaagggaatgcttagacactgttggtgggagggtaaattagttcaaccattgcagaagacagcatgacaattcctcaaagacctacaatcagaaataccatttgacccagcaatcccattactgggtatatatccaagataatatatattttctttttctttttttcttttttttttttttttgagatggagtctcattctgttaccagactgaagtgcagtggtgcgatctcagctcactacaacctctgcctcctgggttccagagattctcctgcctcagcctcctgagtagctgggactacaagtgcaccaccatgtctggctaatttttgtattgtttttagtacagatggggtttcaccatatagatcaggctggtctcaaactcctgaccttgtgatccgcccacctcagcctcccaaagtgctggaattacagacatgaaccaccgtgcctggcctgagaatataaattgttctattaaaaagacacatgcatgcctatgtcactgcagcactattcacaatagtaaagacatagaatcaacctaagtgcccatcagtgatagactggataaatggtacatacacaccacagaatgctatgcagccatgaaaaagaatgagatcatgtcctttgcaggaacatggatggagctaaaggccatttgcaaactaacacaggaacagaaaatcaaatactgcatagtctcacttacaagtgggagctaactgattagaacacatggacacatagaagggaacaacgactctaaggcctatctgaagttgaaggatggaaggtgggagaggatcaggacaaacagctaatgggtactaggcttaatatctgggtgacaaaataatctgtacaacaaacccccatgacacaagtttacctatataacaaacctgcctctgtaccccaaacttaaaatgaaaaagaataagttatattttgctactgattgtaagtggamtttcagagaacatgatgttaacattgtataagatttagataccttctgtctcagtctgtttgtgctgctataacataatagtggtgactgggtaataatttataaataatagaaatttctttcttaagtttctggaggcttggaagtaccatattaaagtgtcaacatttgatgtcttgtgagggccttcttgctgcatcctcacatgacaaaagcagcaagcactgtgtcctcacgtggtggaagagcagaaaagcaaaaagggcctagctagttttctccaacccttttatatggcactaacccattcatgagggttcttagtcacttctgaaaggccctgcctcttantatcaccataataagaattaagtttcaacgtatgaattttgggagatattcattgcaccttctttgctgcantttctgccatttg

SEQ ID NO: 85603 - DNA, 837 bp, Homo sapiens
tctcactttgattcctgctctccttgcaggattatcagaatctcattctatgccctttttccatccagcccaaatgaggccagagtcctgttctttgtccattctcaacaaagcygagacaggtatgcattttcagaaagtctttttttttattttgagacggagtttcgctcttgttgcccaaggtggagtgcaatggtgcgatctcagctcaccacaacctccgcctcccaggttcaagtgattctcctgcctcagcctccctagtagctgggattacaggcatgcaccaccacgcccagctaattttgtatttttagtagagacggggtttctccatgttggtcaggctggtcttgaactcctgacctcaggtgatccacccacctcagcctcccaaagtgctgggattacaggcatgagccaccatgcctggccattttcagaaagttctttaggaaaacaccatataatccaaaaaggaaatataagaagagaaaagaccattaactgtataactgacgtaaggatttctggatctgtgaaatccaaaaattcaggtaagaactagatagagaaccttttgagtccttgagaatgacctcctcagcacaagcaggctgactaggacggtgataccttgctcagtccctcccttcccaccggggatctccacttgatgagcaacattgtgaccccaggagtagtcttccccagccttctcttccatacagggcaaatgccaaatccttctctcctggatcaactctcatactttctaggcttcacccacaactcaggatttacagcgagcaaaccattcatttgggggctgca

SEQ ID NO: 85604 - DNA, 823 bp, Homo sapiens
ctgcagtccacagctcagaatcattcctggattttggtctgtatgtcctggactcacccaatctagtcacacggctcatcctaaaataaattagactggcatgacagcaatgtttctaatcacagaatttgcttctagggttagagcattatagagcaagtaactacaatagtaacaggaatgaatagttaagactgatctattaaagagtataattagcatttacttcttcaacaaaacttcaagtgacccagccccttggtaaaaaaaaccctatgaataaaattaagaactattgagcggttgttgttctggatagaaaagccaacactaaatgggtagttgtggaaaggcaaggattgggcaatcggccttgcatgtagttagcagcctgttggggatcagaaatcatcttacctctctgtgctttggatttgttactttaagaaagaaccaaattagccgggtgtggtggtgggcgcctgtagtcccagctactcgggaagctgacgcaggagaatggtgtgaacccaggaggcggagcttgcagtgagccaagatggcgccaccgcactccagcctgggctacagagccggactctgtctcaaaaaaaaaaaaaaaggaagaaccccctgaactatttctgtcatcccttctagctaacatttttgttctgtttctttagctcatctcatttaaaaaaaaaaaaaaaacccacagagtagattacactttagtgcattttagaggaatgtccagatgttcactgkgtagttgtagtcataatattttataaaagaaaagtcatctcaataatggctg

SEQ ID NO: 85605 - DNA, 741 bp, Homo sapiens
agaaaaatgaccacccttcccaaagctgacctgggaaagttcactatgttttcattgtgatgaacgcgaggtgactgtgcccatgtctgagagtctaggtgagtgtgtctgtgctaggggaggacaagaggaagggcgaaagtgacagagaaaccaaagtaacagcaaacaaacaagtacagatcaggccatgagccacaacagccaaaaagtcttccaagtgattgcaaaggctttcctctgtttctcttaagaattagccaggtcacttgtcattgtttttctgacctcttccctgtgttgctgattgcttgacgcagtgggtctaattatctccagactcccagcctgttttaatgaagagggatgtttatctgtgtaagcagacagacttgtctgtccccttggtcctaaaattttttcttgggaaacctagggatgaaactgacagttgttaatggatcagccggaatataaacttttcgtttctggcttgtttgtagcaagaaatgaacatttcttctccctccttactgtgccttactgcgcwgagcaattgtcatttggaaattcctagcagtatttgattttcctgtgagaatggcctctctcccctcatagttggctttggactgacagtaaactcagttacctagctagcccccgtcaaataatataaggtggtgcagaccctgcccagacaaaggactacacagcgttgaacttggctcatcagcaact

SEQ ID NO: 85606 - DNA, 675 bp, Homo sapiens
tagctttcattatttgtaaactgtttcatacatgtctacccatatccatttcaatgtcacttttccggaagtccctgaaacccatggctccagataaagaccccctactgtccctaaattaagccaccattgaaagcaaggagggtacacgctaaggcaactactaggaagcgcgctaacaacgactttccctcaagagatgcctgcttctttcttatccccaaaagaacttcagggcttgggtagkcaccacataattatgtcaacagactctgctctaggttcctgactctgtattcttactctctccccagtcagattgccatacaaatacaggcggttctcaggtagggtaaataaccatgttatttccacaggaatatttgagattgtagggaggttgcctttatctggcagggtggagtcagtgatgtgataatatatgttatcttttttgagtctgggtggtcacttccatcatgtgactttaaagacctaaaatgaaagaagtttacatcttagcaaacatttaatgccacagtgaaagatagcatgggagccaaaccctctgatggttgtttctttttagatgtctttacttctaaaatgaatctattttatagattgcaccatagattctgaaatcctttcatgaagaagtttgctctttcttta

SEQ ID NO: 85607 - DNA, 553 bp, Homo sapiens
gaatctgagtatcctcctgagtcccatatttacctacctatggcaggaggtttttaaaaaaatcctgaagatacaaagactttgaagtgtaagtggctaaagaaagctcaggttcctggtgatcagctgctctgtgctgaccttgtgtacattcagaagtttccaagatgcagcagagctgggtctagcaggcatcgccttctcttttgtttaacacatctgttgaagatyaaccaagatggtgaggcatccttttagatgctggggattcaaaaagaaattaacgagacctggttcctgctcttggcaaactgtcagcttacagaggaacatagatttgcaaaaacatattggaaagcagggcagtaagagtgattacaggggcatgtaacaggggaagtgatagggaaaagggtggagtttctcctgcacttcggggaaggccatcagggtgggtcatggggaagccctcgattagtaggtcatttttttttttttttgagatggagtcttgctctgttgcccaggctgggctacagtggcgcgatctcgg

SEQ ID NO: 85608 - DNA, 660 bp, Homo sapiens
  misc_feature (1)...(660): n = A,T,C or G
cttgggcagaagacagtcccccagaccagcctcccccagcttctgcccgctcctcagtgggggaaggagagctccagtatgcatccctcagcttccagatggtgaagccttgggactcgcggggacaggaggccactgacaccgagtactcggagatcaagatccacagatgagaaactgcagagactcaccctgattgagggatcacagcccctccaggcaagggagaagtcagaggctgattcttgtagaattaacagccctcaacgtgatgagctatgataacactatgaattatgtgcagagtgaaaagcacacaggctttagagtcaaagtatctcaaacctgaatccacactgtgccctcccttttatttttttaactaaaagacagacaaattcctacctctctgtaccttggtttcctgctctgtaaaacaggaatgagaagccctacttgcaaggttgtggtcaccattccaggagtcacatcccgtyagagctcctggcacaggtgtatgccgagcactgatggatcgctgtgctttgaacacaaaggtcctgctgggaacctctcctgattctggtggcaactagtacttatatgtctgtgtcacttggcnnctgcaaaatagcgattcntgcannactttccaggaaa

SEQ ID NO: 85609 - DNA, 1290 bp, Homo sapiens
tgcatcatgcagctgcactcacgtctgggccagagtgggcccggggctcaactctgtcccctccatgccactggccagttagagggagatggccaccaagcagacgctggagcccagagcggcatggcccccggaagtgtcacccaatttttaaattactggtcctgttttaagaccagctgctttccccctcaacagggtactcttcccttgtaccattaaatattcctcagcaagtccaatttcaatggctgcagggcatgctggtaaaatcccaaacccaagttcgtataaccagtgtccttgttggagttttacattattcctaaattcactattaggagtataaactaaagttctctgaaaaggattttggaggaaagagactttattccagtgaacagtttgcaaaccagagagactccagtgtaaaatgaagggtgcgctccataaagccaagggaagtgtcaggtttagcgtcctgcccaggctcccaatcaggtctgtttatgcaaatgaaggattgaaactttctgagtkctcattggtggacacagctgagctctgattggttggctcaggtgatctctgaaagtccggaagatgaaaatgctgtgggttttcagggaagtcagagtacgtgggtgacctgtacttggctctattttaaactcaggctcagttagccactcaggatccgtcttgaaggagtggctcattcaggttcacatttgttcacaggaataacactgagggttaggatatttgtagttttttatccctcacccccttcctcattctgagtctccaataatgtccattacaccaccctgttgcctttgcacacccatagctgagctcccacttataagtcagaacatgcagtatttgctttttaattcctgaattacttctacacaggggtggacttgtgtagacaggagcccacggagggggagtcgaggtgtgcacagattcgatgatgtgtttcgtactgagaaataacagagagagagaaagagagacagagaaggggaaaggcagcaagagccactcagaaatgttcaattcacagggtatctcaagcagtacttggaaatatatttgccttttgcttttataagaacacatactattttattttgttttactttaagttctggaatacatgtgctaaacgtgcaggtttgttacataggtatacatgtgccatggtgcacctatcaacctgtcatttaggttttaagccccgcatgcattacatatttgtcctaatggcctccctcccct

SEQ ID NO: 85610 - DNA, 1290 bp, Homo sapiens
tgcatcatgcagctgcactcacgtctgggccagagtgggcccggggctcaactctgtcccctccatgccactggccagttagagggagatggccaccaagcagacgctggagcccagagcggcatggcccccggaagtgtcacccaatttttaaattactggtcctgttttaagaccagctgctttccccctcaacagggtactcttcccttgtaccattaaatattcctcagcaagtccaatttcaatggctgcagggcatgctggtaaaatcccaaacccaagttcgtataaccagtgtccttgttggagttttacattattcctaaattcactattaggagtataaactaaagttctctgaaaaggattttggaggaaagagactttattccagtgaacagtttgcaaaccagagagactccagtgtaaaatgaagggtgcgctccataaagccaagggaagtgtcaggtttagcgtcctgcccaggctcccaatcaggtctgtttatgcaaatgaaggattgaaactttctgagttctcattggtggacacagctgagctctgattggttggctcaggtgatctctgaaagtccggaagatgaaaatgctgtgggttttcagggaagtcagagtacgtgggtgacctgtacttggctctattttaaactcaggctcagttagccactcaggatccgtcttgaaggagtggctcattcaggttcacatttgttcacaggaataacactgagggttaggatatttgtagttttttatccctcacccccttcctcattctgagtctccaataatgtccattacaccaccctgttgcctttgcacacccatagctgagctcccacttataagtcagaacatgcagtatttgctttttaattmctgaattacttctacacaggggtggacttgtgtagacaggagcccacggagggggagtcgaggtgtgcacagattcgatgatgtgtttcgtactgagaaataacagagagagagaaagagagacagagaaggggaaaggcagcaagagccactcagaaatgttcaattcacagggtatctcaagcagtacttggaaatatatttgccttttgcttttataagaacacatactattttattttgttttactttaagttctggaatacatgtgctaaacgtgcaggtttgttacataggtatacatgtgccatggtgcacctatcaacctgtcatttaggttttaagccccgcatgcattacatatttgtcctaatggcctccctcccct

SEQ ID NO: 85611 - DNA, 753 bp, Homo sapiens
cacacacctctctctcccagataagcacaacaaagagactcagaagcagtccaagtctctgataaactctcccaccctaaatccttaaaaactcttagtctgtaagagagtgtgcctctgacttaactcggccagaaactcctctcaggtttgttttctctaaaatctgtcttgactggtgagccaccattcgtgtttctttcctctttctttaattcttacagtgagcctttgtgtataggtggggcttgagaagagatgccactgacctgattcctgcccttaagatactccccatccatagcctcatgtcctcaccacacacacacatgctgtctggctttagagctgtgaaaagttgggaatttgccatgtatcatggtagcatatcggaaattttaaaagaaatatgactatagaattttcccctggcacctagtacactgattggcacagtgtcaatgacatctccaaaacaagaaccatgcagcatcttcctgtgaaacaaaagggagaacacatgttytatgaaccagtgcagaaaaaacttcttttccattcatgctgccatttggttcagtgtgggcagaagcaagtttttttagaggctcatcatatggatcaacattttctttcatgtaaaaatctgcttctcacagttaaatatggcccaaagacataatatttccagacaacatgagtggagtgtacagagaaaattaaactttaggtccagctacatggttttccata

SEQ ID NO: 85612 - DNA, 943 bp, Homo sapiens
ggaggcctgggcctgtcccatactctccgggcctrcaaatactttcagtatccaccagcactgggggctgatcacacaagaatacaaaagcttctcagcctgatgcggtggctcatgcctataatctcagcactttgggaggccaaggcagatggatcacttgaggtcaccagttcaagaccagcctggccaacatggtaaaacctcgtctccactgaaaatacaaaaaaatcatccaggcatggtggcacatgcctgtactcccagctacttgggagcctgaggaaggagaatcgcttgacccttggaggtggaggttccagtgagcccgagatcgggctactgcactccagcttgggagacagagcgagactctgtctcaaaaaaaaaaaaaaaaaaaaatctcattttagatcctgcctaagccacagactgacatgaggccccctcattgccaaccactagttcagctgtgggaaagccacctccaggtcttttgtgagagaatcaaggtcagaccccagagaagccatctcttctaactaccatggtcttcctgactcccattcagagtcaatccttcctctatttctcacagacttttattattgttattgtctttaatgaagatgtacctagagtcatatatcatgatattattgtttcaaatattattagtagtagtatttattgggtgctagtttgtattgagtgcctttcattcatcatcacacgtgatcttcttaacaaacctagagtgtaggtaacattaatactatactattatcaccatcacaccgatgaggaaactgtgactcagaaggttaagtaatgtgcccaaagtcacacagctactaaatgacagagccacattttaaactcagggttgacagactccaccaaagatcatctattccaacgcttcccatatggaacactatgc

SEQ ID NO: 85613 - DNA, 596 bp, Homo sapiens
ttgagaacagtcgcattacagcacaatttaaatacattctgaatgtgtttttagacatacctaatttcaccgggctcaaagctcaacttatggaggggatcgatgaatcgtgggcgtcgttacagtcatgggttttccttgtgagagtcttccaactttttcaaaatgcgagattttgccagggtgatctgggccagcccttatcttgycacgctggttgtagaaatcttagtggtgacccttctgtaacttggacaccatgaaaatgctgcatgggccttatcgactcacacattcactttttgaaaatttttgtttgtatgctcattctatatgggaatgccgatcacattctgggtctcattttcagaccctcagggacaagaaactcaaacctcttctccatatcttttgtcctatgtctttgcggaaggggaaaaatactactggggcggccacagtcagccaggagagaatcaggggaccaggtgaagtgagcaggtagaggggaactgatgcagcacagggcctgggggaagatacagcaaataagtgagatcaggaacacggtgagagcaaagacagggtcagacaca

SEQ ID NO: 85614 - DNA, 596 bp, Homo sapiens
ttgagaacagtcgcattacagcacaatttaaatacattctgaatgtgtttttagacatacctaatttcaccgggctcaaagctcaacttatggaggggatcgatgaatcgtgggcgtcgttacagtcatgggttttccttgtgagagtcttccaactttttcaaaatgcgagattttgccagggtgatctgggccagcccttatcttgccacgctggttgtagaaatcttagtggtgacccttctgtaacttggacaccatgaaaatgctgcatgggccttatcgactcacacattcactttttgaaawtttttgtttgtatgctcattctatatgggaatgccgatcacattctgggtctcattttcagaccctcagggacaagaaactcaaacctcttctccatatcttttgtcctatgtctttgcggaaggggaaaaatactactggggcggccacagtcagccaggagagaatcaggggaccaggtgaagtgagcaggtagaggggaactgatgcagcacagggcctgggggaagatacagcaaataagtgagatcaggaacacggtgagagcaaagacagggtcagacaca

SEQ ID NO: 85615 - DNA, 1293 bp, Homo sapiens
caagggccaggatgagaattctcggttcagctgactaacgcagctcacattttaatagtctgcagctctttctaagctgttaacactttactgtcttagaggatgtttgggctgaatacctcccatagttcttccactgagacataccttctccatggtagagaaaagcaaacaggagtgttgtagagaaagatgagtcaggggccaagtgggttggtgccaagacaaagcaggaacaaaccagtgttctggtgccttccgaaaggtatgtgtttagctcccactgataagtgagaacatgatatatttggttttctgttcctgcattaattcgcttaggttaatggcctccagccacatccatgttgctgcaaaagacctgatttcattcttttttatggctgtgtagtattccacggtgtatatgaaccacatctttatccaattcaccattgatgggaaactgggttgattctgtgtttttgctatcatgaataaagatgggaacaatagtcaccggggactactagaccagggacaggggaggaggggcaagggctgaaaaactacctgttgggtgctatgcccattacctgggtgccaatcgtaccccaaagctcagaatcaygctatataccttgtaacaaacctgcacaggtactccctgactctaaaataaaagttgaaaaagaaaaggaaaaaaggaaatgtatgtatgtgtcttctacacttgactggtcagccagggctgtcctgtccaagcctctgttctcatctctctcttcaccctgacggccacgacacgtccagagctgaagaacaaagtgtgcttgaggtcgtcttgagcgcaggttccaagatgattgttaacacacacaaagccttccggaccccagcagaagggtgacattttcttctggtagagtttgtaatttaagataaggcaatagagcccgaagctggcagtgtggtgtgcacgccagccacatagcagcctcacttctcgagaggaatcacagtttctgtttctaggtctctggatttgtacagcccaggccagacactgtgaggatgctggatggaagtctctgtataaggggccggtcccggaaatgagtccgtcatgtctgtagagaggtcaccaacagctgccggatattgtgctgcctcttctggtggcacacatttgcttggaggaaaatgcacacttattttaatattagataaagaggaggagttcttctccaccagtgagcccgactccagagagtttctggagccttgaggatgcat

SEQ ID NO: 85616 - DNA, 660 bp, Homo sapiens
tggttgttgaaggacacccactgccttcttcctgtccctgcaattaatgaaaacaaatgccacctggagcccgatgctgtcttcttttggactcggctgccctggaaaatcagctcacccccttccctgccttctcctttttgacttcaaacaaatggacaaaatcacaccctgctgctttctgatgaaccaaattccccggcactaatggagtgatttctgttcagttcccatccatcatattcctgccaggttcactggctgctgatggaaacatgcagtggatgttactgtcaacacacagctccaagaagctgagaatcaggggtcggctctttctaggatgtgacctggagcagcagaaaggagtggcactccctactcccacccagcctggtgattcaagggtctcggctaaagctgttcagccccagggctgagtgtgtttggggctgtgacaccctctctctgggccatttgcagtcagaatatcttcccatctggggctgctttgtcctggcaggcccaataatgcacccatgcctgagtgagagcagcgrctgctgcacggcagcctgacctggtctcaccttgaggcaggtgtactctaagctcccaggaccttgacagacacacactattctcccttagtgagttcta

SEQ ID NO: 85617 - DNA, 593 bp, Homo sapiens
gatccctttcttggataactagcacaggttgaggagacagcagagactaggagtctgtgaacataagttggcctggtttgggcaaagagtttgcaaatgggagcaagggggaaagatttgtttttctcagggcagatcagaattatgtgtgtcccaggggagatccaaatgatctgacccaaccacagaatggccagaaaaaggttgcaagtcagaacaagggttggtggtctggccaaacagtgacagggcaaactatcaatcaagacccagaagagtggtggtatgaaggaggtgagtatgggactggtgtgggagactcaatcatggtaagaacagtgtcaagaaacaggacatctaaactagggcataaggaaggaggctgggtcctaaaaattcagagcatgaagatcagaagagagcctgcagccaggccctcagacctgagcactgccttcatcttgtcctacatacattcaggattggctccagtcagagacagcacatgcaagaggtgtgagcaaaggatgtgmgtactcctcctcctgcacccatgacagacattactaatcaattctggcactctttcacct

SEQ ID NO: 85618 - DNA, 721 bp, Homo sapiens
ataatgaagatatcgacttcatggtacatttgaaatgaagaaaatgaactgagtgctttgcaaagaaaggtacacttccctctgcatcccccatttgagagtttctaccactccacagtcaaggacatcagggcagaaggactgtagtactgagcactagaaacatgtgtttgcatcactttggaagaggacaaacatcacccagcccatgctcagctgttccacacaagaaaatacaagccagcattttgcatatcattccaggtctaccctcttgacttattttgtagttgaattcagtccagtgttcacataacatcctgagggaagggttgtcctagtgactttacaactgattgcagacaagcagtttcagaatttttaaagtaatgatttttaattctcagggaccatcatgcagcatttgtgtgtatataatgctttctccaagaaacactcactcactctcaaygggaacactgtctttcgtgaactgcctgtgaccttcaggatgaaaagccagagtcccaccacacagagtcacagattttggaagcagaatggactttgacaacatctgcctggacccttgtagctcatggagaggcaatttggacaggagcaagtcagtggcagagtagggccaagaactcgagtttcctgaccaccattcgaagctgtcttttagaagctgaaggaaagcttcaccaccagatcttat

SEQ ID NO: 85619 - DNA, 735 bp, Homo sapiens
tggcctgttggtggctgaacacctcctcactagccacgtgttaaggctggctcagtaaatatgcccaggtcctccatgatgggaagttaggttgtcatgtagccatagttatggcrgtggctgtgtgacctctgtgtcaccgtcttcccacatgtaacttggtattatacccagtttctacatctgtgtgattgatgtgtatgttaagtacattggatgtgccagcatactgaatttttaagacctaagtgtgtcaagggccctcaagatcatcctcagccttgatgatttgctaaaagaaatcacagtacttaaaaacccattcaggccaggcacggtggctcacgcctgtaattccagcactttgggaggctgaggcaggtagatcatgaggacaggagttcaagaccagcctggccaacatggtgaaaccagtctctactaaaaatacaaaaattagccaggcatggtggggggcacctgtaatcccagctacttgggaggctgaggcagagaattgcttgaacctgggaggtggaggttgcagtgagctgagatcgcaccactgcactctccagcctgggcgacagagctagactccatctcaaaaacaaacaaaaaatgctttcatactcacacttatggtttattacagtgaaaggatacaaataaaaattagcaaaaggagaaggcatatggagccaagtccaggagaaatcaggcacaggattctag

SEQ ID NO: 85620 - DNA, 735 bp, Homo sapiens
tggcctgttggtggctgaacacctcctcactagccacgtgttaaggctggctcagtaaatatgcccaggtcctccatgatgggaagttaggttgtcatgtagccatagttatggcggtggctgtgtgacctctgtgtcaccgtcttcccacatgtaacttggtattatacccagtttctacatctgtgtgattgatgtgtatgttaagtacattggatgtgccagcatactgaatttttaagacctaagtgtgtcaagggccctcaagatcatcctcagccttgatgatttgctaaaagaaatcacagtacttaaaaacscattcaggccaggcacggtggctcacgcctgtaattccagcactttgggaggctgaggcaggtagatcatgaggacaggagttcaagaccagcctggccaacatggtgaaaccagtctctactaaaaatacaaaaattagccaggcatggtggggggcacctgtaatcccagctacttgggaggctgaggcagagaattgcttgaacctgggaggtggaggttgcagtgagctgagatcgcaccactgcactctccagcctgggcgacagagctagactccatctcaaaaacaaacaaaaaatgctttcatactcacacttatggtttattacagtgaaaggatacaaataaaaattagcaaaaggagaaggcatatggagccaagtccaggagaaatcaggcacaggattctag

SEQ ID NO: 85621 - DNA, 735 bp, Homo sapiens
tggcctgttggtggctgaacacctcctcactagccacgtgttaaggctggctcagtaaatatgcccaggtcctccatgatgggaagttaggttgtcatgtagccatagttatggcggtggctgtgtgacctctgtgtcaccgtcttcccacatgtaacttggtattatacccagtttctacatctgtgtgattgatgtgtatgttaagtacattggatgtgccagcatactgaatttttaagacctaagtgtgtcaagggccctcaagatcatcctcagccttgatgatttgctaaaagaaatcacagtacttaaaaacccattcaggccaggcacrgtggctcacgcctgtaattccagcactttgggaggctgaggcaggtagatcatgaggacaggagttcaagaccagcctggccaacatggtgaaaccagtctctactaaaaatacaaaaattagccaggcatggtggggggcacctgtaatcccagctacttgggaggctgaggcagagaattgcttgaacctgggaggtggaggttgcagtgagctgagatcgcaccactgcactctccagcctgggcgacagagctagactccatctcaaaaacaaacaaaaaatgctttcatactcacacttatggtttattacagtgaaaggatacaaataaaaattagcaaaaggagaaggcatatggagccaagtccaggagaaatcaggcacaggattctag

SEQ ID NO: 85622 - DNA, 713 bp, Homo sapiens
gccatgtggctgggctgagcctggcagtccactgatagaagaggcggcgtggtctggggtttcctaaaggcagggacagagggcagcaccgcttctgcaatcttagtcttaagctttttgttcatagcctgattgagagtaaggagcagaaatggaaacaggtgaaagtcaagttggaagagaggctagcactgagtgcacccctgttcctgatcaagcttgggagaaacagggcttagcgatggattgtggaaatcgtcacccaagccagctctagagctggcctgtgatttacccatttagtgtattatctgttgttcagttgtccctagagttgatttctctctggccttttagcagggctaccattagcctatatggaacctttgkgcaaattaggcaaaaagaatccctttctcaagacattttactgccatctgttggataactgtcataataaacacacaaatctacaagctctctgatgtgaattgtgtctccttacatagtcgcatttgtgcagtgtgtgacctgcacatctgagaccagcaaccctacctttcacatagtcacctccttccactaaaggtcagcatgtgctcagggaggtcaaattaatttaagcattgatctgaagaatatacaatgagggttgtagaccagggattaagctaaacacatggtacctttcaaagccaaccagaattgagctg

SEQ ID NO: 85623 - DNA, 537 bp, Homo sapiens
caaatttatgcttgttctttagttgtggtaattttaccaccaatgtgaaataatttattgttagttgccatctccacttctcttctaaacctcagattaattttatacaagtattatctagctgttccattctctaacctgttacattcaaagaagttctaatagcaaagagggtgcacattgctgtggctacataaaaacgcagcacccatgctgcaaaaaaaatctgtaaggttgttaccatagggctatagaaaatgaagatgaaaaactggttttcttaatctacttttatgccataccacaaagaacaagaagctgtcaatcacttctctcagtgaaattccactgtccttgggttaggtaaatttcttctctgatggatgcaaagatctaagccaaagattgtgttatgtgttttttcattttcctctgacttcatagattctgatgaaagttagagaggctgtgtcagatgctatttttaaagcaaactgttaatttyaacattattgaaaatgcttgctctttgagaaa

SEQ ID NO: 85624 - DNA, 2075 bp, Homo sapiens
ctcaaaaatttgaaacttttcaagtctagaaggagggaaaaatatattctcagtagagaatataattttaggatataaaacttactcaataatccacatacttataagcaagaaagggaagatttctaagggcttagcctttagatataacctatgactcagcacatgatgataatttgaactttttaagcttttgttcatcatctgttttccaaatctcttcatatgctataacagytttataaaatttgcttttatacaacagatgacctaaattaatatgaggaaatcatataaaatttgtctcccttgatttcacccttaattgtattattaatttagtttttacttttttcagtatgagtaattatcactaattttgtaacacaccatgcaatggccctcagatcaaattatttggagataaaaagacgaaaaaagaaaaccaatactgtgcactcatattcaaatcaatgcagtagctaatttttgcactaaggttttcagtgagttcaagactgctttaggatgttcagatgcagatgtcctcagcatggaatctggacttgctatgactttcaccaaaatactaatggcttgaaaagatgagaatggttatattttacagcaactactgaaaccttccccagctggtgaagcagaaccattaaaaaatacagcaccagaaagacttttagtagagctgtcagattttaacattccagggttgcataattactgtattctctaatgcatgccagaaaagaatagttgggaattaatgagtgaatccaattgcttagtttctctggttatgagcagctctaccaacagagttaggctgtgctcttcctctgttcattcaccagaagaaatgagacctctgaacattttacccacaatatcataatttgaacatcattttgtgttggagtgtcttaaacagaagaactccccgtataccattcactgttcttagtttcatccaattctgtgtaatctctgtttcccaagcatgctacaggtacacctgcttccactcttctgttaggctgttttattctgtgaatgctttcttacttatcctgtattttttttcttcccagcgatacccagtccacatgtcctagttcaagttcctatagtaagcttttatcattttccctcttgctatctttcctctatcattgtcattattattgagcaattatacaacaaacatcatacagagtatatggtgtattaaatcgatgccaactatctacaaagaagttccaaaatcaaatattcatgtatatatgtatgtgtcaacctatttatctgtcagatataacttagagacaaataatacagaaaaggtacaataaagggttatagtaattccaagaaagcagaatttacttcagtctgagtcatataacacaaactagattatatcagtaattatttttaatttatcatttgctttatcaattaatttgctgtctcccacgtaaaagagaagaagtactaggctgggcgctgtggctcatgtctgtaatcccagcactttgggaggccgaggcaggaggatcacctgaggtcaggagttcgagaccagccaggccaacatggtcaaaccccctctctacgaaaaatacaaaaattagctgggtgtggtggcaggcacctgtaatcccagctactcgggaggctgaggcaggagaatcactggaacccgggaggtggaggttgcagtgagccgagatcgcgccattgcactccagcttgggagacaagagtgagattttgtcgcaaaaaaaaaaagaacaagtactctatactttctgaccttaatttcgaggaaaaattttattgcagaatcaaataaaccttattatacacctagcatgagcagggcattattctagataattttactgacattatttattgtttatcttttcacagttaataaatatttgattacaataaagaatagcaaatcacatttgtatactgcttttaagatatcaatgcagattccctgtttgatgttaccttttaatatgctatttcatttatcttacaaggaa

SEQ ID NO: 85625 - DNA, 603 bp, Homo sapiens
gctgggactgtgctaggaagtttcacagatgctagttcatttagattggatatgcctcctggaccagtgtgctgtccattatggaaaatcaaaacagccattgcatttccatagtgttcacaaggagcctcatttctgggctcaggcaggctgaggcgttccagggttgagaatcagacttggtgactgagcaggaactgttgtcctttttctcttttgagatatgaaatttgcttcacatctcagaagagtgtgtgcctccatcccacacttgggacaagcgccgttattcyttttttaaaacatctgtagaacatattaaatgctctgctttcttcacgggttaaatcatgctggggcgggaggcttgtggtgtaagagcggtgcactgtgcatccactagggctctcccgtcattccagttggtctccttgccacgccccagctcgctgcccccaggctgtcttggacagacacatttgtgttttgtaatagagcacatcatgcactattatatggggatattttataaaggagcccacgtgacacaaggaaactaggagaaaacaatcctagaaatccccaaagcttggaagcagggac

SEQ ID NO: 85626 - DNA, 1182 bp, Homo sapiens
ggctgccacctggcccccaccccagcttagctggcctcatgtttgttagaggtgtttccacatgacagtggcattctttttttaagattttctttttcttgagatggagtcttgctctgttgcccgggctggagtgcaacggcgcaatctcggctcacgctcactgcaacctctgcctcccaggttcaagcaattctcctgcctcagcctcttgagtagctgggattataggcatgctccaacatgcctggctagttttgtatttttagtagagatggggtttcaccattttggccaggctagtctcgaactcctgatctcaggtgatccacccgtctcggcctcccaaatttctgggattacaggtgcccagcataaaatagatttttcaagaccctcaaggatgctggggcaggttcagcagctgggcgaccaatatcctttctaggctcctcctgagaagtggctaagcctccagcctgcagggtggtgtgagtaaatgggagctggcaggtgggcacagggyacccaatccccctaaatcctgagcaggaggggatcccagagacagagggaacacaatgagcacccacctggcccaggacacagaagcttctagaagagcagaaaatatggcctagcacatggcattgtttggaggcaatgagaaagccctgtcatgtgcccacctccacctactgtcttggaccttcctgagacatggagactggaaagccttgtgggcacggtacggatttttaagtggcttgagcgggcaggaggcccagggttgttggggaggcctcttccccactggcgctgggcccttcatcagcgattctgctccccagcagaaaatgaccaggggctccctccccacactggtggcgtgtgtggctgtgctggagacaagttgaaggagccacgccttgcatccctggagcctgactgtgcccaaaggtcctcccagccttgctctgaactggctcaccactcaaacctgcattactcacaggccgtgccatcccctctgcctgggacaggaagcagagcctccctgccatcatcagctgattgccaagcgccagacctgagcctgacccatgtgttgccataacacgggggctgtggctgtgcccttgtcccagaggaagaagatgaggccttgacaggcaggcgatg

SEQ ID NO: 85627 - DNA, 1182 bp, Homo sapiens
ggctgccacctggcccccaccccagcttagctggcctcatgtttgttagaggtgtttccacatgacagtggcattctttttttaagattttctttttcttgagatggagtcttgctctgttgcccgggctggagtgcaacggcgcaatctcggctcacgctcactgcaacctctgcctcccaggttcaagcaattctcctgcctcagcctcttgagtagctgggattataggcatgctccaacatgcctggctagttttgtatttttagtagagatggggtttcaccattttggccaggctagtctcgaactcctgatctcaggtgatccacccgtctcggcctcccaaatttctgggattacaggtgcccagcataaaatagatttttcaagaccctcaaggatgctggggcaggttcagcagctgggcgaccaatatcctttctaggctcctcctgagaagtggctaagcctccagcctgcagggtggtgtgagtaaatgggagctggcaggtgggcacagggcacccaatccccctaaatcctgagcaggaggggatcccagagacagagggaacacaatgagcacccacctggcccaggacacagaagcttctagaagagcagaaaatatggccyagcacatggcattgtttggaggcaatgagaaagccctgtcatgtgcccacctccacctactgtcttggaccttcctgagacatggagactggaaagccttgtgggcacggtacggatttttaagtggcttgagcgggcaggaggcccagggttgttggggaggcctcttccccactggcgctgggcccttcatcagcgattctgctccccagcagaaaatgaccaggggctccctccccacactggtggcgtgtgtggctgtgctggagacaagttgaaggagccacgccttgcatccctggagcctgactgtgcccaaaggtcctcccagccttgctctgaactggctcaccactcaaacctgcattactcacaggccgtgccatcccctctgcctgggacaggaagcagagcctccctgccatcatcagctgattgccaagcgccagacctgagcctgacccatgtgttgccataacacgggggctgtggctgtgcccttgtcccagaggaagaagatgaggccttgacaggcaggcgatg

SEQ ID NO: 85628 - DNA, 1182 bp, Homo sapiens
ggctgccacctggcccccaccccagcttagctggcctcatgtttgttagaggtgtttccacatgacagtggcattctttttttaagattttctttttcttgagatggagtcttgctctgttgcccgggctggagtgcaacggcgcaatctcggctcacgctcactgcaacctctgcctcccaggttcaagcaattctcctgcctcagcctcttgagtagctgggattataggcatgctccaacatgcctggctagttttgtatttttagtagagatggggtttcaccattttggccaggctagtctcgaactcctgatctcaggtgatccacccgtctcggcctcccaaatttctgggattacaggtgcccagcataaaatagatttttcaagaccctcaaggatgctggggcaggttcagcagctgggcgaccaatatcctttctaggctcctcctgagaagtggctaagcctccagcctgcagggtggtgtgagtaaatgggagctggcaggtgggcacagggcacccaatccccctaaatcctgagcaggaggggatcccagagacagagggaacacaatgagcacccacctggcccaggacacagaagcttctagaagagcagaaaatatggcctagcacatggcattgtttggaggcaatgagaaagccctgtcatgtgcccacctccacctactgtcttggaccttcctgagacatggagactggaaagccttgtgggcacggtacggatttttaagtggcttgagcrggcaggaggcccagggttgttggggaggcctcttccccactggcgctgggcccttcatcagcgattctgctccccagcagaaaatgaccaggggctccctccccacactggtggcgtgtgtggctgtgctggagacaagttgaaggagccacgccttgcatccctggagcctgactgtgcccaaaggtcctcccagccttgctctgaactggctcaccactcaaacctgcattactcacaggccgtgccatcccctctgcctgggacaggaagcagagcctccctgccatcatcagctgattgccaagcgccagacctgagcctgacccatgtgttgccataacacgggggctgtggctgtgcccttgtcccagaggaagaagatgaggccttgacaggcaggcgatg

SEQ ID NO: 85629 - DNA, 1182 bp, Homo sapiens
ggctgccacctggcccccaccccagcttagctggcctcatgtttgttagaggtgtttccacatgacagtggcattctttttttaagattttctttttcttgagatggagtcttgctctgttgcccgggctggagtgcaacggcgcaatctcggctcacgctcactgcaacctctgcctcccaggttcaagcaattctcctgcctcagcctcttgagtagctgggattataggcatgctccaacatgcctggctagttttgtatttttagtagagatggggtttcaccattttggccaggctagtctcgaactcctgatctcaggtgatccacccgtctcggcctcccaaatttctgggattacaggtgcccagcataaaatagatttttcaagaccctcaaggatgctggggcaggttcagcagctgggcgaccaatatcctttctaggctcctcctgagaagtggctaagcctccagcctgcagggtggtgtgagtaaatgggagctggcaggtgggcacagggcacccaatccccctaaatcctgagcaggaggggatcccagagacagagggaacacaatgagcacccacctggcccaggacacagaagcttctagaagagcagaaaatatggcctagcacatggcattgtttggaggcaatgagaaagccctgtcatgtgcccacctccacctactgtcttggaccttcctgagacatggagactggaaagccttgtgggcacggtacggatttttaagtggcttgagcgggcaggaggcccagggttgtyggggaggcctcttccccactggcgctgggcccttcatcagcgattctgctccccagcagaaaatgaccaggggctccctccccacactggtggcgtgtgtggctgtgctggagacaagttgaaggagccacgccttgcatccctggagcctgactgtgcccaaaggtcctcccagccttgctctgaactggctcaccactcaaacctgcattactcacaggccgtgccatcccctctgcctgggacaggaagcagagcctccctgccatcatcagctgattgccaagcgccagacctgagcctgacccatgtgttgccataacacgggggctgtggctgtgcccttgtcccagaggaagaagatgaggccttgacaggcaggcgatg

SEQ ID NO: 85630 - DNA, 1844 bp, Homo sapiens
ggatcttgattgcaggccttatgctgggcagagctaaggaaattcaatttgtctccaatcttatttgaatgttctttttttttttttttttttttttgagacagagtcttgctctctcacccaggctggagtgcaatggcacgatctcggctcactgcaacctctgcctgctgggttcaagcaattctcctgcctcagcctccccagtatctgggactacaggagcatgccaccatgcccggctaattttttgtatttttagtagagatggggtttcaccatgctggccaggctggtctcgaactcctgacctcgtgatccacccgtcttggcctcccaaaatgctgggattacgggcattagccaccgcgcccggcctatttgaacgttcttatgcctgctacaagtgcagcagcagaatctccacacatcttgagtgcgaaagtttcctgtagttcctttagcatggagaggctggggaaggttacagactgatttgtactctttagacatatagttgatcattgaacaacacacgtctgaactgttacacacagatttttttcaataaatgtgttagaaaatgttttggagttttgcaacaatttgaaaaaactcaaagacaaaccatgcagctagaaatatcaacaaaaatagaaaaagttaagtatgtcatgaatgcataaaatgtatgtagatacctagtctattttattatttactaccataaaatataacaaaactattgcaaaagttaaaatttagtaaaacttatgtacacactcacagatcgtatatggtgctattctcagttgagagaagtgtatacaaacatcaagatgcagtattaaattgtaactgcataaatttaaccgtagtgcataccacagtacggtaataagttcatagcctcctcctgttgctgttgcaatgagctcaggtgttgcaagtatccacttaaaacgttctgtgatactcaacattccatcatgagcaggtcatccccagtgaattgcgcatcccagtaaaaagtgccctctccctgttcacgtgtatttttcatcctgtttcgcgctgtactgtaaaccttgaataacaccatgggatccacatgaagtggcactagtgatgctggaagtgctcccaasaagcagagaaaagtcatgacatttgacattacaagaaaaacttgatttgcttgatatgtaacagagactgaggtctgtagctggggttgcttccatttcagacagatgattcatcttgtaaacaggcggtgtaaacttactgtatggataaatacataacagtaccatagatgtattttctccttagaaacgtttccttttctctagcttactttattgtaagaatacagtatataatacatataacatacaaaatacatgttattaactgttgctggtcaacagcaggctatcagtagttaagtttgggggaatcagaattatacctggattttctactgtgtacggtcagtgtgccaagcccccaagttgttcaagggtcaactgtaatcctaaaagaatctaatacaatattgtacacagtaagtggtcagtaaataaggaattgaactaaataagaatacataaatctcagaatatgtgcaacctgatcgtagtacacagagatctctctctatatctcttttctcagttcatgccattatttcaggtagaaagcaccttattttgaattagttgtctttagagcaaaaatccgtctaagagtgcagtgtggtttcctatgcacaatctggaatagtccattgcttcatgcctaccctggacatgaagggccgtgccacagtggaagtctct

SEQ ID NO: 85631 - DNA, 931 bp, Homo sapiens
ttactgcataaagttatmcatttcactgcagctttaaaaataccatttttaaagagttctaagatgttatgtaaaataattttaagtagatgcaaagtgtcttatttgtagcatgtacacatacacacacaaagcacaaagtaagacttatttgtctttactatatgctttttgtacctaaaagctaactcaactgctagtgttagcaccacaatgagtaataagttcataagttacacttgtactttctcaaaaaaggcagacatatcaatatgaaaaaactgagtgacctttctgaaacattcattcatcatatgcaagagacataatatttatacacgagagaaaataaaatgcaaagggtaaggtaaattttcttcaatgagaataacaacatacaaaagtacaacaggccacatcagtgtgggttaagcaactatttaagaaaatattctttcctaaattaagaggataacctttctttttggcctaccagaatgactaaaagaataaaatgttggattaatgtcataaacacattttaaatcatgcaaattcaattaaatgtattcagaaaaaaagatgcatgtatatattttttaaacccacccaagtatcacttgagtgctaaatcacccagattgaatacattttaacatttgccaattttgcattagattttctttttaatctgcacttagtatatgaaatctttcatataaacagttggaaagactactaaaatgaacatctatataccatgccttccatcaagaatcaataattgttaaaattttgccataggtgctttacctctgagacaatttaaatattaaaagccactctgctcactatgtccctcagtgagattagggctcagaataagcatggtatggagatgggaatgtgttctttcacttagtcaatctca

SEQ ID NO: 85632 - DNA, 824 bp, Homo sapiens
tgcatacatatgtaactaacctgcacattgtgcacatgtaccctaaaacttaaagtataataataataataataaataataataaagtaaaaaaataataaataaataaataaataatagaatagtgtagttaataactcatcatatagaaatatttctcagatatcctgaaacacattaccctataaacagggcataactggagacagactgagattatgggtgatttttattttttctttttatactttttggtaacctggataaaaattgcttttctaaacaagaaaatttttaagatatcaacaatatatcatatcacttactttttttttgctgatcagactttttctctttttttttctgagacagagtctcactcagtcatccagaatgaagtacagtggcatgatcatggctcactacagcctcaaccttgggggctcaaaccatcctcccacctcagcctcccaaggaactaggatcacaggaatscaccaccatgtctggctaatttttattttatttgttgtagagacagggtcttcttatgtttctcagactagttgtgagctcctgggctcaagcagtcctcctgactccacctctcacagtgtgaggattataggcatgagccaccatacccagaccagatttttctttataaataatacaaatcacccttacctccagccaaattagcataaatttcaaattactggtgtccatttaaatgtaattgtgtaattttcttccttatataaatatatttatttcttataaatatgaaaataatattattaataaagtaccttttaccatgc

SEQ ID NO: 85633 - DNA, 824 bp, Homo sapiens
tgcatacatatgtaactaacctgcacattgtgcacatgtaccctaaaacttaaagtataataataataataataaataataataaagtaaaaaaataataaataaataaataaataatagaatagtgtagttaataactcatcatatagaaatatttctcagatatcctgaaacacattaccctataaacagggcataactggagacagactgagattatgggtgatttttattttttctttttatactttttggtaacctggataaaaattgcttttctaaacaagaaaatttttaagatatcaacaatatatcatatcacttactttttttttgctgatcagactttttctctttttttttctgagacagagtctcactcagtcatccagaatgaagtacagtggcatgatcatggctcactacagcctcaaccttgggggctcaaaccatcctcccacctcagcctcccaaggaactaggatcacaggaatccaccaccatgtctggctaatttttattttatttgttgtagagacagggtcttcttatgtttctcagactagttgtgagctcctgggctcaagcagtcctcctgactccacctctcacagtgtgaggattataggcatragccaccatacccagaccagatttttctttataaataatacaaatcacccttacctccagccaaattagcataaatttcaaattactggtgtccatttaaatgtaattgtgtaattttcttccttatataaatatatttatttcttataaatatgaaaataatattattaataaagtaccttttaccatgc

SEQ ID NO: 85634 - DNA, 1211 bp, Homo sapiens
tctccctgcctaccagacacaaatgcatatccgattgttcccctgccccttttttcctttgtcatcttatgtaaaatgcagattcactgagccagacaaaggcatgaatgtatttttccccacccgcctcttaaatgaaaattgtgtacttttcaatattctgccctttcctctttaaatttgaagccctcaaaaccatctttgaagaaaggtatagacctgttttccaggaccacatccttaactttggcaaataaacttcctaaaatgattgagacttgtctcatcatttatctcgattgacacagtatcattatttttaaaagaaatgatatgcttaattttctaatctgtagttcatattcaagtatcataaattatatgaataaagtgctttttttttgagacaggctctcactctatcatccaggctagagtgaagtggtgcaatctcagctcactacagccttgacctcctggactcaagtgatcctcccacctcagcctcccaagtagctgggacttcaggcttgagccaccatgcccagctaatttgtgttttttgcagagacatggctttcccatgctgaccaggctgggtctcgaactcctgagctcatgggatccacttggctcgccctcccaaagtgctgggattacaggtgtgagccgtcctacctggctaaataaagtaatttgtagctagtatttttttatctcccagtccaggatgcactttaaggtcgcgtcatgtcacttcaggttcctttattgtggaatttctttcttggcctatctctgtcgtttgtgacttgacatttttgaaccatacagatcagtgtttatttgaggcttccttatgattgaattaacatttgcattttgggcagggawacaacagaagtgatgtgtcccttatatcccaagattgccttatatagaagtcacatgatatcttcatgtgggttgtttctggtattggaatataatgaaccagaatgctatgaacattcttatacaagtatttttatcaatatttttatatattttgggtacatatctagaagtttaattgccatttcatagaacacgagcatgtttaccctgataagaaaccactaaaccttgttctaaacgttccttttggagtataaaatttatacccccactttatagctgtttcatttgtttatatccttgccaacattttt

SEQ ID NO: 85635 - DNA, 1199 bp, Homo sapiens
gcatgtgtatttccacagtttcctgtgtgcttccacagtttcctgccttcaggtaaatatgtgacattaaagagtaattttctattattacccaagtgacctgtttgggtgcttgaaggttctcttgaactttattcttatatggcaaacatgatgaaccatttttctggccaactctttcttcagtgatccagcacatgttaatcaaccctaaatattctttatttgcaggattgctagagactgcctccctaaaagaccagaaaatcagcactaaaggacataggcttttttttccacataataaagtcttgaggaggagcagagaagcaaacagagtttaatacagacattgaatcacagatgaaagaatccaatcaaatgctgacaaaagaaaaacatctaaacaggagggtaaggaacaacctgcataaaacaccataaccgccctgacagctgagctttcacacctactctggggaaattcaacaccccattagagggccaggatgcagacgtcctgaaggaaaactctataaccagccaagacaagttgatgaaacattttcagaatcatcgccgcacacatgatgcccaaaatgtttacactcattcctcttctgagtcgtttggggattttataatgaggaaatatgagaaatcacaaaagtaataagcctcactcccatatagctgtgaggagaataaataaggccacttcataaaatttctcctttatgattatttccctttcaaaaataccaaaggatttcttcaaaaatattagtttggcaaaagttaacttgcatttgtgttgccctcagtgaatgaaagttattttatgctaacagtattagtaataattaccagctaaagtaaataataccrgtcaaactaatatatttgtaatcatacagttttagcgtcttaatttctaccacccactgctagccaccatcaccatttgtctcaccttctgaaagagacgcaatctaaataaattggctctgtttaggcagcaggcaaggtgaaccctttgggtggttacaaagtcagtgaatggaatattatgactttctgttttaacaaacatcctagactagtaatgtccaatcaaaacataatgtgagccacaaatacaagtaccttataagatgttatatttttgagtagctacattataaaatataagagatgca

SEQ ID NO: 85636 - DNA, 1199 bp, Homo sapiens
gcatgtgtatttccacagtttcctgtgtgcttccacagtttcctgccttcaggtaaatatgtgacattaaagagtaattttctattattacccaagtgacctgtttgggtgcttgaaggttctcttgaactttattcttatatggcaaacatgatgaaccatttttctggccaactctttcttcagtgatccagcacatgttaatcaaccctaaatattctttatttgcaggattgctagagactgcctccctaaaagaccagaaaatcagcactaaaggacataggcttttttttccacataataaagtcttgaggaggagcagagaagcaaacagagtttaatacagacattgaatcacagatgaaagaatccaatcaaatgctgacaaaagaaaaacatctaaacaggagggtaaggaacaacctgcataaaacaccataaccgccctgacagctgagctttcacacctactctggggaaattcaacaccccattagagggccaggatgcagacgtcctgaaggaaaactctataaccagccaagacaagttgatgaaacattttcagaatcatcgccgcacacatgatgcccaaaatgtttacactcattcctcttctgagtcgtttggggattttataatgaggaaatatgagaaatcacaaaagtaataagcctcactcccatatagctgtgaggagaataaataaggccacttcataaaatttctcctttatgattatttccctttcaaaaataccaaaggatttcttcaaaaatattagtttggcaaaagttaacttgcatttgtgttgccctcagtgaatgaaagttattttatgctaacagtattagtaataattaccagctaaagtaaataataccggtcaaactaatatatttgtaatcatacagytttagcgtcttaatttctaccacccactgctagccaccatcaccatttgtctcaccttctgaaagagacgcaatctaaataaattggctctgtttaggcagcaggcaaggtgaaccctttgggtggttacaaagtcagtgaatggaatattatgactttctgttttaacaaacatcctagactagtaatgtccaatcaaaacataatgtgagccacaaatacaagtaccttataagatgttatatttttgagtagctacattataaaatataagagatgca

SEQ ID NO: 85637 - DNA, 499 bp, Homo sapiens
atgagagcagagctttgtttaccagttttcctattgcttgcctagaagagttctggtcacatagtagacatttaataaatgttgatgaatttattgaggatttatttgatgaattactactaagtaatttttgatttgagaaaaaaatatgaatacccactatgggtaaagcactgaactttttattataaactaaaacaaaccttgagatgtagcccatgccctcaagagagggtctgaagatcacaaaagggagtttataattatgaaacgccagtcaagagtcaagaaaaacactttcttcagctttcctgtttttttaatcgaattaaattaattaattaattwatttatttatttattttgagatggatctttgctcttgttgcccaggctggagtgcagtggcacgatctcagctcactgcaacctccacctcccaggttcaagcgattctcctgcctcagcctcccaggtagctggaattacaggcatgtgc

SEQ ID NO: 85638 - DNA, 511 bp, Homo sapiens
ttcctgataacaggtcaactttattccaaggataagcatgtcatgaaattattggatggcagattatgcttatctatggtcttcctttttctccttggtctcatcccaataacttacagatcctttaaaggcaaaggccaaatattcagctaagttaggyatactttagatgccaatatcaattttagctatatgggagatcctacttaagatattgaggacgatcatgtgtgtacagggcaaaaaagatgggacaaagagataagaaggggatgggaaatcacaccctccctccgcaccacagaccatgacctggggcaggtcctctaacaccaagcccacccaggccccatctaacagtatgccgcattctacatgacctcagagttctttcggaattccagctgaaaagctgaaaagcaatactatatagttgtggtttccagctggcccatgttagtatgtatagcttttcttcctcgccatgaaagcactatgggagaacgaagcc

SEQ ID NO: 85639 - DNA, 1013 bp, Homo sapiens
ccaacatggattttgcctgcccaatattaattttctcttaatttcttacttacagaacttcaatttggtcwggagtctaagccccaaattatgtttgctgtcatgtactcatgacagctctttttcttgatttttctagcctttatccatttggaaatgtgaaccaccttttataggtgagatacagtatagctgaacacttctctaaaggtttctgtaaaaaagcataaatgtacaagcctatcatcccgattctatttagtttgccttgaatatgaatgtgataagtgaagtaagatctcacatcttgcaacatgaagtgggagaagggtcaacatagaagaaatgtcagaagaaatgaaccaatagaaaattcctcatttgctaaattttgttaaaagaaaaaaatagattttaatattaatctgatctacacaggcaaatgttaactgcaatgaaaatgtcttttagataattcagaacactttccatccttggtaaaagtattcattttactgactcactattatatattttgttaagttagaaactcatattcaatcaaaggaaataaaagttccccctaatttctaggaatataaaaaaataggtacacatagcttagataatattttctatatttgttcaagtaaatcagtttagtaattgtttgaaatacttccaattgatatgagtccaattttagaaggaattttagttggaagtgttattctctttatgaagatgtaaatggctctgtttactggccaatatttacatacacatacagtcaatgaatgttaatttgcacacagtggcatatataattcaaagttcattttattagttaatttagatatggttcaatgagagtttcaaactgagggcatagagtcatataacatactctagaagaacaactcacaaaaactaaaataaattgctttaccatgtttgcctttgtatttcactttttctgttctgaagaataagcatggtaaaatttacatata

SEQ ID NO: 85640 - DNA, 1013 bp, Homo sapiens
ccaacatggattttgcctgcccaatattaattttctcttaatttcttacttacagaacttcaatttggtcakgagtctaagccccaaattatgtttgctgtcatgtactcatgacagctctttttcttgatttttctagcctttatccatttggaaatgtgaaccaccttttataggtgagatacagtatagctgaacacttctctaaaggtttctgtaaaaaagcataaatgtacaagcctatcatcccgattctatttagtttgccttgaatatgaatgtgataagtgaagtaagatctcacatcttgcaacatgaagtgggagaagggtcaacatagaagaaatgtcagaagaaatgaaccaatagaaaattcctcatttgctaaattttgttaaaagaaaaaaatagattttaatattaatctgatctacacaggcaaatgttaactgcaatgaaaatgtcttttagataattcagaacactttccatccttggtaaaagtattcattttactgactcactattatatattttgttaagttagaaactcatattcaatcaaaggaaataaaagttccccctaatttctaggaatataaaaaaataggtacacatagcttagataatattttctatatttgttcaagtaaatcagtttagtaattgtttgaaatacttccaattgatatgagtccaattttagaaggaattttagttggaagtgttattctctttatgaagatgtaaatggctctgtttactggccaatatttacatacacatacagtcaatgaatgttaatttgcacacagtggcatatataattcaaagttcattttattagttaatttagatatggttcaatgagagtttcaaactgagggcatagagtcatataacatactctagaagaacaactcacaaaaactaaaataaattgctttaccatgtttgcctttgtatttcactttttctgttctgaagaataagcatggtaaaatttacatata

SEQ ID NO: 85641 - DNA, 1013 bp, Homo sapiens
ccaacatggattttgcctgcccaatattaattttctcttaatttcttacttacagaacttcaatttggtcaggagtctaagycccaaattatgtttgctgtcatgtactcatgacagctctttttcttgatttttctagcctttatccatttggaaatgtgaaccaccttttataggtgagatacagtatagctgaacacttctctaaaggtttctgtaaaaaagcataaatgtacaagcctatcatcccgattctatttagtttgccttgaatatgaatgtgataagtgaagtaagatctcacatcttgcaacatgaagtgggagaagggtcaacatagaagaaatgtcagaagaaatgaaccaatagaaaattcctcatttgctaaattttgttaaaagaaaaaaatagattttaatattaatctgatctacacaggcaaatgttaactgcaatgaaaatgtcttttagataattcagaacactttccatccttggtaaaagtattcattttactgactcactattatatattttgttaagttagaaactcatattcaatcaaaggaaataaaagttccccctaatttctaggaatataaaaaaataggtacacatagcttagataatattttctatatttgttcaagtaaatcagtttagtaattgtttgaaatacttccaattgatatgagtccaattttagaaggaattttagttggaagtgttattctctttatgaagatgtaaatggctctgtttactggccaatatttacatacacatacagtcaatgaatgttaatttgcacacagtggcatatataattcaaagttcattttattagttaatttagatatggttcaatgagagtttcaaactgagggcatagagtcatataacatactctagaagaacaactcacaaaaactaaaataaattgctttaccatgtttgcctttgtatttcactttttctgttctgaagaataagcatggtaaaatttacatata

SEQ ID NO: 85642 - DNA, 2571 bp, Homo sapiens
agggcagtttgtgaactagaatgggtcctctcttggtgattgttacatgacagctgtttgcatcaccttagcaacttaaagataaattgtttaaagataaattggcgtcgtttcatacaaacattaaagaaaatggtaatgtccaacagagtgcccacctaattactgttccaggggtcctcagaggctgttttcctactgtcttcttgatttttaaaatatattttagttgattggttttattcatgccataattggtggaaattaatccttgattctataaatttttacctagtccgtttccaatgttttttgtttgtttgtttctctttccttacttatttatttatgcttttcttttactttttttgtaaagtggaataagttaggaatgagtatattatgaccaactaaactgagtagttttatgtcaagttgcaaattatgttaagtatcaaatatttgatttttttagatttcaaaatagtcacgttttcagaaaaaatcattagtagttttctaaaaataaaatcctcttgattcaacaaaacatacttgatgtggtttttcctcccaaaacaggctcctccttgagttattgggaataagtaatgcttctcaataaagcttcgtgtcaacaaatctgaacatataacatctcagctagagcaagttactaaaaataggctcaatttgtagcttgcagtcatgccttcataaccacttttcaattaatcctgcttaattcagagaatgtataaatatgtaattttgcatgacttttaaggcagccattttattttgaaacgcaactaacgttatatgcataaattcaataaatataaagctgttttcaaaaattgaatgtttttacttgtaagttattctttcaataataataaagagatgatcactagtcagtttatttttcatagttgaattgatttagttgaacttcattgggtgttcttatgttttagtcatgagtccatgctctttaacaagctaaaggaaaccatattatatgctaaaagatgtcagtttgtgaacaatttaatgaatatatagagttacaacatttttcccgattggatgttggggtttactataattctttgttactttatatgtgaatatactcactactcactatgtttatgtatgtaggaaacatgctagtgatgaaaattcaagcagttattaccctagttttctttcattaacaaaatacagaatagaaattatctacttattcttggaggtcttaaaatatcttttcagttgactgataattctgctatcaagagctacaagtaggtgctctggccgtctatatctgtatttccatatattcaattccttactatatatttctcatttgatattctatacccaattcaaacaaaaccatttcatgtatacaatgtacttttatttatgcttttctctatcattaagtagaaagccatttgcaccttagtctaaatctgaaatgtgcctctacctaacctttstaatacattttcactatttcttagttattagaataaatttacataatttctgaaacaactttctctatggagtattccctttagtttcttttcccttccaaacaatttaatgaattacaaatatgggggagatattttttcaatgggtaagacttgacttctacaaatacatgtttaattccttctcaaaattatttctacttcctcttattcaacactgtgctagattttagggatatataataagacaatatatgaggtccttgctgttgtgaaaggtacattcttatctttggcaaattgtagaatctttagctttggtatgcaagggcattggtgtttggtacatgcttggctctttgccttaagaattgcctctttccaccatgcatatttcacctgtgtgggaattcttgcagatctctgtattattgatagtcattttgctctgacattttatacaaagctgaatcagcaacagtatgactaaacacaaccaaaaaagaaagctagaaagattatattagacacttacgtgtatggatcattatggtgaggactgctaaaaaaaacaaaacaaaacaaaaaaaaccttcagccaaaatagatttacagtttaatcgagtaatgaatgattcataaattggaaagcccccacaatcacagcagattcagagagactccaggggtgtctcatggtcagaatgaatttatagacaatacaaagtaaagtgacccatagaaatcagaagtgaggtacagaaacagctggattggttatggcttggcacttgccttatttgaacactcagctgtatgcgactagttgaagtatggctgctggaattggccaagactcagcgattgttacaggcgcatattcctaagttaggttttagtcttgtgtacctattgagttaggttgcagttcattcacaaggactgaaatatagaagtatggcgtttttctcaggccatatttaatttgatttaacaggactttgggtatgtcattgtattttactaatatattttacaaacaccccatgttatctta

SEQ ID NO: 85643 - DNA, 1150 bp, Homo sapiens
tttgtcatatctttgagaacattgtgttagattaagtggaacaggaatgcttagagggaaggagattaaaataatgtgttgtatggatatttgaggtgacatacaatagaactggaaaataaagaaacttcatgaaaaatagtataaaaagagacataaatgacttaccaattgactgctgtgtttgatagatgggaattgtagtcgtaacattggatgaaataggaaagacagactagtagagctctttggaggcaaattctataagttctttttacattttgagtgraagttttcacttttaaatgaaatgcatatggataaaaaataaaggtaaatatagttattatgaaattgtcaagataaaatgagagttgatgcataaaaatgaatagactggaaaaagggaactttttaaatataaaaaaaattgcctcttttctgacagtattctttcttcttaaacttcatgattgttcctggaaattaaagtgaaaaaaaactatcataaaactatgactctatcatactgtaacacttcagggcccatattattatacctcctctgtccatctcgcatgactgtttaaaatggttctgtttgatacactgacactcaatttctttttatatggaatgtaatttgggagattctctaaacaatctgtataatggcagacatggagtacaactgaaattagaaatattctgttgtagtttccattctttcttaaaggttttaacattttgttatgaacatgacaagccttatttttttttccacacatagaaggaacacgaattataaatagaacaaaacactgtgaaatactgcaaatgtggaataattatttgatctcatgcacacacctcggtaatttaaattaaattctataagtaaatgactaaatattttaaaattaactactttaaattaagatgtatttagaaataattttaatgttattgaaatttttttaaaaaaactattgtaatataagaaatcatgacataatgcaaatactacatattttcagaaaatttggtaataaatatcatctcccaaaaaaccatcttagtcattgcataaaattctacaaatgatatctgattttaatttagaggaaagtacatgaactgaaagtcccga

SEQ ID NO: 85644 - DNA, 1150 bp, Homo sapiens
tttgtcatatctttgagaacattgtgttagattaagtggaacaggaatgcttagagggaaggagattaaaataatgtgttgtatggatatttgaggtgacatacaatagaactggaaaataaagaaacttcatgaaaaatagtataaaaagagacataaatgacttaccaattgactgctgtgtttgatagatgggaattgtagtcgtaacattggatgaaataggaaagacagactagtagagctctttggaggcaaattctataagttctttttacattttgagtgaaagttttcacttttaaatgaaatgcatatggataaaaaataaaggtaaatatagttattatgaaattgtcaasataaaatgagagttgatgcataaaaatgaatagactggaaaaagggaactttttaaatataaaaaaaattgcctcttttctgacagtattctttcttcttaaacttcatgattgttcctggaaattaaagtgaaaaaaaactatcataaaactatgactctatcatactgtaacacttcagggcccatattattatacctcctctgtccatctcgcatgactgtttaaaatggttctgtttgatacactgacactcaatttctttttatatggaatgtaatttgggagattctctaaacaatctgtataatggcagacatggagtacaactgaaattagaaatattctgttgtagtttccattctttcttaaaggttttaacattttgttatgaacatgacaagccttatttttttttccacacatagaaggaacacgaattataaatagaacaaaacactgtgaaatactgcaaatgtggaataattatttgatctcatgcacacacctcggtaatttaaattaaattctataagtaaatgactaaatattttaaaattaactactttaaattaagatgtatttagaaataattttaatgttattgaaatttttttaaaaaaactattgtaatataagaaatcatgacataatgcaaatactacatattttcagaaaatttggtaataaatatcatctcccaaaaaaccatcttagtcattgcataaaattctacaaatgatatctgattttaatttagaggaaagtacatgaactgaaagtcccga

SEQ ID NO: 85645 - DNA, 1150 bp, Homo sapiens
tttgtcatatctttgagaacattgtgttagattaagtggaacaggaatgcttagagggaaggagattaaaataatgtgttgtatggatatttgaggtgacatacaatagaactggaaaataaagaaacttcatgaaaaatagtataaaaagagacataaatgacttaccaattgactgctgtgtttgatagatgggaattgtagtcgtaacattggatgaaataggaaagacagactagtagagctctttggaggcaaattctataagttctttttacattttgagtgaaagttttcacttttaaatgaaatgcatatggataaaaaataaaggtaaatatagttattatgaaattgtcaagataaaatgagagttgatgcataaaaatgaatagactggaaaaagggaactttttaaatataaaaaaaattgcctcttttctgacagtattctttcttcttaaacttcatgaktgttcctggaaattaaagtgaaaaaaaactatcataaaactatgactctatcatactgtaacacttcagggcccatattattatacctcctctgtccatctcgcatgactgtttaaaatggttctgtttgatacactgacactcaatttctttttatatggaatgtaatttgggagattctctaaacaatctgtataatggcagacatggagtacaactgaaattagaaatattctgttgtagtttccattctttcttaaaggttttaacattttgttatgaacatgacaagccttatttttttttccacacatagaaggaacacgaattataaatagaacaaaacactgtgaaatactgcaaatgtggaataattatttgatctcatgcacacacctcggtaatttaaattaaattctataagtaaatgactaaatattttaaaattaactactttaaattaagatgtatttagaaataattttaatgttattgaaatttttttaaaaaaactattgtaatataagaaatcatgacataatgcaaatactacatattttcagaaaatttggtaataaatatcatctcccaaaaaaccatcttagtcattgcataaaattctacaaatgatatctgattttaatttagaggaaagtacatgaactgaaagtcccga

SEQ ID NO: 85646 - DNA, 1150 bp, Homo sapiens
tttgtcatatctttgagaacattgtgttagattaagtggaacaggaatgcttagagggaaggagattaaaataatgtgttgtatggatatttgaggtgacatacaatagaactggaaaataaagaaacttcatgaaaaatagtataaaaagagacataaatgacttaccaattgactgctgtgtttgatagatgggaattgtagtcgtaacattggatgaaataggaaagacagactagtagagctctttggaggcaaattctataagttctttttacattttgagtgaaagttttcacttttaaatgaaatgcatatggataaaaaataaaggtaaatatagttattatgaaattgtcaagataaaatgagagttgatgcataaaaatgaatagactggaaaaagggaactttttaaatataaaaaaaattgcctcttttctgacagtattctttcttcttaaacttcatgattrttcctggaaattaaagtgaaaaaaaactatcataaaactatgactctatcatactgtaacacttcagggcccatattattatacctcctctgtccatctcgcatgactgtttaaaatggttctgtttgatacactgacactcaatttctttttatatggaatgtaatttgggagattctctaaacaatctgtataatggcagacatggagtacaactgaaattagaaatattctgttgtagtttccattctttcttaaaggttttaacattttgttatgaacatgacaagccttatttttttttccacacatagaaggaacacgaattataaatagaacaaaacactgtgaaatactgcaaatgtggaataattatttgatctcatgcacacacctcggtaatttaaattaaattctataagtaaatgactaaatattttaaaattaactactttaaattaagatgtatttagaaataattttaatgttattgaaatttttttaaaaaaactattgtaatataagaaatcatgacataatgcaaatactacatattttcagaaaatttggtaataaatatcatctcccaaaaaaccatcttagtcattgcataaaattctacaaatgatatctgattttaatttagaggaaagtacatgaactgaaagtcccga

SEQ ID NO: 85647 - DNA, 1150 bp, Homo sapiens
tttgtcatatctttgagaacattgtgttagattaagtggaacaggaatgcttagagggaaggagattaaaataatgtgttgtatggatatttgaggtgacatacaatagaactggaaaataaagaaacttcatgaaaaatagtataaaaagagacataaatgacttaccaattgactgctgtgtttgatagatgggaattgtagtcgtaacattggatgaaataggaaagacagactagtagagctctttggaggcaaattctataagttctttttacattttgagtgaaagttttcacttttaaatgaaatgcatatggataaaaaataaaggtaaatatagttattatgaaattgtcaagataaaatgagagttgatgcataaaaatgaatagactggaaaaagggaactttttaaatataaaaaaaattgcctcttttctgacagtattctttcttcttaaacttcatgattgttcctggamattaaagtgaaaaaaaactatcataaaactatgactctatcatactgtaacacttcagggcccatattattatacctcctctgtccatctcgcatgactgtttaaaatggttctgtttgatacactgacactcaatttctttttatatggaatgtaatttgggagattctctaaacaatctgtataatggcagacatggagtacaactgaaattagaaatattctgttgtagtttccattctttcttaaaggttttaacattttgttatgaacatgacaagccttatttttttttccacacatagaaggaacacgaattataaatagaacaaaacactgtgaaatactgcaaatgtggaataattatttgatctcatgcacacacctcggtaatttaaattaaattctataagtaaatgactaaatattttaaaattaactactttaaattaagatgtatttagaaataattttaatgttattgaaatttttttaaaaaaactattgtaatataagaaatcatgacataatgcaaatactacatattttcagaaaatttggtaataaatatcatctcccaaaaaaccatcttagtcattgcataaaattctacaaatgatatctgattttaatttagaggaaagtacatgaactgaaagtcccga

SEQ ID NO: 85648 - DNA, 584 bp, Homo sapiens
ttctcatctaccctgaccccagaatattaaaacttttcagagtttcaggattaattccattatatggacatgattccttgagataggaaaaactgattggattgtgacattagacttatcagaatctaagatcttacaaaatataaagctttactagtaatttcacgaactcaggtaatcattaggcatrggcaaatcagagaattatttagatctcttaatctgattctttagatccttggttctgtcattagatactcccttgcccaggcagatagatgagacttctagagaggtatgcagacaatttatttacatggagatacctgtctcaattatcaaatatcttaatttttatgcagatagttacatatgtggtatatgtgacattttccagggagccccataaatccacaaccttctactttgttaaccataagcaattctaaacgaccaagtacattctgctaaaagcatttctgtgatagataatcactctcctgccagcaaaaaaacaaattgtttgtcaggagctgtcattagtatgtttatataagcaaaatgggcttccttccttctgtgga

SEQ ID NO: 85649 - DNA, 1329 bp, Homo sapiens
  misc_feature (1)...(1329): n = A,T,C or G
cacgtgctaggacctgggctaagggctgggataaaggtgatgaaaacttcggaacctgagagatggacagcatcattaacatcacctccattttatggatgggggagctgacgctaaggcttgcgccggngggtcttcgtgagtagcgaggtcaggtgccacccggagacgcctgcggggctgggctgcccaggcgctcaagctccccagactcaactgttaactgggactgggctgggggcggggctcggatggagtgttgggaagctttcggtactttcttctcgaaaccctttctgaattactcccaacgctggcggacacctgatgaaggggttaggaaagtttgtggctggaaggaaggacggaagacagcaggagtcctgctgggatcagacagggaaaggcggctccctggagggtcagaggctcaggtcatcgggggaggctggatgcgcgcagccccctgctcccctccccaagtttggcggtgattgcctggggcccggggcgctctgcgccgcacttgggccaggcaggcggcctggtaattgttcggatcttctctccgaggggccgccctcccttcccccaccctcgtgatcgatattctattactggcgcctgcatatctcctgcccgcagcttgcaggtaccgacttcaaaccccctttccctgtctgatcctaatattgttcgattaaaacttacctttaatagatgacatctatcgatccggccccgcacaaatctgaaactctattaacacggcgggagagagaagatgggaaagggaatttcactttaaagcgggggcgggggtggggtggggcagagagcttaataacttcttttttaattgctgggagtcctagatcaaaataggcttctagggtctggggaaggcacagcctaaaagcgtttgacatctagatgtcttaatacaatgatcctaccccccagtatggttacccaataatgtcactattttttcttaatgcggggtgtcattcattcatttggcgtacatttcttggacgctacttgatggcagatttgtaaagggcaagaggacaccattcccctaaacccgctggcgaggatgtgtagtccggcctaaggggagcgcgatgtggggacaggagcagcacccagasttgggttggggggacagctgcttgctctagggaggacgaggacgaggtttggggacctggagaggcttctgttcaccgaccccttctcccctagatgctgcgggcccaggcgccggccaggcgtcccgcctggagggttccgaggcggaagaggaggaggatgcggaggatc

SEQ ID NO: 85650 - DNA, 1329 bp, Homo sapiens
  misc_feature (1)...(1329): n = A,T,C or G
cacgtgctaggacctgggctaagggctgggataaaggtgatgaaaacttcggaacctgagagatggacagcatcattaacatcacctccattttatggatgggggagctgacgctaaggcttgcgccggngggtcttcgtgagtagcgaggtcaggtgccacccggagacgcctgcggggctgggctgcccaggcgctcaagctccccagactcaactgttaactgggactgggctgggggcggggctcggatggagtgttgggaagctttcggtactttcttctcgaaaccctttctgaattactcccaacgctggcggacacctgatgaaggggttaggaaagtttgtggctggaaggaaggacggaagacagcaggagtcctgctgggatcagacagggaaaggcggctccctggagggtcagaggctcaggtcatcgggggaggctggatgcgcgcagccccctgctcccctccccaagtttggcggtgattgcctggggcccggggcgctctgcgccgcacttgggccaggcaggcggcctggtaattgttcggatcttctctccgaggggccgccctcccttcccccaccctcgtgatcgatattctattactggcgcctgcatatctcctgcccgcagcttgcaggtaccgacttcaaaccccctttccctgtctgatcctaatattgttcgattaaaacttacctttaatagatgacatctatcgatccggccccgcacaaatctgaaactctattaacacggcgggagagagaagatgggaaagggaatttcactttaaagcgggggcgggggtggggtggggcagagagcttaataacttcttttttaattgctgggagtcctagatcaaaataggcttctagggtctggggaaggcacagcctaaaagcgtttgacatctagatgtcttaatacaatgatcctaccccccagtatggttacccaataatgtcactattttttcttaatgcggggtgtcattcattcatttggcgtacatttcttggacgctacttgatggcagatttgtaaagggcaagaggacaccattcccctaaacccgctggcgaggatgtgtagtccggcctaaggggagcgcgatgtggggacaggagcagcacccagagttgggttrgggggacagctgcttgctctagggaggacgaggacgaggtttggggacctggagaggcttctgttcaccgaccccttctcccctagatgctgcgggcccaggcgccggccaggcgtcccgcctggagggttccgaggcggaagaggaggaggatgcggaggatc

SEQ ID NO: 85651 - DNA, 1329 bp, Homo sapiens
  misc_feature (1)...(1329): n = A,T,C or G
cacgtgctaggacctgggctaagggctgggataaaggtgatgaaaacttcggaacctgagagatggacagcatcattaacatcacctccattttatggatgggggagctgacgctaaggcttgcgccggngggtcttcgtgagtagcgaggtcaggtgccacccggagacgcctgcggggctgggctgcccaggcgctcaagctccccagactcaactgttaactgggactgggctgggggcggggctcggatggagtgttgggaagctttcggtactttcttctcgaaaccctttctgaattactcccaacgctggcggacacctgatgaaggggttaggaaagtttgtggctggaaggaaggacggaagacagcaggagtcctgctgggatcagacagggaaaggcggctccctggagggtcagaggctcaggtcatcgggggaggctggatgcgcgcagccccctgctcccctccccaagtttggcggtgattgcctggggcccggggcgctctgcgccgcacttgggccaggcaggcggcctggtaattgttcggatcttctctccgaggggccgccctcccttcccccaccctcgtgatcgatattctattactggcgcctgcatatctcctgcccgcagcttgcaggtaccgacttcaaaccccctttccctgtctgatcctaatattgttcgattaaaacttacctttaatagatgacatctatcgatccggccccgcacaaatctgaaactctattaacacggcgggagagagaagatgggaaagggaatttcactttaaagcgggggcgggggtggggtggggcagagagcttaataacttcttttttaattgctgggagtcctagatcaaaataggcttctagggtctggggaaggcacagcctaaaagcgtttgacatctagatgtcttaatacaatgatcctaccccccagtatggttacccaataatgtcactattttttcttaatgcggggtgtcattcattcatttggcgtacatttcttggacgctacttgatggcagatttgtaaagggcaagaggacaccattcccctaaacccgctggcgaggatgtgtagtccggcctaaggggagcgcgatgtggggacaggagcagcacccagagttgggttggggggacagctgcttgctctagggaggacgaggacgaggtttggggacctggagaggcttctgttcaccgaccccttctcccctagatgctgcgggcccaggcgccggccaggcgtcccgsctggagggttccgaggcggaagaggaggaggatgcggaggatc

SEQ ID NO: 85652 - DNA, 487 bp, Homo sapiens
aagctctgtccatcctgtagccccaccctccccttggcccttggaaccctctctatggggatggcacacccagtttttaatgaaatcacctctgatgatgtcatttaatgacgtcacccttccactcgcattctgtttacaagaactcaccacatggccactccctgggagygggaagcagggcttcggggtggggagccacctccctgcagcctctgccctgcagaaagggggcacgggtcttttcctgggctcagctgcctgcgcctatgaggcccccaataaatgtgtatggagctgagcatagccagagggtggaggaaagaggctctgaggagggaaggagagaaaggggccatgctaatgtctactgagcacccactatgtgcccagcgcaaagctacacacagtcccacatgttaaagccacacggggtggggaaagagcccagacttgaagccagacagaccaggtacagttccaggtc

SEQ ID NO: 85653 - DNA, 764 bp, Homo sapiens
cataaggtaaaaatgaacattcctccatcttctttgtcctcacacccattctccaggtgggataagtttaagttgagctagacacagtagcatttctacaaagttttgtccaatataagttcacctatctaggagtgaagttaaaagtaaaccagatatggcaagagaatcacaaagcgccctgtgagtttttgagaattgcgttttgtcagaaggcgggggcatggagagctgattggaaacaacctttgggattgaggaagmtttggatgggggaaatggggacgaggaaggaggctgagacagcggagggggtttcaggtgggaagaacagtgtgaatgaaggtgacagacatgagaaaaacaggaattgtctgaggcagagcaaacagaggggtttggcataacacatatgggtagtagagggaaatcaagctagaaaggtgggttgggtaaataattggtgatgaacaaagaggacaggagtgaggaaggagacttacttcagtaggcaagagggtgccattgaaggtggttgaccaaggaatgatatagccagaattataggtcgggtgtagcggctcatgcctgtcatgccaacactttgggaggccgaggagagaggactgcttgaacccaggagtttgagaccagcctgggcaacctagtgagatgcccatctctacaaaaaacttttaaaaaattagccaggcatggtggcttcttcctgtagtcccagctactcaggagctgaggtgggagga

SEQ ID NO: 85654 - DNA, 764 bp, Homo sapiens
cataaggtaaaaatgaacattcctccatcttctttgtcctcacacccattctccaggtgggataagtttaagttgagctagacacagtagcatttctacaaagttttgtccaatataagttcacctatctaggagtgaagttaaaagtaaaccagatatggcaagagaatcacaaagcgccctgtgagtttttgagaattgcgttttgtcagaaggcgggggcatggagagctgattggaaacaacctttgggattgaggaagatttggatgggggaaatggggacgaggaaggaggctgagacagcrgagggggtttcaggtgggaagaacagtgtgaatgaaggtgacagacatgagaaaaacaggaattgtctgaggcagagcaaacagaggggtttggcataacacatatgggtagtagagggaaatcaagctagaaaggtgggttgggtaaataattggtgatgaacaaagaggacaggagtgaggaaggagacttacttcagtaggcaagagggtgccattgaaggtggttgaccaaggaatgatatagccagaattataggtcgggtgtagcggctcatgcctgtcatgccaacactttgggaggccgaggagagaggactgcttgaacccaggagtttgagaccagcctgggcaacctagtgagatgcccatctctacaaaaaacttttaaaaaattagccaggcatggtggcttcttcctgtagtcccagctactcaggagctgaggtgggagga

SEQ ID NO: 85655 - DNA, 764 bp, Homo sapiens
cataaggtaaaaatgaacattcctccatcttctttgtcctcacacccattctccaggtgggataagtttaagttgagctagacacagtagcatttctacaaagttttgtccaatataagttcacctatctaggagtgaagttaaaagtaaaccagatatggcaagagaatcacaaagcgccctgtgagtttttgagaattgcgttttgtcagaaggcgggggcatggagagctgattggaaacaacctttgggattgaggaagatttggatgggggaaatggggacgaggaaggaggctgagacagcggagggggtttcaggtgggargaacagtgtgaatgaaggtgacagacatgagaaaaacaggaattgtctgaggcagagcaaacagaggggtttggcataacacatatgggtagtagagggaaatcaagctagaaaggtgggttgggtaaataattggtgatgaacaaagaggacaggagtgaggaaggagacttacttcagtaggcaagagggtgccattgaaggtggttgaccaaggaatgatatagccagaattataggtcgggtgtagcggctcatgcctgtcatgccaacactttgggaggccgaggagagaggactgcttgaacccaggagtttgagaccagcctgggcaacctagtgagatgcccatctctacaaaaaacttttaaaaaattagccaggcatggtggcttcttcctgtagtcccagctactcaggagctgaggtgggagga

SEQ ID NO: 85656 - DNA, 764 bp, Homo sapiens
cataaggtaaaaatgaacattcctccatcttctttgtcctcacacccattctccaggtgggataagtttaagttgagctagacacagtagcatttctacaaagttttgtccaatataagttcacctatctaggagtgaagttaaaagtaaaccagatatggcaagagaatcacaaagcgccctgtgagtttttgagaattgcgttttgtcagaaggcgggggcatggagagctgattggaaacaacctttgggattgaggaagatttggatgggggaaatggggacgaggaaggaggctgagacagcggagggggtttcaggtgggaagaacagtgtgaatgaaggtgacagacatgagaaaaacaggaattgtctgaggcagagcaaacagaggggtttggcataacacatatgggtagtagagggaaatcaagctagaaaggtgggttgggtaaataattggtgatgaacaaagaggacaggagtgaggaaggagacttacttcagtaggcaagagggygccattgaaggtggttgaccaaggaatgatatagccagaattataggtcgggtgtagcggctcatgcctgtcatgccaacactttgggaggccgaggagagaggactgcttgaacccaggagtttgagaccagcctgggcaacctagtgagatgcccatctctacaaaaaacttttaaaaaattagccaggcatggtggcttcttcctgtagtcccagctactcaggagctgaggtgggagga

SEQ ID NO: 85657 - DNA, 1307 bp, Homo sapiens
aaaaattagctgggcgtggtggcggacacttgtagtcccagctactagggaggctgaggcaggagaatagcgtgaacctgggaggcagagcttgcagtgagctgaaatcgcaccactgcactccagcctgggcgacaaagcgagactacatctcaaaaaaaaaaaaaagaaaaaaagataagctgtaaaaactggaagtggggaagagtgagaaaactctagcttctccattatgtctttctgccttcaggaaacactgcttcagggtgctttcttgtttcttattttgataaattcagactttttaaacattttcattttcttcttgacttgggaacagtgtttgatttttaaaagccatttaggagccctgaagcttaataaatgagtggctycttctccataggtgaacgggttgttttgcatagggcaataccttttcattttatctgtgtgacgttttctcagtcttatggcattaattttttggaggaggggcagtattgagtgattattttgtcctggagtttgatgtgggttgcctgaacatatttgtaaatcagtacttgtcccaggattcaaatttaggacatggtaggtaagaataggacagtcaagtgttgggaattttaattttctgggacagagattatattttggtgagattacaaagtccagttgactgcagagttaggaactgaaaacccccaatcactcttgtgtatttatcttggtgagtggagcatttcccttcttagctaggtagatgctgggtttatttaaaattggaggttatttttctttttactataaatatttatgaagcaaaataatatttttgtattccttaatgttaagaaattaagacattcatagaatgaacaaggaagttaaaggtaagagcctacgttttcctatgagaactgtaatcctacttattttactagtatttctttactagactgtttaaaaattggttaggaaaccatatatgattagtaagatttagttaaatttttttctgcttttttctctttgtagacaatcaggaaatgaaatcaaggatattggtaagataaaaaaatcattacttttttatatgacaactataattagaaaacataacgggagaccaggtgtggtggctcacaccctgttatcccagcactttgggaggccgaggtgggcagatcacttgaggtcaggagttcgggaccagcctggccaacatggtgaaaccccgtctctactcaaaatacaaaaattagctgggcgtggtggtgcatgctatagtcccagctacttgg

SEQ ID NO: 85658 - DNA, 643 bp, Homo sapiens
tttgtgtaggaaaggataaatatatcctgatactttctagaccatattagttgctcctttacctgccttcctttaacctctttagctcttttctgtctgatactttttcttttcaggagcagtttttaaaaggcagagagaaattgccatcatcttctttcttatattaaggaatctaaaatcttaagaaaataaccattttttttggctgggcgtgaggctcacgcctgtaatctcagcactttgggaggccgaggtgggaggatcatgaggtcaagagataaagaccatcctggccaacatggtgaaaccctgtctctactaaaaatacaaaaattagccaggcgtggtgtctcgcacctgtagtcccagctactcgggaggctgaggcaggagagttgcatgaacccaaggggcggaggttgcagtgagatgagatcgtgccactgcactccagcctggtgacagagcgagactccattaaaaaaaaaaaaaaaaaaaaaaaaaragagagagagagaaagaataaccataaaatttgatggcttgggccatatgaatagcttcttataccccaaagaaacttcacaaaggtctactcctcacttcttcctaaacaattaaggactctttctaccacatg

SEQ ID NO: 85659 - DNA, 728 bp, Homo sapiens
aatgcaagtgaaaatgtctagcagaatgcctgtaaagatcttaaacactcaataatgtcacattccttctattgacacttcatcaaatcatagtttccttctgctgttctcttcattttttaaaatcttactcttgttccaaggccaagctttcccaccttcagagatccttctcgcttctagcctctgacagctgatgcctcttaggggaaatacaggggctaccagagaaacaggtgactggctacggctgtggtaaaagtggaaagtattttccggtgctctttttccccttgctcttcacygcatggattcctcccacagccacgagctcagagctctcctgctttaaggtataaagaaaaactaggagaatgctggttttcaagtctggctctgtctccactgtgttgagtcatatggtaagttattttctggcttccatattacttatatgatggaggagggagaatgaaacatctctcacattgatttgaaggcaaaatggtagcacatatgtgaacaagtctgacaggaagctggctctcagtagtgtatgctaagtgaattaataattgataaatgccacatgtttattggccatgcaagaatggttatgcaagacgcaaagccctgaagtaagtccgcaacaatggaaacagaggaaggtagatttcactgacattgacaataaaactatctccatatatctcaaaatatattctaaa

SEQ ID NO: 85660 - DNA, 1222 bp, Homo sapiens
ggaaacagtgtccatttttcaaacctccccaggggctctctttccctcagtcggggaagaagtctatttatggactttaatgcatttttatttgtcaggaaatgatacttctgcttcatttaaacaacaaaggaacttgaaaactatggcagtttggtcgcaatatttgaaaggtacattagaaacagttttagctctaggcagcaacacatgttttgacagctcagaactgagtcaaacctgcgaatgagaacttgctgaatctctggttttaaaaatgacttactttttagtggcaaaatgtggaaatatttcatcttttctttgtctcatcacctttgctcttagaaaatgaaaagctgcaactttaataaataaataacccaaattttattcagaaattttatcayattccaaatagttgcattaaataggtctagtgatacctttgaggataaccactgaattttaattcattgtaaggttaaaaatggattttgttgactgttaatctcgtggaaaggtgtgctagtggcaaaaacatgagacttggagttgagacaaagatttctgtcctggctctgccacttaataaccctgtctctccggaaaactcgcttatcctcgctgggtcttagtgacctgggaacatcagcgtctgcttccaagacctgtgaagatttagtgacatatgcggattttataaacgttaaaatattatgtcaatgttagttaatatttacttctgcccttccaaaagcaggaacaatttgtggtttaaaaatctgtaaattgagtttgttatttctctaatcctctgtgaatttagtcgaaagttatgagaaattaaaacatcatgcaattttacctccatttattattgaatcagataatttaatattttatgtctatctatagtattataatcactcatatttggagattatgaattcaaagatcattagagctagagaacttttgcagataaccaaagttctcctttaggtgtgtgtgatttgaggctcagagagggtgagtcacttgtctcgaatcaccagcttgctgcaggctgacttagggcaccagtactatggccctgttttcatgcctcacaattcacaggccgtgtgtccaccatgggtttggaaagtgggagggggacagctaaggtgggtggagggcgaggattgtgcttccttagtggtgaatgggaagacttgca

SEQ ID NO: 85661 - DNA, 1105 bp, Homo sapiens
cgtattctacctattagggacataacaccataggttggtcattaatttagagcggctaaatgtgtttttgagggtggtgtctstcctcacagggtacatctctgccctggtttctcagtgcgccatgagtgggccatggattgctcaatcaggccaaaagtttctgcgtagttaggatgacagtagactactgtaaattcaattagtatcttcaatagctatatgacttgaagaattatatactttttgaaaaataaagcctctgggaccagaagatcccaaagtcatgtgtccactgccatatcttctttgttataaaatgggctctttcccggctgaaatgagagtacctgctttcagtacaacgatcccagccgccgaggggtcatcgaagatcctgccttgattcgttggacctatccaagatcagcaaatgtctatccaaatttcagacccactcctaaaaactcactcttgggaactctgtgtggatttaggcccctcttcttctggtattacattttcaaaactgacagagataggaaagaaaaacttatccgggaaggaaaattggatggaacatttaacctttcatattaagtctggcaatgatgactatatgtattcctgccttaatagtctattaatcattaataaataaataaataaataaataaataaaatgggctctttatggccaggagcggtggctcacacctgtaatcccagcactttgggaggcggatgcaggcagatcacctgaggtcaggagtttgagaccagcctggccaacatagtgaaaccctgtctctactaaaaatacaaaagattagctgaggatggtggcatgcacctgtaatcccagctattagggaggctgaggcaggagaatcgcttgaaccttggaggcagaggttgcagtgagccgagatcgtgccattgcactccagcctgggcaacaagagcaaaactccgtctcaaaaaaaaaaaaaagggctctttgttttgatgcactgttatatgagatcccttatcaatggagcaaatattttgtaagctcttgaaagtggtgctggctgagcacactttgaggctctattagtag

SEQ ID NO: 85662 - DNA, 1105 bp, Homo sapiens
cgtattctacctattagggacataacaccataggttggtcattaatttagagcggctaaatgtgtttttgagggtggtgtctgtcctcacagggtacatctctgccctggtttctcagtgcgccatgagtgggccatggattgctcaatcaggccaaaagtttctgcgtagttaggatgacagtagactactgtaaattcaattagtatcttcaatagctatatgacttgaagaattatatactttttgaaaaataaagcctctgggaccagaagatcccaaagtcatgygtccactgccatatcttctttgttataaaatgggctctttcccggctgaaatgagagtacctgctttcagtacaacgatcccagccgccgaggggtcatcgaagatcctgccttgattcgttggacctatccaagatcagcaaatgtctatccaaatttcagacccactcctaaaaactcactcttgggaactctgtgtggatttaggcccctcttcttctggtattacattttcaaaactgacagagataggaaagaaaaacttatccgggaaggaaaattggatggaacatttaacctttcatattaagtctggcaatgatgactatatgtattcctgccttaatagtctattaatcattaataaataaataaataaataaataaataaaatgggctctttatggccaggagcggtggctcacacctgtaatcccagcactttgggaggcggatgcaggcagatcacctgaggtcaggagtttgagaccagcctggccaacatagtgaaaccctgtctctactaaaaatacaaaagattagctgaggatggtggcatgcacctgtaatcccagctattagggaggctgaggcaggagaatcgcttgaaccttggaggcagaggttgcagtgagccgagatcgtgccattgcactccagcctgggcaacaagagcaaaactccgtctcaaaaaaaaaaaaaagggctctttgttttgatgcactgttatatgagatcccttatcaatggagcaaatattttgtaagctcttgaaagtggtgctggctgagcacactttgaggctctattagtag

SEQ ID NO: 85663 - DNA, 1105 bp, Homo sapiens
cgtattctacctattagggacataacaccataggttggtcattaatttagagcggctaaatgtgtttttgagggtggtgtctgtcctcacagggtacatctctgccctggtttctcagtgcgccatgagtgggccatggattgctcaatcaggccaaaagtttctgcgtagttaggatgacagtagactactgtaaattcaattagtatcttcaatagctatatgacttgaagaattatatactttttgaaaaataaagcctctgggaccagaagatcccaaagtcatgtgtccactgccatatcttctttgttataaaatgggctctttcccggctgaaatgagagtacctgctttcagtacaacgawcccagccgccgaggggtcatcgaagatcctgccttgattcgttggacctatccaagatcagcaaatgtctatccaaatttcagacccactcctaaaaactcactcttgggaactctgtgtggatttaggcccctcttcttctggtattacattttcaaaactgacagagataggaaagaaaaacttatccgggaaggaaaattggatggaacatttaacctttcatattaagtctggcaatgatgactatatgtattcctgccttaatagtctattaatcattaataaataaataaataaataaataaataaaatgggctctttatggccaggagcggtggctcacacctgtaatcccagcactttgggaggcggatgcaggcagatcacctgaggtcaggagtttgagaccagcctggccaacatagtgaaaccctgtctctactaaaaatacaaaagattagctgaggatggtggcatgcacctgtaatcccagctattagggaggctgaggcaggagaatcgcttgaaccttggaggcagaggttgcagtgagccgagatcgtgccattgcactccagcctgggcaacaagagcaaaactccgtctcaaaaaaaaaaaaaagggctctttgttttgatgcactgttatatgagatcccttatcaatggagcaaatattttgtaagctcttgaaagtggtgctggctgagcacactttgaggctctattagtag

SEQ ID NO: 85664 - DNA, 1105 bp, Homo sapiens
cgtattctacctattagggacataacaccataggttggtcattaatttagagcggctaaatgtgtttttgagggtggtgtctgtcctcacagggtacatctctgccctggtttctcagtgcgccatgagtgggccatggattgctcaatcaggccaaaagtttctgcgtagttaggatgacagtagactactgtaaattcaattagtatcttcaatagctatatgacttgaagaattatatactttttgaaaaataaagcctctgggaccagaagatcccaaagtcatgtgtccactgccatatcttctttgttataaaatgggctctttcccggctgaaatgagagtacctgctttcagtacaacgatcccagcygccgaggggtcatcgaagatcctgccttgattcgttggacctatccaagatcagcaaatgtctatccaaatttcagacccactcctaaaaactcactcttgggaactctgtgtggatttaggcccctcttcttctggtattacattttcaaaactgacagagataggaaagaaaaacttatccgggaaggaaaattggatggaacatttaacctttcatattaagtctggcaatgatgactatatgtattcctgccttaatagtctattaatcattaataaataaataaataaataaataaataaaatgggctctttatggccaggagcggtggctcacacctgtaatcccagcactttgggaggcggatgcaggcagatcacctgaggtcaggagtttgagaccagcctggccaacatagtgaaaccctgtctctactaaaaatacaaaagattagctgaggatggtggcatgcacctgtaatcccagctattagggaggctgaggcaggagaatcgcttgaaccttggaggcagaggttgcagtgagccgagatcgtgccattgcactccagcctgggcaacaagagcaaaactccgtctcaaaaaaaaaaaaaagggctctttgttttgatgcactgttatatgagatcccttatcaatggagcaaatattttgtaagctcttgaaagtggtgctggctgagcacactttgaggctctattagtag

SEQ ID NO: 85665 - DNA, 1105 bp, Homo sapiens
cgtattctacctattagggacataacaccataggttggtcattaatttagagcggctaaatgtgtttttgagggtggtgtctgtcctcacagggtacatctctgccctggtttctcagtgcgccatgagtgggccatggattgctcaatcaggccaaaagtttctgcgtagttaggatgacagtagactactgtaaattcaattagtatcttcaatagctatatgacttgaagaattatatactttttgaaaaataaagcctctgggaccagaagatcccaaagtcatgtgtccactgccatatcttctttgttataaaatgggctctttcccggctgaaatgagagtacctgctttcagtacaacgatcccagccgccgaggggtcatcgaagatcctgccttgattcgttggacctatccaagatcagcaaatgtctatccaaatttcagacccactcctaaaaactcactcttgggaactctgtgtggatttaggcccctcttcttctggtattacattttcaaaactgacagagataggaaagaaaaacttatccgggaaggaaaattggatggaacatttaacctttcatattaagtctggcaatgatgactatatgtattcctgccttaatagtctattaatcattaataaataaataaataaataaataaataaaatgggctctttatggccaggagcggtggctcacacctgtaatcccagcactttgggaggcggatgcaggcagatcacctgaggtcaggagtttgagaccagcctggccaacatagtgaaaccctgtctctactaaaaatacaaaagattagctgrggatggtggcatgcacctgtaatcccagctattagggaggctgaggcaggagaatcgcttgaaccttggaggcagaggttgcagtgagccgagatcgtgccattgcactccagcctgggcaacaagagcaaaactccgtctcaaaaaaaaaaaaaagggctctttgttttgatgcactgttatatgagatcccttatcaatggagcaaatattttgtaagctcttgaaagtggtgctggctgagcacactttgaggctctattagtag

SEQ ID NO: 85666 - DNA, 658 bp, Homo sapiens
ataccccagggaaaatgttaaatataagcatgaaaatacctttagaaatgttcacagcagcattctttacaaaactggatggcaggcatacagatacatatttcctgtagatgtttgaactaattaattagtataaagttatacatattcattgtaaaaaaatttttgagatattgcagaaaggcagagagaaaataaaaatcacccataatcacacaattcaaagattataactgtcaacattttgttgaatatctagactttttcctaagcagacacacacacacgcatttccttaaaactggccaggtatgctggcttatgcctgtaatcccaacacttggggacactgaggctgggggatcacttgaggccaggagtttgagaccagcctggacaacatagcgagaccccatctctacaaaaaatttaaaaatacaaacaaaaacttcatctttttatttgctcttttattaatatattgtggcagtctttctgcatgtatgtagagccacacacaaatttttttgttttgttttgttttgttttktttttttgagactgagtctcactctgttgtccaggctggagtgtagtggcgtgatgttggctcactacaacctccgcctcccgggttcaagcgattctccagtctcag

SEQ ID NO: 85667 - DNA, 1180 bp, Homo sapiens
ccaaacccccaaccaatttcctcaaaataattaaacctcaatgaaaagcctacatataagaaaccrtcatgctaggatactacaaatgcttagaatcgtttcctgatcaccccacaagtgtttggttgttactcagcagttgttttgtgtgcagtagcactgatggcttgcttagtgacagcaacatcccacatggacagtggacaaaatatctccccgtagttctgcccaccaaccagttatatttggaatgtaacatgagagtttgttcacacatagttttgttaaaatcccattgaattttggaattgaaatgtaaataagatttttttttcctacaaaaacaatagctgaaggctttgtacaaactttggtattggaaatctacaaacattctcttggggaaatgttaaccagtagacctcctgtgaagagtacctatgctactagcatccccattttacaggtgagaacagtgaggattcgctagaagtagcaaagcagggattggtactccaaacttctcttacttcagagccttcacccttaaccactatactatagtgtctatcattattgtcatcattataatgtcaaaatggcttcattagaatgctaccgttatctttgttgttgttgctattattattatcattatttgacatttacttaacactcattatgttccagttactgtactaagtactcaatatacattgttttatttacttctcacatcaacctctgatagaactttattatcctcagtttacaaataagaaaattgagacctagtgaggttttggatcttgcccactggacaatcaactgccaagcctctaccgagtgcctactatgtgctcatccacataccagggttatttagtgctttaaaattgacatgttgtattattggacagagagcttcataatagtaggatttggttcatggctgtgcttcaaagacattacgtattttactatttcatatttcaattttctttctataataaaaccatgcaattgtatcatgacctttgtctcaccctaaataatatggtataacttatattttatacatttattcagatacacatatgtgttgttgctaagtttgagtaagtctgaagtcagagacccagtgactgatgttgtcccagaaagtagaattcttgtgatg

SEQ ID NO: 85668 - DNA, 1180 bp, Homo sapiens
ccaaacccccaaccaatttcctcaaaataattaaacctcaatgaaaagcctacatataagaaaccgtcatgctaggatactacaaatgcttagaatcgtttcctgatcaccccacaagtgtttggttgttactcagcagttgttttgtgtgcagtagcactgatggcttgcttagtgacagcaacatcccacatggacagtggacaaaatatctccccgtagttctgcccaccaaccagttatatttggaatgtaacatgagagtttgttcacacatagttttgttaaaatcccattgaattttggaattgaaatgtaaataagatttttttttyctacaaaaacaatagctgaaggctttgtacaaactttggtattggaaatctacaaacattctcttggggaaatgttaaccagtagacctcctgtgaagagtacctatgctactagcatccccattttacaggtgagaacagtgaggattcgctagaagtagcaaagcagggattggtactccaaacttctcttacttcagagccttcacccttaaccactatactatagtgtctatcattattgtcatcattataatgtcaaaatggcttcattagaatgctaccgttatctttgttgttgttgctattattattatcattatttgacatttacttaacactcattatgttccagttactgtactaagtactcaatatacattgttttatttacttctcacatcaacctctgatagaactttattatcctcagtttacaaataagaaaattgagacctagtgaggttttggatcttgcccactggacaatcaactgccaagcctctaccgagtgcctactatgtgctcatccacataccagggttatttagtgctttaaaattgacatgttgtattattggacagagagcttcataatagtaggatttggttcatggctgtgcttcaaagacattacgtattttactatttcatatttcaattttctttctataataaaaccatgcaattgtatcatgacctttgtctcaccctaaataatatggtataacttatattttatacatttattcagatacacatatgtgttgttgctaagtttgagtaagtctgaagtcagagacccagtgactgatgttgtcccagaaagtagaattcttgtgatg

SEQ ID NO: 85669 - DNA, 648 bp, Homo sapiens
tgtgctttgtccttctgggatcttcctttgcccacacacggcaccaacttgcccagaccacacaatgtgaaacaaacgggcaaccgagcagccggtgataaccagataaagtcagagccaaccaggaaacttagtactttattattttgtaatgttcaatctttcctaaatagtcagtcctggatttcaccatttttctgttcactgtctgtgtgcaatcttttccattgcttttgtctatatttgctctttaaaatttcccagtaaaatgacttggtatgtcacaaaaatctcttcattagtcattttttttttaatcggttccttcgtcggcttatccatccctgtgctgtgagtccagttctggccctcacactcctgcaacctcctgaagctggccatggcccagccgctgaacttgtagctgttgatcagagaggcacagagctccctgtgctgctgctctgacatgatgtcttacctgtggggtctgtgtactcggactctcccaaggattttctagggtgggatgagggtggtgygaattgatggtggtgataggtctctgtttctccttgaaatttatctaggaggctgggtgtagtggctcatgtctgtagtcccagcactttgggagcccaagatggg

SEQ ID NO: 85670 - DNA, 1060 bp, Homo sapiens
aaagaaaaagaaatcttataaacagtcagaaaaataaaaagagcatcacctacagaaaaatgataattagattgacaaatgacttctcaatggcacacaagggaagccagaaagatcgtggaataatgcctttaaagtgctggggaaaataattgccagcttagggttgtatacaaagagaaaaacatttcaaaaaatgagaataaaataaagacattttcagacaaagagaaatggagtgagtgaggcacactcgctttgtaagagtgtaacagacccttccaaaagcaatttctaaaggatgcattcaagaaagaaggaaaattaccccaaaaggaaggcatatgatgcaagagggagtgtgaaacagaaaacacgtgagtaaatctcaacactggccatgtcaaacagtagtaacgttttatatcttgaagagttttgaaaaacataagactaacatcctggacaataataaattagaaattagaagaatgttcaaaaccaaagatttttgtactgttctagagaaggtaaaagttattaattagacactgccagggtggcatgccaagccrggaggggtagcagcccacctggtggggagcatactttatcaccatcattatttagaattgctggtacatggcaacaataaaatgcagacaggcccttcatcagttttactattgcttttaaattctctacaggtaattctcctccttactgcctgtacctagggaagaccacttcatcaccaccactatagtcctagctagttgggaggctgagacaggaggatcacttgagcctaggagttcaaggctgcaatgagctatggttgtcataaggagtgtgcaacctagatccctcacacgcacaattcactatagggttcacgcagcctgggcaacagagcaagaccctgtctctaaaatgtgtgtatatgtatatgtgtttatacccatacacatacataaaaatattttatatgaatatagttgggcattcttacatagattgttttgcttaacattatatttgtgaaattaagtcatttctt

SEQ ID NO: 85671 - DNA, 1060 bp, Homo sapiens
aaagaaaaagaaatcttataaacagtcagaaaaataaaaagagcatcacctacagaaaaatgataattagattgacaaatgacttctcaatggcacacaagggaagccagaaagatcgtggaataatgcctttaaagtgctggggaaaataattgccagcttagggttgtatacaaagagaaaaacatttcaaaaaatgagaataaaataaagacattttcagacaaagagaaatggagtgagtgaggcacactcgctttgtaagagtgtaacagacccttccaaaagcaatttctaaaggatgcattcaagaaagaaggaaaattaccccaaaaggaaggcatatgatgcaagagggagtgtgaaacagaaaacacgtgagtaaatctcaacactggccatgtcaaacagtagtaacgttttatatcttgaagagttttgaaaaacataagactaacatcctggacaataataaattagaaattagaagaatgttcaaaaccaaagatttttgtactgttctagagaaggtaaaagttattaattagacactgccagggtggcatgccaagccgggaggggtagcagcccacctggtggggagcatactttatcaccatcaytatttagaattgctggtacatggcaacaataaaatgcagacaggcccttcatcagttttactattgcttttaaattctctacaggtaattctcctccttactgcctgtacctagggaagaccacttcatcaccaccactatagtcctagctagttgggaggctgagacaggaggatcacttgagcctaggagttcaaggctgcaatgagctatggttgtcataaggagtgtgcaacctagatccctcacacgcacaattcactatagggttcacgcagcctgggcaacagagcaagaccctgtctctaaaatgtgtgtatatgtatatgtgtttatacccatacacatacataaaaatattttatatgaatatagttgggcattcttacatagattgttttgcttaacattatatttgtgaaattaagtcatttctt

SEQ ID NO: 85672 - DNA, 1060 bp, Homo sapiens
aaagaaaaagaaatcttataaacagtcagaaaaataaaaagagcatcacctacagaaaaatgataattagattgacaaatgacttctcaatggcacacaagggaagccagaaagatcgtggaataatgcctttaaagtgctggggaaaataattgccagcttagggttgtatacaaagagaaaaacatttcaaaaaatgagaataaaataaagacattttcagacaaagagaaatggagtgagtgaggcacactcgctttgtaagagtgtaacagacccttccaaaagcaatttctaaaggatgcattcaagaaagaaggaaaattaccccaaaaggaaggcatatgatgcaagagggagtgtgaaacagaaaacacgtgagtaaatctcaacactggccatgtcaaacagtagtaacgttttatatcttgaagagttttgaaaaacataagactaacatcctggacaataataaattagaaattagaagaatgttcaaaaccaaagatttttgtactgttctagagaaggtaaaagttattaattagacactgccagggtggcatgccaagccgggaggggtagcagcccacctggtggggagcatactttatcaccatcattatttagaattgctggtacatggcaacaataaaatgcagacaggcccttcatcagttttactattgcttttaaattctctacaggtaattctcctccttactgcctgtacctagggaagaccacttcatcaccaccactatagtcctagctagttgggaggctgagacaggaggatcacttgagcctaggagttcaaggctkcaatgagctatggttgtcataaggagtgtgcaacctagatccctcacacgcacaattcactatagggttcacgcagcctgggcaacagagcaagaccctgtctctaaaatgtgtgtatatgtatatgtgtttatacccatacacatacataaaaatattttatatgaatatagttgggcattcttacatagattgttttgcttaacattatatttgtgaaattaagtcatttctt

SEQ ID NO: 85673 - DNA, 1060 bp, Homo sapiens
aaagaaaaagaaatcttataaacagtcagaaaaataaaaagagcatcacctacagaaaaatgataattagattgacaaatgacttctcaatggcacacaagggaagccagaaagatcgtggaataatgcctttaaagtgctggggaaaataattgccagcttagggttgtatacaaagagaaaaacatttcaaaaaatgagaataaaataaagacattttcagacaaagagaaatggagtgagtgaggcacactcgctttgtaagagtgtaacagacccttccaaaagcaatttctaaaggatgcattcaagaaagaaggaaaattaccccaaaaggaaggcatatgatgcaagagggagtgtgaaacagaaaacacgtgagtaaatctcaacactggccatgtcaaacagtagtaacgttttatatcttgaagagttttgaaaaacataagactaacatcctggacaataataaattagaaattagaagaatgttcaaaaccaaagatttttgtactgttctagagaaggtaaaagttattaattagacactgccagggtggcatgccaagccgggaggggtagcagcccacctggtggggagcatactttatcaccatcattatttagaattgctggtacatggcaacaataaaatgcagacaggcccttcatcagttttactattgcttttaaattctctacaggtaattctcctccttactgcctgtacctagggaagaccacttcatcaccaccactatagtcctagctagttgggaggctgagacaggaggatcacttgagcctaggagttcaaggctgcaatgagctatggttgtcataaggagtgtgcaacctagatccctcacaygcacaattcactatagggttcacgcagcctgggcaacagagcaagaccctgtctctaaaatgtgtgtatatgtatatgtgtttatacccatacacatacataaaaatattttatatgaatatagttgggcattcttacatagattgttttgcttaacattatatttgtgaaattaagtcatttctt

SEQ ID NO: 85674 - DNA, 520 bp, Homo sapiens
caggctgtgaaatcctattcttgggtgcaaatccagctgaatcgcattcttactttggaaccttggacacatatttaatttctctcagtctaagttttctcttctgtggaaatgaaaaatagttgtatcttyctcctatgtttagggtgggaaataaattagtgtgctcatgcaacaaatgaggtaattcatagtaaggatttcactggaaagcaagatgcaaactgcaaaaggcaggttccttttcatcttgttcacccttgtgccctctggcctagactactgcttggcagggatctatcacttctttcacatctgtggaatgaatgaatgaaaaccttttcctgacccctgacccataaaaagcttcataaatgttagctgtgttgtcatgatctccataattatgattatcctcatgatcattaatgtatataaaggtgttttatcttcaaaatcaagtgggaaatgtagacagccccctgtactttcaacaagtaatgttggattttatagcatc

SEQ ID NO: 85675 - DNA, 955 bp, Homo sapiens
aaacagtgacaacaggttgacagacttgattttggcaactgaatccattgattgtctgtctcacactacaggtgaacactgtgcaggtaaatgagggtcctatgacctatgataaaaaacctgcaagtgtctttgcaccaccaacgagagcaaaaaaagattgaaaaccaaaagagttttatgcccaaattgaattttgtcaaaagtttgaagtaatttcattgtaaaaatatattctgacaaaacttttaaggctacctttccttctcagaataaagttcattttggttaatattgcacctattgtgagggaatgagattaagggaatttccactgaatctaaggaaaggatgtgtgtcagacattgtgagaccacattgggtggctgagtggggctaaaggaaccttatctatattttgggggggtgtggtgggtaaaagcttgctgaattaaaaggagacatgatcctgtggaactaggaaattgagtaagtgaaagtgaaggagtgttctcccttccttccatgcctgcttctcctctgcacttctgctgactttcctacgactcagtgaaggtggccggagacacctgccctgcagctttgggattctatagcttttaagttccaaacatcaggctgtgctgtgattgaaatctctagccacaattccaaatgcttaaaaagtgactgggatctctctaggttgtgttaggtgtccatcctcagcctagttaaccttggccaygagaatgggatcttctatgtgacttgactgtagggagcccatttgtataaacggggtagatagttctaaggaaaatagaatgtctttgacccacagcctgggagaacacctgaaaaggcgtctactgctttatcaattttaagtttaagaataattgcactaagagagtagattttaagtgttttgaccacataaaatgattacgta

SEQ ID NO: 85676 - DNA, 267 bp, Homo sapiens
tatatatatatttatatatatatacacaatacacatatgtttggtccctcctacaaactttcatactctaagatcccattgtgttcctagagatgttcaatagcttgaatatttgaaatgaaaaacattttataacctttatttaaacagcttagttgcctacagttaagtaggcgtttctcaaaattctaccataatrttacatggctcaacacaatccataaaattcgtggctaatatccttaattggctttttccaacccatta

SEQ ID NO: 85677 - DNA, 1299 bp, Homo sapiens
tatgcatgggcaagggatccctgaccctgaaccatgcctcaggagacctccacgttttgcctactcaagggaagtctccttccattgcctggaaacatctgagcctgacrgtgacatatgagtggagtgtccttgggccctgatcacagtttacatgggctccagtccccattttttccttcagggctctcagaactttcctatgcagggtgtccactagatgtcccaaagatgtctgggattcatttttgtagaattgtctaaaggctgcatgtttctataagaacgcttggcaagcttattattcttgacgactagcatagtatatctttcacaattttatgtgagattaggtgttcagtatgtttcatacaaactgatttattgtgtctctcatacatgttggatacaggatgaattcaatagtctctagggcgatgaaactctacctctaaactagagtttgagaaactcatataggctggtgctttagttcttttgacaatgtgccacctcctgtaatcttccatgtctgagggtagtgagtgtggaaacagttaccctttacccttcctattcattttaccatcacctcagacacccaagaccgtcacttcaacacttccataggatcatgtgtcaggcagccacttgaggagtggccatgctcatgtcttccaggagttttcacaccattgctctgaaacaccaacggactctttgatcaatgtcctctcttgccttcagtctatatggtgatgtgttttgctgggttgcccttatattgcgccagacaaagaacagtcgatccttgagcacactgctctgctattatcactctatccacagcccctccaaccatccttctcccactagtggcaataaataaaagtcaagagtgctctcaacaatgaaaaagattacattttaggaatgcagtaatttcaacctaaagagttcagaagaagaaatagttaaaagtggtggtgttctacctttatgctataaaattctgaatgttaaagttaaccagaaaataaattgttttttgcatttttctgcatactccagataagacttaaaattttagtcagggagaagagtaaaaacttttaagaaagtgcttgaaaattagattcataggtgacacatcaaaaatgacaaaacttgactcatgatttataatttgtcatatattaaataattttgtattaaataaatattataagaaaactggagaggcaaatagatttgtattacttcagtataaacagattccaaagagctgtgatattatgc

SEQ ID NO: 85678 - DNA, 1299 bp, Homo sapiens
tatgcatgggcaagggatccctgaccctgaaccatgcctcaggagacctccacgttttgcctactcaagggaagtctccttccattgcctggaaacatctgagcctgacagtgacatatgagtggagtgtccttgggccctgatcacagtttacatgggctccagtccccattttttccttcagggctctcagaactttcctatgcagggtgtccactagatgtcccaaagatgtctgggattcatttttgtagaattgtctaaaggctgcatgtttctmtaagaacgcttggcaagcttattattcttgacgactagcatagtatatctttcacaattttatgtgagattaggtgttcagtatgtttcatacaaactgatttattgtgtctctcatacatgttggatacaggatgaattcaatagtctctagggcgatgaaactctacctctaaactagagtttgagaaactcatataggctggtgctttagttcttttgacaatgtgccacctcctgtaatcttccatgtctgagggtagtgagtgtggaaacagttaccctttacccttcctattcattttaccatcacctcagacacccaagaccgtcacttcaacacttccataggatcatgtgtcaggcagccacttgaggagtggccatgctcatgtcttccaggagttttcacaccattgctctgaaacaccaacggactctttgatcaatgtcctctcttgccttcagtctatatggtgatgtgttttgctgggttgcccttatattgcgccagacaaagaacagtcgatccttgagcacactgctctgctattatcactctatccacagcccctccaaccatccttctcccactagtggcaataaataaaagtcaagagtgctctcaacaatgaaaaagattacattttaggaatgcagtaatttcaacctaaagagttcagaagaagaaatagttaaaagtggtggtgttctacctttatgctataaaattctgaatgttaaagttaaccagaaaataaattgttttttgcatttttctgcatactccagataagacttaaaattttagtcagggagaagagtaaaaacttttaagaaagtgcttgaaaattagattcataggtgacacatcaaaaatgacaaaacttgactcatgatttataatttgtcatatattaaataattttgtattaaataaatattataagaaaactggagaggcaaatagatttgtattacttcagtataaacagattccaaagagctgtgatattatgc

SEQ ID NO: 85679 - DNA, 1299 bp, Homo sapiens
tatgcatgggcaagggatccctgaccctgaaccatgcctcaggagacctccacgttttgcctactcaagggaagtctccttccattgcctggaaacatctgagcctgacagtgacatatgagtggagtgtccttgggccctgatcacagtttacatgggctccagtccccattttttccttcagggctctcagaactttcctatgcagggtgtccactagatgtcccaaagatgtctgggattcatttttgtagaattgtctaaaggctgcatgtttctataagaacgcttggcaagcttattattcttgacgactagcatagtatatctttcacaattttatgtgagattaggtgttcagtatgtttcatacaaactgatttattgtgtctctcatacatgttggatacaggatgaattcaatagtctctagggcgatgaaactctacctctaaactagagtttgagaaactcatataggctggtgctttagttcttttgacaatgtgccacctcctgtmatcttccatgtctgagggtagtgagtgtggaaacagttaccctttacccttcctattcattttaccatcacctcagacacccaagaccgtcacttcaacacttccataggatcatgtgtcaggcagccacttgaggagtggccatgctcatgtcttccaggagttttcacaccattgctctgaaacaccaacggactctttgatcaatgtcctctcttgccttcagtctatatggtgatgtgttttgctgggttgcccttatattgcgccagacaaagaacagtcgatccttgagcacactgctctgctattatcactctatccacagcccctccaaccatccttctcccactagtggcaataaataaaagtcaagagtgctctcaacaatgaaaaagattacattttaggaatgcagtaatttcaacctaaagagttcagaagaagaaatagttaaaagtggtggtgttctacctttatgctataaaattctgaatgttaaagttaaccagaaaataaattgttttttgcatttttctgcatactccagataagacttaaaattttagtcagggagaagagtaaaaacttttaagaaagtgcttgaaaattagattcataggtgacacatcaaaaatgacaaaacttgactcatgatttataatttgtcatatattaaataattttgtattaaataaatattataagaaaactggagaggcaaatagatttgtattacttcagtataaacagattccaaagagctgtgatattatgc

SEQ ID NO: 85680 - DNA, 1299 bp, Homo sapiens
tatgcatgggcaagggatccctgaccctgaaccatgcctcaggagacctccacgttttgcctactcaagggaagtctccttccattgcctggaaacatctgagcctgacagtgacatatgagtggagtgtccttgggccctgatcacagtttacatgggctccagtccccattttttccttcagggctctcagaactttcctatgcagggtgtccactagatgtcccaaagatgtctgggattcatttttgtagaattgtctaaaggctgcatgtttctataagaacgcttggcaagcttattattcttgacgactagcatagtatatctttcacaattttatgtgagattaggtgttcagtatgtttcatacaaactgatttattgtgtctctcatacatgttggatacaggatgaattcaatagtctctagggcgatgaaactctacctctaaactagagtttgagaaactcatataggctggtgctttagttcttttgacaatgtgccacctcctgtaatcttccatgtctgagggtagtgagtgtggaaacagttaccctttacccttcctattcattttaccatcacctcagacacccaagrccgtcacttcaacacttccataggatcatgtgtcaggcagccacttgaggagtggccatgctcatgtcttccaggagttttcacaccattgctctgaaacaccaacggactctttgatcaatgtcctctcttgccttcagtctatatggtgatgtgttttgctgggttgcccttatattgcgccagacaaagaacagtcgatccttgagcacactgctctgctattatcactctatccacagcccctccaaccatccttctcccactagtggcaataaataaaagtcaagagtgctctcaacaatgaaaaagattacattttaggaatgcagtaatttcaacctaaagagttcagaagaagaaatagttaaaagtggtggtgttctacctttatgctataaaattctgaatgttaaagttaaccagaaaataaattgttttttgcatttttctgcatactccagataagacttaaaattttagtcagggagaagagtaaaaacttttaagaaagtgcttgaaaattagattcataggtgacacatcaaaaatgacaaaacttgactcatgatttataatttgtcatatattaaataattttgtattaaataaatattataagaaaactggagaggcaaatagatttgtattacttcagtataaacagattccaaagagctgtgatattatgc

SEQ ID NO: 85681 - DNA, 773 bp, Homo sapiens
taaataccacatttaacatgagtccatgaattttttaatacatatttgaatcaatttgcttatataaacagagaccacataaaaatattttcctggggtgccgtgtgccctagaggctactctgagaaaatggttactctaaacctgtcctgacaaagctttacaatgagccttaaaataattaattttatcttcaagtaacttaacggctgagaaaaaaaagaaaataagaaaataaagtccaacaatctttaggaatgacaaaaactggtacttaatataaaatttatagtactcagaatccaataaaaaaacttacatatagtatacagaaatagacccagaaatgaaatgaaagagatgatggaattaacagacaagaactttaaaatctttgttataaatacatgaatttgaaaaatatggatataataaaaagaaaaacaaaaataaaaatttaacaaaacagaaattttagagattagaaatttcattatctgaaatgaatattttgctacaaggtgttaccatcagatttgctactgaagaaaaagatcagtgaacttgaagatgtagcaatagaaactacccaaaatgaatcctagagagtaaaatggctgaaaaaattaaaaagtattagtgacctacatgaaaatataaaatattctaatctacatggtctcataattgggaaataataagggattcagaaaaamaagtacatggagatatgctgaaagtttctttatttgatgaaaactataaatctacgg

SEQ ID NO: 85682 - DNA, 869 bp, Homo sapiens
tgcatgtttcatatgccattcctaatatttaagttggtaattttaaaagtacacttaaatatttctattgtcaggagtagaaatgtttctttgcacatcaattcctctgttatatctttctccaacagttgaaaatcatgacctaaggcaaaatgtaaattttatgcctctcctaatagatgtcgtgtttatagaattaggctgagtgttcctaytactgtgttgtcctcagtgaatacttaaactgcttttgcttactacagtcaactcatagttctgctatcagaactatatgttttgcatttaattctctttccaaaacaaattaatacataacagaaaatatgcagcactttcagagaagaataaaattatcaaaaggactatcatatcaaaagaactaccatatcaaaagaattatattaaaagaatcatatatgaaatagagataaatattccatattataaatgttcaatcaataacttatttgaatgtgaaaacatgaatatgtaagaggcagctaatgttattgacctaaattagttctagagtacactgatcagttagagtatttaaaacctatttctgaataaaagtgcttttacttgaaaccaattttcttttcttccatggcaacaacacaagccctgcctccccaaggcacagacagagtctcctccgtcttacttgagctccaccaaactcaggaagcgtgcaaatactttcatcctgccagcttcactctggaactttgctttcttggctactatgggtaattatgtttgtgatctgtggaattttatagaatgacagccaattttggaattgtagttaattgtcataatacaagtaaatcaaaggataaata

SEQ ID NO: 85683 - DNA, 1135 bp, Homo sapiens
acatgacatgttagtatacaatacaagccaaaaaacattagtgcaaaaattctgcagggtgaagcagagcttaacaagcaataataattgtgatatagctcatatcattctagggtaaataataaaatgcttatgaagcaataaacacataaaggcattcaaaacatttacacctaagaacatattttgcatgggttccaaaagtctatatgataactactctttcagattctcagacatgtaccagttgctctttatttttcttatcaacttatgatgaagacattgaactctataaggattatttctagtctatcaaaaataaacaccacttctcaaaatataactttagtgatagcattaaaaatgctttaaaaatgcaatataaccactttatttaaaaatgccattatacttcaaatatttccagttcttaataccagatatatttccagatgttgttccatgttcaatataattttgttttttcctcaaatcttttgtagagtgcatctttattataagtatatgtttgagaatcaaattattttagacctaatataatctgccaatcttaaatcaatagtttataatggcaaaatcaaaattttagatacacagttacatattgacaaataattgatacattgtgcagcattgagtccttctattttctttttcttttttttttttgagacggagtcggagtctctctctgtcgcccaggctggagtgccgtggcgccatctcggctgactgcaagctccgcctcctgggttcacgccattcttctgcctcagcctcccaagtagctgggactataggcgcctgccaccacgccgggctaattttttgtattttttttagtagagactgggtttcaccgtgtttgccaggatggtctcratttcctgacctcgtgatccacccgcttcggcctcctaaagtgctgggattacaggcgtgatcccctgcgcctggcgagtccttctgttttcaacatgtgtgaacataagtcatattagaagaaaaacctcttggtgaatatacttttgattttactaaatcctatttcttgaatcatctgattcgggtgcaatctttattttcctaaaaagtctagcagttttttagg

SEQ ID NO: 85684 - DNA, 1135 bp, Homo sapiens
acatgacatgttagtatacaatacaagccaaaaaacattagtgcaaaaattctgcagggtgaagcagagcttaacaagcaataataattgtgatatagctcatatcattctagggtaaataataaaatgcttatgaagcaataaacacataaaggcattcaaaacatttacacctaagaacatattttgcatgggttccaaaagtctatatgataactactctttcagattctcagacatgtaccagttgctctttatttttcttatcaacttatgatgaagacattgaactctataaggattatttctagtctatcaaaaataaacaccacttctcaaaatataactttagtgatagcattaaaaatgctttaaaaatgcaatataaccactttatttaaaaatgccattatacttcaaatatttccagttcttaataccagatatatttccagatgttgttccatgttcaatataattttgttttttcctcaaatcttttgtagagtgcatctttattataagtatatgtttgagaatcaaattattttagacctaatataatctgccaatcttaaatcaatagtttataatggcaaaatcaaaattttagatacacagttacatattgacaaataattgatacattgtgcagcattgagtccttctattttctttttcttttttttttttgagacggagtcggagtctctctctgtcgcccaggctggagtgccgtggcgccatctcggctgactgcaagctccgcctcctgggttcacgccattcttctgcctcagcctcccaagtagctgggactataggcgcctgccaccacgccgggctaattttttgtattttttttagtagagactgggtttcaccgtgtttgccaggatggtctcgatttcctgacctcgtgatccacccgcttcggcctcctaaagtgctgggattacaggcgtgatcccctgcgcctggcgagtccttctgttttcracatgtgtgaacataagtcatattagaagaaaaacctcttggtgaatatacttttgattttactaaatcctatttcttgaatcatctgattcgggtgcaatctttattttcctaaaaagtctagcagttttttagg

SEQ ID NO: 85685 - DNA, 640 bp, Homo sapiens
  misc_feature (1)...(640): n = A,T,C or G
tacagagatcagagatccctcctcctactttgtaatctctgtctacttttcctcctccttttgatacttcagctactaattagtttttttttctttaaatattttaaattctaactggagccaaggtgcagagaaatgagttcaacatagacctcattttacagagtactgctacgactggttattcagggtcttcctttgttttatcccccttacctccatttcctycacaacatgataacctacaaatgtgttggacctacaaactcaaattcctgttctcttgaatttctgtaatacaccttattttatgatatattatttgtaaaactctattggatttatttagatgcaattgtgtttgacgctttcaccactgtatttataactggaaataggttagttgttttagcttagttttgtctttgctattttaattaaactttgacctggctttaaattaatatattagcttctcactcctccactcaccaaccccctatgctatgatgttttacctgtctgtatattttctcgcannnnnnnnnnnnnnnnnnnnnnnnnnnnnnnnnnnnnnnnnnnnnnnnnnnnnnnnnnnnnnnnnnnnnnnnnnnnnnnnnnnnnnnnnnnnnnnnnnnnt

SEQ ID NO: 85686 - DNA, 640 bp, Homo sapiens
  misc_feature (1)...(640): n = A,T,C or G
tacagagatcagagatccctcctcctactttgtaatctctgtctacttttcctcctccttttgatacttcagctactaattagtttttttttctttaaatattttaaattctaactggagccaaggtgcagagaaatgagttcaacatagacctcattttacagagtactgctacgactggttattcagggtcttcctttgttttatcccccttacctccatttcctccacaacatgataacctacaaatgtgttggacctacaaactcaaattcctgttctcttgaatttctgtaatacaccttattttatgayatattatttgtaaaactctattggatttatttagatgcaattgtgtttgacgctttcaccactgtatttataactggaaataggttagttgttttagcttagttttgtctttgctattttaattaaactttgacctggctttaaattaatatattagcttctcactcctccactcaccaaccccctatgctatgatgttttacctgtctgtatattttctcgcannnnnnnnnnnnnnnnnnnnnnnnnnnnnnnnnnnnnnnnnnnnnnnnnnnnnnnnnnnnnnnnnnnnnnnnnnnnnnnnnnnnnnnnnnnnnnnnnnnnt

SEQ ID NO: 85687 - DNA, 771 bp, Homo sapiens
tgcattcctggggggaggtctataaacagccgctctgggaatgtctgtcctatgtggttgagataaggactgagatayaccctggtctcctgcagtacactcaggcttactaggatggaaactcctccctggtaaatttttggtcagaccagttctctgctctcaaaacctgttttctgttaagatgtttatcaagacaatatgtgcactgctgaacatagacccttatcaggagttctgattttgcctttgtcctgtttcctcagaagcatgtgatctttgttctgctttttgccccttgaagcatgtgacctactccctgttcatacaccccttccccttttcaaacccttattaaaaacttgctggtttaaggctcaggtgggcatcacagtcctaccaatatgtgacgtcacccctggcggcccagctgtaaaattcctctctttgtactctttctctttatttctcagccagctgacacttatggaaaatagaaagaacctaccttgaaatattgggggcgggttccccaataatatcccacaattgtaatcaatgtagctttatattgtgttttaatattttgcacagccattgtctttattattctttccttaagaaaacttcaatattcttacatagataatcacacaaatttcataagtgaatactacaaagattttaatgtgaattgcataaatttattttggaattcttaatattcttaatattttaatatttagtcttctcatatagaaagatcatttt

SEQ ID NO: 85688 - DNA, 1095 bp, Homo sapiens
acagaaacaggagaatgaagtagacatgcagagagaaacagaggggagaaattacagggctctagacaaaagtattccagttgctattgctgcatagtagtataaagcaacaacaatcagttataattatctctcatagttctggggtcagccaggtggttctccttgggagtctctcatgtagctgctattggacagtagccctggactcatctcaatggcttccttaccacatgtcagattcttgggctggaacaactaaggttccttgggtgtctctctctgtcttcatatggccgttccaagtagtctctgcagcaggacagcttcaggacagccagacttcttatatggatgctcaaagttccaaaaggtcaaatttcaagatagtgagccagatggaagccatatcaccttttacaacatagctttggaaatgtcctaccactattccaccatgaccctgttacttgaggcatttacaaaggcccacatagtttcaaaagtagggggcatagattctagctcccagtgtgggaatgtcaaggttcaggaagagtatgtaggatgtaaaatattgttgcagccaatttgggaaaatacaatctgccacagaaaagaacctcaattctggatcatcaaaagacattgtccaattgtacttatatttcattagatatcttatatatttctataaaacccaccttttcactttgtgtgtgtgtgctaratagaggggtttctataattaacaatcagaacagccttgactagtgggtataagtaacgatattagacattcttctacttggcatctgtcttcaaaaagaatccatttcaatccttatcttattctaacaggtcatgattagattactgggaagcacacacaatctctgatggatacctagaaatacagtaagtccaatgtgtctagctggttggtaggacccttgctatagcaagacagctagcaagtctggctaggctctaagtcgcatactcagtagtaagcacctgtattgattctgtagctaacaaactgctgttgcaatctcttgagcagtgcttttcttggtgtggcttttcttggct

SEQ ID NO: 85689 - DNA, 534 bp, Homo sapiens
gaaagggtcagggcagtaactccccaggtgttgccatgccaacagctaaattgacatagcacactggtgggcttttctgattgaaagctgcttctgtgctggccctgttttagctagtcctcaatctggttcagtgtccaagccccatctctggagtccagtctggcttcctacttcacttgctagtcttttccagcttctggtggctccaggctttcttggcttgtggcagcataactacaatctttccctcagtttcccaggcccttctctcctttgtgtctctatatcctttcctgtgtcttacaaggatactcttattggctttatggcccaacctgattcaatatgatttcatcaagattcttaccttaataaaaccttcacagaccatatttccaaaataggtcacatgagcttctaaatggacattaatttttttggggggagggtattattcagattastacaattgctagaatgagctaggaaaaagtagagcgttaataggtctatttcgtcaaagtagtaaca

SEQ ID NO: 85690 - DNA, 534 bp, Homo sapiens
gaaagggtcagggcagtaactccccaggtgttgccatgccaacagctaaattgacatagcacactggtgggcttttctgattgaaagctgcttctgtgctggccctgttttagctagtcctcaatctggttcagtgtccaagccccatctctggagtccagtctggcttcctacttcacttgctagtcttttccagcttctggtggctccaggctttcttggcttgtggcagcataactacaatctttccctcagtttcccaggcccttctctcctttgtgtctctatatcctttcctgtgtcttacaaggatactcttattggctttatggcccaacctgattcaatatgatttcatcaagattcttaccttaataaaaccttcacagaccatatttccaaaataggtcacatgagcttctaaatggacattaatttttttggggggagggtattattcagattactacaattgctagaatgarctaggaaaaagtagagcgttaataggtctatttcgtcaaagtagtaaca

SEQ ID NO: 85691 - DNA, 2666 bp, Homo sapiens
cagaagtaaaaaaaggaaaacagagatactgctaaataaaagggtatactaagttcttaatagtaactcaataacctggaacactgtcaaaaagcaacaactagtgaattttttcagtgttttttttttctattatccaataagtgaattatgctattcctttccaatttcccaagcagttttgtcccaatcaccatttctctgttcgaagaaaaagtaacaaatcaagtaactaaactaaacaagcatacaaacaaacaaaacacaactacagtatctgcaaaagtttggtagaagactgaaactgttgagtataagggtctggtattctattatcattagttaacttgagagtttgttaaagacacacatttcataagaaaacatgttagtttgaagttattgaccagtatgtaccatccctaaatattagtaaccaaattcatgataataaaagagctatctaacaagaaaaattaatgactaccagcaccatcaacaagactttgtctttacacttcattaccacttaccgtgcattactatgtctaggattgactctgatagcatttcaaaaacaagctaatgctttgtccaattcttcagttaagacaaactctcgccctaatagagtataggcataagcataatttggatctacttggatagctctctggaagaatttaattgcaatatcgtgttcccattgcagactgaaacagttccctgcagcacaccaggcctctggcagatttttatccaagtctgttaagtcttttgacagaactgaaagagcaccatctttttgaagatgccaaaatgttgtagagtagatttccatgcctttgactctataattctcaacccttctaacctctgagaatattctttcagcttgcatgtactctgaaagttcaaaatagacccttccaatttggcacagtacccaaccagtattgtagtggtgagaaggtagatggctcaaagtatttatagcttctttgcagtggtatgagcacaaagctaaataacctttccccctttcatgaagaagactcatcaagccttctgctgctgttttttatgattaaaagcctgaatctgaggtgtgattgtggatattttctcttctgaaatgatgaaagagtccaattttgtaatttccaggctatcatttatgttaggttgagttattcctcctttattagttttactttttgtttttctgtttgggattttaggtggaaacttcttttttaatttcttcctattctcctttgttgtggaactgtcactagtaaacagtcatgaatttcttcgaggcagtgcatttaggggagatgtcatagtggggctcaatacctgaggtgttgtacttatttatggaccagaactttctgtttgtgcaagaattggagttacctctcttctacttccactctgtgagaagacagactttgctccagtttggccgattctggcaacagacttttttgaaggggctctggtggatgacacattaatttcagaaggtgtattagtgtagttttgtaaataggatccatctccaggacttggggtttctaatggcaaaatcccaaaacttggggttaatggactaagagctcctggtcctcctaataaacttcgaccagtttttggtttattttgaacctgtttagataatatggaagttcctgttcccagtgggacagtatcaggtgaaattacgctgaatcagtagaagacactgaggaatctgtattcaaggaatactttgaattggaagattctaaattcaatctgtttaattcagttgtttccgtaagaaaggtctcaggctgtctgtgacataaactatgactaggtacttgtgttgtgcaagagttgggcagacagttgctaaagttctgaaacgatgtgaatttaaatgtttggtcaggatctggcttttcacctatttcacataatgattcaaagggataccagaggaaaggctttaaactaagccacttttggtcacattctgatcctttggcaagccgatcagtcttgcaatatacatctcccaacaatggaaggggaaagcaagctgaatcaccaaactcagtaacaatatcatcatggcttttytacttattaaacactccaccggataagatttgttccccttgtgcaagcttgctgagatcaacacaacattttgcaagcaggtatttgcattgcagtgtaggacaactgtgtcctttcaagagtctttatgctttgtaggcctttcctgggtggtaagaacaagatgccagtaaaacttggcttcttctgagtgtacttctgcataaaggtgttctgcgaggaaaaccccatttcagtaagcatagtggtttagtgcttgccatatagcagcctggacgggttcctgcagcaccgtcatcctcgaggctcagacccactttctgcagtgcctcaggcacccccaaccctgcccacccccctccccccaccgtagggagctccagcccagccagccttggctcatttaaactcaccagttaccaggggatgggggaggccgagccagaatgacttctttaccctgcagactctggaaagcccgtccccttgttatccattgcaaagcgagagtcacctcatgtttggaaaatgga

SEQ ID NO: 85692 - DNA, 2666 bp, Homo sapiens
cagaagtaaaaaaaggaaaacagagatactgctaaataaaagggtatactaagttcttaatagtaactcaataacctggaacactgtcaaaaagcaacaactagtgaattttttcagtgttttttttttctattatccaataagtgaattatgctattcctttccaatttcccaagcagttttgtcccaatcaccatttctctgttcgaagaaaaagtaacaaatcaagtaactaaactaaacaagcatacaaacaaacaaaacacaactacagtatctgcaaaagtttggtagaagactgaaactgttgagtataagggtctggtattctattatcattagttaacttgagagtttgttaaagacacacatttcataagaaaacatgttagtttgaagttattgaccagtatgtaccatccctaaatattagtaaccaaattcatgataataaaagagctatctaacaagaaaaattaatgactaccagcaccatcaacaagactttgtctttacacttcattaccacttaccgtgcattactatgtctaggattgactctgatagcatttcaaaaacaagctaatgctttgtccaattcttcagttaagacaaactctcgccctaatagagtataggcataagcataatttggatctacttggatagctctctggaagaatttaattgcaatatcgtgttcccattgcagactgaaacagttccctgcagcacaccaggcctctggcagatttttatccaagtctgttaagtcttttgacagaactgaaagagcaccatctttttgaagatgccaaaatgttgtagagtagatttccatgcctttgactctataattctcaacccttctaacctctgagaatattctttcagcttgcatgtactctgaaagttcaaaatagacccttccaatttggcacagtacccaaccagtattgtagtggtgagaaggtagatggctcaaagtatttatagcttctttgcagtggtatgagcacaaagctaaataacctttccccctttcatgaagaagactcatcaagccttctgctgctgttttttatgattaaaagcctgaatctgaggtgtgattgtggatattttctcttctgaaatgatgaaagagtccaattttgtaatttccaggctatcatttatgttaggttgagttattcctcctttattagttttactttttgtttttctgtttgggattttaggtggaaacttcttttttaatttcttcctattctcctttgttgtggaactgtcactagtaaacagtcatgaatttcttcgaggcagtgcatttaggggagatgtcatagtggggctcaatacctgaggtgttgtacttatttatggaccagaactttctgtttgtgcaagaattggagttacctctcttctacttccactctgtgagaagacagactttgctccagtttggccgattctggcaacagacttttttgaaggggctctggtggatgacacattaatttcagaaggtgtattagtgtagttttgtaaataggatccatctccaggacttggggtttctaatggcaaaatcccaaaacttggggttaatggactaagagctcctggtcctcctaataaacttcgaccagtttttggtttattttgaacctgtttagataatatggaagttcctgttcccagtgggacagtatcaggtgaaattacgctgaatcagtagaagacactgaggaatctgtattcaaggaatactttgaattggaagattctaaattcaatctgtttaattcagttgtttccgtaagaaaggtctcaggctgtctgtgacataaactatgactaggtacttgtgttgtgcaagagttgggcagacagttgctaaagttctgaaacgatgtgaatttaaatgtttggtcaggatctggcttttcacctatttcacataatgattcaaagggataccagaggaaaggctttaaactaagccacttttggtcacattctgatcctttggcaagccgatcagtcttgcaatatacatctcccaacaatggaaggggaaagcaagctgaatcaccaaactcagtaacaatatcatcatggcttttctacttattaaacactccaccggataagatttgttccccttgtgcaagcttgctgagatcaacacamcattttgcaagcaggtatttgcattgcagtgtaggacaactgtgtcctttcaagagtctttatgctttgtaggcctttcctgggtggtaagaacaagatgccagtaaaacttggcttcttctgagtgtacttctgcataaaggtgttctgcgaggaaaaccccatttcagtaagcatagtggtttagtgcttgccatatagcagcctggacgggttcctgcagcaccgtcatcctcgaggctcagacccactttctgcagtgcctcaggcacccccaaccctgcccacccccctccccccaccgtagggagctccagcccagccagccttggctcatttaaactcaccagttaccaggggatgggggaggccgagccagaatgacttctttaccctgcagactctggaaagcccgtccccttgttatccattgcaaagcgagagtcacctcatgtttggaaaatgga

SEQ ID NO: 85693 - DNA, 3203 bp, Homo sapiens
ggcagcagccttgtctccaccattccttcaatgctcagtacgtaacacagaagctgactccataacatttagttggccaactgagactaaatgtatgttcctctagatcttaaaaagttacagaaacatagcacaatagtcaaaaaaattgtctttagtcaggagttctccatatatgtacaacagtttgaagtcattattaagcaaaatgaaacagaaactgtcacagaattccctaagataaattattttgctttaatcttcaattcatcatgtgaaataatcaagaccatgtgttattgtaaatatttctagcttacaacacaacaacctgatttttactgtttgaaataaccataatataaatcagttaattaaaaattgcataaataatcctttcaaataaaattctgcctaaattttacattactcatatgttcaaatgataatgagctcataggattttccaatacctcagtcaaaacattgtactgattccagctgtgggaatagtacctgaaagttatcttacagatggggaaaaggtacctatgtgacattggcctttgcactactgtacccttttgggtcaggaaaaagctgttcccttaaagtcctaaaatctcttctgtcaggtctaaagggtgggtgggaaacatagtttttaaattttagccacagatgttttattccttgcttaaagcagtgactagataaaggccactagaagagtctccaacgttcctttagaagcatgtgtctgagaacatcttcctgaaacactcccttgtctctgcccaaaatcaccttaggtaggaaaatcacaactcagcaggctgaggggatccaaggggatcattgagctctgaggcttatgagagaagagagagaggtctaagactttttgtgtataaatttatgggttccaagtgcaattttgctgtaagcacggatggcatagtggtgaagtcagggcttttagggtatccatcactggaataatgcacattgtacccattaagtaatttctcactgttcacctcttccatcccctcaccctgctgagtctccattatcattccactctctacatcaatacctacacatcttttagcacccgcttatgagtgataaaatacgatgtttactctgtgtctggtttgtttcacttataacaatggcctccagttccatccatgtgtctgcaaaaattatgattctattgttttttacgcctgaatagtatttcattgtgtatattttctacattttctttctccaattatttgttgatggacattaggttgattttatatctgtgctactgtgaatagtgttgcaacaaatataaaagtacagttatatttctgatacattgatttttttttcctttgcaaaaatactcagcggtgggattgctgaatcagacagagccaattgatgatcagtaatggtggccaataatcagctggaaacaaagtacttagcagggcttgaaaacaccaaaactctgagaccactgaccttcaaaaacttcaacagccctgagtgaaaagtccaaacacatttatctaccattcaaagaccctttattgtctgtcctctgcgcatctcagtagtctctttttaccacactgtctatatactgcatgagccatttatatgaaactatctgacactccaaggcatcttatactatatattcaatcatgtatccctagtaattagcacagtcctggcatatagtttgctactaaacttttgcagaatgaaggaattatcttgtatccaggttccaagttttaaggtgattcttcacaaaaaaaaagtattacagctcacaaataatctacttccttttttagaaatgggattgattttaatcttataccctaataacattactttcatttactcctatctaaatatactgtcctaagagagcaataagaaagagagttgaagctggagcttgaagaattgtacatggtcctgtgataccctaccttgttttaacctgagtgactctctcctagtggagggagagccggacagaccccattttagtttcttcacatgcagccccctttatctcccttccttaagggcataactagtgtaaactgactcaaagcacatccaggaatgtggttactattaagatattgaggcaagctgcaccagcagctcctggggacgcactcggtgaatggcacccaaaacccctgtatttctctctttgtgatagtttaagcccctgcacctggaatgtttttttttttgtaactgcttttgtaaccgattaatttttttaactttttgccagctctgcttctgtaaaaattgcttcagctaaactcccccctcccctatttagaccacggtataaaaacaaaaccagccccttcctcggggcccagagaattttgagcgttagctgcctctcggtcgctggctaataaaggactccttaatttgtctcaaaaggtggcgttcctctataactcgcttggttacaacagtccacactgtggcctgaggtgcatcacccacctgagcttcatctgttaggtatgtcagggaaggtaagcagggtgagagaggcctcatcagaggaccccagatctctggcttccccatctgacaagtgcacctctgtgaacaaagacttcagagccagatgacaagaatggcccaagcagtccaccagggaaacctgggcccagtgtacatcaatgcagagcatcaagcacggtgtaacaggtgcacagttgcctattcctgttcagagatgactgcgtcccacacactgtaaaatgaggaaatgcagagaagcagatgtaactgaagaagacagcaggaacaacaaggagggacaaccatgacctaggagggcaccatgccagagacgcctggaccctacgctagggtcagtgcttgttatactcttgrgacccagagctttccttctccatcatgtggcatacttggcattatttgttgtttaaaatattgtccttagtttttacctttcctaggagacacaggcagaccctgtgacactacagggtctggcacacagtaggtgcatcacaaacatctgccgacttcacactctgttgccttctcaagccttcttgtcaagtcttcagtgaaaaggaattgctgattgagcaagaattaaacttctagagactcctgga

SEQ ID NO: 85694 - DNA, 3203 bp, Homo sapiens
ggcagcagccttgtctccaccattccttcaatgctcagtacgtaacacagaagctgactccataacatttagttggccaactgagactaaatgtatgttcctctagatcttaaaaagttacagaaacatagcacaatagtcaaaaaaattgtctttagtcaggagttctccatatatgtacaacagtttgaagtcattattaagcaaaatgaaacagaaactgtcacagaattccctaagataaattattttgctttaatcttcaattcatcatgtgaaataatcaagaccatgtgttattgtaaatatttctagcttacaacacaacaacctgatttttactgtttgaaataaccataatataaatcagttaattaaaaattgcataaataatcctttcaaataaaattctgcctaaattttacattactcatatgttcaaatgataatgagctcataggattttccaatacctcagtcaaaacattgtactgattccagctgtgggaatagtacctgaaagttatcttacagatggggaaaaggtacctatgtgacattggcctttgcactactgtacccttttgggtcaggaaaaagctgttcccttaaagtcctaaaatctcttctgtcaggtctaaagggtgggtgggaaacatagtttttaaattttagccacagatgttttattccttgcttaaagcagtgactagataaaggccactagaagagtctccaacgttcctttagaagcatgtgtctgagaacatcttcctgaaacactcccttgtctctgcccaaaatcaccttaggtaggaaaatcacaactcagcaggctgaggggatccaaggggatcattgagctctgaggcttatgagagaagagagagaggtctaagactttttgtgtataaatttatgggttccaagtgcaattttgctgtaagcacggatggcatagtggtgaagtcagggcttttagggtatccatcactggaataatgcacattgtacccattaagtaatttctcactgttcacctcttccatcccctcaccctgctgagtctccattatcattccactctctacatcaatacctacacatcttttagcacccgcttatgagtgataaaatacgatgtttactctgtgtctggtttgtttcacttataacaatggcctccagttccatccatgtgtctgcaaaaattatgattctattgttttttacgcctgaatagtatttcattgtgtatattttctacattttctttctccaattatttgttgatggacattaggttgattttatatctgtgctactgtgaatagtgttgcaacaaatataaaagtacagttatatttctgatacattgatttttttttcctttgcaaaaatactcagcggtgggattgctgaatcagacagagccaattgatgatcagtaatggtggccaataatcagctggaaacaaagtacttagcagggcttgaaaacaccaaaactctgagaccactgaccttcaaaaacttcaacagccctgagtgaaaagtccaaacacatttatctaccattcaaagaccctttattgtctgtcctctgcgcatctcagtagtctctttttaccacactgtctatatactgcatgagccatttatatgaaactatctgacactccaaggcatcttatactatatattcaatcatgtatccctagtaattagcacagtcctggcatatagtttgctactaaacttttgcagaatgaaggaattatcttgtatccaggttccaagttttaaggtgattcttcacaaaaaaaaagtattacagctcacaaataatctacttccttttttagaaatgggattgattttaatcttataccctaataacattactttcatttactcctatctaaatatactgtcctaagagagcaataagaaagagagttgaagctggagcttgaagaattgtacatggtcctgtgataccctaccttgttttaacctgagtgactctctcctagtggagggagagccggacagaccccattttagtttcttcacatgcagccccctttatctcccttccttaagggcataactagtgtaaactgactcaaagcacatccaggaatgtggttactattaagatattgaggcaagctgcaccagcagctcctggggacgcactcggtgaatggcacccaaaacccctgtatttctctctttgtgatagtttaagcccctgcacctggaatgtttttttttttgtaactgcttttgtaaccgattaatttttttaactttttgccagctctgcttctgtaaaaattgcttcagctaaactcccccctcccctatttagaccacggtataaaaacaaaaccagccccttcctcggggcccagagaattttgagcgttagctgcctctcggtcgctggctaataaaggactccttaatttgtctcaaaaggtggcgttcctctataactcgcttggttacaacagtccacactgtggcctgaggtgcatcacccacctgagcttcatctgttaggtatgtcagggaaggtaagcagggtgagagaggcctcatcagaggaccccagatctctggcttccccatctgacaagtgcacctctgtgaacaaagacttcagagccagatgacaagaatggcccaagcagtccaccagggaaacctgggcccagtgtacatcaatgcagagcatcaagcacggtgtaacaggtgcacagttgcctattcctgttcagagatgactgcgtcccacacactgtaaaatgaggaaatgcagagaagcagatgtaactgaagaagacagcaggaacaacaaggagggacaaccatgacctaggagggcaccatgccagagacgcctggaccctacgctagggtcagtgcttgttatactcttgggacccagagctttccttctccatcatgtggcatacttggcattatttgttgtttaaaatattgtccttagtttttacctttcctaggagacacagkcagaccctgtgacactacagggtctggcacacagtaggtgcatcacaaacatctgccgacttcacactctgttgccttctcaagccttcttgtcaagtcttcagtgaaaaggaattgctgattgagcaagaattaaacttctagagactcctgga

SEQ ID NO: 85695 - DNA, 3203 bp, Homo sapiens
ggcagcagccttgtctccaccattccttcaatgctcagtacgtaacacagaagctgactccataacatttagttggccaactgagactaaatgtatgttcctctagatcttaaaaagttacagaaacatagcacaatagtcaaaaaaattgtctttagtcaggagttctccatatatgtacaacagtttgaagtcattattaagcaaaatgaaacagaaactgtcacagaattccctaagataaattattttgctttaatcttcaattcatcatgtgaaataatcaagaccatgtgttattgtaaatatttctagcttacaacacaacaacctgatttttactgtttgaaataaccataatataaatcagttaattaaaaattgcataaataatcctttcaaataaaattctgcctaaattttacattactcatatgttcaaatgataatgagctcataggattttccaatacctcagtcaaaacattgtactgattccagctgtgggaatagtacctgaaagttatcttacagatggggaaaaggtacctatgtgacattggcctttgcactactgtacccttttgggtcaggaaaaagctgttcccttaaagtcctaaaatctcttctgtcaggtctaaagggtgggtgggaaacatagtttttaaattttagccacagatgttttattccttgcttaaagcagtgactagataaaggccactagaagagtctccaacgttcctttagaagcatgtgtctgagaacatcttcctgaaacactcccttgtctctgcccaaaatcaccttaggtaggaaaatcacaactcagcaggctgaggggatccaaggggatcattgagctctgaggcttatgagagaagagagagaggtctaagactttttgtgtataaatttatgggttccaagtgcaattttgctgtaagcacggatggcatagtggtgaagtcagggcttttagggtatccatcactggaataatgcacattgtacccattaagtaatttctcactgttcacctcttccatcccctcaccctgctgagtctccattatcattccactctctacatcaatacctacacatcttttagcacccgcttatgaktgataaaatacgatgtttactctgtgtctggtttgtttcacttataacaatggcctccagttccatccatgtgtctgcaaaaattatgattctattgttttttacgcctgaatagtatttcattgtgtatattttctacattttctttctccaattatttgttgatggacattaggttgattttatatctgtgctactgtgaatagtgttgcaacaaatataaaagtacagttatatttctgatacattgatttttttttcctttgcaaaaatactcagcggtgggattgctgaatcagacagagccaattgatgatcagtaatggtggccaataatcagctggaaacaaagtacttagcagggcttgaaaacaccaaaactctgagaccactgaccttcaaaaacttcaacagccctgagtgaaaagtccaaacacatttatctaccattcaaagaccctttattgtctgtcctctgcgcatctcagtagtctctttttaccacactgtctatatactgcatgagccatttatatgaaactatctgacactccaaggcatcttatactatatattcaatcatgtatccctagtaattagcacagtcctggcatatagtttgctactaaacttttgcagaatgaaggaattatcttgtatccaggttccaagttttaaggtgattcttcacaaaaaaaaagtattacagctcacaaataatctacttccttttttagaaatgggattgattttaatcttataccctaataacattactttcatttactcctatctaaatatactgtcctaagagagcaataagaaagagagttgaagctggagcttgaagaattgtacatggtcctgtgataccctaccttgttttaacctgagtgactctctcctagtggagggagagccggacagaccccattttagtttcttcacatgcagccccctttatctcccttccttaagggcataactagtgtaaactgactcaaagcacatccaggaatgtggttactattaagatattgaggcaagctgcaccagcagctcctggggacgcactcggtgaatggcacccaaaacccctgtatttctctctttgtgatagtttaagcccctgcacctggaatgtttttttttttgtaactgcttttgtaaccgattaatttttttaactttttgccagctctgcttctgtaaaaattgcttcagctaaactcccccctcccctatttagaccacggtataaaaacaaaaccagccccttcctcggggcccagagaattttgagcgttagctgcctctcggtcgctggctaataaaggactccttaatttgtctcaaaaggtggcgttcctctataactcgcttggttacaacagtccacactgtggcctgaggtgcatcacccacctgagcttcatctgttaggtatgtcagggaaggtaagcagggtgagagaggcctcatcagaggaccccagatctctggcttccccatctgacaagtgcacctctgtgaacaaagacttcagagccagatgacaagaatggcccaagcagtccaccagggaaacctgggcccagtgtacatcaatgcagagcatcaagcacggtgtaacaggtgcacagttgcctattcctgttcagagatgactgcgtcccacacactgtaaaatgaggaaatgcagagaagcagatgtaactgaagaagacagcaggaacaacaaggagggacaaccatgacctaggagggcaccatgccagagacgcctggaccctacgctagggtcagtgcttgttatactcttgggacccagagctttccttctccatcatgtggcatacttggcattatttgttgtttaaaatattgtccttagtttttacctttcctaggagacacaggcagaccctgtgacactacagggtctggcacacagtaggtgcatcacaaacatctgccgacttcacactctgttgccttctcaagccttcttgtcaagtcttcagtgaaaaggaattgctgattgagcaagaattaaacttctagagactcctgga

SEQ ID NO: 85696 - DNA, 3203 bp, Homo sapiens
ggcagcagccttgtctccaccattccttcaatgctcagtacgtaacacagaagctgactccataacatttagttggccaactgagactaaatgtatgttcctctagatcttaaaaagttacagaaacatagcacaatagtcaaaaaaattgtctttagtcaggagttctccatatatgtacaacagtttgaagtcattattaagcaaaatgaaacagaaactgtcacagaattccctaagataaattattttgctttaatcttcaattcatcatgtgaaataatcaagaccatgtgttattgtaaatatttctagcttacaacacaacaacctgatttttactgtttgaaataaccataatataaatcagttaattaaaaattgcataaataatcctttcaaataaaattctgcctaaattttacattactcatatgttcaaatgataatgagctcataggattttccaatacctcagtcaaaacattgtactgattccagctgtgggaatagtacctgaaagttatcttacagatggggaaaaggtacctatgtgacattggcctttgcactactgtacccttttgggtcaggaaaaagctgttcccttaaagtcctaaaatctcttctgtcaggtctaaagggtgggtgggaaacatagtttttaaattttagccacagatgttttattccttgcttaaagcagtgactagataaaggccactagaagagtctccaacgttcctttagaagcatgtgtctgagaacatcttcctgaaacactcccttgtctctgcccaaaatcaccttaggtaggaaaatcacaactcagcaggctgaggggatccaaggggatcattgagctctgaggcttatgagagaagagagagaggtctaagactttttgtgtataaatttatgggttccaagtgcaattttgctgtaagcacggatggcatagtggtgaagtcagggcttttagggtatccatcactggaataatgcacattgtacccattaagtaatttctcactgttcacctcttccatcccctcaccctgctgagtctccattatcattccactctctacatcaatacctacacatcttttagcacccgcttatgagtgataaaatacgatgtttactctgtgtctggtttgtttcacttayaacaatggcctccagttccatccatgtgtctgcaaaaattatgattctattgttttttacgcctgaatagtatttcattgtgtatattttctacattttctttctccaattatttgttgatggacattaggttgattttatatctgtgctactgtgaatagtgttgcaacaaatataaaagtacagttatatttctgatacattgatttttttttcctttgcaaaaatactcagcggtgggattgctgaatcagacagagccaattgatgatcagtaatggtggccaataatcagctggaaacaaagtacttagcagggcttgaaaacaccaaaactctgagaccactgaccttcaaaaacttcaacagccctgagtgaaaagtccaaacacatttatctaccattcaaagaccctttattgtctgtcctctgcgcatctcagtagtctctttttaccacactgtctatatactgcatgagccatttatatgaaactatctgacactccaaggcatcttatactatatattcaatcatgtatccctagtaattagcacagtcctggcatatagtttgctactaaacttttgcagaatgaaggaattatcttgtatccaggttccaagttttaaggtgattcttcacaaaaaaaaagtattacagctcacaaataatctacttccttttttagaaatgggattgattttaatcttataccctaataacattactttcatttactcctatctaaatatactgtcctaagagagcaataagaaagagagttgaagctggagcttgaagaattgtacatggtcctgtgataccctaccttgttttaacctgagtgactctctcctagtggagggagagccggacagaccccattttagtttcttcacatgcagccccctttatctcccttccttaagggcataactagtgtaaactgactcaaagcacatccaggaatgtggttactattaagatattgaggcaagctgcaccagcagctcctggggacgcactcggtgaatggcacccaaaacccctgtatttctctctttgtgatagtttaagcccctgcacctggaatgtttttttttttgtaactgcttttgtaaccgattaatttttttaactttttgccagctctgcttctgtaaaaattgcttcagctaaactcccccctcccctatttagaccacggtataaaaacaaaaccagccccttcctcggggcccagagaattttgagcgttagctgcctctcggtcgctggctaataaaggactccttaatttgtctcaaaaggtggcgttcctctataactcgcttggttacaacagtccacactgtggcctgaggtgcatcacccacctgagcttcatctgttaggtatgtcagggaaggtaagcagggtgagagaggcctcatcagaggaccccagatctctggcttccccatctgacaagtgcacctctgtgaacaaagacttcagagccagatgacaagaatggcccaagcagtccaccagggaaacctgggcccagtgtacatcaatgcagagcatcaagcacggtgtaacaggtgcacagttgcctattcctgttcagagatgactgcgtcccacacactgtaaaatgaggaaatgcagagaagcagatgtaactgaagaagacagcaggaacaacaaggagggacaaccatgacctaggagggcaccatgccagagacgcctggaccctacgctagggtcagtgcttgttatactcttgggacccagagctttccttctccatcatgtggcatacttggcattatttgttgtttaaaatattgtccttagtttttacctttcctaggagacacaggcagaccctgtgacactacagggtctggcacacagtaggtgcatcacaaacatctgccgacttcacactctgttgccttctcaagccttcttgtcaagtcttcagtgaaaaggaattgctgattgagcaagaattaaacttctagagactcctgga

SEQ ID NO: 85697 - DNA, 3203 bp, Homo sapiens
ggcagcagccttgtctccaccattccttcaatgctcagtacgtaacacagaagctgactccataacatttagttggccaactgagactaaatgtatgttcctctagatcttaaaaagttacagaaacatagcacaatagtcaaaaaaattgtctttagtcaggagttctccatatatgtacaacagtttgaagtcattattaagcaaaatgaaacagaaactgtcacagaattccctaagataaattattttgctttaatcttcaattcatcatgtgaaataatcaagaccatgtgttattgtaaatatttctagcttacaacacaacaacctgatttttactgtttgaaataaccataatataaatcagttaattaaaaattgcataaataatcctttcaaataaaattctgcctaaattttacattactcatatgttcaaatgataatgagctcataggattttccaatacctcagtcaaaacattgtactgattccagctgtgggaatagtacctgaaagttatcttacagatggggaaaaggtacctatgtgacattggcctttgcactactgtacccttttgggtcaggaaaaagctgttcccttaaagtcctaaaatctcttctgtcaggtctaaagggtgggtgggaaacatagtttttaaattttagccacagatgttttattccttgcttaaagcagtgactagataaaggccactagaagagtctccaacgttcctttagaagcatgtgtctgagaacatcttcctgaaacactcccttgtctctgcccaaaatcaccttaggtaggaaaatcacaactcagcaggctgaggggatccaaggggatcattgagctctgaggcttatgagagaagagagagaggtctaagactttttgtgtataaatttatgggttccaagtgcaattttgctgtaagcacggatggcatagtggtgaagtcagggcttttagggtatccatcactggaataatgcacattgtacccattaagtaatttctcactgttcacctcttccatcccctcaccctgctgagtctccattatcattccactctctacatcaatacctacacatcttttagcacccgcttatgagtgataaaatacgatgtttactctgtgtctggtttgtttcacttataacaatggcctccagttccatccatgtgtctgcaaaaattatgattctattgttttttacgcctgaatagtatttcattgtgtatattttctacattttctttctccaatyatttgttgatggacattaggttgattttatatctgtgctactgtgaatagtgttgcaacaaatataaaagtacagttatatttctgatacattgatttttttttcctttgcaaaaatactcagcggtgggattgctgaatcagacagagccaattgatgatcagtaatggtggccaataatcagctggaaacaaagtacttagcagggcttgaaaacaccaaaactctgagaccactgaccttcaaaaacttcaacagccctgagtgaaaagtccaaacacatttatctaccattcaaagaccctttattgtctgtcctctgcgcatctcagtagtctctttttaccacactgtctatatactgcatgagccatttatatgaaactatctgacactccaaggcatcttatactatatattcaatcatgtatccctagtaattagcacagtcctggcatatagtttgctactaaacttttgcagaatgaaggaattatcttgtatccaggttccaagttttaaggtgattcttcacaaaaaaaaagtattacagctcacaaataatctacttccttttttagaaatgggattgattttaatcttataccctaataacattactttcatttactcctatctaaatatactgtcctaagagagcaataagaaagagagttgaagctggagcttgaagaattgtacatggtcctgtgataccctaccttgttttaacctgagtgactctctcctagtggagggagagccggacagaccccattttagtttcttcacatgcagccccctttatctcccttccttaagggcataactagtgtaaactgactcaaagcacatccaggaatgtggttactattaagatattgaggcaagctgcaccagcagctcctggggacgcactcggtgaatggcacccaaaacccctgtatttctctctttgtgatagtttaagcccctgcacctggaatgtttttttttttgtaactgcttttgtaaccgattaatttttttaactttttgccagctctgcttctgtaaaaattgcttcagctaaactcccccctcccctatttagaccacggtataaaaacaaaaccagccccttcctcggggcccagagaattttgagcgttagctgcctctcggtcgctggctaataaaggactccttaatttgtctcaaaaggtggcgttcctctataactcgcttggttacaacagtccacactgtggcctgaggtgcatcacccacctgagcttcatctgttaggtatgtcagggaaggtaagcagggtgagagaggcctcatcagaggaccccagatctctggcttccccatctgacaagtgcacctctgtgaacaaagacttcagagccagatgacaagaatggcccaagcagtccaccagggaaacctgggcccagtgtacatcaatgcagagcatcaagcacggtgtaacaggtgcacagttgcctattcctgttcagagatgactgcgtcccacacactgtaaaatgaggaaatgcagagaagcagatgtaactgaagaagacagcaggaacaacaaggagggacaaccatgacctaggagggcaccatgccagagacgcctggaccctacgctagggtcagtgcttgttatactcttgggacccagagctttccttctccatcatgtggcatacttggcattatttgttgtttaaaatattgtccttagtttttacctttcctaggagacacaggcagaccctgtgacactacagggtctggcacacagtaggtgcatcacaaacatctgccgacttcacactctgttgccttctcaagccttcttgtcaagtcttcagtgaaaaggaattgctgattgagcaagaattaaacttctagagactcctgga

SEQ ID NO: 85698 - DNA, 3203 bp, Homo sapiens
ggcagcagccttgtctccaccattccttcaatgctcagtacgtaacacagaagctgactccataacatttagttggccaactgagactaaatgtatgttcctctagatcttaaaaagttacagaaacatagcacaatagtcaaaaaaattgtctttagtcaggagttctccatatatgtacaacagtttgaagtcattattaagcaaaatgaaacagaaactgtcacagaattccctaagataaattattttgctttaatcttcaattcatcatgtgaaataatcaagaccatgtgttattgtaaatatttctagcttacaacacaacaacctgatttttactgtttgaaataaccataatataaatcagttaattaaaaattgcataaataatcctttcaaataaaattctgcctaaattttacattactcatatgttcaaatgataatgagctcataggattttccaatacctcagtcaaaacattgtactgattccagctgtgggaatagtacctgaaagttatcttacagatggggaaaaggtacctatgtgacattggcctttgcactactgtacccttttgggtcaggaaaaagctgttcccttaaagtcctaaaatctcttctgtcaggtctaaagggtgggtgggaaacatagtttttaaattttagccacagatgttttattccttgcttaaagcagtgactagataaaggccactagaagagtctccaacgttcctttagaagcatgtgtctgagaacatcttcctgaaacactcccttgtctctgcccaaaatcaccttaggtaggaaaatcacaactcagcaggctgaggggatccaaggggatcattgagctctgaggcttatgagagaagagagagaggtctaagactttttgtgtataaatttatgggttccaagtgcaattttgctgtaagcacggatggcatagtggtgaagtcagggcttttagggtatccatcactggaataatgcacattgtacccattaagtaatttctcactgttcacctcttccatcccctcaccctgctgagtctccattatcattccactctctacatcaatacctacacatcttttagcacccgcttatgagtgataaaatacgatgtttactctgtgtctggtttgtttcacttataacaatggcctccagttccatccatgtgtctgcaaaaattatgattctattgttttttacgcctgaatagtatttcattgtgtatattttctacattttctttctccaattatttgttgatggacattaggttgattttatatctgtgctactgtgaatagtgttgcaacaaatataaaagtacagttatatttctgatacattgatttttttttcctttgcaaaaatactcagcggtgggattgctgaatcagacagagccaattgatgatcagtaatggtggccaataatcagctggaaacaaagtacttagcagggcttgaaaacaccaaaactctgagaccactgaccttcaaaaacttcaacagccctgagtgaaaagtccaaacacatttatctaccattcaaagaccctttattgtctgtcctctgcgcatctcagtagtctctttttaccacactgtctatatactgcatgagccatttatatgaaactatctgacactccaaggcatcttatactatatattcaatcatgtatccctagtaattagcacagtcctggcatatagtttgctactaaacttttgcagaatgaaggaattatcttgtatccaggttccaagttttaaggtgattcttcacaaaaaaaaagtattacagctcacaaataatctacttccttttttagaaatgggattgattttaatcttataccctaataacattactttcatttactcctatctaaatatactgtcctaagagagcaataagaaagagagttgaagctggagcttgaagaattgtacatggtcctgtgataccctaccttgttttaacctgagtgactctctcctagtggagggagagccggacagaccccattttagtttcttcacatgcagccccctttatctcccttccttaagggcataactagtgtaaactgactcaaagcacatccaggaatgtggttactattaagatattgaggcaagctgcaccagcagctcctggggacgcactcggtgaatggcacccaaaacccctgtatttctctctttgtgatagtttaagcccctgcacctggaatgtttttttttttgtaactgcttttgtaaccgattaatttttttaactttttgccagctctgcttctgtaaaaattgcttcagctaaactcccccctcccctatttagaccacggtataaaaacaaaaccagccccttcctcggggcccagagaattttgagcgttagctgcctctcggtcgctggctaataaaggactccttaatttgtctcaaaaggtggcgttcctctataactcgcttggttacaacagtccacactgtggcctgaggtgcatcacccacctgagcttcatctgttaggtatgtcagggaaggtaagcagggtgagagaggcctcatcagaggaccccagatctctggcttccccatctgacaagtgcacctctgtgaacaaagacttcagagccagatgacaagaatggcccaarcagtccaccagggaaacctgggcccagtgtacatcaatgcagagcatcaagcacggtgtaacaggtgcacagttgcctattcctgttcagagatgactgcgtcccacacactgtaaaatgaggaaatgcagagaagcagatgtaactgaagaagacagcaggaacaacaaggagggacaaccatgacctaggagggcaccatgccagagacgcctggaccctacgctagggtcagtgcttgttatactcttgggacccagagctttccttctccatcatgtggcatacttggcattatttgttgtttaaaatattgtccttagtttttacctttcctaggagacacaggcagaccctgtgacactacagggtctggcacacagtaggtgcatcacaaacatctgccgacttcacactctgttgccttctcaagccttcttgtcaagtcttcagtgaaaaggaattgctgattgagcaagaattaaacttctagagactcctgga

SEQ ID NO: 85699 - DNA, 3203 bp, Homo sapiens
ggcagcagccttgtctccaccattccttcaatgctcagtacgtaacacagaagctgactccataacatttagttggccaactgagactaaatgtatgttcctctagatcttaaaaagttacagaaacatagcacaatagtcaaaaaaattgtctttagtcaggagttctccatatatgtacaacagtttgaagtcattattaagcaaaatgaaacagaaactgtcacagaattccctaagataaattattttgctttaatcttcaattcatcatgtgaaataatcaagaccatgtgttattgtaaatatttctagcttacaacacaacaacctgatttttactgtttgaaataaccataatataaatcagttaattaaaaattgcataaataatcctttcaaataaaattctgcctaaattttacattactcatatgttcaaatgataatgagctcataggattttccaatacctcagtcaaaacattgtactgattccagctgtgggaatagtacctgaaagttatcttacagatggggaaaaggtacctatgtgacattggcctttgcactactgtacccttttgggtcaggaaaaagctgttcccttaaagtcctaaaatctcttctgtcaggtctaaagggtgggtgggaaacatagtttttaaattttagccacagatgttttattccttgcttaaagcagtgactagataaaggccactagaagagtctccaacgttcctttagaagcatgtgtctgagaacatcttcctgaaacactcccttgtctctgcccaaaatcaccttaggtaggaaaatcacaactcagcaggctgaggggatccaaggggatcattgagctctgaggcttatgagagaagagagagaggtctaagactttttgtgtataaatttatgggttccaagtgcaattttgctgtaagcacggatggcatagtggtgaagtcagggcttttagggtatccatcactggaataatgcacattgtacccattaagtaatttctcactgttcacctcttccatcccctcaccctgctgagtctccattatcattccactctctacatcaatacctacacatcttttagcacccgcttatgagtgataaaatacgatgtttactctgtgtctggtttgtttcacttataacaatggcctccagttccatccatgtgtctgcaaaaattatgattctattgttttttacgcctgaatagtatttcattgtgtatattttctacattttctttctccaattatttgttgatggacattaggttgattttatatctgtgctactgtgaatagtgttgcaacaaatataaaagtacagttatatttctgatacattgatttttttttcctttgcaaaaatactcagcggtgggattgctgaatcagacagagccaattgatgatcagtaatggtggccaataatcagctggaaacaaagtacttagcagggcttgaaaacaccaaaactctgagaccactgaccttcaaaaacttcaacagccctgagtgaaaagtccaaacacatttatctaccattcaaagaccctttattgtctgtcctctgcgcatctcagtagtctctttttaccacactgtctatatactgcatgagccatttatatgaaactatctgacactccaaggcatcttatactatatattcaatcatgtatccctagtaattagcacagtcctggcatatagtttgctactaaacttttgcagaatgaaggaattatcttgtatccaggttccaagttttaaggtgattcttcacaaaaaaaaagtattacagctcacaaataatctacttccttttttagaaatgggattgattttaatcttataccctaataacattactttcatttactcctatctaaatatactgtcctaagagagcaataagaaagagagttgaagctggagcttgaagaattgtacatggtcctgtgataccctaccttgttttaacctgagtgactctctcctagtggagggagagccggacagaccccattttagtttcttcacatgcagccccctttatctcccttccttaagggcataactagtgtaaactgactcaaagcacatccaggaatgtggttactattaagatattgaggcaagctgcaccagcagctcctggggacgcactcggtgaatggcacccaaaacccctgtatttctctctttgtgatagtttaagcccctgcacctggaatgtttttttttttgtaactgcttttgtaaccgattaatttttttaactttttgccagctctgcttctgtaaaaattgcttcagctaaactcccccctcccctatttagaccacggtataaaaacaaaaccagccccttcctcggggcccagagaattttgagcgttagctgcctctcggtcgctggctaataaaggactccttaatttgtctcaaaaggtggcgttcctctataactcgcttggttacaacagtccacactgtggcctgaggtgcatcacccacctgagcttcatctgttaggtatgtcagggaaggtaagcagggtgagagaggcctcatcagaggaccccagatctctggcttccccatctgacaagtgcacctctgtgaacaaagacttcagagccagatgacaagaatggcccaagcagtccaccagggaaacctgggcccagtgtacatcaatgcagagcatcaagcacggtgtaacaggtgcacagttgcctattcctgttcagagatgactgcgtcccacacactgtaaaatgaggaaatgcagagaagcagatgtaactgaagaagacagcaggaacaacaaggagggacaaccatgacctaggagggcaccatgccagagacgcctggrccctacgctagggtcagtgcttgttatactcttgggacccagagctttccttctccatcatgtggcatacttggcattatttgttgtttaaaatattgtccttagtttttacctttcctaggagacacaggcagaccctgtgacactacagggtctggcacacagtaggtgcatcacaaacatctgccgacttcacactctgttgccttctcaagccttcttgtcaagtcttcagtgaaaaggaattgctgattgagcaagaattaaacttctagagactcctgga

SEQ ID NO: 85700 - DNA, 743 bp, Homo sapiens
caatggttatctttaggtagcagaattcaagactgcttcttttttcttttcttcctacttgtatgttatctctatttccctgtgtgaggatttatgactgttgtgatgaaaaggctagtattctaactccctgcatcataagcacacaccgtgccctggctggcaggatggggaggagggagcrtgtctgttcacctggccagccctaggcaactctgcagagaaagacacaggcacttcccctctgcagccaaagagttaagaaggctcgatgtgaaatgaatcattccaggggagctaaatcccgaccttatctaattctgtatcctgaggctgattaatttaaactcaaaaataaaataaacatcatctttaaatagggattaaatactcagcggggtccttagttgaacaaactgacatacactttatgttatggattcaaggggcccagggtggggcgagggctatctgtggggatgctagctgagctaatcagagaaaatcgccagtgctcctggattccggagtgcattcacctttagcttcttctctggatacccacagaaaaccaaagagccaccctgtggcaggatcttcacacaggaagtgggcttgtgccctgtgtccccgagggagaaagaattatggagggagtgggtgaagagtttggaggaaacccctgatgttcttagaaaacagtaggaaagagattcccttggctgggcattgttcccaaatag

SEQ ID NO: 85701 - DNA, 743 bp, Homo sapiens
caatggttatctttaggtagcagaattcaagactgcttcttttttcttttcttcctacttgtatgttatctctatttccctgtgtgaggatttatgactgttgtgatgaaaaggctagtattctaactccctgcatcataagcacacaccgtgccctggctggcaggatggggaggagggagcgtgtctgttcacctggccagccctaggcaactctgcagagaaagacacaggcacttcccctctgcagccaaagagttaagaaggctcgatgtgaaatgaatcattccaggggagctaaatcccgaccttatctaattctgtatcctgaggctgattaatttaaactcaaaaataaaataaacatcatctttaaatagggattaaatactcagcggggtccttagttgaacaaactgacatacrctttatgttatggattcaaggggcccagggtggggcgagggctatctgtggggatgctagctgagctaatcagagaaaatcgccagtgctcctggattccggagtgcattcacctttagcttcttctctggatacccacagaaaaccaaagagccaccctgtggcaggatcttcacacaggaagtgggcttgtgccctgtgtccccgagggagaaagaattatggagggagtgggtgaagagtttggaggaaacccctgatgttcttagaaaacagtaggaaagagattcccttggctgggcattgttcccaaatag

SEQ ID NO: 85702 - DNA, 743 bp, Homo sapiens
caatggttatctttaggtagcagaattcaagactgcttcttttttcttttcttcctacttgtatgttatctctatttccctgtgtgaggatttatgactgttgtgatgaaaaggctagtattctaactccctgcatcataagcacacaccgtgccctggctggcaggatggggaggagggagcgtgtctgttcacctggccagccctaggcaactctgcagagaaagacacaggcacttcccctctgcagccaaagagttaagaaggctcgatgtgaaatgaatcattccaggggagctaaatcccgaccttatctaattctgtatcctgaggctgattaatttaaactcaaaaataaaataaacatcatctttaaatagggattaaatactcagcggggtccttagttgaacaaactgacatacactttatgktatggattcaaggggcccagggtggggcgagggctatctgtggggatgctagctgagctaatcagagaaaatcgccagtgctcctggattccggagtgcattcacctttagcttcttctctggatacccacagaaaaccaaagagccaccctgtggcaggatcttcacacaggaagtgggcttgtgccctgtgtccccgagggagaaagaattatggagggagtgggtgaagagtttggaggaaacccctgatgttcttagaaaacagtaggaaagagattcccttggctgggcattgttcccaaatag

SEQ ID NO: 85703 - DNA, 743 bp, Homo sapiens
caatggttatctttaggtagcagaattcaagactgcttcttttttcttttcttcctacttgtatgttatctctatttccctgtgtgaggatttatgactgttgtgatgaaaaggctagtattctaactccctgcatcataagcacacaccgtgccctggctggcaggatggggaggagggagcgtgtctgttcacctggccagccctaggcaactctgcagagaaagacacaggcacttcccctctgcagccaaagagttaagaaggctcgatgtgaaatgaatcattccaggggagctaaatcccgaccttatctaattctgtatcctgaggctgattaatttaaactcaaaaataaaataaacatcatctttaaatagggattaaatactcagcggggtccttagttgaacaaactgacatacactttatgttatggattcaaggggcccagggtggggcgagggctatctgtggggatgctagctgagctaatsagagaaaatcgccagtgctcctggattccggagtgcattcacctttagcttcttctctggatacccacagaaaaccaaagagccaccctgtggcaggatcttcacacaggaagtgggcttgtgccctgtgtccccgagggagaaagaattatggagggagtgggtgaagagtttggaggaaacccctgatgttcttagaaaacagtaggaaagagattcccttggctgggcattgttcccaaatag

SEQ ID NO: 85704 - DNA, 796 bp, Homo sapiens
agcatttgtgaaaatcacagaagatcatatgagaaggcaccattttaatgaaagaacaagaaacctgaaattcaataacaaagcctgaaggctagaaaaggttatgaaatagcccatgataagcacaggtggaaaattgacacaaagagttttctgctatgccaaataaattttgttgtctttgtgtgtgtgtatgctgcgtatcttaaaaccataacattttcactgacattgaatcatcctcctcagtaactgagggaaactyccttgggaacccaccttaaattttaccatctttggcagcttttgaaatgactctatcttcaaattcttgaatttccacattctcttctctgactttacctttgattattttgctctcagtaaatctgcatctcagtcttcctcttctcagttctatcctagtgtaccagcccattaacccctgtttgattttatttggctctcttcctccatggggctacacgtaagcctcatgctcattgtagtccctgtctctcttcaacactggtatcttaccacctctccataacttcccactatttctttcttgccaatcatcaaccctgtgtaatatctactgtcttattttctttgacgctagaaatcaaggccctgatggtcaaaggcattaaacaatctatgggtttgccataagtgcattatgtggtttattattttgcagatatttaatgtggtacatgataaaatgttactttttctactaatcttatttatgtagccgaaaatctagaaaaatgtttttcttattact

SEQ ID NO: 85705 - DNA, 768 bp, Homo sapiens
ccaaaagaagcagtccttcagtaaaggctgtggagtgaacatttccccagaagagcccttgttcatggctgatgtggtcaatatcacatagctgtcttattctcatccctggtcctttacacatcatctatagctgatgtggaaactcagagcttctggatggagaaagattataatcatgattcagtgacctaagaaaaggcctccttttattaatctatattttatagagtttatatataaaaatataaatgtatttttatatatatgtatttcatatattggaggagcacaaagtctatggttattgtacagcaaaatatctttagctttgccttttaaccaaatttggagaataaataaaaagctttaataattaattttcagatgatatccaagctgggaggcattagcattttatttgtgacctcaatggcaaagtagattttggtgaggttatatatatattctaggaaaaatgaaatgatgtttaacttaaaatataaatattagaacatcttaagaattgaaatatcaaacagacattcactggaagaaataatcttaaraagcagttatattacttaaaaaacaaaacttgacctctcctacaaattggagagtaaacttacaacatttagggtaatgcaaatctcatgtagtttcagtttgcacaggcctaggctctgtttcatggattagtgaactcacaaagcattggtaagaccatggtaaaaattctgaatgagaagacacaagaggtccagg

SEQ ID NO: 85706 - DNA, 2805 bp, Homo sapiens
aacaaatgctatttcagcagatgatgactttacccaggagggaaacagcaagtcaggcgaggggcagtatccacttgcttagtgaccccagacatgatagggaagaacctaagagtgggaaaaatattatctttgcccaggttgggatggcttacacaataggaacttccacaaacatctctgtgctcttgagacagtattggcaaataatcctgttttccaagggatcccatctgtagaaccgatgtgaaagtttccatctgaagttatgctatgtgaggctctgtaaccacctctcttgttcctccctttggaagaagggtttattaaattcagagaataccaatggtttgagctctgctcctgggtaggtttttatgtcaaaggtcactcccacagcagagtggcctccctctttgattttctctagtaggcacccaggtattgcatctcttctacccagtgagcacctggggtagaccttgtccttcagtgtgggttgtggaagtggcagtagggggaggtcagttgttgtcctgctgttttgtctattactgaaagagtcagctatttcacagggcataaaatgcattgagaagtagaaagtcctcatacagtgtgcagtcacctgctccttaaatagaaatgttgatggaatgtgagaactcaagatatccacaatacaggctacacaataagatattgcctttttattgctagcgtaaaaaacccaactcagtatgccaaacctgtctcatgagctttgttttattcagtgactaaagttatcactgaagttcccatttccaaattatacaaatcaaatacatagctcatcctaaaatgcacaccattttactgcatgatgctctgcctccttcagtcatgttatttgctgattactgcacaaaagtacaaagaaaaacgtctgcttctgagctcacagccatttctcccaattctgaaaatatgctaatgtcaacagcaaacttcaaactcaaaagggatcatttctaattgttttaagacatggcagcgtttgtaaacaagagaagccagataaatatggccaaatactttttcatgttgagaacatatatttgtagaaagaaacattttggagacaatgttcaaatcattaatttatgcactccacaaatatttattgaacacctactgatgtcaggcactgttatgtattgaaattgcagtggtgagtaaggcagacgagactactgtccaaaattattacactgtggatagatcaaaaataaatcataagtgaataaatgtatactgtttcagaagtgtgtaggaaatgactgggatatttagtgtagaagtgttgtatgtgcggtggaggaggcatagggaaagaaacagaaagagaatgaaagaaatcagacatgaatatacatacctgattctgtggctataaaagaccgtaataggcaaagctaatagtgatgtgggaagtctgactagtgttaatccttggaaacaatggatgtggcaatgactgggaggggtttgagagatgtgacattcaatttattagtatgactgttggtcacatgggtgattgatttgtgataattcatcaagctggatgattacaatttgcataattttgtgtatgcatgtactttttcaataaaaactttagttaaaacaaaatgagagtccgggcgtggtggctcacatctgtagtcccrgcactttgggaggccaaggcgagtagatcacctgaggtcaggagttaaagaccagcctggccaacatggtgaaacactgtctctactaaaaatacaaaaaactagccaggtgtggtggtgcatgtctgtaatcctagctactctggagctgaggcaggagaattgcttgaacctgggaggcggaggttgcagtgagccgagactgggccactgcactctagcctgggcgacagagtgagactctgcctcaaaaaaaaaaaaaaaaagaaagaaagaaggaaataaaaactcctacagtctgcttgtctggtagctgcagcacaaagacctggatgagatgtcttttggtattggtttatgtattttgattgaagcaaaacaaataaataaaaaaaaatacctccagaaaaattgcattctatgtggcttttaagcataaaaagaaatttgttgaaagtatcatgagtataaatctcagttcacaaacatatatatatatatatatgtgccagaaatattatttccctttctaaaactcatttcttttctatttcaacccccatcccacagcagttatcccttagctgtaccgcctttcactcagacttacatatggatctaagggaagaggacctcagtggcctgcagtgtggctctgtcctcagggccctctgctcacaccaacatctgtggagaggtccaggccagtggttgttctgttgtctctgtagacttttcagacccaggagctgtcgcctcttcagtatcattccttgctcggctgcacaccagtgcattgtttctcctcctatggtgtaccaaggtaccaggatctcagtgagactctaatgtttttctgtctagtcacctgcacagtcattcttctggagtcctatgactcttccaaggaaagagaaaaccatttctctgttttcagatcctacaaacaaaattgggagtttcatcaccgcaatctaggatcaattttgggtggtacaggagtggtggtaaatgtgtgtgtgtgtgtgtacacaagtgcatgtatatctgtgtgaacatgtgcatggatttgtgtgtgcatgtgcatgca

SEQ ID NO: 85707 - DNA, 2805 bp, Homo sapiens
aacaaatgctatttcagcagatgatgactttacccaggagggaaacagcaagtcaggcgaggggcagtatccacttgcttagtgaccccagacatgatagggaagaacctaagagtgggaaaaatattatctttgcccaggttgggatggcttacacaataggaacttccacaaacatctctgtgctcttgagacagtattggcaaataatcctgttttccaagggatcccatctgtagaaccgatgtgaaagtttccatctgaagttatgctatgtgaggctctgtaaccacctctcttgttcctccctttggaagaagggtttattaaattcagagaataccaatggtttgagctctgctcctgggtaggtttttatgtcaaaggtcactcccacagcagagtggcctccctctttgattttctctagtaggcacccaggtattgcatctcttctacccagtgagcacctggggtagaccttgtccttcagtgtgggttgtggaagtggcagtagggggaggtcagttgttgtcctgctgttttgtctattactgaaagagtcagctatttcacagggcataaaatgcattgagaagtagaaagtcctcatacagtgtgcagtcacctgctccttaaatagaaatgttgatggaatgtgagaactcaagatatccacaatacaggctacacaataagatattgcctttttattgctagcgtaaaaaacccaactcagtatgccaaacctgtctcatgagctttgttttattcagtgactaaagttatcactgaagttcccatttccaaattatacaaatcaaatacatagctcatcctaaaatgcacaccattttactgcatgatgctctgcctccttcagtcatgttatttgctgattactgcacaaaagtacaaagaaaaacgtctgcttctgagctcacagccatttctcccaattctgaaaatatgctaatgtcaacagcaaacttcaaactcaaaagggatcatttctaattgttttaagacatggcagcgtttgtaaacaagagaagccagataaatatggccaaatactttttcatgttgagaacatatatttgtagaaagaaacattttggagacaatgttcaaatcattaatttatgcactccacaaatatttattgaacacctactgatgtcaggcactgttatgtattgaaattgcagtggtgagtaaggcagacgagactactgtccaaaattattacactgtggatagatcaaaaataaatcataagtgaataaatgtatactgtttcagaagtgtgtaggaaatgactgggatatttagtgtagaagtgttgtatgtgcggtggaggaggcatagggaaagaaacagaaagagaatgaaagaaatcagacatgaatatacatacctgattctgtggctataaaagaccgtaataggcaaagctaatagtgatgtgggaagtctgactagtgttaatccttggaaacaatggatgtggcaatgactgggaggggtttgagagatgtgacattcaatttattagtatgactgttggtcacatgggtgattgatttgtgataattcatcaagctggatgattacaatttgcataattttgtgtatgcatgtactttttcaataaaaactttagttaaaacaaaatgagagtccgggcgtggtggctcacatctgtagtcccagcactttgggaggccaaggcgagtagatcacctgaggtcaggagttaaagaccagcctggccaacatggtgaaacactgtctctactaaaaatacaaaaaactagccaggtgtggtrgtgcatgtctgtaatcctagctactctggagctgaggcaggagaattgcttgaacctgggaggcggaggttgcagtgagccgagactgggccactgcactctagcctgggcgacagagtgagactctgcctcaaaaaaaaaaaaaaaaagaaagaaagaaggaaataaaaactcctacagtctgcttgtctggtagctgcagcacaaagacctggatgagatgtcttttggtattggtttatgtattttgattgaagcaaaacaaataaataaaaaaaaatacctccagaaaaattgcattctatgtggcttttaagcataaaaagaaatttgttgaaagtatcatgagtataaatctcagttcacaaacatatatatatatatatatgtgccagaaatattatttccctttctaaaactcatttcttttctatttcaacccccatcccacagcagttatcccttagctgtaccgcctttcactcagacttacatatggatctaagggaagaggacctcagtggcctgcagtgtggctctgtcctcagggccctctgctcacaccaacatctgtggagaggtccaggccagtggttgttctgttgtctctgtagacttttcagacccaggagctgtcgcctcttcagtatcattccttgctcggctgcacaccagtgcattgtttctcctcctatggtgtaccaaggtaccaggatctcagtgagactctaatgtttttctgtctagtcacctgcacagtcattcttctggagtcctatgactcttccaaggaaagagaaaaccatttctctgttttcagatcctacaaacaaaattgggagtttcatcaccgcaatctaggatcaattttgggtggtacaggagtggtggtaaatgtgtgtgtgtgtgtgtacacaagtgcatgtatatctgtgtgaacatgtgcatggatttgtgtgtgcatgtgcatgca

SEQ ID NO: 85708 - DNA, 2805 bp, Homo sapiens
aacaaatgctatttcagcagatgatgactttacccaggagggaaacagcaagtcaggcgaggggcagtatccacttgcttagtgaccccagacatgatagggaagaacctaagagtgggaaaaatattatctttgcccaggttgggatggcttacacaataggaacttccacaaacatctctgtgctcttgagacagtattggcaaataatcctgttttccaagggatcccatctgtagaaccgatgtgaaagtttccatctgaagttatgctatgtgaggctctgtaaccacctctcttgttcctccctttggaagaagggtttattaaattcagagaataccaatggtttgagctctgctcctgggtaggtttttatgtcaaaggtcactcccacagcagagtggcctccctctttgattttctctagtaggcacccaggtattgcatctcttctacccagtgagcacctggggtagaccttgtccttcagtgtgggttgtggaagtggcagtagggggaggtcagttgttgtcctgctgttttgtctattactgaaagagtcagctatttcacagggcataaaatgcattgagaagtagaaagtcctcatacagtgtgcagtcacctgctccttaaatagaaatgttgatggaatgtgagaactcaagatatccacaatacaggctacacaataagatattgcctttttattgctagcgtaaaaaacccaactcagtatgccaaacctgtctcatgagctttgttttattcagtgactaaagttatcactgaagttcccatttccaaattatacaaatcaaatacatagctcatcctaaaatgcacaccattttactgcatgatgctctgcctccttcagtcatgttatttgctgattactgcacaaaagtacaaagaaaaacgtctgcttctgagctcacagccatttctcccaattctgaaaatatgctaatgtcaacagcaaacttcaaactcaaaagggatcatttctaattgttttaagacatggcagcgtttgtaaacaagagaagccagataaatatggccaaatactttttcatgttgagaacatatatttgtagaaagaaacattttggagacaatgttcaaatcattaatttatgcactccacaaatatttattgaacacctactgatgtcaggcactgttatgtattgaaattgcagtggtgagtaaggcagacgagactactgtccaaaattattacactgtggatagatcaaaaataaatcataagtgaataaatgtatactgtttcagaagtgtgtaggaaatgactgggatatttagtgtagaagtgttgtatgtgcggtggaggaggcatagggaaagaaacagaaagagaatgaaagaaatcagacatgaatatacatacctgattctgtggctataaaagaccgtaataggcaaagctaatagtgatgtgggaagtctgactagtgttaatccttggaaacaatggatgtggcaatgactgggaggggtttgagagatgtgacattcaatttattagtatgactgttggtcacatgggtgattgatttgtgataattcatcaagctggatgattacaatttgcataattttgtgtatgcatgtactttttcaataaaaactttagttaaaacaaaatgagagtccgggcgtggtggctcacatctgtagtcccagcactttgggaggccaaggcgagtagatcacctgaggtcaggagttaaagaccagcctggccaacatggtgaaacactgtctctactaaaaatacaaaaaactagccaggtgtggtggtgcatgtctgtaatcctagctactctggagctgaggcagragaattgcttgaacctgggaggcggaggttgcagtgagccgagactgggccactgcactctagcctgggcgacagagtgagactctgcctcaaaaaaaaaaaaaaaaagaaagaaagaaggaaataaaaactcctacagtctgcttgtctggtagctgcagcacaaagacctggatgagatgtcttttggtattggtttatgtattttgattgaagcaaaacaaataaataaaaaaaaatacctccagaaaaattgcattctatgtggcttttaagcataaaaagaaatttgttgaaagtatcatgagtataaatctcagttcacaaacatatatatatatatatatgtgccagaaatattatttccctttctaaaactcatttcttttctatttcaacccccatcccacagcagttatcccttagctgtaccgcctttcactcagacttacatatggatctaagggaagaggacctcagtggcctgcagtgtggctctgtcctcagggccctctgctcacaccaacatctgtggagaggtccaggccagtggttgttctgttgtctctgtagacttttcagacccaggagctgtcgcctcttcagtatcattccttgctcggctgcacaccagtgcattgtttctcctcctatggtgtaccaaggtaccaggatctcagtgagactctaatgtttttctgtctagtcacctgcacagtcattcttctggagtcctatgactcttccaaggaaagagaaaaccatttctctgttttcagatcctacaaacaaaattgggagtttcatcaccgcaatctaggatcaattttgggtggtacaggagtggtggtaaatgtgtgtgtgtgtgtgtacacaagtgcatgtatatctgtgtgaacatgtgcatggatttgtgtgtgcatgtgcatgca

SEQ ID NO: 85709 - DNA, 704 bp, Homo sapiens
ggatcctggaagagaaaaacttcagttaatcatcatgtgtcaaaatcagtttattagttataacaagtgtaccatactaatataagatgttaataatcagggaatctggacttcctttgcaatttttttattctaacaccttcactctgaaataagcagcttatttttgtgtgtgagagatagtagaatatagtataggagatctgtatatatgaagacagtacatggggtaatctttacttcaggaagagtgaacaaagggatcttcagggagagtgagcagtatcactcatttaaagctttttgaatgccttgagactcccactttgtgattggagaaaagtgttcagcctccttgagctaatttaaagacaaatggtagagggataggctttcagatattatccttgttttgaacattttacaacatgtcctgttttctttggcctttctaaatttagagcttctctgagattctggaaggaggcccaagtcacatgtgcrcagttttcccaatggcacttccctttacccatgtagcttctctaccacttctgcatcagttcttcatctcctatagtattttttaaacatttcttgtctcctaatgaccctccatcctttgtgctctctctctctctctgtgtgtatgtgtgtgtcctttgtcaccatttattagtgttttaggggaagaagagataccc

SEQ ID NO: 85710 - DNA, 654 bp, Homo sapiens
aggaggaaagtcaatactgagacagaactttgatacaaacttggcaaagccaggatttgctgccagctaaaggaaaccaatyttgagagcaagcatcggggtctgcatctgtctgacaccctagagaaagatgataagttgaagcaaaataattataatcactcataaacagtttcaaatacactatagcatctttgccacatccttgataagtcaggcatcttaaactattaagttcttcttccataaaaaagaaagaaaacaaaacaatggagacattaaaaagatcagtggttgccaggggttggggtagaagaagggatgactaggggagcacagacgatgtttaatgcagtgaaagtactctgtgcgatactatggtagatacctgtcgttatacacttgtccaggtccacagaacctacaacagcaagtgtaaatcctaatgtaaactatcgattttgtatgtctatggtgtgtcattgtaggtgaatccattgtaataaatgcatcgctctggggataatgggggcagctctgcatgtgtgggcacagagagtatatgtgagtatgtgaaattgatgggaaacttaaactgctctaaaaaattgtctttaattttttaaaaattgaaaaacataaaagggcccattt

SEQ ID NO: 85711 - DNA, 654 bp, Homo sapiens
aggaggaaagtcaatactgagacagaactttgatacaaacttggcaaagccaggatttgctgccagctaaaggaaaccaatcttgagagcaagcatcrgggtctgcatctgtctgacaccctagagaaagatgataagttgaagcaaaataattataatcactcataaacagtttcaaatacactatagcatctttgccacatccttgataagtcaggcatcttaaactattaagttcttcttccataaaaaagaaagaaaacaaaacaatggagacattaaaaagatcagtggttgccaggggttggggtagaagaagggatgactaggggagcacagacgatgtttaatgcagtgaaagtactctgtgcgatactatggtagatacctgtcgttatacacttgtccaggtccacagaacctacaacagcaagtgtaaatcctaatgtaaactatcgattttgtatgtctatggtgtgtcattgtaggtgaatccattgtaataaatgcatcgctctggggataatgggggcagctctgcatgtgtgggcacagagagtatatgtgagtatgtgaaattgatgggaaacttaaactgctctaaaaaattgtctttaattttttaaaaattgaaaaacataaaagggcccattt

SEQ ID NO: 85712 - DNA, 654 bp, Homo sapiens
aggaggaaagtcaatactgagacagaactttgatacaaacttggcaaagccaggatttgctgccagctaaaggaaaccaatcttgagagcaagcatcggggtctgcatctgtctgacaccctagagaaagatgataagttgaagcaaaataattataatcactcataaacagtttcaaatacactatagcatctttgccacatccttgataagtcaggcatcttaaactattaagttcttcttccataaaaaagaaagaaaacaaaacaatggagacattaaaaagatcagtggttgccaggggttggggtagaagaagggatgactaggggagcacagacgatgtttaatgcagtgaaagtactctgtgygatactatggtagatacctgtcgttatacacttgtccaggtccacagaacctacaacagcaagtgtaaatcctaatgtaaactatcgattttgtatgtctatggtgtgtcattgtaggtgaatccattgtaataaatgcatcgctctggggataatgggggcagctctgcatgtgtgggcacagagagtatatgtgagtatgtgaaattgatgggaaacttaaactgctctaaaaaattgtctttaattttttaaaaattgaaaaacataaaagggcccattt

SEQ ID NO: 85713 - DNA, 654 bp, Homo sapiens
aggaggaaagtcaatactgagacagaactttgatacaaacttggcaaagccaggatttgctgccagctaaaggaaaccaatcttgagagcaagcatcggggtctgcatctgtctgacaccctagagaaagatgataagttgaagcaaaataattataatcactcataaacagtttcaaatacactatagcatctttgccacatccttgataagtcaggcatcttaaactattaagttcttcttccataaaaaagaaagaaaacaaaacaatggagacattaaaaagatcagtggttgccaggggttggggtagaagaagggatgactaggggagcacagacgatgtttaatgcagtgaaagtactctgtgcgatactatggtagatacctgtcgttatacacttgtccaggtccacagaacctacaacagcaagtgtaaatcctaatgtaaactatcgattttgtatgtctatggtgtgtcattgtaggtgaatccwttgtaataaatgcatcgctctggggataatgggggcagctctgcatgtgtgggcacagagagtatatgtgagtatgtgaaattgatgggaaacttaaactgctctaaaaaattgtctttaattttttaaaaattgaaaaacataaaagggcccattt

SEQ ID NO: 85714 - DNA, 716 bp, Homo sapiens
gtctctgcttgtatttatgagcagtgtgagaacagattaatataactgagtaccaagatgtttctcagagacattttaatctaaacttactgttgatttgatccttgcaataaaactgagttctaaccaatccttgttttccaaaggcctttttggctttatgttttatttgttggggttatgaagcagctgcctcttctaaacctacaaatccctgaatttcataaatacttctatatccttttatttatttattaattttgccccatgaccaattgattttagagttcatctcttttatgtgatagctcattacaaacattttttttttctgacttattttttctgttgctacaataacatctttactaaatgtttgacactgaataacttggacaatcatctctccagcctttggcatcagttttcttatcagctgcctcctggtcactagcaaaatgtgaccgatattcaatgatggtgggttttgtgtttttgttttttacttgattggttagttattattttgtagctgtcatacagaacttacttctagagactgtttttgtagctgtcagggtaggctagattatgccttcataactaacaacctccatgatttcagaaacttgcaacaatatagatttattttctatgaatgctrtatgtttgccatgggtcagctgtgagttctgttccacattcctcattcctgg

SEQ ID NO: 85715 - DNA, 2263 bp, Homo sapiens
gcatgtgtgtgtatatatatgtgtgtgtgtgtatatagtgtgcatatatatatatatcccaggagtgatgcgttaggtctttaggggtatcatagaaggagttatctgaagcaaatgccgtcaactctattgctgcgcttagtgggtattggaacttcggttatagaatagattgttggaatttctgaaatgtagtttctgaaatgtctgcagtgtacttaggtaatagtaagaaagtttgtatttataaaaatgttttaaataactaaattttgatgatgatctctttcctcttcctaatttttcaataaagcaatccaagtacatcttgcttgatacagatttctaaacgtcagctcaaatcatatcaattttgaaacattaataacttcacttaccatataatttaactcacactatgaaattaaaatccttaaaacacaagaagacttacattgtatctgttttcttccaccaatacttaaattactgtctctccactacacatatgattggaataaataagacactgatatcaccaaacatatataatttttttactgacaaaaatcaaacactgaaggaggcaatatatctttttattctcagatagtctagcctattcaccactgatgaaaccgttactcataaggatattcatgctacttggaacctccatacatttgagctaggsttcacttctgtgtagttccatatctaaaatagggagctctttttcagcacagatcctgcatggagcaatggactctacatgctttgctatgtcattaactaaatctgcaccagaaacttttctctatagccctggcattaaataatcttttctaattctaacaacaatttcatgaagtctgggggtggggagtgggtggaaggggaggtgagaatggaggagtttgcatttcttctttaaagttagactgcaatgaataaaaataccaaggagtgaaggcaaatgttctaagctagatgttatgaataaataattattttttccgacctcataaagtggaatttcaatggttcatgggggaaagaaaaatgaaagaaaactaaagaaaagaataaggaaaccagagatcgaatcacaaccagactgaaactaactttaggagtgcactctttaattttaatgactgttagggagacagggaacaggactttaggaacatgcaacatgcatttagggttcaaagttgtataatccatgtgatctgaaaagccttaaattgtgacacttatttatttttatttttttgagacggagtctcgctctgtcacccaggctggagtgcaatggtgtgatctcggctcactgcaacctccgcctcctgggttcaagcaattctcctgcctcagcctcccgagtagctgggactacaggtgcccaccaccacgcccagctactttttgtattttttagtagagacggagtttcacgatattggtcaggctggtctcgaactcctgaccttgtgatctgcccctctcggtctccaaaagtgctgggattacaggcgtgagccactgcatccagccaattatgatatttatttgatatttatttagggtacccctgtgtggtaactcccctagttacattccaaacattcataataaaactaaacattaatgtttggaagtcataaacatcaagctgcaaattcaagagtatccacctctggctgcatgggagaggaatgaaactgcaaagaagttttacagagagctgaacatagtctggcaacattttatctctgaatccacatagaatgagcatattgttttttgtaagattactttttaaacctttttatatgtctataatatcttctaataatttacattttaaataagaatctagttgaacaatttatttgtgtgatgacattaaacacatcaaaagcaagacattaagaaaaatattaatactattgtcttaataaaagattttaaaaattttaaaagtttgcattttaattaaaaaacaaaagccaggatatctttgtatcatataaacaaaaatggttaatactcatgaatttattttattttgcttttaacttaaaactattattacttatttcttttcatttttcttgaatttgtggtatattgatgtggagcacaacccaaaatacacaaaaggaatagttatcttagaagactatgaagaatataactgatttatgagcctaccaataatgaatagagaaaaaacatgaataaacaatttgcaaaa

SEQ ID NO: 85716 - DNA, 563 bp, Homo sapiens
gaatgccataaaaatgatttggcaataaactggataaattggagtctctgatgacagagtcacgttagcaattgtactagagctagccccaactcagggcttcctatcaagtgaattacatattattcttatgatgtaagccacttgaataagaggttctcttacatatagctataaacatttgaattgacatagaagattatgttaaattagatgataaggaaagggttttcttagtcaatgacacttaagttgaaaactcaatgacagggaagagctcactatgcaaaaataatttcaggctgagaaaatcacgtaagtcaggcatactagtcagtgtatgtgrgaaacaacacaaacgtgagaactgatgaagcgtatatgtgagtaggagatggtgtaagaagtggtgagtaacaacatattaagctttggagactgtaatatgaattgtgaatattatcttatgtgcaattggaagctactaatgagttttaagcatagatgtgattatgtttgtgcttttaaaatcactcagctaactgcagaggatagaaatttga

SEQ ID NO: 85717 - DNA, 563 bp, Homo sapiens
gaatgccataaaaatgatttggcaataaactggataaattggagtctctgatgacagagtcacgttagcaattgtactagagctagccccaactcagggcttcctatcaagtgaattacatattattcttatgatgtaagccacttgaataagaggttctcttacatatagctataaacatttgaattgacatagaagattatgttaaattagatgataaggaaagggttttcttagtcaatgacacttaagttgaaaactcaatgacagggaagagctcactatgcaaaaataatttcaggctgagaaaatcacgtaagtcaggcatactagtcagtgtatgtgagaaacaacacaaacgtgagaaytgatgaagcgtatatgtgagtaggagatggtgtaagaagtggtgagtaacaacatattaagctttggagactgtaatatgaattgtgaatattatcttatgtgcaattggaagctactaatgagttttaagcatagatgtgattatgtttgtgcttttaaaatcactcagctaactgcagaggatagaaatttga

SEQ ID NO: 85718 - DNA, 861 bp, Homo sapiens
tgcatacacaaggctaaccttaagatggctttaagtgatggccaccacattcaaaattattattggtatttaataagtaaaattttcttgttgaatatactttagcattcctgcctctgtctcccagcatgagtttcccctaggaggtcctttagacttctaaaccatcttacaatttgctacacttggaatctagtttcatttaaataaggaccacaggtacatctccattgctgttggtgtttggagttatgtgatgaaaaagttataatgtatggagaaaagtcctagatgtgtaataagaaaacccacatatttcccatggtcttccatatatgaacagtatgacatttgataagtcatctatctctctgagsttcagtgttttcatataaaatgaagcaattgtaatgctctgtattccttacaggtttgatgagaataacatgataaaaattatatgaacacactttgcaaagtgatatacacgtgaatttttttctttttaattactgaccttagttcacagcattcctcatatgtggtcgcagttatctaccaatgcaagtagttgttcttccaaaggattgaaggaatctaccacatttgattgggtccaaaaaaatgtgtatacctttagtgtatagttgtctataattgctgtttcacttcctagtctaccattcactttcataacacaggtgatgttttaattctactttctaaattttgatatttccacttgtacatatttccatagttaactaggaaaaaagaaaatatctttgttgtagcttaaaacaggtaattattctaaatatgttttcacagcaatttgaacattcatgagcaataagactg

SEQ ID NO: 85719 - DNA, 1002 bp, Homo sapiens
actcacagtaacttttaagttttgttttttcttaaacaatgcgwttggagctatcatgtgtgcacgtgtgtgtgcatgtgtgtgtgtgtgagagagagagagagagatagagaggaacagagagaagagagagggagagagagagagaagagagaattcattttggttttctgaactgtgaaaaaaattcaagtgaaaagcattttagcaaaatatcaagagatagtcagacataaccgtgcctgaggtatgagttgctgaaattcattattgatgtttagtatcacaagagtatcttcaagtcactgcaatgccatatgtgaagccaatgcaatacttctcctcacacctatctctcacaaacttgaattcaattaattaccagtttggcttaagtttggtttagaaaaatattttatgctgtttttgtacctgtttggttgagacatatttcgatttttattctttcttaacctagttggctgaattatgaaagaaaccccaaacatattaaaaaaagcccagcacaaaacctaattcagttagtgcctcaataaacagttttatatttgctttggttagggttaaagagctcaacaaatataacttttggatttgctttttggttagacacttgaatgaaaatgctggttggaacatccagaatgtttttaaaagtatccaagtacacaatgctaaagtctaaaatctctagactgagactagttaactttgggagtttatctagtggctatagttcagcggggggaaatctcagtggtgtctgtgactcaatattatgcccatcaagagacattcttagtagaatttgcctaagccatgtaggttggtgaatgaagggttggcatcatgtaacaaaaatctactccctccacactgtgtggtttagttgcaaaataaatcaaatcattttttaatttttattttattttattttttattatactttaagttttagggtacgtgtgcacaatgtgcagg

SEQ ID NO: 85720 - DNA, 677 bp, Homo sapiens
ctatttctatatactttccgaacctcaagaacctctgttgcttagtgctgaggagctctccccatcttcacactccttcacatggaaaaagtgtgtgtgtgagattgtgtttattgagggggatgggagcttatatattttttcaaagtgaactttatttttaaagcagtttagggcctgggtgcagtggctcatgcctctaatcctagcaatttgggaggctgaggtgggaggattgcttgaggccaggaattggagaccagcctgggctacttagtgagaccctgtctttatagaaaaatkatgataaaaattagctgagcatggtggcacgtgcctgtagtcctacctactcaacagggtgagacaggaggatggcttaaacccaggagtttgaggctgcattcagttatgatcctgccactgcactctagtctgggcaagagagcgaggcccagtctctaaatataatgaaaataataatataaataaggtaaataaatcagttttggatttacataaaaattgtgaagatagtatggagtgtttgcatatatctcaaacttagttacccctgttattaatatcttacattagtatgctatagttattacagtgaaaagagtttaattaagcccatactttactcagattttcttcatttttatctaatggaa

SEQ ID NO: 85721 - DNA, 527 bp, Homo sapiens
cacgccccttggcctccaagtactgggattacaggsgtgagccacctcgcgcccgaccagaaatgcttctattttatggtgaggaaattgagagaccagaaagttaaccgaggtcactgtcaaacccatggctcctggctccctgacccctcacacccatttccctctgcgtcctcttgatctcccatggacactgggatgggcagggccaggtgggagaagcagggctcatctctgagggctgcgttatggggtaggagtttagcctcagtaactgcagcactttctgcccatggcaacctgtgctgttttcacatttctcagaaattcccgctcttggagttttacacttgtaacatctgcttagcaaattttgaaaaattgaagatgaagagtaataaagtgtggacaaagctctgcagggagcttgttagaaatgctgatttgaggccgggcgtggtggctcatgcctatattcccagcacttgggaggccgaggccagcggatcacgaggtcaggagatcga

SEQ ID NO: 85722 - DNA, 527 bp, Homo sapiens
cacgccccttggcctccaagtactgggattacaggggtgagccacctcgcgcccgaccagaaatgcttctattttatggtgaggaaattgagagaccagaaagttaaccgaggtcactgtcaaacccatggctcctggctccctgacccctcacacccatttccctctgcgtcctcttgatctcccatggacactgggatggrcagggccaggtgggagaagcagggctcatctctgagggctgcgttatggggtaggagtttagcctcagtaactgcagcactttctgcccatggcaacctgtgctgttttcacatttctcagaaattcccgctcttggagttttacacttgtaacatctgcttagcaaattttgaaaaattgaagatgaagagtaataaagtgtggacaaagctctgcagggagcttgttagaaatgctgatttgaggccgggcgtggtggctcatgcctatattcccagcacttgggaggccgaggccagcggatcacgaggtcaggagatcga

SEQ ID NO: 85723 - DNA, 639 bp, Homo sapiens
cccccatggattgatttgttctttgcaggatgtcacggaaggcttctgtcatgagtcaccaagctttggtatccatcatttttgaaatgtgactatttaccctgtgaccaagtattggcatgaaattaaaatttttgtcttttacgaaccttaccctttcggtgaaattatgtagagcttcaaattggcacgtgtaaaaagtggtccatcgcagccaccctttccagccgctcccctctaccgtaggatggaaggaaggggcaagtctaactttgaaacaaccaggttctttgtcgtgaaatatgtggcatttgtgtgtatggttatgtatctgtgtatgtatgtatatatgtgtatatatgtctaatttccgtgtgtatgtttatatttatgtakgtatctatgtatgtatgtatatatgtctaatttctgtatgtgtgtgtatgtattttctaatttgaccgtgaaagcaaagcagatgagctcttgctgttctgcagactccggcatgggcctgcctagtgtgtctgtcctctgcatttctattgatagcaccagatcccctgcggcccgtggactcctccccactgaccccaacctcattgcatgcttggaggacaggacaagggccaggagaca

SEQ ID NO: 85724 - DNA, 531 bp, Homo sapiens
tctcccatacttatcatttttgtgtgttgagaacacttaaaatctactctcagcagttctcaagtatacaataaattaactatagttaccatgttgaacttttccctcctaactggaactttataatactcatgagcctggttttttgtttctcttccctttgttgcaatgtcacacttgcttttggttagaggatacaaatgtcttctcctcatcattgtgacaaggggaattaaaaaaaaaattcagaaaacactccatttattattattttttaatcctctagggggcagaaataatcaaaggagaastgctgctcagcagaatcacatcgaatgaaatcataattctcatggcttctattaacatgtaaataaataattcttaaatctagagctccagctcacattatattgctggacttgtgactcataaatcttattaaatacaggtatgtgttatttcatttcactccaccttattgcaattcacagatattgtgtgttttacagatttaaggtttgtggcaac

SEQ ID NO: 85725 - DNA, 616 bp, Homo sapiens
tggggacagaagtgactaaaattgctcttttgtgatggctgatcagaggctaatatagccaaggaacagcagcttagctaagaactactcattgcatcagcagtccttcctggagttagccaccgcaaatacatggatcaaaaatttcatcagtctttgagagcactctatgtctctgtgttttataactgtggaagctaccttctcatgtgttattgagcacttacacgaggcaaagtaaactaagtctaccacataatgtaaataggtattgctttatgagataacattcagtgttaagtctatataatatcagtaccaataacttgctttcattatcttagaatttgttttagacaacatttttatttgatattcccgatttaaggtaaaagctgcgtgagattaacacaagttacakaattagattattagagatagaatgtacatcgaccttttacaagtcagagatttgggcagggcacaggtgtcacgcctgtaatcccagcaccttgggaggctgaggagggtggatcacgaggtcaggagatcaagaccatcctggctaacacagtgaaaccccatctctactaaaaatacagaaaaaatagccagg

SEQ ID NO: 85726 - DNA, 1510 bp, Homo sapiens
ttctttctacaatccaaaataggacctggcacacagtaggtgctcagagttttattcggtccaattgtttgtccacatctgcccctaaggataactagtctaggccccccaggggcctttaagaaaatctcccaaagcagccactgatccatgtctccaaggagctgcttcggaccctgagctgaagaggggtctgtgaccaatgaggggacccttactttgtgactcctgtctagctccaagtttggggagggggctgctctgccccggcccggtttgatggcatcacttttaagcacagacgttgccagatcagtggtgctatttaactcctccagggctggcgttttcatttaatacccgtggaataattaacagtgctgcatctgctctgtcattagtggcattyactgccatttggagaaagggctcttatcttcctcagtcattagtctcggggaggctattatgggggaaatggaggaggagaggaggaagtggggcgtgcaacttccctccccttgcctggagaactggcgcgtggtgcggggagcagccgatcatcctatccaatggtccaaacctcttggctgtatgaactgagcatgcaaagccaagaggggaaagaacctgcccacggtcccccacaggcttgaggcccagcagaaggcggctctcccacttctttctcaggtctgcaagcccaggcctcggagccctgcagctttggatctgattcccagctctgccctgtgtcagtggtatgaccttgggcaacttcttgagctccctgagcctcagtttccttattgaggatcctgggacaatgcttgtgaagtactggctcagtgcctaggtcacaggcagagcccaagactgagagatgtacatatcagatcattctgtgtcattatgctgaaccaacctgctaaaaatgcatatgtaatacatgcgtgcatttaaattccatctttcaaaaatactcttcagtaagatgacttcttctctctccccaggcctactttttattattatttttttaatcataggtgggtcctggatcttaagctctggaaacatctgacttgggcggaaaggggcttggtcagctcaggcggcagtgaagcctggattgcaggctggcagctcagacggtgcccaggaagctggtagcttttgcttttggccacttttattttgtattgctttcactttttctcagcccttgcatggcacagccagaaatggcgaatacagagaaaaagcccctggctccccaacagttatcttgtctcaggtgcttttcagaagcagcatgaggttggcatcaccaagacctgggaccaaacttggtctgtgcaccctgtggcaagtgactccaccacccttgggctcagggtcctctctggcagaaggagagagtagcacctatcatccagtatcagccttggctcagggaccagtgcccagcaggccctctgaactcactgtcagggcccagctggacaag

SEQ ID NO: 85727 - DNA, 1510 bp, Homo sapiens
ttctttctacaatccaaaataggacctggcacacagtaggtgctcagagttttattcggtccaattgtttgtccacatctgcccctaaggataactagtctaggccccccaggggcctttaagaaaatctcccaaagcagccactgatccatgtctccaaggagctgcttcggaccctgagctgaagaggggtctgtgaccaatgaggggacccttactttgtgactcctgtctagctccaagtttggggagggggctgctctgccccggcccggtttgatggcatcacttttaagcacagacgttgccagatcagtggtgctatttaactcctccagggctggcgttttcatttaatacccgtggaataattaacagtgctgcatctgctctgtcattagtggcatttactgccatttggagaaagggctcttatcttcctcagtcattagtctcggggaggctattatgggggaaatggaggaggagaggaggaagtggggcgtgcaacttccctccccttgcctggagaactggcgcstggtgcggggagcagccgatcatcctatccaatggtccaaacctcttggctgtatgaactgagcatgcaaagccaagaggggaaagaacctgcccacggtcccccacaggcttgaggcccagcagaaggcggctctcccacttctttctcaggtctgcaagcccaggcctcggagccctgcagctttggatctgattcccagctctgccctgtgtcagtggtatgaccttgggcaacttcttgagctccctgagcctcagtttccttattgaggatcctgggacaatgcttgtgaagtactggctcagtgcctaggtcacaggcagagcccaagactgagagatgtacatatcagatcattctgtgtcattatgctgaaccaacctgctaaaaatgcatatgtaatacatgcgtgcatttaaattccatctttcaaaaatactcttcagtaagatgacttcttctctctccccaggcctactttttattattatttttttaatcataggtgggtcctggatcttaagctctggaaacatctgacttgggcggaaaggggcttggtcagctcaggcggcagtgaagcctggattgcaggctggcagctcagacggtgcccaggaagctggtagcttttgcttttggccacttttattttgtattgctttcactttttctcagcccttgcatggcacagccagaaatggcgaatacagagaaaaagcccctggctccccaacagttatcttgtctcaggtgcttttcagaagcagcatgaggttggcatcaccaagacctgggaccaaacttggtctgtgcaccctgtggcaagtgactccaccacccttgggctcagggtcctctctggcagaaggagagagtagcacctatcatccagtatcagccttggctcagggaccagtgcccagcaggccctctgaactcactgtcagggcccagctggacaag

SEQ ID NO: 85728 - DNA, 1510 bp, Homo sapiens
ttctttctacaatccaaaataggacctggcacacagtaggtgctcagagttttattcggtccaattgtttgtccacatctgcccctaaggataactagtctaggccccccaggggcctttaagaaaatctcccaaagcagccactgatccatgtctccaaggagctgcttcggaccctgagctgaagaggggtctgtgaccaatgaggggacccttactttgtgactcctgtctagctccaagtttggggagggggctgctctgccccggcccggtttgatggcatcacttttaagcacagacgttgccagatcagtggtgctatttaactcctccagggctggcgttttcatttaatacccgtggaataattaacagtgctgcatctgctctgtcattagtggcatttactgccatttggagaaagggctcttatcttcctcagtcattagtctcggggaggctattatgggggaaatggaggaggagaggaggaagtggggcgtgcaacttccctccccttgcctggagaactggcgcgtggtgcggggagcagccgatcatcctatccaatggtccaaacctcttggctgtatgaactgagcatgcaaagccaagaggggaaagaacctgcccacggtcccccacaggcttgaggcccagcagaaggcggctctcccacttctttctcaggtctgcaagcccargcctcggagccctgcagctttggatctgattcccagctctgccctgtgtcagtggtatgaccttgggcaacttcttgagctccctgagcctcagtttccttattgaggatcctgggacaatgcttgtgaagtactggctcagtgcctaggtcacaggcagagcccaagactgagagatgtacatatcagatcattctgtgtcattatgctgaaccaacctgctaaaaatgcatatgtaatacatgcgtgcatttaaattccatctttcaaaaatactcttcagtaagatgacttcttctctctccccaggcctactttttattattatttttttaatcataggtgggtcctggatcttaagctctggaaacatctgacttgggcggaaaggggcttggtcagctcaggcggcagtgaagcctggattgcaggctggcagctcagacggtgcccaggaagctggtagcttttgcttttggccacttttattttgtattgctttcactttttctcagcccttgcatggcacagccagaaatggcgaatacagagaaaaagcccctggctccccaacagttatcttgtctcaggtgcttttcagaagcagcatgaggttggcatcaccaagacctgggaccaaacttggtctgtgcaccctgtggcaagtgactccaccacccttgggctcagggtcctctctggcagaaggagagagtagcacctatcatccagtatcagccttggctcagggaccagtgcccagcaggccctctgaactcactgtcagggcccagctggacaag

SEQ ID NO: 85729 - DNA, 538 bp, Homo sapiens
taagattttaatgagaatcatagtatagctataaataaatttgggtagaatttaaatatttacaacattttatcttcccgcatgggaaattatctacttttatctatttggttgttcattcttgctcttcctaaaatcttataattgtctccatgtaaaccttgcacattccttaactttgtttctaaataattattttcattgcattatgtatgagacaaaatattcattttgttatctctttattgctgccatataggaatctattaatttctgtagattttctttttgtcttctacccttgttataattctttttmgttgtaatagcttttagtttattttcttgggatttccatgtaagcaagttataatgattcagttagttttctaattacttcagctagagtttccagaaaaacaagagtgataataggaaaaattcctttcccttttgttatttctgaacagtgagcaattaaaaaccaactagtatcattctaatttcttatcttgaaacaaatatatagttaaattaa

SEQ ID NO: 85730 - DNA, 631 bp, Homo sapiens
agggaaataccagtgtgaaacacctatattctctatgcccgtgaaaatcccagagggattaaagagttcagtggtttgttgttgtagttgttgttgtttttaaaaaacacaatatcataaaaaggaactagaattacaataaacatttaacaaaatttgtaaatgaggagggatttctaagttccgatttaatgaagaaaaaggggaaaagagtgagatatttaattactaaaaataaaatttacatrtggcaaacaaaaccaaatcaaaaccaaaactacttaagaagaagtttcccaaaatatgacaaaagattgtgagatttaatatactgtgcattcattcaaattgataagaaattatcatgatcttgtcttttgaaaaacagataattacagccctttaaaatacaaatgactggtatgcactttgaaaaatgtatttaaacttactttaaaaatcaaataggtaaaaactaaaacgtcaatgaaacaaattttaacatcgagctagcactttaaaatgagagttgtggggctggcaaaggtgcagagaactgtgaaatcatatatgtactgatagaaactggcccgatcttttcttttggaaagcaattcagcagtatctaaaa

SEQ ID NO: 85731 - DNA, 740 bp, Homo sapiens
aaaagggtgccccggaaagagctgtgccgtctagcacacctcttrgtcatgtctttcacaatgtctggtgttgcctggagcaaggtttggatcataacagcgaatcaagctggaagggaagggttctgaggaagcctggcccctgagaagcacatggaaacttatacatttctgcttctttccttaactgccaattctgcctaccactctgagtggcccacccagccagctctcacttcaatctcattggcttgctcacatgccaatcaagtgctgagccagcaactcatgggaaacccaaacagtatctcacacaaactcaaatagaagcttgtatttcttatggtgctctcaggaggccttcaccaaaggtggagaacaaggacaaaagggcaagagtgctgaacttggcatccccattctgccccatctcagcctgtgaccttgggcaagttacaaccccctattttcccataattgaagcctatagcctctgtgcttccctcctccaaccagcactgagattaggatgttggaaggatgtagaaaggtattaggtattagagcaacaatatacagatacaccgagattggccttgaacctccaacagggaactccagctcagcaaggtgtttcgccaacagaaacagcctgtccctgtgctttgagcagagcagtgataagaccacagagtcgggcataactcaaagtggggtgaccaaatcatctccgttttcct

SEQ ID NO: 85732 - DNA, 740 bp, Homo sapiens
aaaagggtgccccggaaagagctgtgccgtctagcacacctcttagtcatgtctttcacaatgtctggtgttgcctkgagcaaggtttggatcataacagcgaatcaagctggaagggaagggttctgaggaagcctggcccctgagaagcacatggaaacttatacatttctgcttctttccttaactgccaattctgcctaccactctgagtggcccacccagccagctctcacttcaatctcattggcttgctcacatgccaatcaagtgctgagccagcaactcatgggaaacccaaacagtatctcacacaaactcaaatagaagcttgtatttcttatggtgctctcaggaggccttcaccaaaggtggagaacaaggacaaaagggcaagagtgctgaacttggcatccccattctgccccatctcagcctgtgaccttgggcaagttacaaccccctattttcccataattgaagcctatagcctctgtgcttccctcctccaaccagcactgagattaggatgttggaaggatgtagaaaggtattaggtattagagcaacaatatacagatacaccgagattggccttgaacctccaacagggaactccagctcagcaaggtgtttcgccaacagaaacagcctgtccctgtgctttgagcagagcagtgataagaccacagagtcgggcataactcaaagtggggtgaccaaatcatctccgttttcct

SEQ ID NO: 85733 - DNA, 740 bp, Homo sapiens
aaaagggtgccccggaaagagctgtgccgtctagcacacctcttagtcatgtctttcacaatgtctggtgttgcctgkagcaaggtttggatcataacagcgaatcaagctggaagggaagggttctgaggaagcctggcccctgagaagcacatggaaacttatacatttctgcttctttccttaactgccaattctgcctaccactctgagtggcccacccagccagctctcacttcaatctcattggcttgctcacatgccaatcaagtgctgagccagcaactcatgggaaacccaaacagtatctcacacaaactcaaatagaagcttgtatttcttatggtgctctcaggaggccttcaccaaaggtggagaacaaggacaaaagggcaagagtgctgaacttggcatccccattctgccccatctcagcctgtgaccttgggcaagttacaaccccctattttcccataattgaagcctatagcctctgtgcttccctcctccaaccagcactgagattaggatgttggaaggatgtagaaaggtattaggtattagagcaacaatatacagatacaccgagattggccttgaacctccaacagggaactccagctcagcaaggtgtttcgccaacagaaacagcctgtccctgtgctttgagcagagcagtgataagaccacagagtcgggcataactcaaagtggggtgaccaaatcatctccgttttcct

SEQ ID NO: 85734 - DNA, 740 bp, Homo sapiens
aaaagggtgccccggaaagagctgtgccgtctagcacacctcttagtcatgtctttcacaatgtctggtgttgcctggmgcaaggtttggatcataacagcgaatcaagctggaagggaagggttctgaggaagcctggcccctgagaagcacatggaaacttatacatttctgcttctttccttaactgccaattctgcctaccactctgagtggcccacccagccagctctcacttcaatctcattggcttgctcacatgccaatcaagtgctgagccagcaactcatgggaaacccaaacagtatctcacacaaactcaaatagaagcttgtatttcttatggtgctctcaggaggccttcaccaaaggtggagaacaaggacaaaagggcaagagtgctgaacttggcatccccattctgccccatctcagcctgtgaccttgggcaagttacaaccccctattttcccataattgaagcctatagcctctgtgcttccctcctccaaccagcactgagattaggatgttggaaggatgtagaaaggtattaggtattagagcaacaatatacagatacaccgagattggccttgaacctccaacagggaactccagctcagcaaggtgtttcgccaacagaaacagcctgtccctgtgctttgagcagagcagtgataagaccacagagtcgggcataactcaaagtggggtgaccaaatcatctccgttttcct

SEQ ID NO: 85735 - DNA, 740 bp, Homo sapiens
aaaagggtgccccggaaagagctgtgccgtctagcacacctcttagtcatgtctttcacaatgtctggtgttgcctggarcaaggtttggatcataacagcgaatcaagctggaagggaagggttctgaggaagcctggcccctgagaagcacatggaaacttatacatttctgcttctttccttaactgccaattctgcctaccactctgagtggcccacccagccagctctcacttcaatctcattggcttgctcacatgccaatcaagtgctgagccagcaactcatgggaaacccaaacagtatctcacacaaactcaaatagaagcttgtatttcttatggtgctctcaggaggccttcaccaaaggtggagaacaaggacaaaagggcaagagtgctgaacttggcatccccattctgccccatctcagcctgtgaccttgggcaagttacaaccccctattttcccataattgaagcctatagcctctgtgcttccctcctccaaccagcactgagattaggatgttggaaggatgtagaaaggtattaggtattagagcaacaatatacagatacaccgagattggccttgaacctccaacagggaactccagctcagcaaggtgtttcgccaacagaaacagcctgtccctgtgctttgagcagagcagtgataagaccacagagtcgggcataactcaaagtggggtgaccaaatcatctccgttttcct

SEQ ID NO: 85736 - DNA, 543 bp, Homo sapiens
agacaccacaggtaaagcactcagcaccttgcgtgacacagtacctgcatcataagcccagctktcattattgctaacaacacgtgcaagccgctactcagggccagaccctcaagtccacagagatgaacacgactcctgccctggggaatttgtggtttatggttcaggagttaatggattcaggtagaacagcctgaggcaggcccatccaggtaaaggcatcccccaggaggaagcctcctgattattcactcctgttggaaattgaggaagttggaagggtcctaggcagggagcggtgatgagggaaagggcccagaaggtctcagtagctggggaaagagctgcatggagagaggcatgggaggtgtggaaaggaagcccagagctgggtgccgattagggactctgaccagccagaccctccaagaccacgccccactggcctggaacctgagagactgagtgtctgctcactggctgtgtcccctgagcaggctccacagtatctctaagccccaggtcgtcaccaagtaagtg

SEQ ID NO: 85737 - DNA, 543 bp, Homo sapiens
agacaccacaggtaaagcactcagcaccttgcgtgacacagtacctgcatcataagcccagctgtcattattgctaacaacacgtgcaagccgctactcagggccagaccctcaagtccacagagatgaacacgactcctgccctggggaatttgtggtttatggttcaggagttaatggattcaggtagaacagcctgaggcaggcccatccaggtaaaggcatcccccaggaggaagcctcctgattattcactcctgttggaaattgaggaagttggaagggtcctaggcagggagcggtgatgagggaaagggcccagaaggtctcagtagctggggaaagagctgcatggagagaggcatgggaggtgtggaaaggaagcccagagctgggtgccgattagggactctgaccagccagaccctccaagaccacrccccactggcctggaacctgagagactgagtgtctgctcactggctgtgtcccctgagcaggctccacagtatctctaagccccaggtcgtcaccaagtaagtg

SEQ ID NO: 85738 - DNA, 432 bp, Homo sapiens
ccagatcttactacgggctttccttgctctgtcaactacaaaataaattagacgggtcaaacgttgtagatttaatctcactgtgaactgaaaacatagtcgctctccttgccatcggagaatatgcgagcgctcggtgaccccctggtgaaccggaggggccaggcctgccggcaggtgcagctggagcagwctcaatgtgacattcaccgcgatcctttgtgccctgctgagaactgctggggagtgtttggaaccgaatactcaagggctttccctcaccgtctcacaattacctgtgcaaggtacaaaaaaggaagaaattgagagagagacaagaggaggagaagggggagcagctaagggagaagggggaggattctccagtggttcggaggaggccatggtggttccagttaaaggcagagattg

SEQ ID NO: 85739 - DNA, 432 bp, Homo sapiens
ccagatcttactacgggctttccttgctctgtcaactacaaaataaattagacgggtcaaacgttgtagatttaatctcactgtgaactgaaaacatagtcgctctccttgccatcggagaatatgcgagcgctcggtgaccccctggtgaaccggaggggccaggcctgccggcaggtgcagctggagcagtctcaatgtgacattcaccgcgatcctttgtgccctgctgagaactgctggggagtgtttggaaccgaatactcaagggctttccctcaccgtctcacaattacctgtgcaaggtacaaaaaaggaagaaattgagagagagacaagaggaggagaagggggagmagctaagggagaagggggaggattctccagtggttcggaggaggccatggtggttccagttaaaggcagagattg

SEQ ID NO: 85740 - DNA, 483 bp, Homo sapiens
tgctgatatatgacagagattcaggaacagaatcatttggaacatgcgtttttcttttccctttcatttttccctttgcttcaaaggccagtgtgatgtctggatcttaaacagaattcccytctggctgagtagaaaagttaaagatggtggtaaaggaagaacctggatctttgatgacctaattgactacctatattgatttgatttgtacttccaaatgttttgacatgtaattgaagattaaagtcatatttggttcgagctactgtagttggctttgttacatgtagctgaacatgatcctgactaaaaacaaaataggacaagttcttaacaaagtgtctggtatattatatatatcaataactactattattagagttatgattgttttcagtagtaaaagataatgatggttctaattcagaggtccagaaagattggagagtaagagatgcttataaatgatatgtataggta

SEQ ID NO: 85741 - DNA, 483 bp, Homo sapiens
tgctgatatatgacagagattcaggaacagaatcatttggaacatgcgtttttcttttccctttcatttttccctttgcttcaaaggccagtgtgatgtctggatcttaaacagaattcccttctggctgagtagaaaagttaaagatggtggtaaaggaagaacctggatctttgatgacctaattgactacctatattgatttgatttgtacttccaaatgttttgacatgtaattgaagattaaagtcatatttggttcgagctactgtagttggctttgttacatgtagctgaacatgatcctgactaaaaacaaaayaggacaagttcttaacaaagtgtctggtatattatatatatcaataactactattattagagttatgattgttttcagtagtaaaagataatgatggttctaattcagaggtccagaaagattggagagtaagagatgcttataaatgatatgtataggta

SEQ ID NO: 85742 - DNA, 1427 bp, Homo sapiens
aatcatcaacatgtcttatatcatcttgtctaactctgcagcaggtcagacaatttatctcagtttttttcttcaattcctttgagcctcccaggcaattcataaattgtctctcagatttttctgaggtcagatcatgctgagatgtacaccttccttctttccacttaaaatctcttttcctgtcctttacatacatagatcctaaaatctcacttttgacatgtaagttgttttgatgaactagaatatgagtttctctgaccataactatcacaaaaatagtagttttctggaaaactcatccgttgctatacagtacaaatactatgtatttaatttacttaagcattatattcttgatcacgtccatctayataaatggtgtctatgtagacagatgtgttgctttagctggtgaagcctatgtttcccttcccttgaatatggaaggcttatgactgattcaaccaataaagtatggttgataggtaagtatatgacttctgaggctaagtcataaaaagtcctgtagcttttgttggtttctcttggaactcttgctttctggaagcttcctcttaggacactcccactcagaatcgagacaccatagtgttttaaaaagcccaagtcacatggagaagcagtagtagatgctctggccaccagtcctaggtgaatcttgtctttgagtcatcccaggcatcaaacatgacagtaaagagcctccagatgactttagctcctagctgtagccatgacatcatggagcagagacaaaccatttccactgtgataagccccatctgaattctgaactcctagaatctgtgatcagaaataattgtttcccccactaagctcatctgtttgtttttaaatgcataaaagtaattaagaaaaaatacgtagtcattggtatattaaaggccccgatgctagaaattctgggcatttaggtcccctcacatgctgatgaagagtcagaaagaaacatgaagggtaaagggtacctggaaactacagctaggaagagaatgagaaagagtaaaggcaagactgataagagaggagagacaggagagagacacaaaagaagaaaaaacaggaaggaaagaactgagaaggaaatatagagttgcatgagaagaaggaagaaaaggtactggagaattgtgagaaccagtcaagaaaggacattccaaatgagagccagggcatttgattttgagaataattgttttttatttattttttatttattttgttatttcatttctttttatccctagagaccctgattttgagaatagctgaaccctcttgaaccactctggttttattcctgctgttttcggcaaaagtggctcaagtaggggataagtttcaagatggatatagcaaggatctggaaaggagaaatg

SEQ ID NO: 85743 - DNA, 609 bp, Homo sapiens
cttctcccagtggctccccttttgtctttttgtaccacctgatacaagtttgctgtctttgcattttctctgcttctggacattttggcaattgttaactacattatttcattcttggtctctgaatccagacgtttgcttttccaattgatccatgttgcttatgaagtgccttgtcatctattaatccaggatagttrctgagttattgtaggtggcacagccaccaacttggtgtgtgtgtgtgtgtgtgtgtgtgtgtgcgtgtgtgtgtgtgtgtctcctaagggaacagaacactgctgagttcaggctgattattagctcgtggactgtcagcaaaatacattcacaagaaggctatgtgctgatttgtctttcgcagtgaagtcatgttgctcatgttttatgtttttcagagttcattagtttctatttgttctcaattaatatccagctcaatagattgtgtaagtggaatacccccaaattgaaattcacccacttaaaataaagtgaaaaacatgtcacccattaaactatagttgaaaatatgtacccattagttctgtgtaccaaacactggataatgggtaagggcacaggatc

SEQ ID NO: 85744 - DNA, 609 bp, Homo sapiens
cttctcccagtggctccccttttgtctttttgtaccacctgatacaagtttgctgtctttgcattttctctgcttctggacattttggcaattgttaactacattatttcattcttggtctctgaatccagacgtttgcttttccaattgatccatgttgcttatgaagtgccttgtcatctattaatccaggatagttactgagttattgtaggtggcacagccaccaacttggtgtgtgtgtgtgtgtgtgtgtgtgtgtgygtgtgtgtgtgtgtgtctcctaagggaacagaacactgctgagttcaggctgattattagctcgtggactgtcagcaaaatacattcacaagaaggctatgtgctgatttgtctttcgcagtgaagtcatgttgctcatgttttatgtttttcagagttcattagtttctatttgttctcaattaatatccagctcaatagattgtgtaagtggaatacccccaaattgaaattcacccacttaaaataaagtgaaaaacatgtcacccattaaactatagttgaaaatatgtacccattagttctgtgtaccaaacactggataatgggtaagggcacaggatc

SEQ ID NO: 85745 - DNA, 621 bp, Homo sapiens
gatcctggtttcgtgatcttttacatattctgtgttctaacctgaactggccttcatggttaaagatgcatgtataaacagtgtcctggcgagggcttaccttttgaactttgtcaaaaatggatatgaaagtccttcctaaaaccccatcaaattcatttctgaacttgataaattgtaaattgtgtaaattggttaagttgtgtcttgtagggaagtattttgttgtaaaatgtttttaaaaagaaaatttgctttttagtgaggtggtaatcatttcataattcttagttttgtgaaatgtctattatcaataacacatctgactgttcaaaatgtaaggcaattgaatttatgtaaatgattcaggctttccaaagttaaaaagggagctattttaaggaatcggtagtttgggagattttattttaaataagccrttgatcttatgcatatagccatataagtaaaatgttttcttattttaaattagattatgttttaacatttttttctgttttgctttatatttgattgcttttctttgttcctaaggcagccattaagttgaattgttcaaaattgtttcatttttaaaagctgataacttatttgttagtc

SEQ ID NO: 85746 - DNA, 965 bp, Homo sapiens
aatccaagcaatttttcactgtcttttactgactcccaccaaccatgttttctcttcccttcctactctgcttatactttgtgctcagttactactataatttacagcttatctatgattatagtcaaytttcttgcaactgcattgcttctctcactctcatggcaaaaccaaaaccctggttaaatttacctttctatgtattcagtgcctcctctagcactgtcgaaggtgtctgaagaagacacaaaacatcctgattgatcttacttaaaattcatccctaatctcaagttagcccttactgctccctgtcaagcattctatagatccttagccctttctctctctctcagactcattcagtgcctctcagactctaatagacacaagaaaaatcacatggggactctatatttagtctatcagcaaatcctctcagttctaacttcaaacatattcagaattcatctcattctcactggtcctatagccaccatcccagaccaaaccactatgcctagatattgcaatgatccaattaatctccctgcttccacctttaccaaatttatttgacacagtagctagagtaattcatttaacaagtaagttagagcctgtcaatcttttgcttaagcttctccagggttctcgttgcagccagactaaaaggtcttactctgaccttcaggctttgttaattctgattcctgcaatctttctagtatcttttttttttctagtgccctctgctccagacatatcagctcttttatgccaggaacagcttaatgccttgggctttgttgtttcctctacttgcaaggagcctcctcaactctctgtctggctcactatatcaatgccttcccgaatttattcagaaccccaattctcagtacagcgtttcctagctagcttttctaaaatttccaccaacatgtcctgatttacattccttt

SEQ ID NO: 85747 - DNA, 965 bp, Homo sapiens
aatccaagcaatttttcactgtcttttactgactcccaccaaccatgttttctcttcccttcctactctgcttatactttgtgctcagttactactataatttacagcttatctatgattatagtcaactttcttgcaactgcattgcttctctcactctcatggcaaaaccaaaaccctggttaaatttacctttctatgtattcagtgcctcctctagcactgtcgaaggtgtctgaagaagacacaaaacatcctgattgatcttacttaaaattcatccctaatctcaagttagcccttactgctccctgtcaagcattctatagatccttagccctttctctctctctcagactcattcagtgcctctcagactctaatagacacaagaaaaatcacatggggactctatatttagtctatcagcaaatcctctcagttctaacttcaaacatattcagaattcatctcattctcactggtcctatagccaccatcccagaccaaaccactatgcctagatattgcaatgatccaattaatctccctgcttccacctttaccaaatttatttgacacagtagctagagtaattcatttaacaagtaagttagagcctgtcaatcttttgcttaagcttctccagggttctcgttgcagccagactaaaaggtcttactctgaccttcaggctttgttaattctgattcctgcaatctttctagtatcttttttttttctagtgccctctgctccagacatatcagctcttttatgccaggaacagcttaatgccttgggctttgttgtttcctctacttgcaaggagcctcctcaacyctctgtctggctcactatatcaatgccttcccgaatttattcagaaccccaattctcagtacagcgtttcctagctagcttttctaaaatttccaccaacatgtcctgatttacattccttt

SEQ ID NO: 85748 - DNA, 1802 bp, Homo sapiens
caactgggagttaaataagaaagctgccagagcttgaatcgagtattcaggtttgtgatattgatttcttcataggcatcttttgtaaaatacacttaaaaatttggctacttcctgtatcttgcagtgaagctataattcatctttatttaaatgcagctaaatgaaatggagttttcctcaacacccctttattcacttaaatatcagcaaatattgactgcctactgtgtgcccagcaagacctagcagttagtgcagcataggcatactacttatctgttgttgcatagcaactggcccccaaacttagtggcttagataaaacactcattgtccccaacagattctgtgtgtcaagaattcaggagcagcctagtagggtagttttggctccgggcctcttacgacattgtgctcaaaatatcaaccagggctgtagcatctgaagccttgagagtggctggagaatcagtttccaagatgttcactcacatgctgctggttgctggcaggaatcctcagttcttccccatgggggccacttcatgagttgcttgagtgtcttcatgacaaggtggctggctttacccagagtgagcaacccaaaacagaggtagacaatttctcttatgacctagcgttagaagtcatgcattgtaatttccatactatcacattggttagaggtcagccttaaaggactgactaccccagaacatgaagagcagaaggagaggatcactgggccatttggagcctggctcccatgacggctaagatctcattgatatttacaatgaattggtttttaggattaatactagagataaagttccttcttttattgaccttatattctggtgaagaagacagaaaataaactaatataaataataaaataataaattgttacatacaaatatttgccattaaaagggaaaccatgataaagactcactgggtggtgaaactgggatagtttttataagatcattaagcaaattcctcctcaagagacgtttaaaactgagagttcagtgacaagaaggattgaagcatttgatgctctctggaaatgtactaaggcaaacagagagcttgtgctaaagccttaaatggacacaagcctggcttgtttgagacatagraaggaggccagtgtggttggagggctgtgtaaagggaaagcttggaataagacaaatctcctaggaatttcaatttcattctaagagtgatagggaaaaaaagggaaataatttgtttcaagcaagaaagcatttaccaaggttaatggatacgtagttgcttgaatgggtgtgcatttttggatgtgtatatgggtgtgtgggtgtgactcctggaagagagaattgatggctgtttttggaaccatggacagaggttcttcagccagccctaagcagtattgaccaggtctcagggacaatgtcctgactctcagtgctgccttacgaggttgcgttcatgtaaaacacagaacgagcctgaaggaaaccattttacttcctccatggctccctcaaccaggcagagttttcgagatatgctgataaatgacatatttccataaaatcagtacatatgcctatatcattctttagtttatcagtcgccatgatgtctctcttccacctttcttcaccctacactctctttaaaaggacagatgatatacacgtcttctgtatattttaagcaacaaatacagttacaacacataatacaatgcttgggaaaccttttttgaatgaataaataaatgcctgattaaagaa

SEQ ID NO: 85749 - DNA, 1802 bp, Homo sapiens
caactgggagttaaataagaaagctgccagagcttgaatcgagtattcaggtttgtgatattgatttcttcataggcatcttttgtaaaatacacttaaaaatttggctacttcctgtatcttgcagtgaagctataattcatctttatttaaatgcagctaaatgaaatggagttttcctcaacacccctttattcacttaaatatcagcaaatattgactgcctactgtgtgcccagcaagacctagcagttagtgcagcataggcatactacttatctgttgttgcatagcaactggcccccaaacttagtggcttagataaaacactcattgtccccaacagattctgtgtgtcaagaattcaggagcagcctagtagggtagttttggctccgggcctcttacgacattgtgctcaaaatatcaaccagggctgtagcatctgaagccttgagagtggctggagaatcagtttccaagatgttcactcacatgctgctggttgctggcaggaatcctcagttcttccccatgggggccacttcatgagttgcttgagtgtcttcatgacaaggtggctggctttacccagagtgagcaacccaaaacagaggtagacaatttctcttatgacctagcgttagaagtcatgcattgtaatttccatactatcacattggttagaggtcagccttaaaggactgactaccccagaacatgaagagcagaaggagaggatcactgggccatttggagcctggctcccatgacggctaagatctcattgatatttacaatgaattggtttttaggattaatactagagataaagttccttcttttattgaccttatattctggtgaagaagacagaaaataaactaatataaataataaaataataaattgttacatacaaatatttgccattaaaagggaaaccatgataaagactcactgggtggtgaaactgggatagtttttataagatcattaagcaaattcctcctcaagagacgtttaaaactgagagttcagtgacaagaaggattgaagcatttgatgctctctggaaatgtactaaggcaaacagagagcttgtgctaaagccttaaatggacacaagcctggcttgtttgagacataggaaggaggccastgtggttggagggctgtgtaaagggaaagcttggaataagacaaatctcctaggaatttcaatttcattctaagagtgatagggaaaaaaagggaaataatttgtttcaagcaagaaagcatttaccaaggttaatggatacgtagttgcttgaatgggtgtgcatttttggatgtgtatatgggtgtgtgggtgtgactcctggaagagagaattgatggctgtttttggaaccatggacagaggttcttcagccagccctaagcagtattgaccaggtctcagggacaatgtcctgactctcagtgctgccttacgaggttgcgttcatgtaaaacacagaacgagcctgaaggaaaccattttacttcctccatggctccctcaaccaggcagagttttcgagatatgctgataaatgacatatttccataaaatcagtacatatgcctatatcattctttagtttatcagtcgccatgatgtctctcttccacctttcttcaccctacactctctttaaaaggacagatgatatacacgtcttctgtatattttaagcaacaaatacagttacaacacataatacaatgcttgggaaaccttttttgaatgaataaataaatgcctgattaaagaa

SEQ ID NO: 85750 - DNA, 1802 bp, Homo sapiens
caactgggagttaaataagaaagctgccagagcttgaatcgagtattcaggtttgtgatattgatttcttcataggcatcttttgtaaaatacacttaaaaatttggctacttcctgtatcttgcagtgaagctataattcatctttatttaaatgcagctaaatgaaatggagttttcctcaacacccctttattcacttaaatatcagcaaatattgactgcctactgtgtgcccagcaagacctagcagttagtgcagcataggcatactacttatctgttgttgcatagcaactggcccccaaacttagtggcttagataaaacactcattgtccccaacagattctgtgtgtcaagaattcaggagcagcctagtagggtagttttggctccgggcctcttacgacattgtgctcaaaatatcaaccagggctgtagcatctgaagccttgagagtggctggagaatcagtttccaagatgttcactcacatgctgctggttgctggcaggaatcctcagttcttccccatgggggccacttcatgagttgcttgagtgtcttcatgacaaggtggctggctttacccagagtgagcaacccaaaacagaggtagacaatttctcttatgacctagcgttagaagtcatgcattgtaatttccatactatcacattggttagaggtcagccttaaaggactgactaccccagaacatgaagagcagaaggagaggatcactgggccatttggagcctggctcccatgacggctaagatctcattgatatttacaatgaattggtttttaggattaatactagagataaagttccttcttttattgaccttatattctggtgaagaagacagaaaataaactaatataaataataaaataataaattgttacatacaaatatttgccattaaaagggaaaccatgataaagactcactgggtggtgaaactgggatagtttttataagatcattaagcaaattcctcctcaagagacgtttaaaactgagagttcagtgacaagaaggattgaagcatttgatgctctctggaaatgtactaaggcaaacagagagcttgtgctaaagccttaaatggacacaagcctggcttgtttgagacataggaaggaggccagtgtggttggagggctgtgtaaagggaaagcttggaataagacaaatctcctaggaatttcaatttcattctaagagtgatagggaaaaaaagggaaataatttgtttcaagcaagaaagcatttaccaaggttaatggatacgtagttgcttgaatgggtgtgcatttttggatgtgtatatgggtgtgtgggtgtgactcctggaagagagaattgatggctgtttttggaaccatggacagaggttcttcagccagccctaagcagtattgaccaggtctcagggacaatgtcctgactctcagtgctgccttacgaggttgcgttcatgtaaaacacagaasgagcctgaaggaaaccattttacttcctccatggctccctcaaccaggcagagttttcgagatatgctgataaatgacatatttccataaaatcagtacatatgcctatatcattctttagtttatcagtcgccatgatgtctctcttccacctttcttcaccctacactctctttaaaaggacagatgatatacacgtcttctgtatattttaagcaacaaatacagttacaacacataatacaatgcttgggaaaccttttttgaatgaataaataaatgcctgattaaagaa

SEQ ID NO: 85751 - DNA, 1802 bp, Homo sapiens
caactgggagttaaataagaaagctgccagagcttgaatcgagtattcaggtttgtgatattgatttcttcataggcatcttttgtaaaatacacttaaaaatttggctacttcctgtatcttgcagtgaagctataattcatctttatttaaatgcagctaaatgaaatggagttttcctcaacacccctttattcacttaaatatcagcaaatattgactgcctactgtgtgcccagcaagacctagcagttagtgcagcataggcatactacttatctgttgttgcatagcaactggcccccaaacttagtggcttagataaaacactcattgtccccaacagattctgtgtgtcaagaattcaggagcagcctagtagggtagttttggctccgggcctcttacgacattgtgctcaaaatatcaaccagggctgtagcatctgaagccttgagagtggctggagaatcagtttccaagatgttcactcacatgctgctggttgctggcaggaatcctcagttcttccccatgggggccacttcatgagttgcttgagtgtcttcatgacaaggtggctggctttacccagagtgagcaacccaaaacagaggtagacaatttctcttatgacctagcgttagaagtcatgcattgtaatttccatactatcacattggttagaggtcagccttaaaggactgactaccccagaacatgaagagcagaaggagaggatcactgggccatttggagcctggctcccatgacggctaagatctcattgatatttacaatgaattggtttttaggattaatactagagataaagttccttcttttattgaccttatattctggtgaagaagacagaaaataaactaatataaataataaaataataaattgttacatacaaatatttgccattaaaagggaaaccatgataaagactcactgggtggtgaaactgggatagtttttataagatcattaagcaaattcctcctcaagagacgtttaaaactgagagttcagtgacaagaaggattgaagcatttgatgctctctggaaatgtactaaggcaaacagagagcttgtgctaaagccttaaatggacacaagcctggcttgtttgagacataggaaggaggccagtgtggttggagggctgtgtaaagggaaagcttggaataagacaaatctcctaggaatttcaatttcattctaagagtgatagggaaaaaaagggaaataatttgtttcaagcaagaaagcatttaccaaggttaatggatacgtagttgcttgaatgggtgtgcatttttggatgtgtatatgggtgtgtgggtgtgactcctggaagagagaattgatggctgtttttggaaccatggacagaggttcttcagccagccctaagcagtattgaccaggtctcagggacaatgtcctgactctcagtgctgccttacgaggttgcgttcatgtaaaacacagaacgagcctgaaggaaaccattttacttcctccatggctccctcaaccaggcagagttttcgagatatgctgataaatgacatatttccataaaatcagtacatatgcctatatcattctttagtttatcagtcgccatgatgtctctcttccacctttcttcaccctacactctctttaaaaggacagatgatatacacgtcttctgtatattttaagcaacaaatacagttacarcacataatacaatgcttgggaaaccttttttgaatgaataaataaatgcctgattaaagaa

SEQ ID NO: 85752 - DNA, 1009 bp, Homo sapiens
atttgaacacaatcagatgcttacaggaattcctaatgaggaaagataaaatggctttttaaaagaccataaatcccataagcctgatttttcaattactcgtgaagttgccatctctaagttgaatatgtttttgaggtattctatgaattagaagcacttatgtattctgcttaggcaatcattctattatatcatatacatgaaagtttgacaaactatggcctatgcctgtttttgtaaataaatcttcattggtacttcacattgatgtaaagctttacattgatgtactgtccgaagatagtgtggcctacaaagtccaaagtatttactatctagctctttgcaaaaaatttaccaactcctgatatatattatagggattgttaaaacaaaacaatttgtaagtggagagatattttgtagacattagcatagcttgtaaaagttgtatatcttttgaatagaactatcataatttttatttagaaaaacatttttttaattacaactaatcagtaaattcaaaaactttttcttcccctctagtaatgtcaccacaagactcatccttaatctcactcttcttactctcaatttgtactccatcagtatgtcctgccacggctcctttcattactttaaatacrtgtctttaatatattaactccactgctgcaatcctactgcaagtcgtcattatttctggctagactataccaatagcatctgctgtggactgaatgtgtcccctgcaaaattcgtagttgaaaccctcatcctcagatgacagtactatggggcctttaggaggtgattgagccatgagtatggagtcttcaggaatggaattagcgccctcataagaagggacacaagagagatgatctttttctctgccatgtaaggacacaacaagaaggtagctgtctgcaaaccaagaggagacccctcaccagaacccaatcatgctagcaccctgatcttggactgccaaccttaagaa

SEQ ID NO: 85753 - DNA, 1326 bp, Homo sapiens
gcatataatgaacagctgagctgggattcaaaacatagatctgtctgagtccaaaagccttcatcttggcagtggaatatagtcaatggctaagagacaagaaacaatggagagcttagaactaaccctttggagatgctaacaktcctgggtttggagaggaaatgctggtcaggggctaaataaggcactcaggatgtcagaaagatgtgggacaaaataatgcaaggtggtataatatttctgaaagctgaagaattgacattatctaataatagggaaaaactcaggatgtagtcaagaatcctttatttttggaaatcctaatattgaaagcatagatttcaggtggatgttgaagtctccaatggccaccaaaactgcagggctctaaaaaggtgttaggttttgagaaaaacttaaatgtgacgcagaccttttattcagcaaaaaaaaaaaaaagttgttgcaaaggtaatcactaaaatggacaggcattttaaaatattaaaacaatgaggtttgttgacaggtatctaatagaggaaagaaaaagccagttgagatggcaatattgaaaacggccacctggcacacaacttcggggggtgccattcatcttgagctctgtttcaaggcatgtgttactcatagatcacaatacgaatggtgccctctagagctgtgcaacgcgcatctgtgcaacgatgttgctgtgagagggagtaatgtctcataaaaatcaacatgaaagaataggaaaaacatagtcttggtatttagaaatgttactgtgtgcccttgcgtacttcattttattacctggacctcaatatatataaaattgaaagaccggactgggtgaattgtattaagagcactaggaacataaattcaaatttgtgctgtatttacaaacctcttttcacaatcacaattacatttaatataataaaatgaatgatggcatgttattatattcatcttattattctcatttttattctttttaattttttttttttttgaaaaatagagacagggttttgctatgttgcccaggctggtttcaaactcctggctttaagcagtcctctcacctgggcctcccacagtgttaggattacaggtgtaaagccacaatacccagcccatcttgttattttcataataaataagcttttagtttttaacctgaagttcagtaagttcagccaacttgtctgtgatcagacaactagggactactggtggccaaaataaaaattcctaatggcaaaccctatgtagaaggggatgatgtctaggaaagagatggaggattgg

SEQ ID NO: 85754 - DNA, 859 bp, Homo sapiens
tatgcttaaaaagcaatgtcaagaagagaaaaagaggctctctttttaaaaggctaattgattttcacagaaaccttaagcctcactgtccagtgttgagtcatgtgctcattccagaatggatagctggtgaggaacatagcattaccttaaacttacctcagacctgagcttctggctgtgtgggagaagggcagataactcaacaataccgtgggtgtctcaagaaaataacaactggggatggaatactggatggacatccaaccgtatcaaatacagcaggattctttgaattttattttgatatcctcacaaaaaaacataaaaataaatgatgttttgcatattctaaaccaatattggtgaagagcagagactctaactgattgggaggatttttgttaataaaatatccagtagttttcagctcacakttttgtcattatggagttttttgtttattgcttttatttcttcaaaatcagagtcccctgaacataaagctcataacaaaatcagagttccctgggagcatatagctcataacgttcttcagcatcttctaatgcaaacacagtctgagcttggcaactgtttatataaaaaggaatttgttcaggaaatattgtgaaaagtacagggaacagacacagaaatccacccaggctctgtactttagcattaggcttagaagagttgtggttttgcttcattccctgaaataaaatatttggttgattgtttggtagaggagtgtggacgcaggaaaccacagtgtatacctgggagaggaattggggtggataaactctcctccattgaggggaagcctctagctctatattttgcttctaat

SEQ ID NO: 85755 - DNA, 859 bp, Homo sapiens
tatgcttaaaaagcaatgtcaagaagagaaaaagaggctctctttttaaaaggctaattgattttcacagaaaccttaagcctcactgtccagtgttgagtcatgtgctcattccagaatggatagctggtgaggaacatagcattaccttaaacttacctcagacctgagcttctggctgtgtgggagaagggcagataactcaacaataccgtgggtgtctcaagaaaataacaactggggatggaatactggatggacatccaaccgtatcaaatacagcaggattctttgaattttattttgatatcctcacaaaaaaacataaaaataaatgatgttttgcatattctaaaccaatattggtgaagagcagagactctaactgattgggaggatttttgttaataaaatatccagtagttttcagctcacatttttgtcattatrgagttttttgtttattgcttttatttcttcaaaatcagagtcccctgaacataaagctcataacaaaatcagagttccctgggagcatatagctcataacgttcttcagcatcttctaatgcaaacacagtctgagcttggcaactgtttatataaaaaggaatttgttcaggaaatattgtgaaaagtacagggaacagacacagaaatccacccaggctctgtactttagcattaggcttagaagagttgtggttttgcttcattccctgaaataaaatatttggttgattgtttggtagaggagtgtggacgcaggaaaccacagtgtatacctgggagaggaattggggtggataaactctcctccattgaggggaagcctctagctctatattttgcttctaat

SEQ ID NO: 85756 - DNA, 674 bp, Homo sapiens
aacatctaaatatatgacagtttttggttatggcaatcaaaataacaaacagaaggagattcttcaaaaataagtttattcaggaacgagcattgcaataggaatacgcatgggtgttttcagggaggcaaaagaagrtaaggatttttaaaggtaaaatgatgagggccacataagtgtttctgaaatagttatccctggctacaagcatgaataaccaggattgcctcagtctaaggcaggacaggcagttgctgggcagatgtccttgcagaagtattttttatgtcggtttgcagtggccttgtgcacagtcgtggttttggcagaatctttcatgatagctcttgttatcaggcaatcatgtgtgagaaccctcccttcatggccttcttagacaccattttgtcaggatttgacccaagtgactccattttaattctgacaagtttcacagctctgagcgagaatgaccatgaagcggatcttttttttttttttttaaagtattacttgatttttgaaggtcatagggcgcagtgtagtcctgcctctgactcttactagatgtgaaaagttgaatttttaagcattctaaattccaatttcatcttctgtgtagcaagagtagaaatatctaacttgcagcatactattttttaattttttttaac

SEQ ID NO: 85757 - DNA, 674 bp, Homo sapiens
aacatctaaatatatgacagtttttggttatggcaatcaaaataacaaacagaaggagattcttcaaaaataagtttattcaggaacgagcattgcaataggaatacgcatgggtgttttcagggaggcaaaagaagataaggatttttaaaggtaaaatgatgagggccacataagtgtttctgaaatagttatccctggctacaagcatgaataaccaggattgcctcagtctaaggcaggacaggcagttgctgggcagatgtccttgcagaagtattttttatgtcggtttgcagtggccttgtgcacagtcgtggttttggcagaatctttcaygatagctcttgttatcaggcaatcatgtgtgagaaccctcccttcatggccttcttagacaccattttgtcaggatttgacccaagtgactccattttaattctgacaagtttcacagctctgagcgagaatgaccatgaagcggatcttttttttttttttttaaagtattacttgatttttgaaggtcatagggcgcagtgtagtcctgcctctgactcttactagatgtgaaaagttgaatttttaagcattctaaattccaatttcatcttctgtgtagcaagagtagaaatatctaacttgcagcatactattttttaattttttttaac

SEQ ID NO: 85758 - DNA, 691 bp, Homo sapiens
aaaaattagctgggtgtggtggtgggcacctgtaatcccagctacttgggagactgaggcaggagaattgcttggacccagtaggcagaggttgcagtgagccgagatcgtgccattgcactccagcctgggcaacaagagcgagaatcagtctcaaaaaaaaaaaagaaagaaagaaagaaagaaagaaagaaagaaagaaagaaagaaagaaagaaagaaagaaagaaagaaaccccatctctaccaaaaatacaaaaaaatagccagatgtggtggcacacccctgtagtcccagctactcaggaggctgaggcaggagaatcacttgaacccaggaggcggagcttgcagtgagccgagatcgggccactgccctccagcctgggcgacagaacgagactccatctcaaaaaaaaaaaaaaaattatttggataattctcccaaaagaaataccacacatgtacatgcagaaaaattcagtcttgaagatcaaatttgtcattcaaattaattaattttaccagggaattcctcatttgatggctacatggtatagtggaaagattattcaatcatactatttgtattgcaaataacaaaaaattcrgctcacactattttaatggaaatttattgtatcatatatttggagattccaatagtatgttctggcctttgggcatggtt

SEQ ID NO: 85759 - DNA, 1024 bp, Homo sapiens
atactagttagtcagcaataagaaggattatggagtttcagtagttactaataaacttgaaggcatgaacaaatcccataggcataatagctgttttgtttttcagaggcggtcttgctctgtcgcccaggctggagtatgcagtggtgagattatagctcactgcagcctcagacttctgggctcaagcgatggtcccaggagcctcggcctcccaaagcactgggattacaggttcacaccaccatcgccggccactgttgaaggaaaaatgccagacgcaaagagaatgtggactctaagattccattattttaagttcagtaacaggcgaaactagccgatcacattagaaataagagcagtggtggcctctagtggggagggaaattcattaaaaagagacaatttctgcagcgaaggaaaggttctatatcttgatttggagattgagcccatacatacatacttaagaccagcgtattwtaccttcactaaaatataattcttttggatttgaaaatttaataatcaactaaacacatttggacatggacacgtccattatgtcccaatttattgagctcatcctgtgtgtggctatcattgaatcctcccaacacctccttaagtgggtactattactattcccattgtttagatgagaaaacacaaatgcaaaatacctgagctacacttgcccaaggtttgcaggatgggaaggtgaataagagacttattcaccttcaggggtttgtgctcctgatcccagcgctacctgttctgggccctgggctgactgctgggagccttcatagaccccacaggccagaggaggagacagtgtgtggggtggtgatgaccacagggcatgtctagtccctgggggatggatggggcaaggtcctaactccacctgggaggatgggagtgggtatgggagaaactctgttatgagagtgagctcagggccactgggggcaggggtaggggtcaccctacaacatgatctcataactgatca

SEQ ID NO: 85760 - DNA, 646 bp, Homo sapiens
tattttatttcaattgtatgaagatattgctactttgtctttttgaatacagtattactgatgttattctagttctcattcctttatgatttattttccacttctgtgtaaaatttctccttagaagttaattaattttcattatttcctcaggtttcattttgtgatttctagttatgaatatttgttcttgtgctttttattgatcttgcttggcaattaacaagttctttaattttagccatcatctttttaaaattttgttcacttggccaggcggggtggctcatgcctgtaatacsagcactttgggaggccaaggtgggcggatcacctaaggtcaggagttagagaccagtctggccatcatggtgaaaacctgtctctgctaaaaatacaaaaattagctggacctagtggcgggcacctataatcccagctacttgagaggctgaggcaggagaatcgcttgaaccagggaggcagaagttgcagtgagctgagatcacgccactgcactccagactgggtgacagggcaaggctctgtctcataaataaataattttgttaactttattttgaagctttcaaaattttttttattttttatttttgtgcatacatactaggtgagtatatttatg

SEQ ID NO: 85761 - DNA, 678 bp, Homo sapiens
tgcatcctaaatacaagtggagagctattcggattttatgttcaatatcccatagtctattaagaactaatgttagttaagtagagattctgctgccctggctgcttagagggacatgtctggacttgaccatatccaaaccaatggggatagagtggtttgagktgggccaaggagagtcaggatgattatttgtgacttttgaagcacatatgagaaaagaaaccctgtcttatcaaggactggtgatcttagctgtatcttctctcaaaacaccctacaccaaattcaaaaacagggcccatacccaaagatattctattctactttcttttcttgctgacaaagatgaaatattaggcagctcgtcctaagacccttatttgtttgcttgtttgtttttacactgtcttgctctgtcgtccaggctggagtgcagtggtgcgatctcagctcaccgcaacctgtgcctcctgggttcaagtgattctcctgtctcagcctcctgcgtagatgggactacaggcatgcaccaccacgcctggataatttttgtatttttagtaaataggggctttcaccatattgaccaggctggtctcgaaatcctgacatcgtgatctgcctgcctcagcctcccaaagtgctgggattacaggcgtgagcaccatgcccagc

SEQ ID NO: 85762 - DNA, 678 bp, Homo sapiens
tgcatcctaaatacaagtggagagctattcggattttatgttcaatatcccatagtctattaagaactaatgttagttaagtagagattctgctgccctggctgcttagagggacatgtctggacttgaccatatccaaaccaatggggatagagtggtttgaggtgggccaaggagagtcaggatgattatttgtgacttttgaagcacatatgagaaaagaaaccctgtcttatcaaggactggtgatcttagctgtatcttctctcaaaacaccctacaccaaattcaaaaacagggcccatacccaaagatattctattctactttcttttcttgctgacaaagatgaaatattaggcagctcgtcctaagacccttatttgtttgcttgtttgtttttacactgtcttgctctgtcgtccaggctggagtgcagtggtgcgatctcagctcaccgcaacctgtgcctcctgggttcaagtgattctyctgtctcagcctcctgcgtagatgggactacaggcatgcaccaccacgcctggataatttttgtatttttagtaaataggggctttcaccatattgaccaggctggtctcgaaatcctgacatcgtgatctgcctgcctcagcctcccaaagtgctgggattacaggcgtgagcaccatgcccagc

SEQ ID NO: 85763 - DNA, 678 bp, Homo sapiens
tgcatcctaaatacaagtggagagctattcggattttatgttcaatatcccatagtctattaagaactaatgttagttaagtagagattctgctgccctggctgcttagagggacatgtctggacttgaccatatccaaaccaatggggatagagtggtttgaggtgggccaaggagagtcaggatgattatttgtgacttttgaagcacatatgagaaaagaaaccctgtcttatcaaggactggtgatcttagctgtatcttctctcaaaacaccctacaccaaattcaaaaacagggcccatacccaaagatattctattctactttcttttcttgctgacaaagatgaaatattaggcagctcgtcctaagacccttatttgtttgcttgtttgtttttacactgtcttgctctgtcgtccaggctggagtgcagtggtgcgatctcagctcaccgcaacctgtgcctcctgggttcaagtgattctcctgyctcagcctcctgcgtagatgggactacaggcatgcaccaccacgcctggataatttttgtatttttagtaaataggggctttcaccatattgaccaggctggtctcgaaatcctgacatcgtgatctgcctgcctcagcctcccaaagtgctgggattacaggcgtgagcaccatgcccagc

SEQ ID NO: 85764 - DNA, 658 bp, Homo sapiens
aaaattaagattgcattttcataattttataaactatttttcttacttaacaatatattgtgaaatttcacaaggctttyccccaatattgtaaagtgttttcatgaatattattttaatgtactagattgaaacatatagaattagtaatatttaatgttttttaacctatagtgtacttttttttttttttactagagaaggtttgtgtaaattagcagtacatttatttcttcctcatttcagaaaatagcaaaattgtatgcaggaaaatgggggaagccagaagaccttgcgacctggcacccagaggtcagatgccatttcagagatttgggaaggctccaactattgcttttaagatacacctatgcctaaacaccactagaaatgacacaacttatttctatcccataggcttgaaataagtaagagagagttgctatgaatttggttaaaagagtaaacctagtgagaaaaaaagtagtttagatggtcgtcattttgacatcaaatgatggcaaccaaataaggttattttcaccatcataccatcagaaaagaaagattcgggatttggaaatcaatgaaagcagccagaaaacttccctattgtgcaacaaacaagacgtggaaacactcgtgagttgactctact

SEQ ID NO: 85765 - DNA, 591 bp, Homo sapiens
tgtttcagatagtgaaattcaaaccacatcttcaactttctgcagtaatgtgtcatttatctggaatcactcatcagtgagctatgcaaacccaagacagtttttcaaaagaattttggagggaagactttattttttaaaaacaagttataatataatgtctgctttaaatattaagtaccatttaaataagagtttaccaaagtgtgtcttaaggcatagtaatcccataggatattatttgataaaatayattgtattgcctaacctattaaaacctgttaaacctattaagatcctgtaaaattgttccttttagagatacatttttatcagaggctaacttaccttatcctctttccaaatagcatctcaataaggtaaaatttatacaggaaaaaaagctaatgtatccaaatgaacatctctgagaagaagatataaaacatctccatcctcctgtgagggttctttatgcctttttccaacaaattccatctctcaagccaaccactttgttgacaccttttttttgaaacttttattttaaattcaagggtacatgtacaggttttttatataggtaaactc

SEQ ID NO: 85766 - DNA, 577 bp, Homo sapiens
aatggtcattgcatgacagccccttggccactgcaacccagacttaagtgtgcatgctcatagcacccaaagagaatttaccacacactagtccctttcttccttttctcgaacttcctttgtggctatgtagtgggtggtcaccactggagatgcctcacaaccttcaaacaaggaagcaccatgctccccatcccccatctttgagctttctgctaagtgaagtctgcctgattcagtcatagccagggaggctggaccattggctgggtactaggtgagtctcaatctaattgtatcttgttaagatcaaagaaatgtcttttgggtgcatatatatatatatatatatatatatgcatcttcatgcaaatgaggcaatcatatattggtactaaagtggactgagatgcaacctcaataggttgttcagatttcagctgaattctcaaatctactttcttggctcttctggagattcagctctttctagaaaatccttaggatgcccaaaacaaaaagaaaaatctgtaggtggccccagaacagtatttcccaaagtgcrccttatggcttg

SEQ ID NO: 85767 - DNA, 1595 bp, Homo sapiens
tggaggtgcatgagggaaatcccttgtgagtcaatatttgactaagacctgaaagcactttgggtgtgcacatcactgtggagagcaccctggcccaggtaggagggcagctcctgggcctgcctctgctataaccttgaacgaataacagaaacatgcccagcttctgagagcatggaaaaatagaagacattttatgtttttaacttgaacattctgtagtacactggcagctcaaacattcagacaaaacatttgtttatattgcattaatggtgttatctctaaggagagggattacacaggagctttattttcttctttatagttwcatatttttcaaattcttccataatgagaatgcataacatttattatcagaatagaaaactatttgtaaaaacaaatcaatgcatttttttaaaaaaaacctttaaatgtggagaaaaggaaataatcattttctgattatttggcattggcattagtttgacaacattacaaggagaataaattttttctccatttttcagctgggagataccatgtagtaaagcaaaagagaagctaagatgggtgaatcctaatttccaaagcaacatggtcttaacagcaatgcaataaaaaatgttatcatacaggttgatgaggtcctactgaccagaggcttgatgtactgggtattgtcgtataaagtaagtataggtgcatgatttgactttaaccattatgggctttgctcaatggtgatacggattgttacagaaagagcagtctcactaaacactctcaacataaagagaatgctttcttaagtctcttgcaccaagtcagctttcttacattttgagagtttcttatttagcctgagaggtttagtttttaataatcaatgaattgaaatgttccagaatgccaaagaggctaagtttaataaaggggtttctctgggctatgccacctgaaaatatgtgtaagattagataaatcccagaagtaaatttatttggatcagctgtcagtaaggtactcaggactagacatgcagtttctgtcttaaagaagaaacaggtttctctgcccttgtgcctaaaatgcaccttggcccttgtctatgggtgcaaactggccctttgacctttgttgtaattaagagaccagccaactcatttaataaagaactatattccaggccagttgctgtgactcatgcctgtaatcccagtaatcccagcactttgggaggccaagacgtgcagatcacgaggtcaggagtttgagaccagcctggccaacatggtgaaaccccatctctactaaagatacaaaaaattagccgggtgtggtggcatgcacctgtaatcccagctactcgggaggctgaggcaggagaatcgctggaacccaggaggcggaggttgcagtgagcagagattgcaccgttgagtcattgcactccagcctgggtgacagggcgagactccgtcttaaaaaaaaaaaaaaaaaagaactagcttccggacctaaatctacttagttgttgattcttcttagttgttaaaacataaaatagattatatatgtcatatttgtgt

SEQ ID NO: 85768 - DNA, 598 bp, Homo sapiens
ggatccagctgccacatgcaagggccaggatgcaactgtgcctgaaaattgtacttttaacatttctgctcccatcggacagttgcttcattcttctatttaaaggatttcagtgcttctgaagttcatacagggcagaccgaagtgctcattctggtcaaataaactgtggccaaagggttggagttatgcgtaaaataattgatggttgctgtgggcaagggggtgtcatctcagagagaggccttggccactgggcagaatttccacaaagcagactatattaccttcacattcccaaatataaagtttttgtgaacaaatatggttccatatgccttatawtatttatattatttttatattatttttaatttcattaatgtaatgccagccactcaccccaaaggtcttctactattttcacaaaggatcacctcaaaaaaataaattttaccttatcccaagtgatagcataaatatcctatataaaatccctccaggcctccaggtcagctttataactgttttttttttttttcagtagttgaggattttttgtgtgtgtttgtttttgttgttgttttgttctgttctg

SEQ ID NO: 85769 - DNA, 705 bp, Homo sapiens
tcgtaagattttacttaattgtaccatttgagttttcttattatattaatagttgttttctgagttacctttcattaacaactctttattttctaattttaacctttgatcaaagaaaagacaatgttaaaaattgactgtctaaaatgtgaacaatgttaaaaacactaggatttttaactgctgartccaagtatagtgtctgccccagaggctcagtccgatggacgtgccttccctttgatatttgtttgccagtctgtttgggtttgttagtatatccatgttgtttgttttttgaacttggccttttatgattttgtaaataagtaaaaaaagaaacaagtatgctactttaaaataaaatctggcttactaacttaattttctaaaaattaaagaaaaaccacacagatgctttaaactaaatagtagttgatataccctgtctaatgaagggtgtgtaagtaaatctttgtgtcaaaccagccttttaatatggtttaattcagcctggtgcctgggtccgaccagatgtttctgttcttagaactcttttctgttactgactgacaccaagtaatgcatataattaatatgcaaataaaattatctatataattagtacttggagacaagattttaagtagttcttgtctgcacttatcactttacatatttatatttctgagggaggtaactatc

SEQ ID NO: 85770 - DNA, 591 bp, Homo sapiens
aaatctgaaatttaactatctaacagggaatatgacaaagtggaaatttgtttaactatgcaccatatcgtagagaaggcaccaatacgaattaggttatttctgtgtaggcacaagactgtagttgcaaagctgcactgcagtagatgactcttttttttttttgagacggagtctcgctctgtcgcccaggctggagtgcagtggcgcgatctcggctcactgcaagctccgcctcccgggttcgcgccattctcctgcctcagcctcccgagtagctgggactacaggcgcccgccaccactcccggctaattttttgtatttttagtagagacrgggtttcaccatgttggccaggatggtctccgtctcctgacctcgtgatccgcccgcctcagcctctcaaagtgctgggattacaggcgtgagccaccgcgcccggcccagtagatgactctttaaaggtcattttagcaagtgtaagatagatcttttgagggtgcacatagcccacctccctcagtttggttttctgtttcattgactgtattagcgttaaactttttaagagtgacaggctgcaggaagg

SEQ ID NO: 85771 - DNA, 722 bp, Homo sapiens
tagacaacatggtgaaaccccatcgctaataaaaatttaaaaaattagctgggcgtggtggcagctgcctgtaatcctagccacttgggaggctgaggcaagagaatcacttgaactcgggaggcaggggttgcagtgagccgagatcgcatcactgcactccagtctgggagacagagtgagactccgtctcaaaaaaaaaaaaaaaaaaaaaaargaaaagcaaagcacatataccacttgtttccatatatattccgagtaaatgcaacactgtgtcttatatcatcaataatacgtatcactttttatctttccaggaaatttaattaatttaaatattaaatattacaggaatgaatgcatgtaaaatcatttagcattcacataaaataatcctcttaatccatcactcaaaatagagcagaaaatcccaattctttatcaaaatgtcaaactgtagcccctgcccccacccactcaacattttatgggccattaaatgcaccaaaaaataagaaaaggtgtaaaaagtgtgaataagcatcccaaaattatagcaaaaataggcattgcaccaaggggctttaagaaaacaatcgataatggcaatgggcatatacattatgcttgtccatattcttattttcaagatttctgagtcatatcccagaaaaagaacaccccacacatttttagtttgtgtctatacgtgggatcca

SEQ ID NO: 85772 - DNA, 1112 bp, Homo sapiens
attttttaaaactattataataaaaacttctaggttttcttaattattctttagttatagcattgtgctcatatttaaatgcacatcaaacactgctttgccttttcttgatttcttaaatttcagaaaagaacataaaatggtatttagtcactcacagaggcaatgccccattcattaacctattgggtgcagctaacaatgctaataggattgactgtaaaatagcttaacttgatatttctctcttcacatagaaaatgtgagcttagtaataaccttgtatgcctcatttagcagactggccagagaataggaagagatttatttaaaaaattgtacacggtaacagtggaggtgcctaaactaaagatcttctgttcagctcttgtattttatatgctatactagccccgcttctgccattccaaattatttcaagacttcacatgtattaagagagacaagttctttcctacagtttttttttcttaaagcataacctcatgctatcaatttcttttgatatgctcttttctttgagcttgtcatgagtccacctagcatatttttcttcaatttggtgcacttcgaaaatggtaaaaaattagtacattctgagtggtgatcttccaaatttagacacattctaaagagtccaagatgggtaaagaaaaaaagcacagagagaacacctaaatgtcttctttccttagtaaaaatagactgttactttctaccacaaaaataaagttatagattccacagtggcatagataaatatggcagaactttgtactttcttcaaaaagcataatttatactaaaataggcacataagaagtggcccacagtaaagtgaaaactgtgggtcttgacagccatgtggcaagtcttccaagggaagcaatgcactgcttaactyagcagaattccatgtgatgtcatttttcttcaacaaaaaaggtcctctaaagttgatatattcatctggtaatatatccatctagatttaaagcagaataaaattactatgcttctgaaacaaaacataagtttggtggacttccattccattttgagtagctagagataaaagacttatatgagct

SEQ ID NO: 85773 - DNA, 1006 bp, Homo sapiens
aatattttgtccggtactatataatatatatagtagatactgtacccagaccatcacggaatgtggtaaaaatatatatatatataaaataaaataaatgtttctaggaccatctaagtgggaccctggggttaacaaacatctaagaagagctggctggcgctgggagcctggctcttccacttacccatgaaggcattgactttataggaattcaatgagaattaatgatgcagctgcttcagagaactgtaagctactttagaagcagagaacttctcagtaaagccccaaaaccaaagaagttcatattcttctgaatcctagtgatggtccagctcttgatgaaagcggccttgcctcaacccctgccrtgctctgctccttcccacccacctcagccccgtggctcctgttgctttgttttcacaaggtggtttgtttttcatataacttacaaaattgtcccttggacttctgaattaagaatgtctaggtggcgaagcaaaatccaaatgataagacgcaatagtacgtattattatcattatttggtatatgaaagagtctgcttgtgtttcataatggaagactggcaagtaaggtactgctgtctgaatatttcccattaaggtggcaggagatgagacagcaccagggtcagtgccacctgaagctaaattatcacttaatatacatagtgagcagctgatgtccagaagtgagcatcaagctccttgctaacatgatgagcaatggccatctgtccccacaaagccaggcagcgtgaccttcagtcccaggcattgctagcatcattctttcccatgatgaaggacgagagaaagagctgctctggtaattctctgttattagcaacaagaaaaaccaaagttcttgtccctgtttttattacatattttctcctaaaaaaagaaatagagggagaatcaaatgggaacctggacagcaagttaaagcttagagctgtgtgattctatttcct

SEQ ID NO: 85774 - DNA, 576 bp, Homo sapiens
ggtttattctggtattattgtaattagttgccacaaaagcccctaaaggtgggaactggttgtgcatgtgtggatcactgtgtgtattctaatggtgcttaacacattgtctattactgccttaatgagcatctgggctcactagaacccacaagctaagcaggtgttaatatttccaaagctaaccaaaacccctggcacagcaatgaggtgcaagctctccttgtatctgcctccttgcacctgggctgcaagtgacttgaactcagttagactggagctcttcagtaagggtttctcatttggggttttccccgaatagctccactttgggaatctaggtattgtaaaaatagaacaccggggggatttgaatttaccattacacaaagagttcttggggagttttttgtttttgtttttgttttttcccttgccaaaatgttctttccctcagaagatccacaaggtgaggattcttagcagaggtgagcagtcatggggatcacgggctccatagtctcacacagcccccggtactgggcaggcacaacccacacaaraaacacttgccat

SEQ ID NO: 85775 - DNA, 568 bp, Homo sapiens
tgtgaggcagagaagaaaggcaagcgaagaagctctaggcctttcactyggggtggaccatgagggaaacgaactgtgggaatgctctgctttttcttgtttctgtgccttctattatgaggaaggctggaggctgggcctggtggcacatgcctgtcatctcagcactttgggagactgagatgggaggattgcttgagcccaggagttcaagataagcctgagcaacatagcaagaccccatatacaaaatatgtaggcatggtggcacgcatctgtagtactagctactcagaaggccgaggtgggaggatcgcctgaatccaggagtttgaggctacagtgagctgagatcacatcattgcacaccagcctgggagacagagcaagactccatctctgaaaaataaaaataaaaaggaggagggctggagagggtggaacaggctaagagtgaaaggaaagttcacgttgaagtagcactcagcttctgcaacagtccagacttctggcctagcaaggccatcctaagagctgacacattagtgtagacaaaatggcagacacc

SEQ ID NO: 85776 - DNA, 568 bp, Homo sapiens
tgtgaggcagagaagaaaggcaagcgaagaagctctaggcctttcactcggggtggaccatgagggaaacgaactgtgggaatgctctgctttttcttgtttctgtgccttctattatgaggaaggctggaggctgggcctggtggcacatgcctgtcatctcagcactttgggagactgagatgggaggattgcttgagcccaggagttcaagataagcctgagcaacatagcaagaccccatatacaaaatatgtaggcatggtggcacgcayctgtagtactagctactcagaaggccgaggtgggaggatcgcctgaatccaggagtttgaggctacagtgagctgagatcacatcattgcacaccagcctgggagacagagcaagactccatctctgaaaaataaaaataaaaaggaggagggctggagagggtggaacaggctaagagtgaaaggaaagttcacgttgaagtagcactcagcttctgcaacagtccagacttctggcctagcaaggccatcctaagagctgacacattagtgtagacaaaatggcagacacc

SEQ ID NO: 85777 - DNA, 568 bp, Homo sapiens
tgtgaggcagagaagaaaggcaagcgaagaagctctaggcctttcactcggggtggaccatgagggaaacgaactgtgggaatgctctgctttttcttgtttctgtgccttctattatgaggaaggctggaggctgggcctggtggcacatgcctgtcatctcagcactttgggagactgagatgggaggattgcttgagcccaggagttcaagataagcctgagcaacatagcaagaccccatatacaaaatatgtaggcatggtggcacgcatctgtagtactagctactcagaaggccgaggtgggaggatcgcctgaatccaggagtttgaggctacagtgagctgagatcacatcattgcacwccagcctgggagacagagcaagactccatctctgaaaaataaaaataaaaaggaggagggctggagagggtggaacaggctaagagtgaaaggaaagttcacgttgaagtagcactcagcttctgcaacagtccagacttctggcctagcaaggccatcctaagagctgacacattagtgtagacaaaatggcagacacc

SEQ ID NO: 85778 - DNA, 568 bp, Homo sapiens
tgtgaggcagagaagaaaggcaagcgaagaagctctaggcctttcactcggggtggaccatgagggaaacgaactgtgggaatgctctgctttttcttgtttctgtgccttctattatgaggaaggctggaggctgggcctggtggcacatgcctgtcatctcagcactttgggagactgagatgggaggattgcttgagcccaggagttcaagataagcctgagcaacatagcaagaccccatatacaaaatatgtaggcatggtggcacgcatctgtagtactagctactcagaaggccgaggtgggaggatcgcctgaatccaggagtttgaggctacagtgagctgagatcacatcattgcacaccagcctgggagacagagcaagactccatctctgaaaaataaaaataaaaaggaggagggctggagagggtggaacaggctaagagtgaaaggaawgttcacgttgaagtagcactcagcttctgcaacagtccagacttctggcctagcaaggccatcctaagagctgacacattagtgtagacaaaatggcagacacc

SEQ ID NO: 85779 - DNA, 568 bp, Homo sapiens
tgtgaggcagagaagaaaggcaagcgaagaagctctaggcctttcactcggggtggaccatgagggaaacgaactgtgggaatgctctgctttttcttgtttctgtgccttctattatgaggaaggctggaggctgggcctggtggcacatgcctgtcatctcagcactttgggagactgagatgggaggattgcttgagcccaggagttcaagataagcctgagcaacatagcaagaccccatatacaaaatatgtaggcatggtggcacgcatctgtagtactagctactcagaaggccgaggtgggaggatcgcctgaatccaggagtttgaggctacagtgagctgagatcacatcattgcacaccagcctgggagacagagcaagactccatctctgaaaaataaaaataaaaaggaggagggctggagagggtggaacaggctaagagtgaaaggaaagttcacgttgaagtagcactcagcttctgcaacagtccagacttctggcctagcaaggccatcytaagagctgacacattagtgtagacaaaatggcagacacc

SEQ ID NO: 85780 - DNA, 1046 bp, Homo sapiens
ttaaatatatcaatcttttcttagaatattaaccaaattgagaaattttcattaaataaaaatcactatttttcttaggaaatcaagagccacaaaaaattatactactgtattcaatattgctaaaaattttaatttccagggtaattttctatttattatctttctcactaaagttttagagttttagagatgatgaattaaaaaaactattatcaatgttaataatctcaaacccatatatctaagaatgtatcatacagggtgtattttttccttaaaaatggggtctaactaagataatcaattctcttgcattcttttttggaagagagaactcatgacaggattacrtcttattcagacattattttggtatatataattgactacaaaatataatacattttatttaaaaatttaggacaagtaaatttgtattcctcatttcacttcaattccttctgaataattaagcaaattctaaatcagctgtaattttagttcctagacaggaatatctaaaatatttttgtaaatatcttgttttttaagtatgtataaggcaatacaaacaggaatttgatgatgtctgtatcaatgtcctatgaaggaaagatataagacaatctgataactagtttatttttcatttactgtatgctttccttttgttagacacttcattggccctctactttaaaaaatataaaatcatttcttagcattttttctaattgctttcaagagaagaaaattagaatgtcagtttttctgggaggtaaccttgaaatagaagagatgccctctgaaaattctgtatttattaaatgtcaataattgttttaaaactgcttttcaatgaacagtattttgatttcctaaaatagatcattgcttaattttttgtccctagcaatatcaatggaagtttaggagtaaaggagattgaagcagcacatgtttgtttaaatcactctgcctccttaggagagatcctattctggagataagcatgatataaatggaaagttcaagggttatta

SEQ ID NO: 85781 - DNA, 627 bp, Homo sapiens
attgtgtgctgaaaattcacactacttttttttcttgtatgtctttatttaaaacccttttcaaaacccactaagtttattttgtgatccactaggacccacactgtcctagaataaaattttcaattcctctgtcaaggattcttggctgcaaaacctgatactgcatttcccyttagcccttccacttctgtttttctcctcttcactaaacaactcacttcttcattaacaatatctctacttcatactacagaacttaatcctacaaatatttagtgggcttttaatatttgttgatactgtgtcaggaactggatctatgaaaatgcttgtcattttctgtgccctggagttgagtaatgaattgggcagcatctttaacagtgaaattggatcatcttgtgcagtcttttccaaattattatttagagactgttgtgttctgttgagcttctccattgccaattcacattaactgactgatgagcacgaacctccattttgcagatgtcttataatagtggttactggtaggaaatggatgattgtcagctgtctaatgtcaatggacaagatgtaaaagacaaaattgacatatagttttagatagatgcttaagatctt

SEQ ID NO: 85782 - DNA, 607 bp, Homo sapiens
gaccttgatcctgaattttgcacatgtagctaagtgtatcacaaaaggtacaattaattgagaagagttgaatggtaagaagtgttcaattgtcaagtgataaaattgctaatatatcaaaatattagaaaaacaagactttatcctagaagtgactatttttgctttactttttaacatatttaatgtctacttttctaacatacaacgtatgatagaagaggtattggctcagctaggctttgaagaatgtctgggatttaaaaatgagcagggagcaaggagcaagtcaagaagaaggaacatcaagaatgtaatctcacctgcctgtttgctttgggaagtccagggttataacactgtttttgtccaataattaatggtacttcctttcactctcagaagccactcaaaaggcaggcatgcaaggggtccatgtgatctcaygtgcaaaagtcagggtgagtctgaatgtggggactctgtagttataactgagggattggactttagttattttaactaagagtggggaaggatattgaagatatatgaggagggtaattagcactatgtttcagagaaaaaaaaatcagatagtagttta

SEQ ID NO: 85783 - DNA, 852 bp, Homo sapiens
tcagatcttcgcggagcggatcagcggccggagcgtttggcggactctgcgtggacttggagctcacagcgtcttgcgacttgaaagcggattcagaggacaggacagaacacttgggcaagtgaatctctgtctgtctgtctgtctgtctgtctgtctgtctgtcccattggttggttgatttccattttcttaaggggcacatagctcacaccgcacacacacaaacacacacacacacacacacacacacgcacacgcacacacgcacacacactccttccttctgcgagttagaacattagtaggggcccctgggagctgcaggtttcctaatcatgtctgcacctaagaacagtagggtcttgtctggctcttcttatgaacggtcccccagcacggacaccccaaggtccatgcgagcctcacccagcttctccctctcccctctcagaaactcaggcttaaggggaagctcctcaccagggatccggaactgccattcaccatcccctagggcttcaccacactcacctctgtcatcaccagaatcccacaagctcccatttccctgtcctcaccgtgatgggcaatcaatgaagccattgggctctgccgtgtcctcctctgaggactcctcagagtccccacgttcatcaataatataccacatgttcttactgccatcacccagcagctcayccccagctctcggggggtctcctgtgtctcccagctactctccaaacaaccccagatttcagctggagtcagccccccacacccaggaatcacctacaaactcacgagcctcacgctgctccaccctgtgtcttgcatctcttcaccccc

SEQ ID NO: 85784 - DNA, 596 bp, Homo sapiens
aattgcttgcatgcccttactccacaaactgaatgcaatcttctacccagatatcccttctgctgaaatatgcacaagtttgcctatgttcttgcaaaataatacaagggacagggaagagatgtttggtgactcctcttatccctgttaaaactcctggcacactcaaagttaggaataagctcatgctgcctctccattaatccctccgactgctcttaatcatgaaaatgctattccactgactttatagcagtcctttaaaaaatgaggttgggctcaataaattttgtaggtcacaattgtttataaaacaatattgataaagcagttcaggagatgaaaatccccttcaggattgttgaaacacaaatgtaaagggtcagcacagtcactgtcctctgactggtataaagaatcaasggcactgtaaaataaaacataatgctaaaatacagtggtttgtttcctgcagagaattctgagagagagaaaaaaaatccttatgagggaagaaggctagtgaattagaagcaggaagacagaattttttaaaaaagaagaaaaaataaccatttacttagcatctactaaat

SEQ ID NO: 85785 - DNA, 786 bp, Homo sapiens
tgcatctaatcattttagtttgcatatatttgattagcagagaaatttaacagttttcaatgggccatttatgtcttatgaaatgccttcttatgtgttttgttttgccccatttttaaaatttacatgtttaccttttttcttattgatttgacaaagttcttaatatattaagsatacactcactcatatatatggcaagtttgttatcttttgtttttcaagccttcaaactttaaaactcataaaccccttttcttatcctttttctcctagaaatttcttcattttttttgtttttgctacccaaatatttttacagtggaaatcactgtcataatacaggctgtagctagaagccaaacatggttttcaatcatatttctgccacttactccctgtgtaatttcaggaagtaattcaggatcccagagcttcagtttccttatctgtgctagataatctctaatatactttcatgttctaaaattcagtacttctatgaattggcaaatatggaagttttcatttgatgtgcatttatgtttacaggaacatttattttaagttttaataaaaaatgaaatgtaatgtaatggagaaaagagcttgctaaagtaattgatttgttaaaagaataagctttctgtccagcgagaaaacatgtgtctcaaatgaatgttcctttaaaaggtagattttccagaagactgtattataacaaccacagtttgttagtgttcctaaaatgttccctgaaatttacataatcctccctcatttttt

SEQ ID NO: 85786 - DNA, 1084 bp, Homo sapiens
aaggtcgaccctggcgcttcatactttctcctacgcatcatagcaaagtccaagatattccagaggaatatgagctaacagaaaatctgccaacaaaccaaacaaatatacaaggagcaccgctattataaaaagaaaaaaaaagtcaacaaatggaacacttaattcgaaataaagaattaaagaccattttattttttttccagattattttgtggtaaaaataccatatgtaatacataaaacatacaaaatatatgttaatccaatatttatgttattgttaaagcttccagtcaatagcagaccattagtagttcaattctgggggagccaaaatttttttttttttaacttctatgttatgttcagagttaaatgtgtgggtttgttgtataggtaaaatcatatcacagcatttgttatacagattgtttcatcacccaggtactaagccgagtacccaatggttgttttcttctgatcctctccctcctccctccctccaacctccagtaggccctagtgtttgttattccttttattgtgtctatgattaacaaccattttacattagcctgacatacatccttaatgaatamaggcaatatttgacatgaaaattttgaggaaaaataaagacaaacaattgaagagcagtatgtacaaagcttaagaatacattaatagatttaaatatcagatccacgagcatgtcaaaatatgaagaatgcataaaaacaaaactatctgaaagaaaaaaatgaagagatatagaagatagaaataaaaatgtcaatacatgtcagtatgttttacagaagggggaaatttacttgataaagagaaataaatagaagaaaaaaagaccaataagcttaaataaacaaagattttttttttaagtctcagatcaacagtgtttaaccttatcaaacaggaaaaataaaaagaaaaccattaatcttgaatatgcgtgattgaaagcaggtttctggaataaatgaggtgaaaatctacaaggaataagtatcgattaaaaacttgtaactagtaagtaaggtaacaaccaagcataagatct

SEQ ID NO: 85787 - DNA, 569 bp, Homo sapiens
agctgagaaaactgggccttggggaaagcgagaagtcccagtttaagtcaccagagacgtcttcctaaagaagtattcaggatgctgtgctatccagaagctggctccagagacacctggaccatttcaagctctaagaactgtgcttctgttccctctgcctggctcctatgccatatcacacccacatgtgtgaactcaaagccaaagggaagagaccaggccatgtgcagccaggacagaggcatgtaaaatctagagagggtgggccaacctcccatactcctgtgttggcggagaaatagacccaccagtttgtctggcacaaccaaaactcagctttcttgccatgggatgctggcctgagaccagtcacaaccagtctcaaccagtctccatatcagggcttggctgtctgggtgctttcaagcacccttcccccaccyggatcccaagcatcccttggactctgccaggacagagccacagatgccgggggaaatgggaaatgactggagacacagaggacagccacattcaaagctggtgggaaagtggtggtggtgaca

SEQ ID NO: 85788 - DNA, 849 bp, Homo sapiens
taaaaatacaaaaattagctgagcatggtggcacacgcctgtagtcccagctgcttgggaggttgaggcaggagaatcacttggacctgggaagtggaggttgcagtgagccgagatcaagccaccgcactccagcctgggtgacagagcgagactccgtctcaaaaaaaaaaaaaaaaaaaagaaaagaaaagagaaaagaaatagtaaggcatggtggtgcatgcttatagtcccagctactcagaaagctgaggcaggaaaatcacttgagcccagaggttcaagccttcagtgagctatgactgccactgcattccatcctgggcagcaaaaaaagtctctgtctctactgaaaaaaaaaaaaaaaaaaaggaaaggaaaagaaaaaaaaaagaaaagaaaaattttggaaataaattaaaagtgcataaaagttattaaaatactgctaaatagtaatagataatttatcttcctctttacactctgcaraaaaaacggtgaatggtacttattaggcaatgtgtaaagcacttgacgtgtgtaatcttatcacatctgcacaaatgacacacgatccaaagaacatttttggctccaacttacagatgagtaagcaagctcagggaggatctttcctgatagatatttagcagcagagagggccaggaattgggttctgtaatctcagtctgtgctcattttactggaagccacatgtgtagatactggtattatctgagcctaatccctggaatctctatggtcaattggagagaggcttagggaggtcaggggatagacaggtcttggccagagtccacctcacagtgggtcaggtaggat

SEQ ID NO: 85789 - DNA, 849 bp, Homo sapiens
taaaaatacaaaaattagctgagcatggtggcacacgcctgtagtcccagctgcttgggaggttgaggcaggagaatcacttggacctgggaagtggaggttgcagtgagccgagatcaagccaccgcactccagcctgggtgacagagcgagactccgtctcaaaaaaaaaaaaaaaaaaaagaaaagaaaagagaaaagaaatagtaaggcatggtggtgcatgcttatagtcccagctactcagaaagctgaggcaggaaaatcacttgagcccagaggttcaagccttcagtgagctatgactgccactgcattccatcctgggcagcaaaaaaagtctctgtctctactgaaaaaaaaaaaaaaaaaaaggaaaggaaaagaaaaaaaaaagaaaagaaaaattttggaaataaattaaaagtgcataaaagttattaaaatactgctaaatagtaatagataatttatcttcctctttacactctgcaaaaraaacggtgaatggtacttattaggcaatgtgtaaagcacttgacgtgtgtaatcttatcacatctgcacaaatgacacacgatccaaagaacatttttggctccaacttacagatgagtaagcaagctcagggaggatctttcctgatagatatttagcagcagagagggccaggaattgggttctgtaatctcagtctgtgctcattttactggaagccacatgtgtagatactggtattatctgagcctaatccctggaatctctatggtcaattggagagaggcttagggaggtcaggggatagacaggtcttggccagagtccacctcacagtgggtcaggtaggat

SEQ ID NO: 85790 - DNA, 678 bp, Homo sapiens
agtggagaatccagaaaagagggacggaggagaagttgttgtggaaacaactcagcccagttttacgggaattttgccttttttggcaccgaaagtcctatgtaccgggaaaccccagtccagtacaaaccagagcggtggtcacctatttcccagggtcccagaaaatctaagggggagtggtcaaaaaaggggtgatggagctgggctgggtcttagccctggtgaggagggttagaggaactctgtcctgggtgggcagggatggacctggcctgagtgtgggggggtcatattctaccccttgcctctgcccccaggggaggtgttcttcgccacacgccttgagcagttcaccttccaggaagcactggagttctgtgaatctcacaatgcyacgctggccaccacgggccagctctacgccgcctggagccgcggcctggacaagtgctatgccggctggctggccgacggcagcctccgctaccccatcgtcaccccaaggcctgcctgcggtggggacaagccaggcgtgagaacggtctacctctaccctaaccagacgggcctcccagacccactgtcccggcaccatgccttctgcttccgaggtatgcagcctcacttcggctccaacagccccttttgtctggagaggaccccactgggttcacc

SEQ ID NO: 85791 - DNA, 545 bp, Homo sapiens
ggcattcttttccattaggggcacaggaaggttcccactgaacttgaatctacagaactgtaactgctacccagtcactttgaattcattgtgcaagcaggaaaatgaagaaattattgtactggtcgtggtaatggactcatgaggagatgacattcccactacacrgtagaagcaaacagggtctgtcgaggacggggccatgatgaatgggggaaagtgtaactgccatgaacacagtctcagaggggcaaggcaaccacaggctcctaagggaagagggtctgggtcaccctatcaggcaagcagccaagaatagtcaaatcactggccaagagtgaaggaaggcagggcgcagtggctcacacctgtaatcctggcactttgggaggccaaggcaggtggattacttgaggtcaggagttcgagatcagcctggccaacatggtgaaaccccatctgtactaaaaatacaaaaaaattagctgggcatggtggcaggtgcctgtaatcccagcttcttaggaggctgaggcaggagaatc

SEQ ID NO: 85792 - DNA, 545 bp, Homo sapiens
ggcattcttttccattaggggcacaggaaggttcccactgaacttgaatctacagaactgtaactgctacccagtcactttgaattcattgtgcaagcaggaaaatgaagaaattattgtactggtcgtggtaatggactcatgaggagatgacattcccactacacggtagaagcaaacagggtctgtcgaggacggggccatgatgaatgggggaaagtgtaactgccatgawcacagtctcagaggggcaaggcaaccacaggctcctaagggaagagggtctgggtcaccctatcaggcaagcagccaagaatagtcaaatcactggccaagagtgaaggaaggcagggcgcagtggctcacacctgtaatcctggcactttgggaggccaaggcaggtggattacttgaggtcaggagttcgagatcagcctggccaacatggtgaaaccccatctgtactaaaaatacaaaaaaattagctgggcatggtggcaggtgcctgtaatcccagcttcttaggaggctgaggcaggagaatc

SEQ ID NO: 85793 - DNA, 545 bp, Homo sapiens
ggcattcttttccattaggggcacaggaaggttcccactgaacttgaatctacagaactgtaactgctacccagtcactttgaattcattgtgcaagcaggaaaatgaagaaattattgtactggtcgtggtaatggactcatgaggagatgacattcccactacacggtagaagcaaacagggtctgtcgaggacggggccatgatgaatgggggaaagtgtaactgccatgaacacagtctcagaggggcaaggcaaccacaggctcctaagggaagagggtctgggtcaccctatcaggcaagcagccaagaatagtcaaatcactggccaagagtgaaggaaggcagggcgcagtggctcacacctgtaatcctggcactttgggaggccaaggcaggtggattacttgaggtcaggagttygagatcagcctggccaacatggtgaaaccccatctgtactaaaaatacaaaaaaattagctgggcatggtggcaggtgcctgtaatcccagcttcttaggaggctgaggcaggagaatc

SEQ ID NO: 85794 - DNA, 685 bp, Homo sapiens
tagcgctttgagggtgtattggtcactgatatcagtcataggcactaggacatgggagggatggaggggagcatgaygattcctcaagttgtgtttgatcattagttgacattgaacatttcaagtgtttgtttttgttttgtgtaaactgtgtgagtctgttttgctcatttatctcttgatgccttgattttttagtgagtttgataattttatatattatacgtatactttgttgtatttcatgtgaatattttcttcagcctctttgcctattattttgtcgcacacacttatttactttgatggactcaaatgtgttaaactttttgatatgtcgcaggtctgagaattatgtctccagtgttctgacattcagttctttcttcaattttattttcccccactacaaatacatggatatataacgatttcttagtagtcaaaatgattcttcagcaccagggaagtttttagccgtgagccatcagctgtggtaataccctggggaagtatttacttctggttgaagcgaatcatttacatcccatattagcaagggctaaatggatataagaaatattacagtttaatactgttggcaggaagcaagttcttagcaccatgaatcatactacccatttcagaaagcctattataattagaagcaacaacacttacacag

SEQ ID NO: 85795 - DNA, 685 bp, Homo sapiens
tagcgctttgagggtgtattggtcactgatatcagtcataggcactaggacatgggagggatggaggggagcatgatgattcctcaagttgtgtttgatcattagttgacattgaacatttcaagtgtttgtttttgttttgtgtaaactgtgtgagtctgttttgctcatttatctcttgatgccttgattttttagtgagtttgataattttatatattatacgtatactttgttgtatttcatgtgaatattttcttcagcctctttgcctattattttgtcgcacacacttatttactttgatggactcaaatgtgttaaactttttgatatgtcgcaggtctgagaattatgtctycagtgttctgacattcagttctttcttcaattttattttcccccactacaaatacatggatatataacgatttcttagtagtcaaaatgattcttcagcaccagggaagtttttagccgtgagccatcagctgtggtaataccctggggaagtatttacttctggttgaagcgaatcatttacatcccatattagcaagggctaaatggatataagaaatattacagtttaatactgttggcaggaagcaagttcttagcaccatgaatcatactacccatttcagaaagcctattataattagaagcaacaacacttacacag

SEQ ID NO: 85796 - DNA, 656 bp, Homo sapiens
ccaatatggtgaaaccctgtctctactaaagaaaaatacaaaaatttagctgggcatggtgatgggtgcctgtaatcccagcactttgggaggctgaggtgggtagattgcctgaggtcaggagttcgagactagactggccartatgatgaaaccctgtctctactaaagaaaaacacaaaaatttagctgggcatggtgatgggtgcctgtaatcccagctacttggaaggctgaggtaggagaatcacttgaacctgggaggcagaggttgcagtgagccaagattgcaccattgcactccagtgcaatggttacccagttactgggtaacaagagcgaaactccgtctccaaaaaaaaaaaaagtcaaattctgtccaatctactttttctaattctctgtttgactattaccaggggtaacctctgagaaatagggtagatgtggcaagtgggggcaaagagattgttgcacaatctttgaaaacagtttactacagctgggaacattcctttaatggaatcaagttgtaaatgggaaaccagattatctgaacagcatatggaaaatagcaaataaattctaagtccaacagggtgagttatcaaagaaaactgaagattgggtctgagttctctcatccactcattcat

SEQ ID NO: 85797 - DNA, 600 bp, Homo sapiens
gtctcagacaaatatctttgtacaggtaataaaaaggactcatatctgaaatatatgaacaactcctacaaatcaacgagaaaacaaaccaattttaaaatgtgtaaaaatatttcacttaaaaggagagaatatccaaatggctaacaagcatgtgaaaaaatactgcacgttatactacttatcaagtaaatgcaaactaaagccataatgagatgccactacacacccaccagaataactaaaatttaaaagcctgacactaccgaatgctagtgaggataggaagcgactggacctttcaatcactggtggttgggatgtaaaatgtcataaccactgttgaatatcatttggtagcatctattaaagtcaacaggtgcataccctgtgatccagcaaattcacccattgtgttcacccaacaataagctgcacayatgtgcatgaaaaaaaacatgcacaagaatgttcatagcagctttatttgtaatagcaaaaaactagaaacaacccacagacccatcaacaggagaatgggtacgtcaatcatggaatataggtgtgtgtacataaatattcacgtgcatgtgtacacac

SEQ ID NO: 85798 - DNA, 689 bp, Homo sapiens
cactctgtgagggttcttacccttggtggtttaatgctctatttctgtgctggttggcctcctgccgggaggtggcacattgcagagagcatcagctgtgaagagtatagagaggaaccggcggtgggcggggccctagaactcccaagatatgccctttgccttcagctaccagggtgggtagggaaggaccatcaggtgggggcagggctaggcgtgtctgagctcagactctccttgggtgggtcttgctgtggctgctgtgggggatgggggtaaggttcccaggtcagtggagctgtggctaggaggattatggctgcctttgcttagtcatgcaggttgtcgcagaagtgggagaaaaccggcagtcacaggcctcacccagctcccacacaatctgaagggttggtctcactcccactgtgccacccctaacagcacagagtctgtttccaggcagtgggcgagcagtgctgagaacttgtcccaggctacctgcctcycagctgcaaaagagaagggctttagttcttctcccacctgtagagtctgtaagctggattcatgccctcccccaagttctggccaggaggcttctcgacctcggttcaaattgttacaaagttcagctggagatttccttctccctgtggcgttttctccgtgcccctggctgccctcccaaa

SEQ ID NO: 85799 - DNA, 678 bp, Homo sapiens
gggtgcaccccattcttgtttcaaaccagaacactctcagggggcaaagaagctgcccctgagggtaaagattgagaaaaaaaaaaaagccctgccattctcagaatgtagagttccccggggcaacagtgaagtaaatattgtcatggcgaggttgattcctcctgcgcacacccagtgtagagytgcaggcaggtcttagtcacgcatcacgacaatggggtgggataaacacagactgtgttgaacatttccagccgggggtggtgggcttcccctgagggcacagacacaggtcctgccagcaagccttcttcccacgctgctgttagcctgatgcctcccttcctcctctgtccctgagtcccaggtgcactgaggagttcagatgtatgagtggtgagttgatgtgccatgcccaagctaggaggagctcctggatttgttgcagggccagcttcatggacatgaagcctgggcagtacaaggccccgccctcagatgggcctgcacttggcttaatgctctacagtcatcatcttaaaattctgaacaatttttggtcaaggagcttcacagtttcattttgcaccaggtgccacagattatgcagctggcctgatttgctgtgtggttagtccttaaagaggttgggctcatatgcagaaaattgggaat

SEQ ID NO: 85800 - DNA, 678 bp, Homo sapiens
gggtgcaccccattcttgtttcaaaccagaacactctcagggggcaaagaagctgcccctgagggtaaagattgagaaaaaaaaaaaagccctgccattctcagaatgtagagttccccggggcaacagtgaagtaaatattgtcatggcgaggttgattcctcctgcgcacacccagtgtagagttgcaggcaggtcttagtcacgcatcacgacaatggggtgggataaacacagactgtgttgaacatttccagccgggggtggtgggcttcccctgagggcacagacacaggtcctgccagcaagccttcttcccacgctgctgttagcctgatgcctcccttcctcctctgtccctgagtcccaggtgcactgaggagttcagatgtatgagtggtgagttgatgtgccatgcccaagctaggaggagctcctggatttgttgcagggccagcttcatggacatgaagcctgggcagtacaaggccccgccctcagatgggcctgcacttggcttaatgctctacagtcatcatcttaaaattctgaacaatttttggtcaaggagcttcacagtttcattttgcaccaggtgccacagattatgcagctggcctgatttgctgtgtggttagtccttaaagaggttgggctcatatgcagaaaattggraat

SEQ ID NO: 85801 - DNA, 867 bp, Homo sapiens
ggatcctccattggaggtgcactaccttgtcatcttaagagcctttgagataagtgttgtcaacaattcaacatgtggttggcatgacactaaatattcagatacatgcatctccattactgggattgtataaagatagtatcactatcctaaccaaattaaagaaaacctacccaagatgagattcacatgcttyttattttctgaaactgaaggtacctcatgtctccagaagtgccatgaattccaggccccaagcctagaaaaggaagcaaaagtgtagaaagaaaaaatggccttgaaattagagtgggaaacaagaaacaagcaaggagtaggaaagaagagcggaaaaggagatgctggcagtggtgacagcaaagagaactatggtgcccattttctacagggaagcaatgatttgttcctcatgagccatgaatcctttctccctggactcaccttattccactttgtctcagggcctggaatcccacctttagggatgagctcctttgcacacttaacagccttttagcagtcactgtttagcctggggctggttccatgcacttgccagtctgtaggcatcttctgcttctctgactgaaggtcacatcaggtgaggctgggctgtgtacacctagtcacttgtgtagatgcttcgttcacatcttcacggctgtgacaaaaatgttttaggaaaaactaaatgcgtggcttagatctaatcaagttgctcagtgagattatttaccccaaatgcagggagctggagttaaagacagggggttcattcagcaatgacaaagcaatgcatttcctcatttgtagcatctggcttccaagcctctgttttcccagttt

SEQ ID NO: 85802 - DNA, 727 bp, Homo sapiens
agagagagagagagacagagagagagagagagagagagagaaagaaagagagaaagaaagaaagaaaagaaagaaagaaagaaagaaaggaagaaagaaaaagtaagtcagtctcagtgtgaacaagcgtcatttgtgtctggtgatggacgtgacaaggctttcttatgtttgcttttcctcctcacctgttcatcctccttccctgcactgctgctctctagaagcgctttcccaaataaagtccttgcaacaagccttggtctcagggtctgctttcagggaactcaggctaaggtaattagtcacagacatgggcctaggaagcagattctcaggatgggattttggagctggaaaacacagagctaagaaacacgaggctggagtgagtggcatctggtaacatcacgattgctaaggatctcaccctggtggcttgggatgaggtgcaggtggaaggtaaagcactgggcrtgtggcagctctgacacctaagtggtattggggcgaggggaactataacgattttggaggttcctggtctttgttaaatgctctggacgtcttgaaaaaaaagtcaaacaggtttccacctgcaactgtcagcttgaggcaggttgtggaagcaaagcggctccataactgcattcatggagacgctcattttattcgtagaatgtgtggatgaaaatcaggcacagcactgtgttattaggaaaacaga

SEQ ID NO: 85803 - DNA, 660 bp, Homo sapiens
tcttatttccacattattacatgaattagaaatgtaaaatatagaactggtcccttggtctcatggtaaaaaggtggtaatacttatgcttagtgctgaagactgagaggcagaggaaggtccagacagcaagactaagtaaggtgtgtggtgctttcacaacagcatctattcccttctgagcctgattcccaggttgtgggttcgtacttctttttgtatttttcttcttaatttctggcttaatttgtgtgtttcactctactcttgtaatggtccttgaagaactggcactgatttctcttcctactttcagagtaggaattatattgaaatccaactcaacaaaaacaaaagtagagtcagcaggcaaaattgaaawgaaaagtttttaataagaataaaatgatagcggaaacttttcccaataagttgcaaaatacaactgtatttattgtatgttattattttcctagagctctcataataaagtaccaaaaactgagtagctcaaaacaacagaaatttactccctcatagttctggaggctaaaagtctaaaatcaagtgtctgcaggattggtttctttttgactgctttcagagaaaatctgttctgtgcctttctcctcgttcaggtggttgccagtaattcttggt

SEQ ID NO: 85804 - DNA, 1103 bp, Homo sapiens
ttgaggcaagagaatcgcttgaacccgggaggtggatgctgcagtgagccatgatcatgccactgcactccagcctgggcgacagagtgagactctgtcttaaaaaagacaaaagcagcaaaagcagaaccccttgaagcctgggaattcacacattccttgaaggcttggaattcacgcactgtcacttctggttaaaataagtcacgtggctagcccagattcaaggggtgggaaaatggattctacttgatcggagaagcagcaaagtctcattgccaaagggtgtgtgtacagggaggggaatcgtagctgtcttctcatactgtcagaagcagattgtgaagacttgcacacaaagtaaacagtttggaatttatctcaagggcacaggaaactatcaaagtttggctttttggtttttgttgaaagcactaacataaaaaataagattttctactcagcaccccttattcaggaaccgttcctctcttgtaatccacatggttattgcagaaaccatcacattaggaraatggatagaatggactaccttttggcaagttgtttgaattagggccaatcagaatccttctttttggtgtttttctcctgaaaatgagagttggtctcttgctaagcctgaagctttaagatgtaaatttgggggagtgctaggtggctgtgcttgcagctatgtgaaaaaagcactccgcacaaagaagcagaggcgaaagatgagaatcctgatggccttggagtccgctcgttctgatatccctctctgcctcagcttcaagtttggtttgtctcttggaaccaaaggagtctcgactactataaagagagcttaccacctgcaagtagggagttgcaagtgacaacataaaaatccaaaaaaaaaaaaaaaaaatccaaagccagctttgttttagtgcaatggttactggcaagttattttaactggttatcactggtatataagaaagctgtttttcttatagtttgcatacaactaacctacgctgatagcttttcagctgaatctcttggggtttcctagaccaacaaccaggttatcagaaagcaattgtattttgtct

SEQ ID NO: 85805 - DNA, 661 bp, Homo sapiens
cccaccacagtccccagagtgtgatattccccttcctgtgtccatgtgatctcattgttcaattcccacctatgagtgagaatatgcggtgtttggttttttgttcttgcgatagtttactgagaatgatgatttccaatttcatccatgtccctacaaaggacatgaactcatcattttttatggctgcatagtattccatggtgyatatgtgccacattttcttaatccagtctatcattgttggacatttgggttggttccaatattttatctttgaaagaccagaagtagtaggaaaatgtaaaaatctactatatcaatttcatttatgacttttttaaaattgtttaaactttacatatgttttggggttatttgaatatgttattttagaatgtttatttttttctgggttgtaattttactaatacaaaatttaaggctttaacttctattatattttcaaaataaacttcttacatgatttttctttgttaagctattagtaaatagttattgaataaatattaatttaatagttctatattccaggtacacatatacatatgatggaagtatgagggaagaacattctaggcagataaaatagcttgcataagggcttggtatgttcatgatctggcacgttagcataact

SEQ ID NO: 85806 - DNA, 661 bp, Homo sapiens
cccaccacagtccccagagtgtgatattccccttcctgtgtccatgtgatctcattgttcaattcccacctatgagtgagaatatgcggtgtttggttttttgttcttgcgatagtttactgagaatgatgatttccaatttcatccatgtccctacaaaggacatgaactcatcattttttatggctgcatagtattccatggtgcatatgtgccacattttcttaatccagtctatcattgttggacatttgggttggttccaatattttatctttgaaagaccagaagtagtaggaaaatgtaaaaatctactatatcaatttcatttatgayttttttaaaattgtttaaactttacatatgttttggggttatttgaatatgttattttagaatgtttatttttttctgggttgtaattttactaatacaaaatttaaggctttaacttctattatattttcaaaataaacttcttacatgatttttctttgttaagctattagtaaatagttattgaataaatattaatttaatagttctatattccaggtacacatatacatatgatggaagtatgagggaagaacattctaggcagataaaatagcttgcataagggcttggtatgttcatgatctggcacgttagcataact

SEQ ID NO: 85807 - DNA, 661 bp, Homo sapiens
cccaccacagtccccagagtgtgatattccccttcctgtgtccatgtgatctcattgttcaattcccacctatgagtgagaatatgcggtgtttggttttttgttcttgcgatagtttactgagaatgatgatttccaatttcatccatgtccctacaaaggacatgaactcatcattttttatggctgcatagtattccatggtgcatatgtgccacattttcttaatccagtctatcattgttggacatttgggttggttccaatattttatctttgaaagaccagaagtagtaggaaaatgtaaaaatctactatatcaatttcatttatgacttttttaaaattgtttaaactttacatatgttttggggttatttgaayatgttattttagaatgtttatttttttctgggttgtaattttactaatacaaaatttaaggctttaacttctattatattttcaaaataaacttcttacatgatttttctttgttaagctattagtaaatagttattgaataaatattaatttaatagttctatattccaggtacacatatacatatgatggaagtatgagggaagaacattctaggcagataaaatagcttgcataagggcttggtatgttcatgatctggcacgttagcataact

SEQ ID NO: 85808 - DNA, 661 bp, Homo sapiens
cccaccacagtccccagagtgtgatattccccttcctgtgtccatgtgatctcattgttcaattcccacctatgagtgagaatatgcggtgtttggttttttgttcttgcgatagtttactgagaatgatgatttccaatttcatccatgtccctacaaaggacatgaactcatcattttttatggctgcatagtattccatggtgcatatgtgccacattttcttaatccagtctatcattgttggacatttgggttggttccaatattttatctttgaaagaccagaagtagtaggaaaatgtaaaaatctactatatcaatttcatttatgacttttttaaaattgtttaaactttacatatgttttggggttatttgaatatgytattttagaatgtttatttttttctgggttgtaattttactaatacaaaatttaaggctttaacttctattatattttcaaaataaacttcttacatgatttttctttgttaagctattagtaaatagttattgaataaatattaatttaatagttctatattccaggtacacatatacatatgatggaagtatgagggaagaacattctaggcagataaaatagcttgcataagggcttggtatgttcatgatctggcacgttagcataact

SEQ ID NO: 85809 - DNA, 661 bp, Homo sapiens
cccaccacagtccccagagtgtgatattccccttcctgtgtccatgtgatctcattgttcaattcccacctatgagtgagaatatgcggtgtttggttttttgttcttgcgatagtttactgagaatgatgatttccaatttcatccatgtccctacaaaggacatgaactcatcattttttatggctgcatagtattccatggtgcatatgtgccacattttcttaatccagtctatcattgttggacatttgggttggttccaatattttatctttgaaagaccagaagtagtaggaaaatgtaaaaatctactatatcaatttcatttatgacttttttaaaattgtttaaactttacatatgttttggggttatttgaatatgttattttagartgtttatttttttctgggttgtaattttactaatacaaaatttaaggctttaacttctattatattttcaaaataaacttcttacatgatttttctttgttaagctattagtaaatagttattgaataaatattaatttaatagttctatattccaggtacacatatacatatgatggaagtatgagggaagaacattctaggcagataaaatagcttgcataagggcttggtatgttcatgatctggcacgttagcataact

SEQ ID NO: 85810 - DNA, 597 bp, Homo sapiens
gcatgctgacttgtaaagtcctttttaattgcactgagcatcatttaayatattcactaaataccatccaattataaataatggaaagcaaagaattattcattgtcaatatgccattatatatatatttaaaaatgataaacatttaaatactttgatttaactaaaaactgagtgtatataataatgtataatttctaataacatgacaaaataaaaattgtcatagtgtgatactttgttttatatattaataacatagtatataacataacactacaatattatgactgtggttacatatattaattaaatctaatgttaataatccattaagactatggctttttacatcttaaaaggaatcttcccccaattctgactgtagttttacaaaatgttgttattaagtacttcctagatactttttggggaggtgaatgtatgtgaagtaatgagtagagtatgtttgcaaatatcactgataccggaaaaataatcattggcctaggatagtgacatcatctgctaccttttatgtaataatttattattcatcccatccagcaattttagttcaaaatcaagtctgtagcg

SEQ ID NO: 85811 - DNA, 597 bp, Homo sapiens
gcatgctgacttgtaaagtcctttttaattgcactgagcatcatttaatatattcactaaataccatccaattataaataatggaaagcaaagaattattcattgtcaatatgccattatatatatatttaaaaatgataaacatttaaatactttgatttaactaaaaactgagtgtatataataatgtataatttctaataacatgacaaaataaaaattgtcatagtgtgatactttgttttatatattaataacatagtatataacataacactacaatattatgactgtggttacatatattaattaaatctaatgttaataatccattaagactatggctttttacatcttaaaaggaatcttcccccaattctgactgtagttttacaaaatgttgttattaagtacttcctagatactttttggggaggtgaatgtatgtgaagtaatgagtagagtatgtttgcaaatatcactgataccrgaaaaataatcattggcctaggatagtgacatcatctgctaccttttatgtaataatttattattcatcccatccagcaattttagttcaaaatcaagtctgtagcg

SEQ ID NO: 85812 - DNA, 664 bp, Homo sapiens
aaacagttcactactcacaattgcaaagtcatggaatctaagtatatatcagtagacgactgaataaacaaagtgtgatacatgtacacaatggaacactaagtaaccataaaaataatgaagtcatgtcctgagagacaacataaatggagctggaggccattaccctaagtgaaataaytcagattcggaaaatcaaatatttcatgttctcacatataagtaagagctaaacaatggtacacactgtgatggataaaaacagtagacaatggggacaccaaaataggggagaatgggatgagaatgagtgttgaaaattatctgttgggtacaatattcactatttgggtgagaagtacactagaattccaaatctcatcactacaaaatatattcatgtaacaaacctgcacatatacccagtgagtctataaaattatttttaaaataaaatataccacatattttatgattttttatgctttttgggttccttgtggttcatccaataagtcaaaatttcttaatataaaactgcccacatagttataacaagggtatggtaaagagtgtggactacaaggtaactgaaatcggagaccattaaaagattttaaggatatttctcagaaggggcatctaccactttgtttttctaata

SEQ ID NO: 85813 - DNA, 664 bp, Homo sapiens
aaacagttcactactcacaattgcaaagtcatggaatctaagtatatatcagtagacgactgaataaacaaagtgtgatacatgtacacaatggaacactaagtaaccataaaaataatgaagtcatgtcctgagagacaacataaatggagctggaggccattaccctaagtgaaataactcagattcggaaaatcaaatatttcatgttctcacatataagtaagagctaaacaatggtacacactgtgatggataaaarcagtagacaatggggacaccaaaataggggagaatgggatgagaatgagtgttgaaaattatctgttgggtacaatattcactatttgggtgagaagtacactagaattccaaatctcatcactacaaaatatattcatgtaacaaacctgcacatatacccagtgagtctataaaattatttttaaaataaaatataccacatattttatgattttttatgctttttgggttccttgtggttcatccaataagtcaaaatttcttaatataaaactgcccacatagttataacaagggtatggtaaagagtgtggactacaaggtaactgaaatcggagaccattaaaagattttaaggatatttctcagaaggggcatctaccactttgtttttctaata

SEQ ID NO: 85814 - DNA, 664 bp, Homo sapiens
aaacagttcactactcacaattgcaaagtcatggaatctaagtatatatcagtagacgactgaataaacaaagtgtgatacatgtacacaatggaacactaagtaaccataaaaataatgaagtcatgtcctgagagacaacataaatggagctggaggccattaccctaagtgaaataactcagattcggaaaatcaaatatttcatgttctcacatataagtaagagctaaacaatggtacacactgtgatggataaaaacagtagacaatggggacaccaaaataggggagaatgggatgagaatgagygttgaaaattatctgttgggtacaatattcactatttgggtgagaagtacactagaattccaaatctcatcactacaaaatatattcatgtaacaaacctgcacatatacccagtgagtctataaaattatttttaaaataaaatataccacatattttatgattttttatgctttttgggttccttgtggttcatccaataagtcaaaatttcttaatataaaactgcccacatagttataacaagggtatggtaaagagtgtggactacaaggtaactgaaatcggagaccattaaaagattttaaggatatttctcagaaggggcatctaccactttgtttttctaata

SEQ ID NO: 85815 - DNA, 664 bp, Homo sapiens
aaacagttcactactcacaattgcaaagtcatggaatctaagtatatatcagtagacgactgaataaacaaagtgtgatacatgtacacaatggaacactaagtaaccataaaaataatgaagtcatgtcctgagagacaacataaatggagctggaggccattaccctaagtgaaataactcagattcggaaaatcaaatatttcatgttctcacatataagtaagagctaaacaatggtacacactgtgatggataaaaacagtagacaatggggacaccaaaataggggagaatgggatgagaatgagtgttgaaaattatctgttgggtacaatattcactatttgggtgagaagtacactagaattccaaatctcatcactacaaaatatattcatgtaacaaacctgcacatatacccagtgagtctataaaattatttttaaaataaaatataccacatattttatgattttttatgctttttgggttccttgtggttcatccaataagtcaaaatttcttaatataaaactgcccacatagttataacaagggtatggtaaagagtgtggactacaaggtaactgaaatcggagaccattaaaagaytttaaggatatttctcagaaggggcatctaccactttgtttttctaata

SEQ ID NO: 85816 - DNA, 209 bp, Homo sapiens
ttctacatttgtggattctagatgagtgattttcttttgctctcactgagctcaaaatatcccaacagagtaaaacaytggtatgtatttcaaaagatgtatcaagaagaatttttgaatgaagaaatgctagaatgacaaacatggcctatctcatttccccatgctaataaggaagttcctgtgattttattgctacaagaccactt

SEQ ID NO: 85817 - DNA, 850 bp, Homo sapiens
aaaagacttatgaggcatccataaagctagggtggtttttaaatttgtaaattaagacaagaaggcataaagaaaccctacagaatgccacatagattagaggaatggaagatgaagaaggaataaatgagttgaagaaagagttatcaggtgatatggggatgaggaaaaagattgttctgtrtaaaaacatgaaattcttgtaaaagaagtcaagagggatgaactcttgaaacaccctttaattgtggaatgggcaagacagtgaccaccttctaaggggaatttcaaagtaacaatgttggttgatttaaatttatctttcttgcaagagaagataaattgatttgggtgaatatcaatgattttacttgtcatgatagataaggtggcatcaagtgagtgaaatttactgaaatgtttatttttatttacaacagaataccatgctttattccatgacattcatagaatgttattttaattgatcggaacccccgcctgaaaaacatttcaaattaatttcctgttttttctttttgacagagtctctatcactcaggctggagtgcagtggcacagtctcggctcactgcaacttctgccttccgggttcaagtaattctcctgtctcagcctcctgagtagctgtaattacagacgcccgccatcatgcccggctaatttttgtgtttttagtggagacgacgggtttcaccatactggtcaggttggtctcgaactcctgacctcaggtgatccaccttggcctcccaaagtgctgggattacaggcatgaaccactgcgcccagccaatttcatagttttatatgatataatcttaatcat

SEQ ID NO: 85818 - DNA, 722 bp, Homo sapiens
tcccaaaatcttatcagtgatgtaggtgatgatgaataggaaaaagggaaaacaaatggcatatttgaaagtatgcagctgatttaatgatctaatgtataagttctgaagaaacttaagttctttattgtaaaatgtgtcatgtggtcacaattatcctgagtgtagatggaaaaaatgagccaaaaaagatatggtatgcagcatgagcaaaataataccatatgtgtgtttcgggaaaaaaagaataaagtagaataaagttgatgctctcactgacttgatagtaaataagattgaggtgattttgaatatttaacaacagaaattcattagaaaataaaacttcacaattactcataattgaggcatwaagcaaaatagaagacaaagtcaggatggctggcttactaatcatattatgaaacttcagataagaatggcatacattttaataattcactataaagttttagaagccaggctgtcttctagggaaatgcaatttgtggtgtcgagagtattaaaaccacaaaagttctattgaatgcagagatggaaggatggaacatactaaaggagaagttagaaatgctggcttccagtctagctctgtcaaaaatctagaagatttagctccctcctctgccaaacaagaaatgttaggctagaactagatactctctgaattctctaccagctctgaaattgtacattatttt

SEQ ID NO: 85819 - DNA, 701 bp, Homo sapiens
taatagcatctagcacctagtctaaatccaagtattctcagctgcctccacaaaaaaatgagctttatagttgctttagccaaaccaggatccaatccagaacagcacaactggatgttgcgttcctttaaatctctttcaacctagaaaaagataatcatcttttcattgcttggcttgttgaatagacaggttaattgccctgtaaaatgttgtaacttccagatttgtttatttgcatcctcatggtatttgtttaccttgttcatctattcccatctttgttggaaactggaagttacagctgaagacctgattatattcaactgaaacatttttaaatggatggaatatatgatcagtggacacttactatctggttaccctatcattagtaatactaagattgattgatttctcagctctccaatggggccaccagcaatttaaaaaaaactttgggctacttgatatattaaatatattttaatgggataacctggtctaaaccaccatgtgcaacattgttgcaatgcataagcactttagaatctccagcagcagctcatctatagactaattytggagtacagtcatgtgtcttcatgatggagatatgttttgagaaatgtggtttcatcgttgtgtgaacataatagagtgtacttacacaaactagatgatagagcctgctacacatc

SEQ ID NO: 85820 - DNA, 676 bp, Homo sapiens
ttctattggggtgaaatggagagattccactagattcctcacatgcttgtcttatatttattttaaaagagcagtatttccatgatgagagagctttctgctgaagtttctattgcataaatgacacaaaattatgccctcaagtccacagaagtgctatgttggtctctagcatattctagtttattggttctcaaattctgttgaatagcatgaaatttaatttttagtctcattacaggarctgggaagaattaagattgtaactgtgacctcacattccaggaaaaataaactactaaatcaaagtgaatgcgttgttcagctctattttagttgcaaatgacagaaaacccaaaatgaaactaactgaagctgaaaaagaaaaattattgtgtcttgtaactgtggcatccaagaggagatcacttccgatacagttcgatctaaggtatcaagagagtgacaggagctggtttatctttttccacctctcagctcagctcaatgcagcccatctccatattggcttctctgtgaagcaaccttatgatggcatgatagctaccagcagctttaggctttaactgttacaagcctaagtgcattggggaagagaaaaagtggctcttaccaaatgctccttaaaatctcaggtttcactgacgggactgac

SEQ ID NO: 85821 - DNA, 726 bp, Homo sapiens
acctacgaactacctcctccactcccccatccccatacaacatccaaaagtgagtttattcaaagagcatttatgtagaatgttcactacctgttttgggaggagaaaatgaaaaataaatgcgttaatcactgcccagaagcttacaccctaaagaagacacacatatggaaatgcgtagtttcaagccagtcaggtgctctataacaggataattttgaaagtgctatggaaatcctcagaaaaaaacaagtaaataaataaataataakaagaaaacctctacagaatcctggaaagactttccagagaagctggctttaaaagctgggcaggccaaggtaatttatagattcaatgccatccccatcaagctaccaatgactttcttcacagaattggaaaaaactactttaaagttcatatggaaccaaaaaagagcccacattgccaagacaatcctaagcaaaaagaacaaagctggaggcatcacattacctgacttcaaactacactacaaggcttcagtaaccaaaacagcatggtactggtaccaaaacagagatatagaccaatggagcagaacagaggcctcagaaataataccacacatctacaaccatctgatctttgacaaaccggacaaaaacaagaaatggagaacggattccctatttaataaatggtgctgggaaaactggcatatgtagaaagctgaaactggat

SEQ ID NO: 85822 - DNA, 503 bp, Homo sapiens
tctggcactcctgacctccaggcctgcctcggcttcccaaagtgctgagattaaaggcatgagccactgtgcctggcctattttctttcattatagattggtttcccacgtaacaaaagactgctggcatcttacaattcttctgagggtgggcatggggagggacggacgtggaggacttcattcaagtttgaataatcagcagggcttgcatctaatggcccagctccgaccaggtgcttacccagactaccccttctggaggggcctcagggaagaatgtggcagtggtgcctccacctgctttcycaggaggatggtgttttaggaggtaggcagttccataggctttaactgtagtaatgctagttaaaaatgtgttttcgtccttactgattgtgtgtgtatgatacaggacttgtttaggtatctgccttccaagtacagatgagggttttccacactggaaaaatcttggcttgttgtattactctgttctcatg

SEQ ID NO: 85823 - DNA, 1462 bp, Homo sapiens
tttaagacaacatcaccctgcatatcaggtggcatgatttttgaacctcactgattgcattatgccaggctggactagggaaccttggaattatatgctgaagtaaatagaaactgcttagatttaaaacctcaattttatgaacagattttcattttagaaagacgattgtgtcagttgtaggtgcaattcagaagagggcgggcaaatttaagagaatttgagaggctacctcagcaggaggcagccgaataaccacacttgggactggggaggagctctgtacagcgtgttgaatgatgtggtcactcagggacagggaattaagggggagaagcagggctgcgtgcaggagaattgacatattgggattgataacagggatgggtgtatcagtaacaatttacaaaggacgtaattcagaagtcatcataaaatctaaaattgtaatttcagaagtgtaattccaagcacgttttaagtcagtacagttatactttattatctgctcttctgtagtctaacttactttcaatttctttgtcatcaatatgtgaatactacttactggaaggaaatcacacgtcttttctccaaagagtctgttggcagttctaagcaagtactgagtgccagttctgttaacttcactgagaagtgactggaaacctcggtgaatatctccgtctttgtataaacaaagtgcctgggaacagaaaccaacactgacttttaacgctgccattatactctcccaaagagctttctccaaacaaacctctgtactaaaaaaaccacacaggatcctactttaaaaaggtttggcctaattgtctagcacagggtttctcaacgtgggcaatgcagcattgacatttggggccaggacacttccttgtctcatataagcattgtaggatttttgcagcwcttctggcttccatccactagatgtcagtagcacctctcagttatgggatctaaaactccaggtcttcgcaagggtccccaggaaggaaaaattcacccaccgacccctacctcccacccaccaggtgagaaccactagtctagcaaatttattcatgccagcaaggcagtgtgcgataattcagggggaaggcagaacagaaaaaagtaagtaactgggatgaattacaactcgggtaatacaaacaaaagcagcaataaaactaaaaatgtttcatctgcaattttacagaagttctccagaccatattataaattaaatgtcaagtcagagtgagaattaaggttattcctatatctctcgatcacccccagtccaaagcctcactcctccaatcagttgaaagaaacaaccacagaaggatgtcaactggggtccctgggtgcattttaggagactgtctatacactcctgatattggtggcaaaatgatatccatttggcaattatctgggacatcttcaccaatag

SEQ ID NO: 85824 - DNA, 891 bp, Homo sapiens
cccaatttctgcctctgtttcctgacctgttctttggcagcacaaaataaataagtaaataaataacaaccaggaggaaacagcatcaaattgataaatagaatgttataaactgtttcaaagataaaggcaagaagaagagcacaaactaaagacaagtgaatgcagcaaacctggggaaactgggctccgatttttctttttaaaaattcaacttcagaggctgtgcggccaataaattatccttttgcatgaatggcctatagtgcaatatgtgggaagcatcctccttcagctaaggggatgtcttagaaatgtaaacacaaatgaaaaaataggagagagacgccgaagccaggaggcggcccagcgctgtgctaatgctgtttatcaagttaaataatataccctgccaccccctccctctaaaaccaaaccaaaattaaaggcaaaatcaagaaacgacgataaattctgagaagaaaaggaaagagagaaagaaaatgggagaaagagcccgtgatttgaaatgtcctgccaacaggataggtttatggtaccctggatgtcattatgggggtctgagattgcytcccacgcttatttttagcagaggtgggggtcggggggaagtgactctctttagcttccgaggggcctcactgtggagactgaaccagagcaaattccctttgtgtttcgtgctctgaagggacctgctattgttgtatgaggggcctcgtgtaagatccagtggagctggggctgtgggcaaaacctttccagataacactccacttgttttggaatggatactgactctccttccgtcatcgtcctcccccattgacttggcacgactagcactttagtatctttttattctcattt

SEQ ID NO: 85825 - DNA, 891 bp, Homo sapiens
cccaatttctgcctctgtttcctgacctgttctttggcagcacaaaataaataagtaaataaataacaaccaggaggaaacagcatcaaattgataaatagaatgttataaactgtttcaaagataaaggcaagaagaagagcacaaactaaagacaagtgaatgcagcaaacctggggaaactgggctccgatttttctttttaaaaattcaacttcagaggctgtgcggccaataaattatccttttgcatgaatggcctatagtgcaatatgtgggaagcatcctccttcagctaaggggatgtcttagaaatgtaaacacaaatgaaaaaataggagagagacgccgaagccaggaggcggcccagcgctgtgctaatgctgtttatcaagttaaataatataccctgccaccccctccctctaaaaccaaaccaaaattaaaggcaaaatcaagaaacgacgataaattctgagaagaaaaggaaagagagaaagaaaatgggagaaagagcccgtgatttgaaatgtcctgccaacaggataggtttatggtaccctggatgtcattatgggggtctgagattgccycccacgcttatttttagcagaggtgggggtcggggggaagtgactctctttagcttccgaggggcctcactgtggagactgaaccagagcaaattccctttgtgtttcgtgctctgaagggacctgctattgttgtatgaggggcctcgtgtaagatccagtggagctggggctgtgggcaaaacctttccagataacactccacttgttttggaatggatactgactctccttccgtcatcgtcctcccccattgacttggcacgactagcactttagtatctttttattctcattt

SEQ ID NO: 85826 - DNA, 891 bp, Homo sapiens
cccaatttctgcctctgtttcctgacctgttctttggcagcacaaaataaataagtaaataaataacaaccaggaggaaacagcatcaaattgataaatagaatgttataaactgtttcaaagataaaggcaagaagaagagcacaaactaaagacaagtgaatgcagcaaacctggggaaactgggctccgatttttctttttaaaaattcaacttcagaggctgtgcggccaataaattatccttttgcatgaatggcctatagtgcaatatgtgggaagcatcctccttcagctaaggggatgtcttagaaatgtaaacacaaatgaaaaaataggagagagacgccgaagccaggaggcggcccagcgctgtgctaatgctgtttatcaagttaaataatataccctgccaccccctccctctaaaaccaaaccaaaattaaaggcaaaatcaagaaacgacgataaattctgagaagaaaaggaaagagagaaagaaaatgggagaaagagcccgtgatttgaaatgtcctgccaacaggataggtttatggtaccctggatgtcattatgggggtctgagattgcctcccacgcttatttttagcagaggtgggggtcggggggaagtgactctctttagcttccgaggggcctcactgtggagactgaaccagagcaaattccctttgtgtttcgtgctctgaagggacctgctattgttgtatgaggggcctcgtgtaagatccagtggagctggggctgtgggcaaaacctttccagataacactccacttgttttggaatggatactgactctccttccgtcatcgtccycccccattgacttggcacgactagcactttagtatctttttattctcattt

SEQ ID NO: 85827 - DNA, 891 bp, Homo sapiens
cccaatttctgcctctgtttcctgacctgttctttggcagcacaaaataaataagtaaataaataacaaccaggaggaaacagcatcaaattgataaatagaatgttataaactgtttcaaagataaaggcaagaagaagagcacaaactaaagacaagtgaatgcagcaaacctggggaaactgggctccgatttttctttttaaaaattcaacttcagaggctgtgcggccaataaattatccttttgcatgaatggcctatagtgcaatatgtgggaagcatcctccttcagctaaggggatgtcttagaaatgtaaacacaaatgaaaaaataggagagagacgccgaagccaggaggcggcccagcgctgtgctaatgctgtttatcaagttaaataatataccctgccaccccctccctctaaaaccaaaccaaaattaaaggcaaaatcaagaaacgacgataaattctgagaagaaaaggaaagagagaaagaaaatgggagaaagagcccgtgatttgaaatgtcctgccaacaggataggtttatggtaccctggatgtcattatgggggtctgagattgcctcccacgcttatttttagcagaggtgggggtcggggggaagtgactctctttagcttccgaggggcctcactgtggagactgaaccagagcaaattccctttgtgtttcgtgctctgaagggacctgctattgttgtatgaggggcctcgtgtaagatccagtggagctggggctgtgggcaaaacctttccagataacactccacttgttttggaatggatactgactctccttccgtcatcgtcctccmccattgacttggcacgactagcactttagtatctttttattctcattt

SEQ ID NO: 85828 - DNA, 1883 bp, Homo sapiens
tggcagagaaactgagatttaaacaccagcaggtgttgattgcctaataacttctagatctaacttaggctattgtatccctcatgcactaggaatattcagtctgtgtctgggtttggaatttcctaagctttctctttgcatattcaaaatgaggaagtctagattcatattccagctcaaccacttgttaccagcattaattcagtaatctgctcattcagtcagcagatatatgtgggccctactctatgcaaaataccatggttggaggctggagttaagatgagaaatcatggattttaaataggagggtgactgtattagatttgtatttttggaaggaacttgcattttgcaggagcctcagagactagttagaaggctattgcagtaatctatggtagagttgatttggtagcctcagcatatatttgtatgataattcaagccacgagggtgaatgaatcaattcatttaacctctctgagcccatcaataaactagaaatactaattcctgctatatttgtctcacattattgttataaagtcaaatgagataatatatataaaatcatttgaaacagccatggaaatgttatttattataattaattataattatttctttatgtatatgcctttatgtgttttctttcatatttctactgatttatggtctacaatgttaaacattttcagttttcagttatctgcatagttccctaaattattcaaaagattggtacattaaaaatataattaaaccaaatccaggacacatttctttgcaaggaaatgtagcaacaattgcatctttttaaatgtaatgtaatccatcatttcccaggatccatgaatctttttcacagtatgaactggatccatgaaaaggagggacagaatgcatcttatcagattctctcagatcttgatggtcaattaaatatgctttggtttaattcttttgaaagggaacacgggcttctaaagccttccatatcaccattcttaccataataaccctcactctacaggtaaggaaaccaatgtagagattttgcctaaacacaggatttagggaaacaacttcagagtaaattcttggtctcactgagtctattgtgatatatactagtggcagaacagcatttactacttaacctcctcactctgactgaaagatcacatcatccctggagaatttattttatctcaaagtcagtatccgaatagttcctgaaaagtttgaaagtttccatctctttgtatatattcacaaaaataaatggctacaggtttgtgatatagctgactctcctctgactcaggtgtgagatgttttagtgaatattaactaggcagtccttaataggcttgcttgtggttttgtcactgggacatcagaactaaagaatctttataaagagatctcactgaaccctaggtaccaggcatcaacaactaccaattggcataactctgcctacttaattttgttttctccactacttgagcccagctattcttgcctctccagttcygtataattaattatccacctttggtccgagattccctcacagggcttcaggcattccattacagatcttttcctaatgtgaggaaaagggaatagtggagagtcctgaggaccctggtgagaaacatagggcaagcatatatgacagatccacactagcatttttcttctgcagcctttcaagtttatattatgcaaagggacctttacatcagcaaactgtgaaagtaactactagttactacattaaatcaagcttctccagtgagatgtcctagagtaattaagttgtcaatcaaaattatgtttagtcatccttgaagaagtagtgcaaaatg

SEQ ID NO: 85829 - DNA, 619 bp, Homo sapiens
atctgcatgacttttgcctgtcctgtttccctctccctgggaaactccacctactcaggctttaagatcaggatacgtgccacttctacaaagctttccccagtgtgatgtcactactctactccccccccaactcccctaggctctcatctctggagcctccatcattgtgcagtgagctcctgaggcagggactcaggttatttaattcttcaatccccactcttgagcagagcttggaggtgctaattgaatgattgctgatagggtggacctgttggggaagggttcttggagggaagcagcaaattgctttaagatcaagctggagctctttggaggaccgctgtgggccaacctctattctcggttttctcctcaagctctgagatctgggaagttggagacagcaaggtccaggggcagaccagggcatcatcaacttgtttgatggcagagaggagagagctcctctgtgaggtcccagacggttgacaccaccacagggtygtggggatgttaatgcccactgcaaggggagcagaacccgagctggggggcagagtccagcgctgggagcctgcggccaggggcgccgatcgccccccagcgcagagtg

SEQ ID NO: 85830 - DNA, 764 bp, Homo sapiens
  misc_feature (1)...(764): n = A,T,C or G
atagagtgaagcctttcttgtgggaagatcaatgcaggctggcatttcaacatggtgccaaggtcaggatctcactttcctaagtgattacctgcatctctgccccgaggggatctgctcaccttactcaatcaggtgatggttagatctttctcaacacctttttctttcaagtaaatctcaagttgctttgcccagaaaacaaggaaaaccgactccttcctacacagagaatagattcctggcttctctgcgattatttaatgtcagtggaaaaacattctcattactgtagctgggaagaaaaaaatgtgttgcacaagtgtgatttctattcaggacgtagtgtgggtttgtgagtagcataaagaagtatataaaacrcctcctttattaactcgttaaaatatgaaacaataaacagaaatgaaatacaatgtaatgaaatcaatatataagttagggttgtttttaattataacttaaattaaccagggtatctccattgtgcaagaatttatttccaaaactaaaatgaagtctataaacgtgcactcaattacaccggggaattgcaaattttctgtcttctggcattcaaaagatttttgtttcattaatggctaaaatgattataaccgcttgtatactcatttcctttacnnnnnnnnnnnnnnnnnnnnnnnnnnnnnnnnnnnnnnnnnnnnnnnnnnnnnnnnnnnnnnnnnnnnnnnnnnnnnnnnnnnnnnnnnnnnnnnnnnnna

SEQ ID NO: 85831 - DNA, 1563 bp, Homo sapiens
ggttccctccagatgtgtccagatctgggatgtcctgcacagcggcccctggcctcctatggccttggagtgcttgaaatgtggctgccgagacagaggaactgaattttaagttgtatttaattttgattgaattagagttgtcacctgtggcagatggctactgcactggaccgccacccaagaagcttaaaatcccaggacactcaaatgtgggtgggttttgtgttgtgagaacaagaaatcctttatgaagaggtttttacaccttgccaagtacatggaaaattatgcaatttggccacgttgcaggatggagtggagccctctgtgctcacggcaagaccagcagtggagcgtagggtttgagcactctgtgaattctcgtcatgaccacagtagagaaaggacacagaaaaggggcgaaagagacagtaaaatggaaaggcacactgtgaacaggcgtttacactggaaggcctttgttttatagctgaaaacgaaatctactggccaagttcaatttaaattttagctggaggctttgcagaagacctgttgcagcagcgatagtgcaacatcattaacaaaaaaagaacaaaattggagaggaaaactatggaatagccaggaagcagactgaatgtcagcctcaatgaggccagaagaagcctcaacgaggccacagcagcacagagcaggggcaggcgggcacacagtgtggctcgtgcctggatcccccgctgggaacctggtgcccgttggctggtgcactgggccctgaccccctgagccgacagagtccaggtgagcacagcacgtctgtttccaggtgggaaaccctctgcctgsctgccgccgtgacccagtagatctgagatcacaaccattacagctttctgggtgatgagggggacattcacactgcagaagagtaaggacatcccagcaaggtcatcctgcagccaagacccaggtcagttctggagaagctgaaggcgtgggaaaacccgccagccttgggaggctccccaggccccagagtgaccccgttcttggagcactggtcctttgtccccacagtgagagggtggaccccatcaccttccacagctgtgctgacacctgcccacccacccctcatacaaagtcacttaggtggccaaggaaaaagtaacctcagatcccaaagtgtttcttccaggcccggaaggtgcaggaagcggccagccactgattgcccggctggcacctgcagcaatgatgctattctcactcatccgattggtgagcagatttttctgattcttcgattcttctttgtgatatttaaagaaagcctatgtgacagtgccactatcacctctccaaattcttgctgtctcctcatgtcaacatggagtgtgcagtgctaagatgtcttccacggctgggctttgcctccatatctgtgggcaggatatctgagccagcgccaggatgtggacaaaactcaagtcagatcccagaggacggccctactgtcaatcagaccaggggtgccctgaccacaccctcttccca

SEQ ID NO: 85832 - DNA, 1326 bp, Homo sapiens
tcaattttcctgtaacaacatgatttaaagcctactttaaaaaataaacaccgatcttagctattgtgtcttagccagagagctggcctcacaggaaaaaggctcatgtctgttccttttgcatgaaacttggcatgctgtacacacgttagaaacatgtgctgagctgatgagcagctcaccaaaaagaaccacaaagctgatcggtgtccaaggaacgttggtgggagagacgatgtgctcctgacgacagccacctgctcccccgaaagccagcatcagccgctgcggtctgtgctccggggtacttccatgcatctttcaaagaaatctttaggaacagttgtcactgcaatccttgtgggtcacagtgagaaaagttcagtttcaatagaaaactaagccacagataaaacaaagcaaaagcaaaagcattgaatgtgagggggtcccattccctttgtggaaacccaggactcagcagaattcatggacgttcttagtagagtcagccatcactacagcaagttctccctcagagatggactcttggaagccactggcaggagggctcatgggaaccggtgcgtgttgggtgctgtgtgcaaacggagcagggacaggctcagagggcctgaagctggcggggaagtcgctaccctaccacccagcgatggctggctgtcctgcagtgggktctgctgactccacacgggggactgactcccagagaccctgatgtggactttcaaactggcacctgctgaatgcacaccacgggtggtcaggccagtagggtggaggagccgcttcccgaggttccttctgtgcctgcagaggcctgagagccaggtccactctgctttcaatgccacttttgagcgcgttgtgttttcccagcgtctccctccccacatcagcaattcctcacaccacgctgagggaagaatggctcccgatgacaggcctcccaaggaatggaggaggggaagcgtgatttttctcctttcctcatccctccggcatccatcgactctccatgataaatgaggagggcacgacttcttttgtcattggagaaactgactccacattgcacagccagggagaggctatcctggctatttcctcaagaatgaaccttgatggtggctgtgcagatacacacacacatccacatacatatgcacacacacctgtacatacacatccacacacatatgcacacacacctgtacatacacacatccacacacatatgcacacacacctgtacatacagacacacaacacacacacacctgtacatacacacacatccacata

SEQ ID NO: 85833 - DNA, 1138 bp, Homo sapiens
ggaacctcccagtgcacctgtgagaagcgttctggggaggcacctgcccgccacaggattgttaaagacatgtgtggcccacagaagtcccaagttagatttaaacatagcatgaaataacacgtggctgtggtctctatttatgtctaagggaaatagtcacgaaggcattctctgaaaattaagcaccccgcctatcatctggaaagaggcgcacaggctgacgcttcatgttggtccccatatttttatctatgtatggatggcttttcattgcttctggcacatcaccgtgttgttgtgggtgcaatggctggggctggtgtcacgggtggtaaaagaatttaccaagacagtcgtgggtaaagaaggcagatttattagagaaagcacgaagatacgttgcaagaaagcaatgggcagcacagcagaaaaggggccgtctgcaaagaagcagggctggaaggaagctgtatagggtcatgctggagggggccatgggcagataaggtcatgctgctggggctacttgtggagtgaggtatttgggaacagcatgtcatgccagcagttgcctgtgattggccgtctctcagaacaactgttctccccgacctgtagcgccttcctcaacgttacttactaatcttatcaggactccacacttctgatcagtgcagtcacttctcctgtaaggaagtggtgttagccatgggtcagaggagaaagccagcgtttgcaggatcgggcaayccaagtttcacagccatgagtgagaggcagtgctgcgcagtgggagggtgcccttgcgtggctgtgaaggtgctctaggggttggatcgtaggccaggtggggatctggggagagtcatcatgatttgccacaaggtcagcatccggaacccgtgggcagcccagcacttgtgtctctgattgttaaaaaaggaagtccctgtgggccaggagtgttcccgagcatgtgaatatcatgcggccaccctcacttgtggcacccaggctgggttcagaaattagagttccctccacaccccagagggccgtggcacctgcaacctcctggccctttccatccagctggcctcgggtgacttggatgcacggggacgcctctgcctcc

SEQ ID NO: 85834 - DNA, 1138 bp, Homo sapiens
ggaacctcccagtgcacctgtgagaagcgttctggggaggcacctgcccgccacaggattgttaaagacatgtgtggcccacagaagtcccaagttagatttaaacatagcatgaaataacacgtggctgtggtctctatttatgtctaagggaaatagtcacgaaggcattctctgaaaattaagcaccccgcctatcatctggaaagaggcgcacaggctgacgcttcatgttggtccccatatttttatctatgtatggatggcttttcattgcttctggcacatcaccgtgttgttgtgggtgcaatggctggggctggtgtcacgggtggtaaaagaatttaccaagacagtcgtgggtaaagaaggcagatttattagagaaagcacgaagatacgttgcaagaaagcaatgggcagcacagcagaaaaggggccgtctgcaaagaagcagggctggaaggaagctgtatagggtcatgctggagggggccatgggcagataaggtcatgctgctggggctacttgtggagtgaggtatttgggaacagcatgtcatgccagcagttgcctgtgattggccgtctctcagaacaactgttctccccgacctgtagcgccttcctcaacgttacttactaatcttatcaggactccacacttctgatcagtgcagtcacttctcctgtaaggaagtggtgttagccatgggtcagaggagaaagccagcgtttgcaggatcgggcaatccaagtttcacagccatgagtgagaggcagtgctgcgcagtgggagggtgcccttgcgtggctgtgaaggtgctctaggggttggatcgtaggccaggtggggatctggggagagtcatcatgatttgccacaaggtcagcatccggaacccgtgggcagcccagcacttgtgtctctgatygttaaaaaaggaagtccctgtgggccaggagtgttcccgagcatgtgaatatcatgcggccaccctcacttgtggcacccaggctgggttcagaaattagagttccctccacaccccagagggccgtggcacctgcaacctcctggccctttccatccagctggcctcgggtgacttggatgcacggggacgcctctgcctcc

SEQ ID NO: 85835 - DNA, 1138 bp, Homo sapiens
ggaacctcccagtgcacctgtgagaagcgttctggggaggcacctgcccgccacaggattgttaaagacatgtgtggcccacagaagtcccaagttagatttaaacatagcatgaaataacacgtggctgtggtctctatttatgtctaagggaaatagtcacgaaggcattctctgaaaattaagcaccccgcctatcatctggaaagaggcgcacaggctgacgcttcatgttggtccccatatttttatctatgtatggatggcttttcattgcttctggcacatcaccgtgttgttgtgggtgcaatggctggggctggtgtcacgggtggtaaaagaatttaccaagacagtcgtgggtaaagaaggcagatttattagagaaagcacgaagatacgttgcaagaaagcaatgggcagcacagcagaaaaggggccgtctgcaaagaagcagggctggaaggaagctgtatagggtcatgctggagggggccatgggcagataaggtcatgctgctggggctacttgtggagtgaggtatttgggaacagcatgtcatgccagcagttgcctgtgattggccgtctctcagaacaactgttctccccgacctgtagcgccttcctcaacgttacttactaatcttatcaggactccacacttctgatcagtgcagtcacttctcctgtaaggaagtggtgttagccatgggtcagaggagaaagccagcgtttgcaggatcgggcaatccaagtttcacagccatgagtgagaggcagtgctgcgcagtgggagggtgcccttgcgtggctgtgaaggtgctctaggggttggatcgtaggccaggtggggatctggggagagtcatcatgatttgccacaaggtcagcatccggaacccgtgggcagcccagcacttgtgtctctgattgttaaraaaggaagtccctgtgggccaggagtgttcccgagcatgtgaatatcatgcggccaccctcacttgtggcacccaggctgggttcagaaattagagttccctccacaccccagagggccgtggcacctgcaacctcctggccctttccatccagctggcctcgggtgacttggatgcacggggacgcctctgcctcc

SEQ ID NO: 85836 - DNA, 747 bp, Homo sapiens
agagagcaggtgctgcagcctgggctccccaggggccatcctgagccaggacttcccctgcgtggacatttgctgctggtgcttctgggcccccaaatgctcctagtgctcttctgcacccacgtacagcgtttccctgcttggctcactcacacaccctactgcagcactgtaggcaggtcttttcctgcagcggtgacctttctccacatccactgcccccgagtgctcatttacatggccagagtggccccagcctgtgagagggttggcttcagcagcccaggctcctgmaggccagcgagctctcagcagaggtggagctcagaacagggctttgggcttcagttcaggaggccagtaaatgaacagaggatgcatctgctgacgtttgtttggaggcagacagtggctctgtgtgcttgtctggggtgggcctgtccctgtcactgatggggatgaggggctcagtgagccaggggaccagggctctcagctgggaaaggacagcttggatgagccccggtgggggctgtcaccggcactcaactgtgctcaggttgcaactccccaccccatgtgcaccagctgtcaatggctgctgcctgggataaaagggccttcccccatttctcctcatgtcacagaagagcttggggatgtgttgagtgtggggcggaaactggtgaggccgaagtacacagcagaaagtaaaggtgccatcagcagagagccaggccggtgcct

SEQ ID NO: 85837 - DNA, 904 bp, Homo sapiens
cagtttgtggtactttgttacagcagcctaggagactaacacagtgtctatcaggggcatgtcttcagccttgactcagcaagtggcgtgctaatgagtccgtttcccagtgactgtataatcagtctgggagtaaactgggtgcttttggggggaagtgacatgagctcttctcagctgtgaaattgctcatcagtcaatgtgttcgagtgatmacctcacagatggccccccagtgaccataaagagttacatactctttcccaaaatggcccattgctctgggcggctgtttgccatggaggggtatctggacgtgctgtccacgggggcccagggaggaggaaggggtgggagccagttagacatgactgttgctgctgctgctgcccaacctcaagtgcatgagtctgtactgcctgccacactgtgggaacacgctctttggatgaaactattttcccagttaaaagagcttcatcaaggctgggcacggtggctcacacctgtaatcccagcacttttgggaggccaaggcgagtggatcacctgaggtcagaagtttgagaccagcctggtctacatggtgaaaccccatctctactgaaaatacaaaatttagccgggcgtggtggcacatgcctgtaatcccagctactggggaggctgaggtgggagagtcacttgaacttgggaggtgaaggttgcagtgagctgagatcgcgccactgcactccagcctgagtgacagagcgagccttcaaggctgaatagggctccatctcaaaaaaaagaaaaaaaaagagcttcattggaaccccccatctgcttcctcttgtcaccccagtttctgatgtaatagtaaactaagtgaagcgtgtcttgattcagaaaggccacccgt

SEQ ID NO: 85838 - DNA, 904 bp, Homo sapiens
cagtttgtggtactttgttacagcagcctaggagactaacacagtgtctatcaggggcatgtcttcagccttgactcagcaagtggcgtgctaatgagtccgtttcccagtgactgtataatcagtctgggagtaaactgggtgcttttggggggaagtgacatgagctcttctcagctgtgaaattgctcatcagtcaatgtgttcgagtgataacctcacagatggccccccagtgaccataaagagttacatactctttcccaaaatggcccattgctctgggcggctgtttgccatggaggggtatctggacgtgctgtccacgggggcccagggaggaggaaggggtgggagccagttagacatgactgttgctgctgctgctgcccaacctcaagtgcatgagtctrtactgcctgccacactgtgggaacacgctctttggatgaaactattttcccagttaaaagagcttcatcaaggctgggcacggtggctcacacctgtaatcccagcacttttgggaggccaaggcgagtggatcacctgaggtcagaagtttgagaccagcctggtctacatggtgaaaccccatctctactgaaaatacaaaatttagccgggcgtggtggcacatgcctgtaatcccagctactggggaggctgaggtgggagagtcacttgaacttgggaggtgaaggttgcagtgagctgagatcgcgccactgcactccagcctgagtgacagagcgagccttcaaggctgaatagggctccatctcaaaaaaaagaaaaaaaaagagcttcattggaaccccccatctgcttcctcttgtcaccccagtttctgatgtaatagtaaactaagtgaagcgtgtcttgattcagaaaggccacccgt

SEQ ID NO: 85839 - DNA, 904 bp, Homo sapiens
cagtttgtggtactttgttacagcagcctaggagactaacacagtgtctatcaggggcatgtcttcagccttgactcagcaagtggcgtgctaatgagtccgtttcccagtgactgtataatcagtctgggagtaaactgggtgcttttggggggaagtgacatgagctcttctcagctgtgaaattgctcatcagtcaatgtgttcgagtgataacctcacagatggccccccagtgaccataaagagttacatactctttcccaaaatggcccattgctctgggcggctgtttgccatggaggggtatctggacgtgctgtccacgggggcccagggaggaggaaggggtgggagccagttagacatgactgttgctgctgctgctgcccaacctcaagtgcatgagtctgtactgcctgccacactgtkggaacacgctctttggatgaaactattttcccagttaaaagagcttcatcaaggctgggcacggtggctcacacctgtaatcccagcacttttgggaggccaaggcgagtggatcacctgaggtcagaagtttgagaccagcctggtctacatggtgaaaccccatctctactgaaaatacaaaatttagccgggcgtggtggcacatgcctgtaatcccagctactggggaggctgaggtgggagagtcacttgaacttgggaggtgaaggttgcagtgagctgagatcgcgccactgcactccagcctgagtgacagagcgagccttcaaggctgaatagggctccatctcaaaaaaaagaaaaaaaaagagcttcattggaaccccccatctgcttcctcttgtcaccccagtttctgatgtaatagtaaactaagtgaagcgtgtcttgattcagaaaggccacccgt

SEQ ID NO: 85840 - DNA, 886 bp, Homo sapiens
acatcctattacattaacttagggagctaaggaataatctcagtgagcacatgaaagttatgtaactgctttgacctcacaagcaggatggcaacagttggcaaactcttratggggcagttgatgggagaatttgagaccattttcatcagtgactcccaatgtgactttaggcatatctctacatctctctgcacttctatattttttttttgtttaagtatggtggaaaactgcctaatcctcttgggaatccaggatttggaatgtgattcactcaggattaaatcatcatttcctgcatcttattttacataattcaagaactcagagagtcaacactgttgaaatttacaatcagccttcacagactctgtactcaaaacatctgcaaagcaaaagaaagagtctatctcagagaacctctttgataagacaataaaagttactttattcaactggcatcttattctcaatgagcctatttgtgcaatttgagtgttgtgcaatttagttatcaaggttttttttttcctgtccctggaagacaaggtcaagcaggatgtgcatgttaacaccttccactgacttaaacaaaggtaacaccagatctaacccacactggttggagagattctccacacaaaatcttgtggagagattttgctgcacaaaacttccagatccactctgtgccataaagcttcaattcaatgggatttccagcatcttgaattgtttagaaatgtcatttactccacttttaggaataagaagagataatttcccaaacccatccaagctgttacacactcaatagatatttcttgaacctcttttatgttccatatatggtgctgaatgcaagaaatataagaagaaagca

SEQ ID NO: 85841 - DNA, 886 bp, Homo sapiens
acatcctattacattaacttagggagctaaggaataatctcagtgagcacatgaaagttatgtaactgctttgacctcacaagcaggatggcaacagttggcaaactcttgatggggcagttgatgggagaatttgagaccattttcatcagtgactcccaatgtgactttaggcatatctctacatctctctgcacttctatattttttttttgtttaagtatggtggaaaactgcctaatcctcttgggaatccaggatttggaatgtgattcactcaggattaaatcatcatttcctgcatcttattttacataattcaagaactcagagagtcaacactgttgaaatttacaatcagccttcacagactctgtactcaaaacatctgcaaagcaaaagaaagagtctatctcagagaacctctttgataagacaataaaagttactttattcaactggcatcttattctcaatgagcctatttgtgcaatttgagtgttgtgcaatttagttatcaaggttttttttttcctgtccctggaagacaaggtcaagcaggatgtgcatgttaacaccttccactgacttaaacaaaggtaacaccagatctaacccacactggttggagagattctccacacaaaatcttgtggagagattttkctgcacaaaacttccagatccactctgtgccataaagcttcaattcaatgggatttccagcatcttgaattgtttagaaatgtcatttactccacttttaggaataagaagagataatttcccaaacccatccaagctgttacacactcaatagatatttcttgaacctcttttatgttccatatatggtgctgaatgcaagaaatataagaagaaagca

SEQ ID NO: 85842 - DNA, 794 bp, Homo sapiens
gcttggccccatcagtctgtgggcaggatctgagaccctgcttttcatctcaggccaaattcttcttggccggggataaaagtgaaaagtgttctactgtgtcccatgctgctctgttgaaggtctctgttaaagccattctttcctttgctaaaagtcagggcatgaccaggcaggcggaggtgggcacttagcttyttcgcccttcactctctcctaccttaacagggagagtaaaaccctcctctgtttactctctttactctcttcctccgtcacatctgtcttcaggtctgtctgtctggatcatccagtctctttttctgttactttcttccttgagccctgtcttcctctcttttttctctgtgtggctttcaccctctccgtctttctttctcctggtcaccatgtctctcatctctgtctctgtctctgcctctccctggctctttctccctctcctctccccgctggctgtaatcatccacccttcacagcctcatgaacactggcagcccttctgcgctgcattccttaaaaacccttgctgctgacagagaggacttggaggtggtggctgggggactgcgggagggagggaagactaagccccttcagaagtcagagcatctgtctctttgggagcaatgccggggctttgatgctaaatactgaggagtgagaaggagggggcagatggcagaggaggagctctgtagggcgggtgctggtgcgccccttcagaagaaactcgatgctgactccatcatgacaagcctggggtcctggat

SEQ ID NO: 85843 - DNA, 794 bp, Homo sapiens
gcttggccccatcagtctgtgggcaggatctgagaccctgcttttcatctcaggccaaattcttcttggccggggataaaagtgaaaagtgttctactgtgtcccatgctgctctgttgaaggtctctgttaaagccattctttcctttgctaaaagtcagggcatgaccaggcaggcggaggtgggcacttagcttcttcgcccttcactctctcctaccttaacagggagagtaaaaccctcctctgtttactctctttactctcttcctccgtcacatctgtcttcaggtctgtctgtctggatcatccagtctctttttctgttactttcttccttgagccctgtcttcctctctyttttctctgtgtggctttcaccctctccgtctttctttctcctggtcaccatgtctctcatctctgtctctgtctctgcctctccctggctctttctccctctcctctccccgctggctgtaatcatccacccttcacagcctcatgaacactggcagcccttctgcgctgcattccttaaaaacccttgctgctgacagagaggacttggaggtggtggctgggggactgcgggagggagggaagactaagccccttcagaagtcagagcatctgtctctttgggagcaatgccggggctttgatgctaaatactgaggagtgagaaggagggggcagatggcagaggaggagctctgtagggcgggtgctggtgcgccccttcagaagaaactcgatgctgactccatcatgacaagcctggggtcctggat

SEQ ID NO: 85844 - DNA, 794 bp, Homo sapiens
gcttggccccatcagtctgtgggcaggatctgagaccctgcttttcatctcaggccaaattcttcttggccggggataaaagtgaaaagtgttctactgtgtcccatgctgctctgttgaaggtctctgttaaagccattctttcctttgctaaaagtcagggcatgaccaggcaggcggaggtgggcacttagcttcttcgcccttcactctctcctaccttaacagggagagtaaaaccctcctctgtttactctctttactctcttcctccgtcacatctgtcttcaggtctgtctgtctggatcatccagtctctttttctgttactttcttccttgagccctgtcttcctctcttttttctctgtgtggctttcaccctctccgtctttctttctcctggtcaccatgtctctcatctctgtctctgtctctgcctctccctggctctttctccctctcctctccccgctggctgtaatcatccacccttcacagcctcatgaacactggcagcccttctgcgctgcattccttaaaaacccttgcygctgacagagaggacttggaggtggtggctgggggactgcgggagggagggaagactaagccccttcagaagtcagagcatctgtctctttgggagcaatgccggggctttgatgctaaatactgaggagtgagaaggagggggcagatggcagaggaggagctctgtagggcgggtgctggtgcgccccttcagaagaaactcgatgctgactccatcatgacaagcctggggtcctggat

SEQ ID NO: 85845 - DNA, 794 bp, Homo sapiens
gcttggccccatcagtctgtgggcaggatctgagaccctgcttttcatctcaggccaaattcttcttggccggggataaaagtgaaaagtgttctactgtgtcccatgctgctctgttgaaggtctctgttaaagccattctttcctttgctaaaagtcagggcatgaccaggcaggcggaggtgggcacttagcttcttcgcccttcactctctcctaccttaacagggagagtaaaaccctcctctgtttactctctttactctcttcctccgtcacatctgtcttcaggtctgtctgtctggatcatccagtctctttttctgttactttcttccttgagccctgtcttcctctcttttttctctgtgtggctttcaccctctccgtctttctttctcctggtcaccatgtctctcatctctgtctctgtctctgcctctccctggctctttctccctctcctctccccgctggctgtaatcatccacccttcacagcctcatgaacactggcagcccttctgcgctgcattccttaaaaacccttgctgctgacagagaggacttggaggtggtggctgggggactgcgggagggagggaagactaagccccttcagaagtcagagcatctgtctctttgggagcaatgccggggctttgatgctaaatactgaggagtgagraggagggggcagatggcagaggaggagctctgtagggcgggtgctggtgcgccccttcagaagaaactcgatgctgactccatcatgacaagcctggggtcctggat

SEQ ID NO: 85846 - DNA, 1354 bp, Homo sapiens
actgcatttgaatctctttcccatcttatacctgctgatccctgtctctgaggctgggcccagaatcggggggctatttaacaagcactcatggaattaggatacagagaccagtctgcagaccagggttaggacctggtgatgattttcaccaactgccaaccacctgagaaaataatggcaatgtagtgagtgtttccataaagtatgttcgtgcacttaataaacaaacttttagtttaagatcatatcctgcatccttttttggtgttaaatgtcttttaaaaatgaaatgatgataatgataaatggctattttgttgttgttgttgttttgttttgtttttgagatagagtcttgctctgttgcccaggctagagtgcagtggcacartcttggctcactgcagcctccgcttcccagattcaagcgattctcctgtctcaccctcccgagtagctaggactacaggcacccgccaccatgcccggctaatttttgtattaatatttctaggagagatggggtttcaccatgttggccaggctggtcttgcgcttccggcctcaagtgatctgcccaccttggcctcctaaaatgctgggaccacaggtgtgagtcaccgtgcccggctgatggtttctatttagtgtccttactaggaaagaaaagttgctaactctaggtagtcccctatttattaatttcatgggtgcataaaatccaagtcagaaaccatttctctagattggcattttaaaactttcttcttatttagcaataaaacctctcttctaaaagaatcctgtctaaaacctcagtagatgaatgagcagataaaagtggaatcattgtgggttacatggagcctgggggcctggtttcccatcccctgggtctccccttccttccattccctaacaacagtggcccctgagacacctcctccttaaaactcaacttggaaactactctcctagaaatttctttgaatgttataaatgggaaaatcaaggctctagaaaggaaagtattttccccaaacttctaattcctatttgagttcagtcatcacaagatcagcatatcattgattaatgaaaaaggtccacccgaactccagtatggcttagagcctggtaaggtatcaaggggcatggtcttctttgtaacaacctttggggaaggtggagtctgagtcttctccttttgtaaatgaggacaacatggtccagctaagttaagcagctttctcagggtcaaccaagagggaggaaagattcagggacaggtacgtttaccttgaggtccagagctcttttctgctttttctgatgctgcaaagttggctct

SEQ ID NO: 85847 - DNA, 1354 bp, Homo sapiens
actgcatttgaatctctttcccatcttatacctgctgatccctgtctctgaggctgggcccagaatcggggggctatttaacaagcactcatggaattaggatacagagaccagtctgcagaccagggttaggacctggtgatgattttcaccaactgccaaccacctgagaaaataatggcaatgtagtgagtgtttccataaagtatgttcgtgcacttaataaacaaacttttagtttaagatcatatcctgcatccttttttggtgttaaatgtcttttaaaaatgaaatgatgataatgataaatggctattttgttgttgttgttgttttgttttgtttttgagatagagtcttgctctgttgcccaggctagagtgcagtggcacaatcttggctcactgcagcctccgcttcccagrttcaagcgattctcctgtctcaccctcccgagtagctaggactacaggcacccgccaccatgcccggctaatttttgtattaatatttctaggagagatggggtttcaccatgttggccaggctggtcttgcgcttccggcctcaagtgatctgcccaccttggcctcctaaaatgctgggaccacaggtgtgagtcaccgtgcccggctgatggtttctatttagtgtccttactaggaaagaaaagttgctaactctaggtagtcccctatttattaatttcatgggtgcataaaatccaagtcagaaaccatttctctagattggcattttaaaactttcttcttatttagcaataaaacctctcttctaaaagaatcctgtctaaaacctcagtagatgaatgagcagataaaagtggaatcattgtgggttacatggagcctgggggcctggtttcccatcccctgggtctccccttccttccattccctaacaacagtggcccctgagacacctcctccttaaaactcaacttggaaactactctcctagaaatttctttgaatgttataaatgggaaaatcaaggctctagaaaggaaagtattttccccaaacttctaattcctatttgagttcagtcatcacaagatcagcatatcattgattaatgaaaaaggtccacccgaactccagtatggcttagagcctggtaaggtatcaaggggcatggtcttctttgtaacaacctttggggaaggtggagtctgagtcttctccttttgtaaatgaggacaacatggtccagctaagttaagcagctttctcagggtcaaccaagagggaggaaagattcagggacaggtacgtttaccttgaggtccagagctcttttctgctttttctgatgctgcaaagttggctct

SEQ ID NO: 85848 - DNA, 642 bp, Homo sapiens
tcttacccagcttggccttgctatgcagtagakttggactttcgttggtgatgggaaactaacaacaaattactcagtattcattttatacctttgggactgtgtgtaaacaaatatgtccttgtctttcacttacagctcttttaagctaattcctattcagaaattctgaatcgaggtaaataatgctcttagcggttttggcagctggtttccgtcattatttcagatcaagaacggagttatttatttttgaaaaaggtcataattgttgatgtttatgtgcctctgaatgcaaggcattgtgctgggtggtacccacagctagttaaatagagccttctgggtcaggagcttacactctaaaatggatagtttcaacagagcaggagaggagaagggcagagaacgtggagctaaaaccataatacagagtttgtggttaagagtttgtggcttctgagccagagtatgaatgagtaagtcactggataagggaggaagattgtgtccttcctctggcagaagagctatcagtggagaaggggcaagatcatgttcagagcagaataaacgaacttcatttatgtgacagaagtagggatctgtgggaagttggcaggggtagggtgaggtgagttt

SEQ ID NO: 85849 - DNA, 995 bp, Homo sapiens
tgcattatacgatctcatttaatcctcagggcacccttcgaaggttcttttgtgatcctcagtttagaaatgaggaaacggacacggggagagggtcagtcacttgcccgagatcacacagcatgtacacaatgggactgggatctgaactcagattctcattttgaacaatcrtgctcctcgcctttgctcagaatcatctgaaaatagggaacgtttgctttaggaaagtaagattaggggaggtggacatgaacggggtacacaggtctgtcccaaacactctgatcgtggcatcattcaactccctgatatcctccccttccctcctcttctacctcctctcatgctttttcgtgtcacagtcatcccttccaaccaggctagtcctgaccccctgcctctagcgagggcagggagaaggctatctgcagaccgtcacttttatctctccatcaacactcggtcttcccttccagatttggtgctatgttcacagccttcaagaagcctgcacaggttcatgtcactcatgtattcatccaatacctgatgagcacctattttgcgccagggaccattccaaaccctgggatgcacacaggaatgagctgcgtgacctacccttaaaaagctcacagtctagctggggagaaggggagtggaacagagtaggagagaccaggtggtcctgcaacagcagctctcaagctgaaggaccacctggggatctgattgaaagctctggggtggggcccaatgtcctgccattccaacaagctgctgggtgctgctgcgggggctggggaccactctatgtgtaccaggagccctgagtattccagctgctaccacacaaatgaatgcctggtgctgggacgaggggagctcagatagggaataggggtttgggaaggagctgagtgaggcctgagccaagtcctgacctaagtggaggggaagtgatctcggttgccttttggaaatgaaatgca

SEQ ID NO: 85850 - DNA, 995 bp, Homo sapiens
tgcattatacgatctcatttaatcctcagggcacccttcgaaggttcttttgtgatcctcagtttagaaatgaggaaacggacacggggagagggtcagtcacttgcccgagatcacacagcatgtacacaatgggactgggatctgaactcagattctcattttgaacaatcatgctcctcgcctttgctcagaatcatctgaaaatagggaacgtttgctttaggaaagtaagattaggggaggtggacatgaacggggtacacaggtctgtcccaaacactctgatcgtggcatcattcaactccctgatatcctccccttccctcctcttctacctcctctcatgctttttcgtgtcacagtcatcccttccaaccaggctagtcctgacccccygcctctagcgagggcagggagaaggctatctgcagaccgtcacttttatctctccatcaacactcggtcttcccttccagatttggtgctatgttcacagccttcaagaagcctgcacaggttcatgtcactcatgtattcatccaatacctgatgagcacctattttgcgccagggaccattccaaaccctgggatgcacacaggaatgagctgcgtgacctacccttaaaaagctcacagtctagctggggagaaggggagtggaacagagtaggagagaccaggtggtcctgcaacagcagctctcaagctgaaggaccacctggggatctgattgaaagctctggggtggggcccaatgtcctgccattccaacaagctgctgggtgctgctgcgggggctggggaccactctatgtgtaccaggagccctgagtattccagctgctaccacacaaatgaatgcctggtgctgggacgaggggagctcagatagggaataggggtttgggaaggagctgagtgaggcctgagccaagtcctgacctaagtggaggggaagtgatctcggttgccttttggaaatgaaatgca

SEQ ID NO: 85851 - DNA, 1693 bp, Homo sapiens
ttaactcaaaggagtcactctctgatgtagggattccatcctgcttcctagtagggcacgtgctttggggcttgaatacccaaaagccctgatgtggaaacaaaacaggaaagaaatgagctggagacagcctgggatgtgggctgctttagaaaatgccctgtatgtgtagctctgtgtctcttagagacagcagggacctgctgagaagggttgtcaggtgtagatgtgcagaacgtcccagctagaatctagctcacactccacatgttagagcagcacctggcgtaaagtatgccaccttctcattctcatactaaagaccccaagttgctagccaactgaatgctgtctccttccagaggaggtgctttttgtaattctcacaaaggtgtcctatggattagttaggtgtccyttggttaggacagggaggagggaaggggccatccacagtggtgaagatggcacctcacaagtgtccagtgcattcccttttacaaagttcttttagacacatggtcttggcaaacctacaagacaggtgggccgtctcccattttatagatgagaaagctgaggcccaacgaagggaaagcattttggcccaaggtcacccatggagcactgaggttttttgactcaaattccgtatgccttcctgtcactcttccctcctagacacaggtatgtccagccaatttgttctgtgcctcagtttacctttttgcaaaactaggagaggagatcagaggaatgagtcttgggatccagggtgaggaagacagaaagcaaaaccaaacaaaagcaagcaaacacattctctagtgttttgtcttctgggaacacggaaaacagctcagcttttccataccgctgctttcctagtgggtcctgccccagaagcagctgcccagcaacctcctgaccaaggctggtgcaccccaccagtgccaagggtcttcctgtgcacccagtacccagcctccgtttcacccacactgcccaattcccagatccctggatcctcgtccttccctgaacccccttccctgagcaggtcagaggtgtgggagggtgtgtcaggtgggtgtcatagctccagggaaggaaatggctgttcctggctctgtccaggtggggctcaaaatagtcatcttcaaagagaaaaactgggacacagagctggagagacccagagccccggagccaaggcgcgcaggtgcagcgatgtcaggctgaggggatcgcagagttcccccttgccctgccactcaccagttaacccttccctcaagccctgccagagccccctccccaacctaccttgaaagcccctcatccttccaagaagtcccactttcacagaagccaattaatccttatttttaaaaaacaaaaaccaatccctctcccccgagaccttccctccatccatccatccctttggaatgaaagcccttgtgcctgtttcacgaaaaggctcccaggtcctcctttcaaggaaaaaggacccaatttccccgcgcctccccagcccccgcttccagtaaagggggaacctcggctccctgcctcccctcagctgccctcacctggctgggggcggcggtcgagtcgggttcggtctgagcccgcgatctggctccgggctgcgggctgcgggctgcaggctgcaggctgcgggtgccgg

SEQ ID NO: 85852 - DNA, 682 bp, Homo sapiens
caccccctcactcctccatctccacttccatctcaccctgtcaaaatcctcaccattatttagaaagagcctcttcaggccgggcacggtggctcacgcctgtaatcccaacactttgggaggccgaggtgggtggatcacgaggtcaggagatcgagaccatcctggccaacacggtgaaactgtctctactaaaaatacaaaaaaactagctgggtgtggtagtgcacacctgtagtcccagctactcaggaggctgaggcaggagaatcgcttgaacccaggaggcagaggttgcagggagctgagatcataccacgcactacagcctctgtcttaaaaaataaaaataaaaaggctgagagagaatcagagaragggaggctgcagagtatactggttaaggactgggtttgggagccagatagctctgagtttaaatcctactcctgcattaacttttctgatccagaagggacacatggccctaagaagggctgcatggccctaagaagggttgtggctgccctaggttggcttccagcttccccagctctcctgcggcatccctgtgtggctcatcccacccttaccatgcctcttgtcttccccatagtcttggggcccaagcttttcaagctggtgaaggagagagttgtgatcccaagaagcggagtgagcg

SEQ ID NO: 85853 - DNA, 737 bp, Homo sapiens
ggcttttcattcatttattcgtttgattaatgttatcttttcagaaaaaccttctctgaccattctaaaattacctcccccttttctttttctttcttttttttttttttttttgagacggagtctcgctctgtcacccaggctggagtgcagtggcccgatctcagctcactgcaaccttcgcctcccaggttcaagcaatgctcctgcctcagcctccctagtagctgggattacacgcacacgccaccacgcccggctaatttttgtctatttagtagagacggggtttcacgatgttggccgggctggtctcaaactcctgacctcgtgattcacccgccttggcctcccaaagtgctgggattacaggagtgaggagccatcgcgcctggccacctccctcttattttctcccacattgtgccccgtcgtagcattatcactgaaattatgtctcctccactggaatgaaagctccatgagttcaggaaccgtgacagcctctgttcacggttgtgttttcagtgcccagcacatacgaggtgctcaataaatatttattgcacaagtgaacaaatacttcagtgcctaccagtctacaggctatcagaggcaaaagtgaaaaaggmattgtccctgctccttcagccccagctcacgtgttctatcaaacaacatttggtgaatctgagcttggagcagagtgaagtactgtaggggaaagacttggattt

SEQ ID NO: 85854 - DNA, 546 bp, Homo sapiens
taaattctgactacacgttttcctttgtaacttgctacctttgaccaacatttgttcgtgagattaatctatgttaatgtgcagctgtagttttatttccattgccatatagtattctattgtatgaatgtaccacaaattatttatctggtgtatagttgatagataagttggttgttttcagcttgggactattataaacacttcaatatatttttcttggtgcacttgtacagaactttctctaggattaaaattggttatagattatacacaytttcaacttttctggagaaagcaaactctttcacgttgtggttgtaccaagttcattcataccaacactgtgtgagaggtacctttgccgcacatccccaccaacacacggtattatcagaatttacaatttttctataactggtacatgattttaatttacatttttctaatcattagtaaaatgagcaaccttctcttatgtttatgagccatttggattttctctttcttgaaagattcactcaaatctttgcttattcttatgat

SEQ ID NO: 85855 - DNA, 654 bp, Homo sapiens
  misc_feature (1)...(654): n = A,T,C or G
tttttcttaattcttatttcaatggccagtggcatttattttctaaaatataaatctttagtatcttaacttaggtttttggtagaaacctaaaaccagattacagaagtttccatctgttcttcattttgcaagtatctttttcatgagtaaaactagacatcaattttattatcttcatctattgagtagttcatattatttttttctcttaaggtgctaatttagtaaattatattgatagattttcttctgattctagattattcttggataaactctacatggttatgctctattattactatagatagtggaagaatttgctataactttaacttttctctnnnnnnnnnnnnnnnnnnnnnnnnnnnnnnnnnnnnnnnnnnnnnnnnnnnnnnnnnnnnnnnnnnnnnnnnnnnnnnnnnnnnnnnnnnnnnnnnnnnntctcctactaatagccaaccactattattaactgacactgtcctagaacatcttgctttcctctgagagctgacatactttctcccttttgataatgagaaraaaagattttaacgtcttactctgactgccacaaatcttagaggcacctttaatcactgtggttgtggcaatctttatcattggtttatatgttcctatatgcat

SEQ ID NO: 85856 - DNA, 727 bp, Homo sapiens
taagactgcatcatgacataaataacactatttgaattatgtggagaagagaatatttatagaccttaagtaattataattattttgaaaagatacgtagacattaatggctacctccgtgagaaagcagttagaaatctggaagaaaagaatgatttactttccttttcataccttattgttcttacatatgcttattttactttatcatttaaaaccctatttaaccaaataacaaatattgaatcccaaaccagttgatctttattgtgttaatacataggaaatcattaaaagaaaaactttagatgaattaaatttaagagtttaattgagcaaagaacaatttgtcaatcaggcagtcctcagaaccggaagaggttcagagaattctgctccacaacatgggctggcagcattcatgaacagaaaacaaaacatgaggtagrgaaacaatttggttagttacagctccacgtttgcctaatttgaacatggtctgatcagttggccacctgtgcttgacctaagcttaactactgtgattggctgaggctcagctatttgttacaaaagtgtagtcctaaagtacgctttcagttagtttatgtactaagttaggttgcagtttttacataagaactcacaatatgaaggcatcctcaggccaaatttagtttaacagaataacgtactgctatcaacattaaacatagctaaataattt

SEQ ID NO: 85857 - DNA, 493 bp, Homo sapiens
aaaaatgctcaacatctctaaccatcagagaaatgcaagtcaaaaccacaatgagctatcatctcataacagtaaggctgttattaaaaagtcaaaaaacaacagttgctggcaagactgtggagaaagggaatgcttatacagtgttggttctacacacacaaatcaataaatatgatttgtaaatcatatgtaaattaattcagccactgtgggaaacaatttggagatttcttaaaaawcttaaaacactactactatttaacctgtcagttcaattactggatataaatccaaacggaaacaaatcattctaccaagaagacacatgcactctcattttcaatgcagcactattcacaatagccaagacatggaatcaacccaggtgcccatcaatggtgcattggataaagaaaatgtaaatatacacctatacaccatggcgtactatgcagccataaacacaaacaaaattttgtcctttgcagta

SEQ ID NO: 85858 - DNA, 626 bp, Homo sapiens
tgccttctattcttttgctctactatactggcattctcggttcttggcatccagcatcaagatatcgcttcatgatccaagatggcgcctcagtctccagctgtcagttctgcactgaagacagcaggatgaaagaagagaaaagagaagtacactctgtttccattttatttattttttgagtcagagtctccctctgtcacccaggctgaagtgcagtggtgtgatctctgctcactgcaacttccacctcccgagttcaagccattctcctgtctcaacctcccaagtagctgggattacaggtgtgcgctgccactcccggctaattttttgtatttttagtagagacrgggtttcacaatattggtcaggctggtctcgaactcctgacctcgtgatctgctagccttgggaaagaaccttcccacaagcaccatagtgcatacacctttgcttccatcttaaaaaaaaaaacaaaaacaaaaaacttagctgcatgatcagcaacatcagcaagaagaggaactagcaaatccagtgtttcaggtagataaattttcattaagaaataagggaagaatcaacattgaaagagctggagaacttccagttatgttagtccc

SEQ ID NO: 85859 - DNA, 626 bp, Homo sapiens
tgccttctattcttttgctctactatactggcattctcggttcttggcatccagcatcaagatatcgcttcatgatccaagatggcgcctcagtctccagctgtcagttctgcactgaagacagcaggatgaaagaagagaaaagagaagtacactctgtttccattttatttattttttgagtcagagtctccctctgtcacccaggctgaagtgcagtggtgtgatctctgctcactgcaacttccacctcccgagttcaagccattctcctgtctcaacctcccaagtagctgggattacaggtgtgcgctgccactcccggctaattttttgtatttttagtagagacggggtttcacaatattggtcaggctggtctcgaactcctgacctcgtgatctgctagccttgggaaagaaccttcccacaagcaccatagtgcatacacctttgcttccatcttwaaaaaaaaaacaaaaacaaaaaacttagctgcatgatcagcaacatcagcaagaagaggaactagcaaatccagtgtttcaggtagataaattttcattaagaaataagggaagaatcaacattgaaagagctggagaacttccagttatgttagtccc

SEQ ID NO: 85860 - DNA, 626 bp, Homo sapiens
tgccttctattcttttgctctactatactggcattctcggttcttggcatccagcatcaagatatcgcttcatgatccaagatggcgcctcagtctccagctgtcagttctgcactgaagacagcaggatgaaagaagagaaaagagaagtacactctgtttccattttatttattttttgagtcagagtctccctctgtcacccaggctgaagtgcagtggtgtgatctctgctcactgcaacttccacctcccgagttcaagccattctcctgtctcaacctcccaagtagctgggattacaggtgtgcgctgccactcccggctaattttttgtatttttagtagagacggggtttcacaatattggtcaggctggtctcgaactcctgacctcgtgatctgctagccttgggaaagaaccttcccacaagcaccatagtgcatacacctttgcttccatcttaaaaaaaaaaacaaaaacaaaaaacttagctgcatgatcagcaacatcagcaagaagaggaactagcaaatccagtgtttcaggtagataaattttcattaagaaataagggaagaatcaacattgaaagagcyggagaacttccagttatgttagtccc

SEQ ID NO: 85861 - DNA, 626 bp, Homo sapiens
tgccttctattcttttgctctactatactggcattctcggttcttggcatccagcatcaagatatcgcttcatgatccaagatggcgcctcagtctccagctgtcagttctgcactgaagacagcaggatgaaagaagagaaaagagaagtacactctgtttccattttatttattttttgagtcagagtctccctctgtcacccaggctgaagtgcagtggtgtgatctctgctcactgcaacttccacctcccgagttcaagccattctcctgtctcaacctcccaagtagctgggattacaggtgtgcgctgccactcccggctaattttttgtatttttagtagagacggggtttcacaatattggtcaggctggtctcgaactcctgacctcgtgatctgctagccttgggaaagaaccttcccacaagcaccatagtgcatacacctttgcttccatcttaaaaaaaaaaacaaaaacaaaaaacttagctgcatgatcagcaacatcagcaagaagaggaactagcaaatccagtgtttcaggtagataaattttcattaagaaataagggaagaatcaacattgaaagagctggagaacttccagttatgytagtccc

SEQ ID NO: 85862 - DNA, 616 bp, Homo sapiens
ctgagggccccagctgctgtgctctaaaatccatctctatgttcacsatgaagtcctttcttccacaggctgctcctgtttaattactgagtagtgcatggctattcctggaagtcatgggattcctttgataaattaagtctaggatttcccaaatgccttgtggggatttccttagactgtgggacagcctgggatgctgcactctcttcattttatcccaaagacatttcctctaataaaattatttcatgtttaacataatcttgatgtctccttcttggaggacctagaataacatagctcttcacttcattcccaatgggttaagctagggttgcccacagtagtaaccagctcaataattcacctgtcaatagctactctttttttgtttcagttgccctttccctcaaccctgtttcctcggatcacctctcaaataaattacttgcagccccctgggctcttcttttacagaaacctaacctaaaatgaacttgtttctacagaatgtcattactgtctaaacctcttgggcacatattcagagcctgccacaatctgcccttaagctactagtagtattccttttttctatttgtctcccatccta

SEQ ID NO: 85863 - DNA, 616 bp, Homo sapiens
ctgagggccccagctgctgtgctctaaaatccatctctatgttcacgatgaagtcctttcttccacaggctgctcctgtttaattactgagtagtgcatggctattcctggaagtcatgggattcctttgataaattaagtctaggatttcccaaatgccttgtggggatttccttagactgtgggacagcctgggatgctgcactctcttcattttatcccaaagacatttcctctaataaaattatttcatgtttaacataatcttgatgtctccttcttggaggacctagaataacatagctcttcacttcattcccaatgggttaagctagggttgcccacagtagtaaccagctcaataattcacctgtcaatagctactctttttttgtttcagttgccctttccctcaaccctgtttcctcggatcacctctcaaataaattacttgcagcccccygggctcttcttttacagaaacctaacctaaaatgaacttgtttctacagaatgtcattactgtctaaacctcttgggcacatattcagagcctgccacaatctgcccttaagctactagtagtattccttttttctatttgtctcccatccta

SEQ ID NO: 85864 - DNA, 616 bp, Homo sapiens
ctgagggccccagctgctgtgctctaaaatccatctctatgttcacgatgaagtcctttcttccacaggctgctcctgtttaattactgagtagtgcatggctattcctggaagtcatgggattcctttgataaattaagtctaggatttcccaaatgccttgtggggatttccttagactgtgggacagcctgggatgctgcactctcttcattttatcccaaagacatttcctctaataaaattatttcatgtttaacataatcttgatgtctccttcttggaggacctagaataacatagctcttcacttcattcccaatgggttaagctagggttgcccacagtagtaaccagctcaataattcacctgtcaatagctactctttttttgtttcagttgccctttccctcaaccctgtttcctcggatcacctctcaaataaattacttgcagccccctgggctcttcttttacagaaacctaacctaaaatgaacttgtttctacagaatrtcattactgtctaaacctcttgggcacatattcagagcctgccacaatctgcccttaagctactagtagtattccttttttctatttgtctcccatccta

SEQ ID NO: 85865 - DNA, 1130 bp, Homo sapiens
gagacagaatgaggagtgctaatgtctacagggtttttctctggtcgggggtgataagacgttctacaatggattgcgaattaaaattgaatgtgcacaaccacaggtatactaaaagccactcaattcatgacttttaatgggggaaaagtgaaaagaagcaatcacaggtatatgaaaatttaagttcttgtttaatattaggtttttttttttgctttactaacaaagcatagtccaaatgacatgacctttcagactatacctttagaatccaatagatcataattttatatgtaatttttaaaacatcataaccagttatgaaacttaagatattcttactatctcgagtaactattagttattctagtaattcttagtatctctagtaactcatagctgtctttacccttggaattgaggcaagaaattttcagaattatcttgctgttttatttatataaccttactcataatacacaaggtaacatgaagtattgggtcatattactgaggaatagaaattatgaacagtttaacaacaatggccactgagttaaactagtgttaaaggagtcatcattgccagtgcttcaaatgttgcagttttatattgctggtcaccagtgccgaggttaaagatttattctgttttgtggtcaccagttgacttctgtgtctgtgttcagggagtgaatggggtcataaaagtcaatgcagttgcctattaagagaatcctaccttgcagaatgggayctttggtgtcagggtgtgaacaataactttatttcaacataaatacatagtaaacattactaaaatttaaaaaatccaaaccctatcactaccggaacttaaaatatattaaaagtggatataagcagaaattctatctagatacataacactatcatagtatatcatttgaattagaatttaaaattttgattctctttcttattggtgttcagtttagctcttaataatttagtgtttgcctagtgctctagttaatcttcagaaataaacatgcactgtaggggcttactctttctggtatgctgaggtaaagtctttgtaagagagggagcttttataatactacctatcatctttgaattcattt

SEQ ID NO: 85866 - DNA, 1221 bp, Homo sapiens
ctgagattacagacatatgccaccatgcccagctaatttttttgtatttttagtagaaatgaggtttcaccatgttatccaggcttgtctcgaactcctgacctcaggtgttctgcccacctcagcctcccaaagtgctgggtttacaggagtgagccaccgtgcctggccacctatagcagtatttatcagyggataattgtcattgtgctataaactaattcaaaattggactaatgttccttatgattaacaagttttatagttttaccagggatatttagccctgcctggtaatcagaaaaatgcaaattaacataaaataagatatattttgtaaagtcatgctgatattgaaaaagtaattactaccattgaaaatgtgaggaaaaaggcattctcatacactgttggtatatgaaattggtaaattatttctgaagggtaacttagtgctgtgtatcaaaatttcaaataacctgacatccctttaactcaacaactccacttctgggactagatttcacaggaaaacataacttgtgtaaacatacacacacttattaagggcattaattatatattacacataatgaacaatagcttaataaatatataaaatatatgtaataagaaggtgaattggaagtattaagaaagaattataaaaagtgtggggtaacagatgttagactctttagcctagttttagatgacaatcatctgcagatatagtttgtgtgagagacatcttactctgtaaatcatttggagagacacatacaatatttcatagagatgaaaatttatttctagtgaacttatacacttgtcaataaatcgtaactttaaaaatttagttgattgtaaatgatcttttctaatcggggagtaattatgactgtgtgatttgaaaaggtaattttgaacttctaactatactgaattatttccagtatccttttttataatacatactagagtgactagtaacaaaaactttagcagaatattctttccttactacttttcaagtatatacattcgtttgaagatgttgaagtgagaaattaaatatctgagaactacaaaggaaaaataatccagcacatagaaattttattaggatgataaggagcatctgcagaggtagatcacaggatgatctctttgttttttaacaaaatgaattttaagataaatgtctttatctgcagatgc

SEQ ID NO: 85867 - DNA, 788 bp, Homo sapiens
ggcaggttcctgtaatcccagctacttgggaggctgaggcaggagaatggcttgaaccagggaggcagaggttgcagtgagccaagatcgtgccattgcactccagcctgggtgacagagcaagactctgtctcaaaaaaaaaaaaaaaaaaaaaagtagcattgttagaattttaggtgtaatcagattgagagccaattctagaaaccctcacaccaattagggatggtcattttaaaaatgtcgtttctctagaaccatttttattaccaatatctgtattagttaatgttctccaaacagaagcaatagaataggtaggtaggtaggtagatacatagagatttactttatggtatttgatcrcataaatatggaggctgagatctttcacaaaaggctctctagaagcaggaaatgcagggatgctgatagtgcacctaagtgcaagactgcaatcctcagaaccatggaagggcttggtgtaatgatggaatcaggccgaatgtcactggaaattttttcagttggatactctattaatttccaatacctgtgtctgcaattttatgtgtggttggttggttgttttgttgtttagcattttctattattttgggactactgggtgcaccaggctaattgtgcttattccctatttaagccttgtattaatcatttgttcacaaagttctagatttttttaagttagagaatggaattagtaatggaccaggtgcagtggcttccatccgtaatcccatcattttgggaggccgaggtgggt

SEQ ID NO: 85868 - DNA, 695 bp, Homo sapiens
tttattttattacaacccagtggtaggacacaaactgaccctgaaaaagagggtatttatctgtggataagggcagtgccttgctccaaaatttgaagaccctctactgtgatttacctgtgggagcctaagaaagactccaaagaacatctctatctgccactgacacctcaagtactgttggatctgctggattatatggcctaagtggaaaagctgcttgcatggcagcctgkactgctgaagtcttgtgttctgggccccctcaaacctagaagctttttgagttgtttggtagatgggccagagtaacacacccaaaggacaaaattgttgcctccaaaatccaaataggcccgctaggccttgtgcctttttcttggttgttggtgagaccagatgcaaccaattttactttattttggaaggaatacctcaaaatgttccacaccactggatatctacaaatttcactaatgtagaaggcctctgaatttcatttaaatatattgcccacataatatatttctgtgggctgaatatatatattaacataatatatattcagttaaatatattgcccacataatatatattgcccacaatatatattaacagaatttcagttaaatatattgcccacatattatgtcataatatattgtctgacataaaaatattttatgagtatgcta

SEQ ID NO: 85869 - DNA, 2158 bp, Homo sapiens
acaaccactttctaggaaaactctgaattggaaaaatgttaagttcaggtgtgttggtcatgtgagacacagaggaggccactcaacagagcacatgagataatgtaagcggtgtatttcttacaggtgaggttcactgggcaccatcgtagggtctacctgacacatcaagtattctctaatctgcagatttctcagtcttcacttattttttgtgaacttgacttttttgaaaacacaggtcagatattatgtaggttttcccacaatatgaatttgtctcatgatttctcatgattaaactgggacataaatacattaaaaccatgcatgtgtgtttgaagacaagaaaaataaacattatagatattagaaatataaacatagaggtaaatgtaataaacacaaattagaggataacaaataattcacagtaatagctattttcagtgattarggaagatggtgaagctcaggagatgcactatgggccatcaaacatattgctcatgttgttttataaggtcaacagtgactttaaagataaagaaaccttataaatttaagaatagttttaggtttacagaacagttgtagtacatagaatttccacatatcctacgaagtttccatttttatgaaattcttacattaatgtaggacatttgtcacaagcaatcagttttataacactataactactcttcatactttattcatttttttttagttttgacttaatgtcctgtttctattccaggatttcatccaggatacctcatcacaggtacatgtcatgtctccttagaattctctgactgtcacagtttctcagagtttccttatttttgatgccattaatattactaatgtgggatttgtctgatgtttctctaatgataagactggatttgtgggtttaggggaggaagatcacgaggaaaagtgtcatttttatttatttatttaattttgagacagtgtctcactctctcgcctagcctggagtgcagtgtcatgagcttggctcactacagcctccatcttctgagcttaaggatccttccctctcaacctccagggtagctgagactacaggtatgtgccaccaggctggactaatttattgttgttgttgtttgttattttttttggtagaggcaaggtttcaccatgttgcccaggccggggtcaaactcatgggctcaagtgatatttattttgttatagagatggggtcttaatgtggtgtccaggctggtctgggattacaggcgtgagccactgtgcctggccaaaaagtgccattctcatcatatcataccaagagtaaaaactgtcaacaagggtagacagtcattattggcagaatgtctacaaattcctttaaaccttcaccgtaaacatgtgcctattctcttccaattatttcatgtgtattaatttattcacttaaacatgcatcttttatttatatcattatctaaatatggagatttattttacaatgcatatgtgctatttttttttttgagacagagcctttctgtgttgccaaggctggagtgcaatggtgcgatctcagctcattgcaacctctgccccctgggttcaagcgattctcgtgcctcaatctcctgagtggctgggattacaggcatgagacactacacctggctaagttttgtatttttagtagagactgagtttcaccatgttggccaggttggtctcaaactccatacctcagatgatccaccctcctcggcctcccaaagtgctgggattacaggcatgagccaccatgctcggctgctattttttttttaattgcacaaattgttccagtgttggctattggaaggtttttaagttgtcccttctatcactttgaaatacctgcataattaaagtttgatgttgtgtggttggttggttttgttgttgtttggcattttcttttgttcagtcactattatatgctccagtctgtgaatttaattctgcttcagggtaatttggtaattttatactttctgctaatgtttccaacaccatatgacctaatccaggaccatataaatggatccactcattctcatttgtatgtgatctagcactccctgcaagcaagttgatgttgttaatttaatcatgc

SEQ ID NO: 85870 - DNA, 2158 bp, Homo sapiens
acaaccactttctaggaaaactctgaattggaaaaatgttaagttcaggtgtgttggtcatgtgagacacagaggaggccactcaacagagcacatgagataatgtaagcggtgtatttcttacaggtgaggttcactgggcaccatcgtagggtctacctgacacatcaagtattctctaatctgcagatttctcagtcttcacttattttttgtgaacttgacttttttgaaaacacaggtcagatattatgtaggttttcccacaatatgaatttgtctcatgatttctcatgattaaactgggacataaatacattaaaaccatgcatgtgtgtttgaagacaagaaaaataaacattatagatattagaaatataaacatagaggtaaatgtaataaacacaaattagaggataacaaataattcacagtaatagctattttcagtgattaaggaagatggtgaagctcaggagatgcactatgggccatcaaacatattgctcatgttgttttataaggtcaacagtgactttaaagataaagaaaccttataaatttaagaatagttttaggtttacagaacagttgtagtacatagaatttccacatatcctacgaagtttccatttttatgaaattcttacattaatgtaggacatttgtcacaagcaatcagttttataacactataactactcttcatactttattcatttttttttagttttgacttaatgtcctgtttctattccaggatttcatccaggatacctcatcacaggtacatgtcatgtctccttagaattctctgactgtcacagtttctcagagtttccttatttttgatgccattaatattactaatgtgggattygtctgatgtttctctaatgataagactggatttgtgggtttaggggaggaagatcacgaggaaaagtgtcatttttatttatttatttaattttgagacagtgtctcactctctcgcctagcctggagtgcagtgtcatgagcttggctcactacagcctccatcttctgagcttaaggatccttccctctcaacctccagggtagctgagactacaggtatgtgccaccaggctggactaatttattgttgttgttgtttgttattttttttggtagaggcaaggtttcaccatgttgcccaggccggggtcaaactcatgggctcaagtgatatttattttgttatagagatggggtcttaatgtggtgtccaggctggtctgggattacaggcgtgagccactgtgcctggccaaaaagtgccattctcatcatatcataccaagagtaaaaactgtcaacaagggtagacagtcattattggcagaatgtctacaaattcctttaaaccttcaccgtaaacatgtgcctattctcttccaattatttcatgtgtattaatttattcacttaaacatgcatcttttatttatatcattatctaaatatggagatttattttacaatgcatatgtgctatttttttttttgagacagagcctttctgtgttgccaaggctggagtgcaatggtgcgatctcagctcattgcaacctctgccccctgggttcaagcgattctcgtgcctcaatctcctgagtggctgggattacaggcatgagacactacacctggctaagttttgtatttttagtagagactgagtttcaccatgttggccaggttggtctcaaactccatacctcagatgatccaccctcctcggcctcccaaagtgctgggattacaggcatgagccaccatgctcggctgctattttttttttaattgcacaaattgttccagtgttggctattggaaggtttttaagttgtcccttctatcactttgaaatacctgcataattaaagtttgatgttgtgtggttggttggttttgttgttgtttggcattttcttttgttcagtcactattatatgctccagtctgtgaatttaattctgcttcagggtaatttggtaattttatactttctgctaatgtttccaacaccatatgacctaatccaggaccatataaatggatccactcattctcatttgtatgtgatctagcactccctgcaagcaagttgatgttgttaatttaatcatgc

SEQ ID NO: 85871 - DNA, 2158 bp, Homo sapiens
acaaccactttctaggaaaactctgaattggaaaaatgttaagttcaggtgtgttggtcatgtgagacacagaggaggccactcaacagagcacatgagataatgtaagcggtgtatttcttacaggtgaggttcactgggcaccatcgtagggtctacctgacacatcaagtattctctaatctgcagatttctcagtcttcacttattttttgtgaacttgacttttttgaaaacacaggtcagatattatgtaggttttcccacaatatgaatttgtctcatgatttctcatgattaaactgggacataaatacattaaaaccatgcatgtgtgtttgaagacaagaaaaataaacattatagatattagaaatataaacatagaggtaaatgtaataaacacaaattagaggataacaaataattcacagtaatagctattttcagtgattaaggaagatggtgaagctcaggagatgcactatgggccatcaaacatattgctcatgttgttttataaggtcaacagtgactttaaagataaagaaaccttataaatttaagaatagttttaggtttacagaacagttgtagtacatagaatttccacatatcctacgaagtttccatttttatgaaattcttacattaatgtaggacatttgtcacaagcaatcagttttataacactataactactcttcatactttattcatttttttttagttttgacttaatgtcctgtttctattccaggatttcatccaggatacctcatcacaggtacatgtcatgtctccttagaattctctgactgtcacagtttctcagagtttccttatttttgatgccattaatattactaatgtgggatttstctgatgtttctctaatgataagactggatttgtgggtttaggggaggaagatcacgaggaaaagtgtcatttttatttatttatttaattttgagacagtgtctcactctctcgcctagcctggagtgcagtgtcatgagcttggctcactacagcctccatcttctgagcttaaggatccttccctctcaacctccagggtagctgagactacaggtatgtgccaccaggctggactaatttattgttgttgttgtttgttattttttttggtagaggcaaggtttcaccatgttgcccaggccggggtcaaactcatgggctcaagtgatatttattttgttatagagatggggtcttaatgtggtgtccaggctggtctgggattacaggcgtgagccactgtgcctggccaaaaagtgccattctcatcatatcataccaagagtaaaaactgtcaacaagggtagacagtcattattggcagaatgtctacaaattcctttaaaccttcaccgtaaacatgtgcctattctcttccaattatttcatgtgtattaatttattcacttaaacatgcatcttttatttatatcattatctaaatatggagatttattttacaatgcatatgtgctatttttttttttgagacagagcctttctgtgttgccaaggctggagtgcaatggtgcgatctcagctcattgcaacctctgccccctgggttcaagcgattctcgtgcctcaatctcctgagtggctgggattacaggcatgagacactacacctggctaagttttgtatttttagtagagactgagtttcaccatgttggccaggttggtctcaaactccatacctcagatgatccaccctcctcggcctcccaaagtgctgggattacaggcatgagccaccatgctcggctgctattttttttttaattgcacaaattgttccagtgttggctattggaaggtttttaagttgtcccttctatcactttgaaatacctgcataattaaagtttgatgttgtgtggttggttggttttgttgttgtttggcattttcttttgttcagtcactattatatgctccagtctgtgaatttaattctgcttcagggtaatttggtaattttatactttctgctaatgtttccaacaccatatgacctaatccaggaccatataaatggatccactcattctcatttgtatgtgatctagcactccctgcaagcaagttgatgttgttaatttaatcatgc

SEQ ID NO: 85872 - DNA, 1141 bp, Homo sapiens
ctgacaacactaggtgtcctggcgtcggtggcagtatgtcatctgactattacaacaagttgtctgctgaagaagagaattccttctttcttccttctctcttcccaccagtgcaggtctctgggtgcccctcccaggagctggagcctggaggggtctcttagcagtggggctggtgctgcccaatagtgtgggaaactgggggactcgcaagcagatcctacagtcactgcatggcgtcccgtgtgcattgggctcctgctgccccctgttacaagaccctgcctgacgttcctcccagcatttcagaaaccctgagaacctccacagagaacgccctctccccagcttttaccaccagggccctggccggatcccagttctgtgtctctgggctaccacttctcaggctcgaatctcctctctctcctcacagcccactggccttttgagtctaaggccccacccaattgcatgggaagagtcacagaatcacagactcctggagtgggggagatcatttcattacagaccagaaaggttctgtgacttactccagatggtacacacagtttgaagttgtttgtggacggcaacttatagaccccgggcaatctagtgtcatggatcggaggtgggctctgattcagacaacctgaatccatatcaaggttccatccctrggggactgaatagccttgaacaagtctgtggacctcatccacagtctagggatagtaatggtgcatagctcatgaggttgttgggaggagaaatgagctcattcctgcatcgtgtttggcacacaataaacactcattaaccattagctggaaatattattattattctcatcttgtggacattcccttaacatgcttgataccccagctctgaaggacttgctccactcctccccaacaccacacctttccctccctctttccctccctccctcccttccttccttcttccttccttccttccctccttccttcctcccctccttccttcctctttctttctctcttctgttttctttttgagacagagtcttgctctgtcactcaggctggaatgcagtgatatgatctcggctcaccgcagctttcatcccccacctcagctcaagtgatcctcc

SEQ ID NO: 85873 - DNA, 694 bp, Homo sapiens
tttagagggtcctcttcagccatgccttgataaggtgcaaggaaactggacatgcaacccccccaaccctccccatctttgcttcccccagctgacagctgtaagagccctgcaggaattccagccytacttgcagtaatcgaggacaagagaatgcaaactactgaaccgcagagccttcccaagtcgctctagagaccacagatccatcttgcaatcaatgatttctagggtggtaaacgggcaggtggtgtgccccttcaattccagaagcaaagcctaagaatgcaagatataaaaaatgcttacataatgatgacaactatgctctgtgctttaaaatgttgctttcaagtccatcatgttaattacctcaacatttttgccccaagataactttctaattatctaaggaaaaggtggcatgaaaataaaatactttccctttaaaacaaagagtcactgaattggattggagtgttggattggagccaacacatgagcactggagccagcccaggttcccacagtttcctgtgtggagggcccaaggccaggtcatttcctgtggtaacaatggatgctaatgacagataaatccccacctaatgaaaggagagggtatttaaaaatgtaaatcacaagaatgtcgtgaacaggccaccttttagcaattagagccatcacaacctga

SEQ ID NO: 85874 - DNA, 1042 bp, Homo sapiens
tcggagcacacatccagcctcaggatcaagctctctttaagtgggtgtttaagaggctgtccttcttttctgccctgtcaccccaggacacagagcaccttcttttcgcttgcactgagtgcatgaatcatgtaggtcaatgtgattcttaggcaggaggtttatggcggccacagtggggatctgcactgatggattcttcctaaggagctggctccagacaagatcagaggcttgagttcagagagctacacctggtttctcagctcctccaggaggcagagaaacaagggaaaactgaggtccagaaaaggcagtataatttgagattgttgggccaggcacactctgctaggactgccttcgttccccactgggctgaccttgcattttatagagatgccccaagcgatgtcacctaaaaaacaaggatttatcgtttaagtcttcttaattagaagagaatgtctacattatttaccaattaactcctcgctcctcctcaggggcagtgctttagccccagggytctataatcacatacaaaatatttccactattatgatgctcattcaaaaataaataaatatcagcacccccacagatgtttccttatttgctgaaggaaaaagaagataaacacagttattgtgattcacaatatttgtgtaaaaggcaccacactagagccttcccaagtactcccaacaataatattttgagaactttaattttttatcttgggtggctccatgccacttggattcagctcggggctccccctcagtgttaacacctacagtaagtcagaggaggcttgcaggatgacccggtgcttccaggaattgcctgtgccctccagaggcaggcggccgatttccctttggcagcaggtgtcagggaggtctacagcacctgatcacctttccagatcagcttggagggtgctaaaagcaggggttctccaacttgagtcaccgtcagaatcacctggaaggcctgtgaaacagatggctcaggctcaccccgcagtggctgactc

SEQ ID NO: 85875 - DNA, 995 bp, Homo sapiens
tttttcctcggaagagtagattccttgaaatagaagattccaactagcagatttttaaaagaaaacccagtataaagaacagatttttcttatgatctgctactaaatacatccaaaaaaattaatatacttcttgaatttgtcagtgctgattctgggcatccatgtggagttttcatgtataattcaagttactgcatatataaacaggtagttgcatgtgcagttttcccactagggagcatttatgagatttttttttttttcagatgcttgttatgcaagcctttggaaaatttgacatgaaaggtgtagcttacaatttaaaattgtaaagatagatcatgggtcgtagtttaaaatagaatgctttcatatgtaaacgtgacagtgcctaatgccaatatgctaagatttttggagttagactcttagattaggtcagttagtgtaatgttgaaggaacattgctccaaggctagagcttccatttcttaatccttacaatgatcacacaaatgtgttgggcattaaaagtccatcattcttgtcattagaakaattcaaagattatgtcttccttaggaggtaattagaagtgtcattacatggaagccaagaaatgttgttttatagaaagcaatatgtattcagaatctctttatgtggcaataattataacatatttcttcatatatagactgagattaattttaaaaagtggaggccctaattatactattaagatattaaagcttttccattctcaccagtaccttttccaaccttcactgctctccttaaactcacattatcagctccctattcctctcaacagagcatctcaccttttgtcagttcattaagtttatctgcttcttacgacgcccccactcaaccacttatcaatatgcacatgaatctttccctctcagttcagtgaaaaagaatcccttcctcttgtccaagactagcgccaccactatttgctctgt

SEQ ID NO: 85876 - DNA, 673 bp, Homo sapiens
cttgtcccctgtggtctgagtgagcctgatgtatgaaatctctaaggtgttcccatagatttgaaaaatgagctggctctctcagaaattaatttactttacatgaacatgaaaatttttgcttctataaattaaatcaattttcttttcttaagagatggggtctcactctgtcacccaggctggagtgcagtggtgcaatcatagctcactgcagcctcaaactcctagggtcaagtgatcctcctacttcagccccctaagtagctggaactaccayaccctgctaaaaatcagttttcttaacaagtatgataaaatgttttatttacaaactaggttactcttaggcatactttctgcttcagtttccctataacatgaaagtccttaagattatagttcaagtacaattttagtactattattcatttgtaatttaaaaacttaaaaattttgaaaataagaaaatacaaagaacaacttaattaccactgttcacatctggatatatatacttccacttatttagatttttttttaatatggacaaaataattattcttgtttttgtaaaatgtatctatgttcataaaaaataattcaaacaatacaagaagcacaaagatggaaatatatatcacttccactttgcaatacccagaaattaaca

SEQ ID NO: 85877 - DNA, 692 bp, Homo sapiens
ggtgggcggatcacttcaggtcaggagttcgagaccagcctgaccaacatggcgaaaccccgcctctgctaaaaataataataataaaaaacaaacaaacaaaaatctagcaggtcgtgatggcggcagcctgtagtcccagctattcgggatgttgagaaaggagaatgacttgaacctggaaggcggaggttgcagtgagccgagatagcaccaccacactccagcctgggcgacagagtgggactccgtctcaaaaaaaaaaaaaaaaaaaaaaaaaaaaaaaaaaaaatcctcttggtcgcaggacaagaacctggcacytggaactgcggatatgaaaagaactgtaacctgtgttcctcctcgcagagctatgggagaaaagatcactgggcaccacacacccctattcacagagaaggcagcaagacctgagctgtggcatgcccttgttcaccaagttgcaggcgagagaacgaacgagagctgtaacattttacgggggctcagacctccagactccctgaacgaaaactgtaacactccttggggctccgcagtttctgccatctccaagttttcaggcattgcaggctccctatagtccagacactgacgccggaggtggaagcctatcgcggcatatcccgtaccagccatgggatgagcacagagccttggcggttgca

SEQ ID NO: 85878 - DNA, 1193 bp, Homo sapiens
gtttgcattttaccgattcctacatatctacttccttgtcactgagagaattgaatgatttattctttttcaacacaatctcctctaccaaataatgcagtttcactgtggttggaaccaattcttccccaagattcactagccctatggaaacttctcctataagttttaatgaagcttgaccttctcttttatcttctgtactaaactattttgtagtactgccagagtcagtttaataacaggtgagtttcacccctaggctgattgtatttcagcagaggttgaagtgatttctgtatgtcaggttgttaaatctgtaaaaagctatgtgatctttcaaaatgaaagtcagtacatcaaggcaatatagttctcttttgtctttttatgaacccctttacatctttttctggacagctctgaaatacaaaaatgactgctttccctatccccacacactcatgaatggccaacaaatattcaaatacaaaaattgtcaaaataaaatattcttgtcttaagctttgcaacctttccaaggaacttcatagtttagtgcttccatatgaacctatgggggattattaaactgctatttcaatgctttaaaataaattcacagttagcattgttcttgaggtctcattctaacttgtttctacaacatccaccaaaattcaagatacttttattatgttagcagatatataaattttatttagaatattttcttatatytgaagaatttataattcctatttccagaaatctacttaatataaagtagcacttcaaaaatgtttgtagtgctatttaaaaaaaccctttttctataatattttatatttaaatttataatacagtttcactcatttattttatatttattaaatacaagctatgtgcctactatataatatgttaaagggttgaaaaaataaactattaaggtaccttggagtgataatactttctggttttgtttaattattttttcagattgcactattcttaaaatgaataagagatcgatgtgcaatatatgtgtatgtgataaaatatttcaatctttaaagccaaatctatgaatattgattgattgtctgactttctaggttatgaatctgtacttcagaatagcttaataaccttccatattattaaaagttacatttggtttccagaatgca

SEQ ID NO: 85879 - DNA, 1722 bp, Homo sapiens
gggttagaattaagatgtcagacacatcatatgcaggatgataagccaagatctgggaagaataagggtattgggacactcagcgtctatgataattgcctggatacttagggggatgttagttacctaacaaaaagctaacagaaataaagtcactgcactggaagcagttctacactagttaccagcccacccccagattgagatcttcccttgtaataagacagcatggcacaatggtataaggagcaggactttcaaatccaacaggtgtggactccagcccagaaccaccacaggggagctgaatgatattggatgaggttctcagtcctttctaagcctctgtaaaatgaggaggattctaatttctacctcacaagtgagaaaagcaacaagaaaaaggcctggcaaagagtaagtgctttaaaatatcattttattccattacaaatgatcatgaacctattaaaagtaagtcacttcccaaatgccagaaactgtgtccttatccctccagtatcccctggtcaactttgggggatccatttcattctgggcatgtgcacagttagcaccgcataaggacattttggtcaacaatggatgtcttataggccagtggtcccataagattataacatcatattttactgcacttgttctatgtttagatatgtctagatatacaaatatttaccattgcattgcaatttcctacaatatttagtacagtaacatgctgtacaggttggtatcctaggagctacaggctataccacatagcctaggtgtgtagcaggctataccatctaggtttgtgtaagtacactcaatgatgttcacgtgacaacaaaatcgcctaataatgcatttctcagaacatatacccatcattaaaggattcatgactgtatttctatctgctgcaaatagtgactagcagcttttcactgctttggactctgtgcctatggatgccgtaagcctcagcacataatcttttctcttccaggtcttaactygggctcaaaacccagccactattcacttcctggacagcgaaagcaataataatttatctctgcctcagtttcctcatctataaatgggtcaaatcctagtcttggttatgaatataagaaaatgagaggatatgcaaaagtgctcagcagagtgctcagcacatatgggccttctataaacattggttaagtaaatgtactatgctagacagtgtagtgtctaagagtctgttcacagattgatgacagatgatttgggtcaaatataggctctgccactcattagatcttgggaaaggtgcttaaagttacttactttctctcaccctcaggtcttcccttgtgaaccaggaaaaggaatgatgttcatctcaggggatttgttctgaggattagcagaaatgatgtatataaactgcctggcacgttggaaccactcagcaaatctgagcttttattaaatattatcacgacactcctagcagaggattgcttgctctggggcttgttcaatttgggataatattcgagtcaagcgtgagggtgatggccagcctaatgtaatagaaattctagacttcaatttttagcacatcatgtgatgggcaaagctggtttgcaaggccctgggagaacccttccttacccctccacaccacccaatttaccaaagacctagcccatcacatccatagtg

SEQ ID NO: 85880 - DNA, 1149 bp, Homo sapiens
aggaaatctctcacagagtagtttgagtggtgacacagaatttattgtctttatccatgcttttaataacactaacagacaattcagtgagagctggtgcaattcccaatgtrcagacagaataaatgaggcaaatcacaattcatcatcaagaattagatgagccagaaaaatgcctttggtgaaacaagtttcttgcactgacctgtgagaggtttgactgtgaaattttgtcttcttaaaaaagtgaatttgcaatgaaggagtatctgtagaataaaaccagtgaagagctataggaagcagcacagagattgctacatgacacccctattgctctagtgggaggcagcccaatagaaagggaagactgggagctgggagacctgggttccagttctggtttgcagcaactttctgactaatcattggcaagtcactttactactctggctcacagtttttatacctataaaatgaggaaaataaattatgtatggctccaaatgtgaaattgctgcttggttgcatcagaaggcccagggactttttaaaatgcagattcctggctgctttccaagacttaacaaatcagaacctttaggagaagagtcagaacttgggaatcaatatttttaatagctgcatagatgattcttgcaaattaatgaaatacagcttgaatactttcagccacagattgtaagctctggctccttcattcaacaacctaatcacaatccatatctccagggcagcaatggagactgtggtggtgtctctggttttgacttagcacaactgttcatcaggatgtatcgcctgggatggttaatgtgtacaaaaaataggtagaaagaataagtaataactactattgatagcataacaggttgactatagtcaataataacttaatcttacattttaaataactaaaagagtataattggaaggtttgtaacacaaagaataaatgcttgagggaatatatatcccatttcctatgatgtgactatttcacattgcatgtctgtatcaaaacatctcatataccccacaattatatgcacctcatatgtacccacaaaaattaaaaatttgaaaaaatttgaaaaagatgtactgcttggattttctaggcaatgc

SEQ ID NO: 85881 - DNA, 1022 bp, Homo sapiens
tgttgtcggctagggaaaaaagaatgttttccaaacatgttgtgtggctatttttaacctgagaacattaatcagaaaagagcttaaatcttacttcctctgcttttccctctggtacaaataggatgacatggtgagagtgtccataacacaaggtatgacaaagccaggctgttttgatatttgcgtaagggacaaatttaactctaaatctcctggccagacctgccttccccatataatcagagcccatccacgtgtgacccttgtctaaagcttcargaagatgctgccccttcccttttgccgctgctctctgatctgactttcatgcttaatctgatctaatcctgccagcattatcttcatctgtgcaatgaaacctggaggattctttctcatatttggtgaggaaaggcatttactaaattacttgctcgaatcatacggtgaggttttagctccttatttttgattagatgagggctgcagcattgaggcacattatcattgattagtcagaaatccaggtttctcctatttttggaacaagattttctgaaattgggtgcaaaaagactaaaagggctatgaaaaactagaaactctcagctaagaatagacaaaatatttatttttcatggagaagtgtttttttttctgaagaaaaaaagcaaacctaattccaatgacttttgtagaaaagttatccattgaaaatcttattaaaataataataataacaaaacccacttcctgaaaatttcattcaattctcctctagggaaagtcttccctgagttctggatcttatgattggccttatcaatataacagaacttcttcagaatctgaacttaatgtgttttcaaatctaaagtgtcctaataaacatcatgataaaacctcaaacaagatcttactcttaacagggaaaatacttgtgaattgtcaatgtttcccataagctgaaataattattattcaaactgcatgaagaaatacataagattagttgaaat

SEQ ID NO: 85882 - DNA, 677 bp, Homo sapiens
ttcccaacgtcttcttcctgcctgtagatctgctcagccttgtctctccatctccctagttgacctgtctgtgcagcagggactctgtagccactccctgggaaaccctcaacttgctcaaagagacaatcgtccttggttgccagtcttgtcacacttcctgaagtgctgatgaaagacagtgagggcctaggcgtggtggctcacgcttgtaatcccagcactttgggagaccaaggcaggcgggcaacttgagaccaggagctcacgaccagcctggcgaacatggcaaaacctcgtcaataatamcaataataataataataataataataataaaattagttaggcttgctggcacgtgcctgtaatcccagctactcaggaggctgaggcacaagaattgcttgaacctaggaggcagaggttgcagtgagccaagatcacatcactgcactctagcctgggcaacagagccaaactccatctcaaaaaaaaaaaaaaaaaaaaaaaaaagagagagagaaagagaagatcagacaggagaggagacgaggggttgggccagagggatgaaattttgttcccaggacacagaactaatcccaaaatcaagtttcataaatgacctgcccactctctcctttagacaataagcaatatagatgatttaataa

SEQ ID NO: 85883 - DNA, 578 bp, Homo sapiens
aactgtagccctagggtaacacagaatgagtgtcaactacattttgctattaagtttcacaaaaatcccctctaggattttcaatcacaatatttggaatctatattcatgttacagttacaaaataatagcgaagactcataaaaagtataagagcttcaatttcagagacataattttgtgatttaagaaaaaatattcttttaatttttattttttataaaaaaggacaacttttgtttaatattcatggctagcttactagagatttatataaaatttctgctygtatagcattactctttttaatatactatttattcagcccaaattattaaacaagtacaaagataagacagtatcactatgattcctgatcaaatacttttggtttctcctctttctttcgttctgtgtatatctgcactcgaagacagacagctggtagaggaacttaaaaggttgctttttaattcacagcaaaacaaatgattttatagatactgttggataaatgtacaaaaaacattatttaaagccaataattgattctacctgtccaagtacctgatccttca

SEQ ID NO: 85884 - DNA, 545 bp, Homo sapiens
tttttwaaaaataaaatttgttgtctgtgttccctgatagaacatgagctatctctccatttcctagtggccaatatttattgagtaaatgaacgaatagagctctatacttacaattatagcatttctgataacatgacagctcttacctagcagttcgacttcttttatttatgatagcatattgaaactttaagcacatactttaagtctagactcattttatattttttcattccatctgacattgttactttgagaaacagaattcgacaataaaatcaacaaacaataaacatccaaaattaggaccgtaaaaataaaacaccaaggctaaaactttttataaaggcacaattctattaaacccataatttatctctgaaaattatataacttattataggttgaatatgtacatcatatctaagttttaagaaaattaatattcttaatctgagatttgaagcatttgtactctgtgaagagacttgcacaaataaaatctattgaattactacgttacaatatgttaaatattgtat

SEQ ID NO: 85885 - DNA, 545 bp, Homo sapiens
ttttttaaaaataaaatttgttgtctgtgttccctgatagaacatgagctatctctccatttcctagtggccaatatttattgagtaaatgaacgaatagagctctatacttacaattatagcatttctgataacatgacagctcttacctagcagttcgacttcttttatttatgatagcatattgaaactttaagcacatactttaagtctagactcattttatattttttcattccatctgacattgttactttgagaaacagaattcgacaataaaatcaacaaacaataaacatccaaaattaggaccgtaaaaataaaacaccaaggctaaaactttttataaaggcacaattctattaaacccataatttatctctgaaaattatataacttattataggttgaatatgtacakcatatctaagttttaagaaaattaatattcttaatctgagatttgaagcatttgtactctgtgaagagacttgcacaaataaaatctattgaattactacgttacaatatgttaaatattgtat

SEQ ID NO: 85886 - DNA, 656 bp, Homo sapiens
tgatctgaacatctagcttaaatcgtaccagcatcaaagcaccatatttccaatggacatagtattttccttgatgtctttcaaactgcagattttattctgctttgtgccatgttttctaatttaattaatcctattcctgtcctctcaggtacccaggttcagaaaagagtatcgtgctttcctgctgccttgcagtgtgcctcctagccagtcattgagtcatcytgggtctacttgttcaagttgctgtcaagtcatctgtaacttttggcttttcccccatgccacctccttcatatggctaagtcctattcattctccttcaagtctcaccttggaagttacttctttctggaaacctcccccaacacctgcaaacgttaaagatgagccagagactttaggttggggggagtgggggtagggtagaggctacaaatagatgaaaaacacttttaaatagaggatacccagagtatgaatagatgaaaaacacttgtaaatagagggtacccagagtgctgggaaaatgggtgggaagggtgtattagtttgttctcgcattgctataaagaactgcttgagactgggcaatttataaagaaaagagatttaattgactcacagttctgcaggttgtacaggacgcctgg

SEQ ID NO: 85887 - DNA, 592 bp, Homo sapiens
ttctgaatagccaagaaaggctacagtcatcacaatggcaaaatcttgcatcctggacttcttagccgttaacaaacctctttcattgcagtcaccatctttcaggcccgggggtctgagttgtgtagggaaacagatgtgggcttcagataccaggctcgactcagggcatttcatccaaccacaaaagggctgctttgaggataccgaggctcggagaggtgaaaacactgtcacaactgctttggtaggaaatggcagagccaggattcaaacccaggttgagcaacacaaatcccgttacccctctgcccgtaaaaccctctgagcatctggatcaaccctcacattggacagatgaagagactgatgaagagactggaggtgggaggtgacttagccagatatgagttctacttgacaaaagtttttgggtaaargaactttgataggggcctcttggttttaataatctcaattggttttttaaaagaaaagagaagaggcaagagaggaggaggagattcgttccgaatcttgcataatactgccagatggaaagaaggcttgctggttcttctgcatggattgt

SEQ ID NO: 85888 - DNA, 592 bp, Homo sapiens
ttctgaatagccaagaaaggctacagtcatcacaatggcaaaatcttgcatcctggacttcttagccgttaacaaacctctttcattgcagtcaccatctttcaggcccgggggtctgagttgtgtagggaaacagatgtgggcttcagataccaggctcgactcagggcatttcatccaaccacaaaagggctgctttgaggataccgaggctcggagaggtgaaaacactgtcacaactgctttggtaggaaatggcagagccaggattcaaacccaggttgagcaacacaaatcccgttacccctctgcccgtaaaaccctctgagcatctggatcaaccctcacattggacagatgaagagactgatgaagagactggaggtgggaggtgacttagccagatatgagttctacttgacaaaagtttttgggtaaaagaactttgataggggcctcttggttttaataatctcaattggttttttaaaagaaaagagaagaggcaagagaggaggaggagattcgttcygaatcttgcataatactgccagatggaaagaaggcttgctggttcttctgcatggattgt

SEQ ID NO: 85889 - DNA, 1233 bp, Homo sapiens
attgttcccaattttccacacctccctatacccatcctctttgccgcgtgacttgtgctcattccctccacagaaaggatatctttccccaccctattaatgttgggcttggccaggtgctttggccagtggcacgttagcatatgtgatgcaagcagaagcttgaaatgtgtttgtgaaattgggtttgttctcttgtacttctgccatttccatgatgtgctggcccaggaattatgggagaccaatacagaagacctaaactccaccctcagcttagagccaagcccaggcagcccgcagcctggagcagagccacgcagccaacctcagcctaagtcagccgaacctcagtcaactgcagaattgtagccatgagaataagtacttgttgctataagccactgagttttgaagtggtttgttacacagcattgctgtggtgagaactgactaatacagtagctgtattcacccaaggtactgtgcacttttgtgggtcagaaacacaaacaaatgtccagattatctgagcagcttttctgggatagtaagcataacttacattcatagaacacagtgtagttatttttacatgacatgttattggtttgcaccaaacacccacaagacaggtaatatttcctctattttacagatgaagatcatattgttyttagaagatacattacttgcttgagatcacaaagctttgcttccttgcaaaagggacaggtataagaagaagacttgcatcctctttccactttttcctggagctgaagcaaccccattgcaaccattagataggtatcagttagctactgctgtgtaacaaacaacctcaaaatttgttagcttgtaacaataaccatttattattggtcacatgtctatgtgtgaattgtgggttctgctgacatggtaggctcagctgatcttgattgggctcacttatgcatctgtggtcagctggcaagttgaccagaagctggctgacttagaatgggtgcactcacatgtctggtggctggctggctgacaaatgggacaacaatgagtgacttggccactcctctgtcatcattcagcaggccagcccagattttgtcccatggcctaggttccaaaaataagagtggaagcacacaaagactctcaaagcctgagttccagaactccccatcaatgtcaccacattctattggccaaagcaaatcgtaagaccaacca

SEQ ID NO: 85890 - DNA, 561 bp, Homo sapiens
agatattgagatggggccccatcccatccagtcctgggtcggggagttagggggtctgtacacatctggaattgggaatgaggtagtgctctgcactggctgctggcaaggatgcccacggactggaggaaggaggtccaggcatctggattttccatcaggaaaggccaggttatgctgcaataacaaacaaccccattatgtcggtggcytacaacatcaagggtttgtttcttattgcatccgctcctgagtcacttgggaacccaagctgataaagaagccaccgtctccaacatcactgctcgtggtggcagatggaaagagagactgagagtgagggaggggtctcccatcagcaaataagggttccagcccgaagtgacacacccgactcccacagacagctcagtggcagaatggtttgtatggaccagcccaaccactaacagcttcagtgacacagagtcattgtaagcgaaggtctgaagccagggtgcttgagggacctagctagagaaaactggaagcttctgaaattgtgtctgtcaatatgaaact

SEQ ID NO: 85891 - DNA, 561 bp, Homo sapiens
agatattgagatggggccccatcccatccagtcctgggtcggggagttagggggtctgtacacatctggaattgggaatgaggtagtgctctgcactggctgctggcaaggatgcccacggactggaggaaggaggtccaggcatctggattttccatcaggaaaggccaggttatgctgcaataacaaacaaccccattatgtcggtggcctacaacatcaagggtttgtttcttattgcatccgctcctgagtcacttgggaacccaagctgataaagaagccaccgtctccaacatcactgctcgtggtggcagatggaaagagagactgagagtgagggaggggtctcccatcagcaaataagggttccagcccgaagtgacayacccgactcccacagacagctcagtggcagaatggtttgtatggaccagcccaaccactaacagcttcagtgacacagagtcattgtaagcgaaggtctgaagccagggtgcttgagggacctagctagagaaaactggaagcttctgaaattgtgtctgtcaatatgaaact

SEQ ID NO: 85892 - DNA, 539 bp, Homo sapiens
cattctcatgctgctatgaagaaatacctgagattgggtaatttatttttatttttatttttttgcagttgcaagatttaatagagtggaaacagaactcccatactctaatttttaaagaaaagacgtttaattgactcacagttctgcatggctgggaggcctcaggagacttacaatcatggggaggcacctmttcacagggtggcaggagagagagtgagtgcaagcaggggaaatgccataggcttataaaaccatcagatcttgtgagactcactcattatcactagaacagcatgtgggaaccacacccatgattcaattacctccacatggtcccacacttgacacgtggggattatgggaatcacaattcaaggagagatttgggtggggacacagagcaaaaccttatcaaacagccatttttttacatgaggctagcaggctaaatgcctggaagcagcattttgcaggcatggagatgctaattccaccttcagatcataggatgcgctgggtagaataaatgaaga

SEQ ID NO: 85893 - DNA, 622 bp, Homo sapiens
atgtactattttcctttggattttttagtttaatttatatatctttctggtctgtttctattctagaagtaataagactcgatatggtttggatctgtgtccccacacaaatctcaaatgtaatccccagtgttggaggtggagcctgatggtaggtgatttgaccatgggggcggtttctcaggaatggtttaataccattctcttggtgctgttctcatgatagtgagtgagttatcataagatctggttgtttaaacgtgtgtagcacctccctactctttctcttccgcctgctcccaccatgtgagaggcctcatttcccctttgccttgtgtcgtgattgtaagtttcccaaggcctccccaaaagctgagcagatgccagcatcatgcttcccgtacagcctgcagaactgtgggccaattaagcctcttttctttataaattatccagtctcaggtatttctttatagcagtgcgagaatgaactaatacaagatrtataggaaaaacaaaattataagaaaaaaaaggaaacaagaaaccatgatgtgagaactaaaaataaaatcctaagtcccccaaaggatgaaacagaccccttttggccaagaggatc

SEQ ID NO: 85894 - DNA, 1210 bp, Homo sapiens
actattatattagctttggggagttgatatttgcatttttttttactttttyacttttatcctttctgcattgatatgttttagacctatttcttataaatagcgtgttttacttttctattatgacaatcttctcttttaagtggaaaatttaatagatttgcattaattgtatttctaatataattgattggtttctaataagtcattttgtactttctgtccaatcttttctatatttgtttctcttgctttcttttgaattgattagatattttttcttattccattttttgggggctctggtttagaatttatacatgtttttctgttatgtatttaacaggtctgtttaacttatcaaagtcaaaatttaataaattataatttccccaaacaatataggaaccaagaacatgttaattttaactcctttctaaatacagtattgatgcccagtcttttagttttaaccatatttctaatcttattggacataataataattattatttgtataaaatcagtatttgtttagatttacttatattttatcatcatgttcttgtcaaatatgaattctaggttgacaattttttctactttctccttgaaagtattattcctgttttcatggcttcctttgttgctgttgagaagacatttgccaaaatactgttgacacgttaaaatttagcctgtattttctctcacattactgctaatacattcttattctcatcactatttagcactttcactatgatatggctaggtgtggattctttgtatttatcctatttgggtctttgggatttctgtattctgaagattggtgcctttaattaatcctgggaagttctcagtcacctattacctcccaccatttcttccccttctgaaaatcggattagatgtagtctagctttcattactcagtcctccatatatttttggcacacatctgaagtatggacttaattttgcttaacatacttggtgcttgcggggcccatttgctatgagtctggttttctaactctgggtctcccttgccaggcaaatacttttacttcctcagtcagcaagctggtgcctttctgcatttttatttcttttctgagtccacagaaacgtcctccttgcatttgaggctactttccctcttcagtgctttctctcttataaccatatattcagaacagaaggg

SEQ ID NO: 85895 - DNA, 1210 bp, Homo sapiens
actattatattagctttggggagttgatatttgcatttttttttactttttcacttttatcctttctgcattgatatgttttagacctatttcttataaatagcrtgttttacttttctattatgacaatcttctcttttaagtggaaaatttaatagatttgcattaattgtatttctaatataattgattggtttctaataagtcattttgtactttctgtccaatcttttctatatttgtttctcttgctttcttttgaattgattagatattttttcttattccattttttgggggctctggtttagaatttatacatgtttttctgttatgtatttaacaggtctgtttaacttatcaaagtcaaaatttaataaattataatttccccaaacaatataggaaccaagaacatgttaattttaactcctttctaaatacagtattgatgcccagtcttttagttttaaccatatttctaatcttattggacataataataattattatttgtataaaatcagtatttgtttagatttacttatattttatcatcatgttcttgtcaaatatgaattctaggttgacaattttttctactttctccttgaaagtattattcctgttttcatggcttcctttgttgctgttgagaagacatttgccaaaatactgttgacacgttaaaatttagcctgtattttctctcacattactgctaatacattcttattctcatcactatttagcactttcactatgatatggctaggtgtggattctttgtatttatcctatttgggtctttgggatttctgtattctgaagattggtgcctttaattaatcctgggaagttctcagtcacctattacctcccaccatttcttccccttctgaaaatcggattagatgtagtctagctttcattactcagtcctccatatatttttggcacacatctgaagtatggacttaattttgcttaacatacttggtgcttgcggggcccatttgctatgagtctggttttctaactctgggtctcccttgccaggcaaatacttttacttcctcagtcagcaagctggtgcctttctgcatttttatttcttttctgagtccacagaaacgtcctccttgcatttgaggctactttccctcttcagtgctttctctcttataaccatatattcagaacagaaggg

SEQ ID NO: 85896 - DNA, 535 bp, Homo sapiens
cctgggaccttagggaacaaccacaatgccactgagccccccaggtccctgggagccttcccttcagaccccactgagttcttttccgggatgctgaggactcactgtgcccctgggatgccctgaggaccccgttcaagatattgccagggcaccacagacctaagagccctcactgaaacctagaaaagctctaggacccctgggacccgcatgaggactgcaggaccccactgcccccccaccggaccatgccaaacctgctgagaccctgagagtccccccaacaagatgagcccctgagatcctctgaaccctccaccaaggccccttcaagccccttgggacctactgagaccctcatgacccctccttccctccctgccaagactgaacctctgggttcctgctgagccctyggctcaccatccctttccttcaggaccctgctgacacctgggccctgttgaagcccaactaagcccccaagactctcaggggctcagggagccctgcgaccctgcataactcccca

SEQ ID NO: 85897 - DNA, 1956 bp, Homo sapiens
ccctggtatagacagtaggagaggggactcagtggcgacgcctggtctcctcaccatctctgcacagcctggctccagacctctctagagacagtaaagtcactttctccacagccaaagtcccaagaggaggcacttgccgttttgatccaagaagggaaatgcccttcaaatcctggcgtgaccttgcctggaatcttcacagccactcttggaggtagatattcttttgcccatttggcagagttggaagcttattgaggtttagtgaccagccyaaagccacaccgtgaggagtggcagagcaaggattcaagcccaagtctgcctttcttcagctacccatttccaaagaaagctgcgactaaccgatttgcagcccactgcccctgcccactgcaagtcacacctacagactccacccaccacagactccacccacagcagattctcctgcttcaggctccactcaccagactccacccactgcagactccacctaccacaggctccacgcactaagactccacccactgcagactccacccgctgcagactccacccaccacaggctctactaagactccacccaccagaggctccacccccagcagactccacccactgcagtgccaccactgcagccttccttcctctcagccttgcctgggatccacccacttttcctctggccccaaagactgcttcttctcccataccctgtgatcatcattctcctaggctcgaccgagaagacctaaccgtactgggatgactttattatctcctgggcatgtttccagaagccagctccgcttactctaaattcaagcagggtgtcctggccaattcccatgtgggcctctctcctatccccccacgcagcgtcctgttggcccagctgctcactgtgggaagagatgatgggttgtccccaccccagtgatcaactgtaaagctcaggacagttcaagggaatcaagccccacattctctgggcttcatgcaggacatcacagccaaacacagccccaggaagaggagccctggtgattttcagaggcctgtgttatgatccaggccagccctgctagctccaggccacattctcccaggaaagtcaccacctctggagcctctccctgccatctgcgcaggaaggctgcggctgtactgagcttttggtggtgtggtgagactcagaggccgaggctggaccctgagcccagcacacagcatgagctcaacacacgccagggcttagggatccttgcacactgactgccatctggggagacgccagaggacagttccagaagagcactccacactcatgtctagaggcccttgagagctcaggcaggagctggccccatgagactcgtcctccaatcccacagggttgtagggaggcctctgtcttgctggaaaacttggggtaggtcccttttccctccagcccagtttctaatctgagtcggcctcactgcgagggggccgtcagcatgatggagtctccaagacaagctctccaagttggcaaggtggcaagatctgggagggtggcctccagcacaagctgcacccctctgcttaggtccctcccccattcaagaaccttccatggctccccacagaacacagcccagcccctaaaccagcactctaagcctggtacccacctggttgcctgacttcctcactgccctctgatcccacactctttcccaaagttgtcctcgatagtcctggcaccagcctgggctcccaccattcctgctccggggagcactgtgtgcccatctcacctgggaagaccctacttgtccttccaggcccacgtcaaatgccccctctgtaccgacagcgtattcacagacaatgattcactcttgtgctgagctctgcactggaggcttcaggacctaagcgcccttctttgcaccctaactttaa

SEQ ID NO: 85898 - DNA, 1956 bp, Homo sapiens
ccctggtatagacagtaggagaggggactcagtggcgacgcctggtctcctcaccatctctgcacagcctggctccagacctctctagagacagtaaagtcactttctccacagccaaagtcccaagaggaggcacttgccgttttgatccaagaagggaaatgcccttcaaatcctggcgtgaccttgcctggaatcttcacagccactcttggaggtagatattcttttgcccatttggcagagttggaagcttattgaggtttagtgaccagcccaaagccacacsgtgaggagtggcagagcaaggattcaagcccaagtctgcctttcttcagctacccatttccaaagaaagctgcgactaaccgatttgcagcccactgcccctgcccactgcaagtcacacctacagactccacccaccacagactccacccacagcagattctcctgcttcaggctccactcaccagactccacccactgcagactccacctaccacaggctccacgcactaagactccacccactgcagactccacccgctgcagactccacccaccacaggctctactaagactccacccaccagaggctccacccccagcagactccacccactgcagtgccaccactgcagccttccttcctctcagccttgcctgggatccacccacttttcctctggccccaaagactgcttcttctcccataccctgtgatcatcattctcctaggctcgaccgagaagacctaaccgtactgggatgactttattatctcctgggcatgtttccagaagccagctccgcttactctaaattcaagcagggtgtcctggccaattcccatgtgggcctctctcctatccccccacgcagcgtcctgttggcccagctgctcactgtgggaagagatgatgggttgtccccaccccagtgatcaactgtaaagctcaggacagttcaagggaatcaagccccacattctctgggcttcatgcaggacatcacagccaaacacagccccaggaagaggagccctggtgattttcagaggcctgtgttatgatccaggccagccctgctagctccaggccacattctcccaggaaagtcaccacctctggagcctctccctgccatctgcgcaggaaggctgcggctgtactgagcttttggtggtgtggtgagactcagaggccgaggctggaccctgagcccagcacacagcatgagctcaacacacgccagggcttagggatccttgcacactgactgccatctggggagacgccagaggacagttccagaagagcactccacactcatgtctagaggcccttgagagctcaggcaggagctggccccatgagactcgtcctccaatcccacagggttgtagggaggcctctgtcttgctggaaaacttggggtaggtcccttttccctccagcccagtttctaatctgagtcggcctcactgcgagggggccgtcagcatgatggagtctccaagacaagctctccaagttggcaaggtggcaagatctgggagggtggcctccagcacaagctgcacccctctgcttaggtccctcccccattcaagaaccttccatggctccccacagaacacagcccagcccctaaaccagcactctaagcctggtacccacctggttgcctgacttcctcactgccctctgatcccacactctttcccaaagttgtcctcgatagtcctggcaccagcctgggctcccaccattcctgctccggggagcactgtgtgcccatctcacctgggaagaccctacttgtccttccaggcccacgtcaaatgccccctctgtaccgacagcgtattcacagacaatgattcactcttgtgctgagctctgcactggaggcttcaggacctaagcgcccttctttgcaccctaactttaa

SEQ ID NO: 85899 - DNA, 1956 bp, Homo sapiens
ccctggtatagacagtaggagaggggactcagtggcgacgcctggtctcctcaccatctctgcacagcctggctccagacctctctagagacagtaaagtcactttctccacagccaaagtcccaagaggaggcacttgccgttttgatccaagaagggaaatgcccttcaaatcctggcgtgaccttgcctggaatcttcacagccactcttggaggtagatattcttttgcccatttggcagagttggaagcttattgaggtttagtgaccagcccaaagccacaccgtgaggagtggcagagcaaggattcaagcccaagtctgcctttcttcagctacccatttccaaagaaagctgcgactaaccgatttgcagcccactgcccctgcccactgcaagtcacacctacagactccacccaccacagactccacccacagcagattctcctgcttcaggctccactcaccagactccacccactgcagactccacctaccacaggctccacgcactaagactccacccactgcagactccacccrctgcagactccacccaccacaggctctactaagactccacccaccagaggctccacccccagcagactccacccactgcagtgccaccactgcagccttccttcctctcagccttgcctgggatccacccacttttcctctggccccaaagactgcttcttctcccataccctgtgatcatcattctcctaggctcgaccgagaagacctaaccgtactgggatgactttattatctcctgggcatgtttccagaagccagctccgcttactctaaattcaagcagggtgtcctggccaattcccatgtgggcctctctcctatccccccacgcagcgtcctgttggcccagctgctcactgtgggaagagatgatgggttgtccccaccccagtgatcaactgtaaagctcaggacagttcaagggaatcaagccccacattctctgggcttcatgcaggacatcacagccaaacacagccccaggaagaggagccctggtgattttcagaggcctgtgttatgatccaggccagccctgctagctccaggccacattctcccaggaaagtcaccacctctggagcctctccctgccatctgcgcaggaaggctgcggctgtactgagcttttggtggtgtggtgagactcagaggccgaggctggaccctgagcccagcacacagcatgagctcaacacacgccagggcttagggatccttgcacactgactgccatctggggagacgccagaggacagttccagaagagcactccacactcatgtctagaggcccttgagagctcaggcaggagctggccccatgagactcgtcctccaatcccacagggttgtagggaggcctctgtcttgctggaaaacttggggtaggtcccttttccctccagcccagtttctaatctgagtcggcctcactgcgagggggccgtcagcatgatggagtctccaagacaagctctccaagttggcaaggtggcaagatctgggagggtggcctccagcacaagctgcacccctctgcttaggtccctcccccattcaagaaccttccatggctccccacagaacacagcccagcccctaaaccagcactctaagcctggtacccacctggttgcctgacttcctcactgccctctgatcccacactctttcccaaagttgtcctcgatagtcctggcaccagcctgggctcccaccattcctgctccggggagcactgtgtgcccatctcacctgggaagaccctacttgtccttccaggcccacgtcaaatgccccctctgtaccgacagcgtattcacagacaatgattcactcttgtgctgagctctgcactggaggcttcaggacctaagcgcccttctttgcaccctaactttaa

SEQ ID NO: 85900 - DNA, 676 bp, Homo sapiens
acgacactgtacatttgtccaaacccatagaacctataacactaagagtggcccccactgtaaagtatgaacttcgcttaagaatacatcaacgttggtacagttacaacaaatgcacctcaccagtgcaaggtgttaatcatagggaagaygggatgggagcacatcggaactctctgtgtcttatctagaaaccaagagatgctctgagaaataaaatctatcaaaaaatttaaaaattctaggccaggcgctatggctcacgcctgtaatcccagcactttgggaagctgaggtgggtgggttactgaggtcaggagtttgagatcagcatggccaacatggcaaaaccctgtttctactaaaaatacaaaaattagccgggtgtggtggtacacacctgtaatcccagctactcgagaggctgaggcaggagaatcacttgaaacccgggaggcagaggtcgcagtgagccaagattgtgccacagcactccagcctgggtgacagaataagactctgtctcaaaaaaaaaaaaaaaaaaaatttaaaaaggaactaaccacaattgcggcaggttcatttcactgcagtttcaagattggctccaataatttggcttaacaagtctctaactgtgataataacatagaacataaactcaagtgctaagaat

SEQ ID NO: 85901 - DNA, 761 bp, Homo sapiens
tttcataagttttaaattgcatgctgttctgaaatcttgttacaaaacaccagagatttgttctaggtcctgttgctcaccacacagaaaaccagccactgaaatgagtgtcgtcaggaaagaaggctttaatcgggtgctgcagccaagaagagtgggaatgagtctcacatccatctctctgatgactaaaattgggaggtttgtatagtggagaaggagggaaaacaggaattagggaggagtaaggaagcagttatgatggattaagggtctgatgactcactgcctagatgcagtgatctgatgagtttcagttcatctcctgaggaaggaactcagatgagacaaatgtaagtttgaagtgttaagaccaaggagaatcagcttctatgtttattcaaaaaactgtaaatattagttccatgagacaattgaggcagtttcaatcytcactttctatgtatcaattcctcagtcatggggaatctgctggtcatttcttttggctgcttcctgcggaagagggggcattgtgggatgatcatgaggaatgaaaacattacccctgtaaatggaagtactcatgagtacctggctggcatccagcttgttgaaacaccatgtgactccaattgtgtcttgttataataaaagaaaacagattcttactgaaattagggaaatagctatattgccacagattaagaatattcagaaatagtttctgaattctggagaattcaagtagagatagagaa

SEQ ID NO: 85902 - DNA, 761 bp, Homo sapiens
tttcataagttttaaattgcatgctgttctgaaatcttgttacaaaacaccagagatttgttctaggtcctgttgctcaccacacagaaaaccagccactgaaatgagtgtcgtcaggaaagaaggctttaatcgggtgctgcagccaagaagagtgggaatgagtctcacatccatctctctgatgactaaaattgggaggtttgtatagtggagaaggagggaaaacaggaattagggaggagtaaggaagcagttatgatggattaagggtctgatgactcactgcctagatgcagtgatctgatgagtttcagttcatctcctgaggaaggaactcagatgagacaaatgtaagtttgaagtgttaagaccaaggagaatcagcttctatgtttattcaaaaaactgtaaatattagttccatgagacaattgaggcagtttcaatcttcactttctatgtatcaattcctcagtcatggggaatctgctggtcatttcttttggctgcttcmtgcggaagagggggcattgtgggatgatcatgaggaatgaaaacattacccctgtaaatggaagtactcatgagtacctggctggcatccagcttgttgaaacaccatgtgactccaattgtgtcttgttataataaaagaaaacagattcttactgaaattagggaaatagctatattgccacagattaagaatattcagaaatagtttctgaattctggagaattcaagtagagatagagaa

SEQ ID NO: 85903 - DNA, 409 bp, Homo sapiens
gcagtggcgccatctcaactcactgcaagctccccctctcaggttcatgccattctccttcctcagcctcccgagtagctgggactacaggcgcccgccaccacgcccagctgatttttttgtatttttagtagagacagggtttcaccgtgttagtcaggatggtctccatctcctgaccttgtgatctgcccgcctcggcctcccaaagtgctgggattacaggcatgagccaccgcrcccagcctacttcatttttcaaaagtcgtgttattaggtatacaagcggctttacattttaaaagttgtgttattaggtatggaagtggtctgttccttatctgaaacacttgggaccagaagtgtttcagattttttatttttttcagattttgcaatatttgcatat

SEQ ID NO: 85904 - DNA, 485 bp, Homo sapiens
gatcactgaagataatgtattttaccataatgttttaatctcaggtaaatgccaattaggagacaaacacttgtttatctcctgattggtattgatttgaattaagctgtctgccatttggagaaatttaaatgctattttaaacacacagtcttgttacttgagttatttatgatcttaagcggctcccctccttttgtgggttagattgtgtcttcaaaaagaaaatatatatattagagttctagcccctgatgtctgtgagggtatgacttaatttgaaatcaaattatttgcagatgctgtataattatgatatgctagatgagctcataatgcattagagtgggccataattcartatggttgatatcctcataagaagggaagaggaaacagagacgcagggaggagatggccatgtgaggatggaggtagagaataaagtgaggtatcctccagccaagcaatgacaatgaagctca

SEQ ID NO: 85905 - DNA, 928 bp, Homo sapiens
caggtgaacagaggaatgactttgagttctgtctgtcctttgtcccacacctgtgaagataagctatcaatttacattaccagggtgaaattcaacagaaatgcttttggataaagatgttcaggcccacagggaatttccttgttgacaaattgtgaaggaggtatgtagctttttcttctttatagctatcatattaagtaataaaatgggaggtttgcctgacacagttcccagcttgacttttccctctggcttagtgatttgggggtcccgagatttatttttctttcacattttgcaagactatggatgcttaataggatgagattagcaattgaaagagaaaaaattttgattcttaaaatcttcaccctttccctcaaactctktgaaccttgttcttctaatggacatttgtgtgcatgattgaggtgtagtatcttaggtgctgtaggaaacagtaatattcaagaatgtgctgtgatctgcactaaggaggtgatgctattgaacaaggccaaaataaacctacctatggagaagtattcttgccgaaaacgatgaaccttaatcttatctgctctctaaatctaaattgtagtttaccagagccacaaaagatattcaagaaaatgttaaatggcagcataatgaaacatttttaaaaatccataatgtgggacatcttacttgacaactgacctgatgtcttctataggccaaaagcatgaatttaaagtggatcaaaggggggatactcttccagattgaaagagactcaagagagaaaacaatcacatgcaaagaatgggtatttttgagatgactggaaattttgaagttttgttttgtagggtataaaataatattaaggaattattaactttcttcagtgtgatagttgtatttttgttatattagaaaa

SEQ ID NO: 85906 - DNA, 1621 bp, Homo sapiens
cttgaactactgacctgacgtgatccacccacctcggcctcccaaagtgctgggattagaggcatgagccactgagcctggccccatgctcttaacactgaactatctatgtctcagatatacagcagcaaaacaaaaccagagaaagtggaaagcaggtaatacagaagaaacagaggtgaaatgaagaatataattctcagggaatatatagagaacgcaaatatatttaacaagcagtataaatgctaaataaaacaacaacctcagaagaaacctaaggttcatccccaaataggaaatctattctgaatgctctaagagagaaataatacaaacctacaatgaggtgattattagaataaacttttccagagagcagaacgtgttaggagcttcttaacttattatattactaccccaaatcctagtataatcttgataaccaaattataccctaacagagcaacaacaaaaacaacaacgacaacaacaacaacaaaaaaaaaacagccagaaaactaaaggaaaatgtctcaatgaatagaactgcaaaattttatggaaagcagcaaacaaaatccatcaacatattaaaattattacagtacaacagtaatgcatggaaattcatcattactacatttagcaatataattcctcttattaagaaatattactttctaaaacatatcaccatgaaaacaaatgtcaatcaacagrttgaaagtaaatttcttgttaatacatataacagaagaaaaaagatcaaaacctagaaaaaaacacacaaagagttcataaataagatgcatacctaaacagaaagaaacaaggagtaaatagcaaggggaatacaaaagaataagcttataagaggatgaagaggcagggagagatggctcacacctgtaatcccagcactttggaaggccaaggcaggaggatagcttgagcccaggagtttgagacaagcctgggcaacatagtgagacctcgactctacaaaaaatttaaaagaaaattatcaggtgcagtggttcacacctgtagttctagttgctcaagagactgaggatctcctgaggctctaattgcaccattgcagtaaagcctgggagacaggatgagatcttgtctcaaaaaataagaggatggccaatatctcctacctggaaaaattaacataatgtaatgccataattgttctcctgatggaaaaagactaaaaggattaataagagccagctttttttgtttgtttgtttttgttttgagatggagtcttgctctgtcacccaggctggagtgcagtggcatgtgatgtcggttcactgcaacttccacctcccaggttgaggcaattctcctgcctcagtctcctgagtaactgggatgacaggcgtccaccacttaagcaaaaacaaacacacaaaccccaaactctattcctaactatacacaaatatctgtgtaaatatatagaaaccgatctgaaacaactaaggtgaaatttttaataacggtaattttgggagggaaatgaaagtaacaagagagaggaggttgatatagcaatggggactttcattttaacttaaaaaaattaaaacataagcaa

SEQ ID NO: 85907 - DNA, 1621 bp, Homo sapiens
cttgaactactgacctgacgtgatccacccacctcggcctcccaaagtgctgggattagaggcatgagccactgagcctggccccatgctcttaacactgaactatctatgtctcagatatacagcagcaaaacaaaaccagagaaagtggaaagcaggtaatacagaagaaacagaggtgaaatgaagaatataattctcagggaatatatagagaacgcaaatatatttaacaagcagtataaatgctaaataaaacaacaacctcagaagaaacctaaggttcatccccaaataggaaatctattctgaatgctctaagagagaaataatacaaacctacaatgaggtgattattagaataaacttttccagagagcagaacgtgttaggagcttcttaacttattatattactaccccaaatcctagtataatcttgataaccaaattataccctaacagagcaacaacaaaaacaacaacgacaacaacaacaacaaaaaaaaaacagccagaaaactaaaggaaaatgtctcaatgaatagaactgcaaaattttatggaaagcagcaaacaaaatccatcaacatattaaaattattacagtacaacagtaatgcatggaaattcatcattactacatttagcaatataattcctcttattaagaaatattactttctaaaacatatcaccatgaaaacaaatgtcaatcaacaggttgaaagtaaatttcttgttaatacatataacagaagaaaaaagatcaaaacctagaaaaaaacacacaaagagttcataaataagatgmatacctaaacagaaagaaacaaggagtaaatagcaaggggaatacaaaagaataagcttataagaggatgaagaggcagggagagatggctcacacctgtaatcccagcactttggaaggccaaggcaggaggatagcttgagcccaggagtttgagacaagcctgggcaacatagtgagacctcgactctacaaaaaatttaaaagaaaattatcaggtgcagtggttcacacctgtagttctagttgctcaagagactgaggatctcctgaggctctaattgcaccattgcagtaaagcctgggagacaggatgagatcttgtctcaaaaaataagaggatggccaatatctcctacctggaaaaattaacataatgtaatgccataattgttctcctgatggaaaaagactaaaaggattaataagagccagctttttttgtttgtttgtttttgttttgagatggagtcttgctctgtcacccaggctggagtgcagtggcatgtgatgtcggttcactgcaacttccacctcccaggttgaggcaattctcctgcctcagtctcctgagtaactgggatgacaggcgtccaccacttaagcaaaaacaaacacacaaaccccaaactctattcctaactatacacaaatatctgtgtaaatatatagaaaccgatctgaaacaactaaggtgaaatttttaataacggtaattttgggagggaaatgaaagtaacaagagagaggaggttgatatagcaatggggactttcattttaacttaaaaaaattaaaacataagcaa

SEQ ID NO: 85908 - DNA, 1621 bp, Homo sapiens
cttgaactactgacctgacgtgatccacccacctcggcctcccaaagtgctgggattagaggcatgagccactgagcctggccccatgctcttaacactgaactatctatgtctcagatatacagcagcaaaacaaaaccagagaaagtggaaagcaggtaatacagaagaaacagaggtgaaatgaagaatataattctcagggaatatatagagaacgcaaatatatttaacaagcagtataaatgctaaataaaacaacaacctcagaagaaacctaaggttcatccccaaataggaaatctattctgaatgctctaagagagaaataatacaaacctacaatgaggtgattattagaataaacttttccagagagcagaacgtgttaggagcttcttaacttattatattactaccccaaatcctagtataatcttgataaccaaattataccctaacagagcaacaacaaaaacaacaacgacaacaacaacaacaaaaaaaaaacagccagaaaactaaaggaaaatgtctcaatgaatagaactgcaaaattttatggaaagcagcaaacaaaatccatcaacatattaaaattattacagtacaacagtaatgcatggaaattcatcattactacatttagcaatataattcctcttattaagaaatattactttctaaaacatatcaccatgaaaacaaatgtcaatcaacaggttgaaagtaaatttcttgttaatacatataacagaagaaaaaagatcaaaacctagaaaaaaacacacaaagagttcataaataagatgcatacctaaacagaaagaaacaaggagtaaatagcaaggggaatacaaaagaataagcttataagaggatgaagaggcagggagagatggctcacacctgtaatcccagcactttggaaggccaaggcaggaggatagcttgagcccaggagtttgagacaagcctgggcaacatagtgagacctcgactctacaaaaaayttaaaagaaaattatcaggtgcagtggttcacacctgtagttctagttgctcaagagactgaggatctcctgaggctctaattgcaccattgcagtaaagcctgggagacaggatgagatcttgtctcaaaaaataagaggatggccaatatctcctacctggaaaaattaacataatgtaatgccataattgttctcctgatggaaaaagactaaaaggattaataagagccagctttttttgtttgtttgtttttgttttgagatggagtcttgctctgtcacccaggctggagtgcagtggcatgtgatgtcggttcactgcaacttccacctcccaggttgaggcaattctcctgcctcagtctcctgagtaactgggatgacaggcgtccaccacttaagcaaaaacaaacacacaaaccccaaactctattcctaactatacacaaatatctgtgtaaatatatagaaaccgatctgaaacaactaaggtgaaatttttaataacggtaattttgggagggaaatgaaagtaacaagagagaggaggttgatatagcaatggggactttcattttaacttaaaaaaattaaaacataagcaa

SEQ ID NO: 85909 - DNA, 1621 bp, Homo sapiens
cttgaactactgacctgacgtgatccacccacctcggcctcccaaagtgctgggattagaggcatgagccactgagcctggccccatgctcttaacactgaactatctatgtctcagatatacagcagcaaaacaaaaccagagaaagtggaaagcaggtaatacagaagaaacagaggtgaaatgaagaatataattctcagggaatatatagagaacgcaaatatatttaacaagcagtataaatgctaaataaaacaacaacctcagaagaaacctaaggttcatccccaaataggaaatctattctgaatgctctaagagagaaataatacaaacctacaatgaggtgattattagaataaacttttccagagagcagaacgtgttaggagcttcttaacttattatattactaccccaaatcctagtataatcttgataaccaaattataccctaacagagcaacaacaaaaacaacaacgacaacaacaacaacaaaaaaaaaacagccagaaaactaaaggaaaatgtctcaatgaatagaactgcaaaattttatggaaagcagcaaacaaaatccatcaacatattaaaattattacagtacaacagtaatgcatggaaattcatcattactacatttagcaatataattcctcttattaagaaatattactttctaaaacatatcaccatgaaaacaaatgtcaatcaacaggttgaaagtaaatttcttgttaatacatataacagaagaaaaaagatcaaaacctagaaaaaaacacacaaagagttcataaataagatgcatacctaaacagaaagaaacaaggagtaaatagcaaggggaatacaaaagaataagcttataagaggatgaagaggcagggagagatggctcacacctgtaatcccagcactttggaaggccaaggcaggaggatagcttgagcccaggagtttgagacaagcctgggcaacatagtgagacctcgactctacaaaaaatttaaaagaaaattatcaggtgcagtggttcacacctgtagttctagttgctcaagagactgaggatckcctgaggctctaattgcaccattgcagtaaagcctgggagacaggatgagatcttgtctcaaaaaataagaggatggccaatatctcctacctggaaaaattaacataatgtaatgccataattgttctcctgatggaaaaagactaaaaggattaataagagccagctttttttgtttgtttgtttttgttttgagatggagtcttgctctgtcacccaggctggagtgcagtggcatgtgatgtcggttcactgcaacttccacctcccaggttgaggcaattctcctgcctcagtctcctgagtaactgggatgacaggcgtccaccacttaagcaaaaacaaacacacaaaccccaaactctattcctaactatacacaaatatctgtgtaaatatatagaaaccgatctgaaacaactaaggtgaaatttttaataacggtaattttgggagggaaatgaaagtaacaagagagaggaggttgatatagcaatggggactttcattttaacttaaaaaaattaaaacataagcaa

SEQ ID NO: 85910 - DNA, 1144 bp, Homo sapiens
taggtgatgagttgacaggtgcagcaaaccaccatggcacacgtttacctatgtaacaaatctgcacatcctgcccatataccccagaacttaaaaacaaaacaaaacaaaaacaaaacgctagcggcaaaataaagtctcaaactgaaaaagtgacagaccaatttttggttcaaataatggttctcaacccaggtgttataaagtaaagacaaagaatttgatcacatattgcaattaagacatacagcaaatgactagaaaaattattctcaacacatatgacggttagtagctaatttccttaagaggaaatggtcacaaaacaatgaaggggggaaaatgaacacttgaaaaatgggtgaacagctaggcctggtggtgtgtgcctgtggtcccagctactcaaraggctgttgcagcggaattgtttgagcccagggattggaggctatagtgagctgtgattgggcccctacagttcagcgtgggtgacacagcaagaccctgtctcaaggtttttttttttttttttttttgagacggagtctagctctgtcgccaggctggagtgcaatggggccatctcggctccctccaacctctgcctcccgggttcaagcggttcttctgcctcagcctcttgagtagctgggactacaggcgccagccaccacgcggctaatttttgtatttttagtagagacggggtttcgccacgttggccaggatgatctcgatatcttgacctcgtgatccgcccgtctcggcctcccaaagtgctgagattgcaggtgtgagccagtgcgcccggcctaaaaatttttttcagttaaaaattaaataattaaaaagtgggtgaaagacatgacaaggcagtgaaaagaaaaatgacaaaaagacatcaactatgaccaccttgattgttagcaataaaatgaaaaccaacatcctttttatatatcaaagactaaacatttttattgtaaatcaagtgatcctcaatagtgtgagaaaatagacccgtttacattttaggctgagtgaaaaaaacaaaaactgtttttcctccgctctcatatcacaacaattaacacagaagatttctgtgacagcatgtctggggatttctctcggtcagtca

SEQ ID NO: 85911 - DNA, 792 bp, Homo sapiens
acaatatctcatttaatcctctgagtatcctttgaagtagctattactaagcacattttactcagaaaaaaatgaaggcttagagatgtcatgccaaagtcatacaactattaagtgatagagacagtatagccaatattcaatccaggtctatctgactcactcctgaattccctctccatcctttcttaaccacaagtactgtatgctaggactcactaggacatcataagttatttgagataataggttgttagagaaggagcacgggctttgatgttaraccagctttgaatctgagacccagctaggtcgggtgtggtggctcacgcctgtaatcccagcactttgggagaccgaggcaggtggatcacaaggtcaggagttcgagacgagcctggttaacatggtgaaaccctgtctctactaaaaatacaaaaaaattagccaggtgtggtggcaggtgcctgtagtcccagctactcaggaggctgaggcaggagaatggcatcaacccgggtggtggagctttcagtgagccaagatcgtgccactgcactccagcctgggtgacagagcgagattccgtctcaaaaaaaaaaaaaaaaaaaaaagaatttgagacccagctctggcacagaacagccattgatcttagacaagttatataaacctctccctccactcctaccccaaaaccttaggttctatatctataaaatggaaataatatcagccatcttgcaagattgccataaaaattaggtataatatatatagagtgcttgacac

SEQ ID NO: 85912 - DNA, 889 bp, Homo sapiens
tcctaaataacgtcttcagaattacgtttctatacttttattctgactgtatcagtatgctaatgcatcttggaatggctccccctttcagaatacaatgtgatctcctttgtttgcgacaccatgtccttcccgatctggcattcgtctactttaccaacctcatgtaatcctagcctggaccctggtcatactaaaatactctcctctatgcccccgcatatggcattccctctaccagcgacatctttccttaccctgtatctaaatgaaagaagcgcctctctccttagactgtgagttccttcagagtggacccaagtgttccatgtttgtatccagagtctggcagagtgctggataaacagtggacgcttagtacatgtttgtaaaattagtgcaattaatagttgaatggctgtggaattcaccatcaacaaaaaataycttataatgtctactaatgatgaagttttcatcaaattttggaatgtttaagctgttgtatcccaaaatgggacgaggctgggacatctggggcatctgcattactagacagcactggaggttgggtgagggaataaggtgacaaaaaaaatgaagaagctgtatgaagttaattttcaaaattatttttattttatttacttttgtttttatttttttttttgagacagagtcttgcactttcgcccaggctggagtgcagtggcgtgatctcagctcactgcaagctccacctcctgggttcatgccattctcctgcctcagcctcccgagtagctgggactacaggcgcccgccaccacgcccggctaattttctgtatttttagtagagacggggtttcaccgtgttagccaggatggtctcgatctcctgaccccgt

SEQ ID NO: 85913 - DNA, 662 bp, Homo sapiens
  misc_feature (1)...(662): n = A,T,C or G
ttattttggtgaaaatattggtatttagagatgcagcattatacataaaaataaataanccgtggtttctatctgagtgagggtgctgtgaggtgcacttgatttgatttttttttagaaaataggtcatgttaaacttggacaagaacacactttgatgaacatatttttggcagaggtattgagtgaaatatattaactttaagtttaaggtgatagtgtgatccgtgctattgaacttcccaagggacaacctgaaagaaaaaatgaaatatttatgtgaaattatagctagctcatccttggagtgctagagagactatattgtcagggaatgttgatctcagcatttcccatgtaaccagcacagttctggcaactcacttagtaatatccagaaagtcttacagttttaaaaccaaataataaatataccaaaattcaataaatatggctgtaatcagttaacttttgctgtgtaacaaactaccttaaaacttagcaacttaaaataacagtcatttaccrggctttcttcatgggccgctattctgggctaggctcagctgggcagttctcatcttgctggtctttgctagtgttacgggctgaattacatctcttccttttcaaaaatatgtatatgctggagtcttaatccc

SEQ ID NO: 85914 - DNA, 941 bp, Homo sapiens
tacacttacaaaatgggaaacattcttacctcaaaaggctctgaggacccaaagtcatacataagcctttagcctgagacatgctaaagattagttgtaaatttctttcctttcctttattctctcttccttttttacttcttttttctttcttcttttccttccttccttcccttcttccctctgttcctccctccctccctgtctccctatcttccgtctttccttcttcttattccgtcttctgaattactacctagtaactcttctacttccctgaatgatcttttgtgattgtaccccataataaagctttagtgacaagagacagctagaaaaaatccactaatgctgataattgttggtgatcattcacaggattactagatgagttaggaaaagttactagatgagttaggaaaagttgttagatgagttaagacccaatctcagaatcatggtcaacattgagctatatccatttatagtttccactattaaaaaatctcctttgggaggccaaggcaggcagatcacgaggtcaggagatcgagaccatcctggctaacacagtgaaaccccatctctacyaaaaatacaaaaaattagccaggcgtggtggtgggcacctgtagtcccagctactggggaggctgaggcaggcaaatggcgtgaacctgggagacagagcttgcagtgagccgagatcgcgccactgcactccagcctgggcgacaaagcaagactccatctcaaaaaacaaacaaacaaacaaacaaaactcaggctgtcaaggtatcagttatttgtaatataatatccccatactaccactcaaggcaactgttgggtaactaatgtaataaaattattattcaagaaagactttcaacagtgttatcattgtaaaatatcaggattgaaagtcatcaagaaagaaa

SEQ ID NO: 85915 - DNA, 925 bp, Homo sapiens
ttatcctgtgtaaggaagcagggaatgaattttgtctcaggaaagcaaagtcttgcagatcatggcaacaaacgcaactctaaatgtgtgtgtagacrtcatagtgaatatcagacagtcccacagcttctgagtctgagcccctggaaagcaatgtggagggagaaaaaaaatctaaactcaggttcctgctccagcagtggttaaaaatttctaagctctcatcccagctctgcctttgccagctatgtccttgtgtaagtcacttatatcctcaactaagaactacagataatcatagtacctattccttgagtttacaggcagactaaatgatacatttattaaaagatgtccatcacattatttatactattaagtactgaaaaaacctatatgcccaataataggggatctatcaaatacactatagtttatctatgcaatattatattaaaattaaaatggtgcttatagatcacagtacaatttgcaacatatatgcacaaacttggacattaataagaattgcaaggaaacacatcaaaatgttaactggatttgtgtctgggtagtggaattttgagagtttaatttttctttttatttgtcacatcctctataatgatcttataatatttttaaatcagaaaaaaagttttataaaatgaatgaagtttgcttgccagagacaaaaaagtgatatttgcaaaaatcatcccctacaacgagaacatgtaatctgaagtgagcaaagcaatttaggtagcagtgtactatgtttgtttaaagttagacattgtagctgaatttttgctgtactatctactggttgaattactttatgcaacttactaacttctctgtttctgttccttcctctgtaaaacattacctcatgaagttttgtgaagataaaataata

SEQ ID NO: 85916 - DNA, 925 bp, Homo sapiens
ttatcctgtgtaaggaagcagggaatgaattttgtctcaggaaagcaaagtcttgcagatcatggcaacaaacgcaactctaaatgtgtgtgtagacatcatagtgaatatcagacagtcccacagcttctgagtctgagcccctggaaagcaatgtggagggagaaaaaaaatctaaactcaggttcctgctccagcagtggttaaaaatttctaagckctcatcccagctctgcctttgccagctatgtccttgtgtaagtcacttatatcctcaactaagaactacagataatcatagtacctattccttgagtttacaggcagactaaatgatacatttattaaaagatgtccatcacattatttatactattaagtactgaaaaaacctatatgcccaataataggggatctatcaaatacactatagtttatctatgcaatattatattaaaattaaaatggtgcttatagatcacagtacaatttgcaacatatatgcacaaacttggacattaataagaattgcaaggaaacacatcaaaatgttaactggatttgtgtctgggtagtggaattttgagagtttaatttttctttttatttgtcacatcctctataatgatcttataatatttttaaatcagaaaaaaagttttataaaatgaatgaagtttgcttgccagagacaaaaaagtgatatttgcaaaaatcatcccctacaacgagaacatgtaatctgaagtgagcaaagcaatttaggtagcagtgtactatgtttgtttaaagttagacattgtagctgaatttttgctgtactatctactggttgaattactttatgcaacttactaacttctctgtttctgttccttcctctgtaaaacattacctcatgaagttttgtgaagataaaataata

SEQ ID NO: 85917 - DNA, 618 bp, Homo sapiens
gatgcaaattgtagagaaacacacaccaaaggatttgcatttaatcaaatctagagcaagtcatttcagaagcatcactaccgtgtgcagaaggctttcccaccagggtcaggctragctttctagcagaccaggaccccttaccaaggagtgaacaccattcacaagaaattctgcactgctgttaagaaggaaatccaccagaaacatccagaatggaaagtggtaagtcaacatcaattattataatttaaaaaaactttaatcctaatttttatttttgataacacaaagtcataacataaaacaaaggttaaggagaaatctcctaactctggcatagaacatataaaaatataaaacacagatcaaggactacctatttagaactcttggtaacattttcctaattctagttacatttaattactaattgtttgattttgttttgctttatagagtttacagagatattctgaaagatcaactcagttgaacattattttcataaaataagtacttgaatatcaaagccttcttttccaatatatagtgaaattttattttagcaaatttcagtaagctctcaactatagagaaagtgcagaagaagaattc

SEQ ID NO: 85918 - DNA, 564 bp, Homo sapiens
aggggcttgttatcaagtcccagctsttctactaaataatgataatggctatcatttattgagaagtcactgagtgccaggcactgctgcaattattttacctataataacttattttctccttcagaaactctacaagtcaggaatcattactatctccatttaaaaaaaaataaaaagaaaactgaggcacagagaggttatgtactttgctccaaatcacttgggtagtcagttacagagctgggattttaaaccaggcagcctcgtttcagactatctgctaaaccacagtactacactgcctctcatgctctactgcataccccagagaagtcataaaacacagtgtttcccctgccaggtggagaaaacaagggggttgagctgaatcaacacttatttcagaccttctgattccactactatgattttgcctggaaaaccaagattctgaagaagtttttaaaaatttttttagagacatggtctcactctgttgccatcctgaagggcagtgacaaaaatcatagctcactgcagcctcgaactcctgggcttaat

SEQ ID NO: 85919 - DNA, 564 bp, Homo sapiens
aggggcttgttatcaagtcccagctctyctactaaataatgataatggctatcatttattgagaagtcactgagtgccaggcactgctgcaattattttacctataataacttattttctccttcagaaactctacaagtcaggaatcattactatctccatttaaaaaaaaataaaaagaaaactgaggcacagagaggttatgtactttgctccaaatcacttgggtagtcagttacagagctgggattttaaaccaggcagcctcgtttcagactatctgctaaaccacagtactacactgcctctcatgctctactgcataccccagagaagtcataaaacacagtgtttcccctgccaggtggagaaaacaagggggttgagctgaatcaacacttatttcagaccttctgattccactactatgattttgcctggaaaaccaagattctgaagaagtttttaaaaatttttttagagacatggtctcactctgttgccatcctgaagggcagtgacaaaaatcatagctcactgcagcctcgaactcctgggcttaat

SEQ ID NO: 85920 - DNA, 945 bp, Homo sapiens
aacctcatgatctaatcacctcccaaagtccccacctactaataccatcacattaggaattaggatctcaatgtatgaattttgggaaggaggagcaaacattcaattcataacaatattgtgactaggaatgcaatgtattataaaacctaagcaaattactaaatttctatatgtttaacatacaaaacagtggatggtatgaggcaagacataatcaggtagcataaagaataccatagggttatggtaaaggtgacatttgtgtgggctccagtattggggaaagactccacagatgttttgagacctaagtttggccttgagtgaggggtaagatttggagtgtaggaaagagagtggcaggactgtattgaagctgaaagtgtacactgatgacctggtttgttctgccttgctccattttggtgagagagagagggattcttttgcattttaatttctaacaaggaccttcaggcytggtttgggtgtgggaagactggtgtttacttcccctggcaagtaagcagaactggggagctctgggttttctgcagcagaggatcaggtgagaggaaagatgtcttatggagaggagacactgagcactaacagactggctggttatggggcatggaaatcattggttggagtgagttagcttcctgtcagctcttaagaaatgatgacaggcattgttttacaggcagagccatgattagaagaaggtaagggaaattcattccaaaaatgaagaggaaaaaaaatccagatcaagaagcatattccttgtcttagggctagggttgaggagctggtggttgtcagtttctgtaatctagggatttgtgttttagtattcatatggggttagacaatgagtgtttggcctaaatgaggggggaggatgagttagacctgagacacttgaataaaagcaag

SEQ ID NO: 85921 - DNA, 894 bp, Homo sapiens
gaagagaagataacacctgaaatatgtcaaggaattaactgttaatgatttctgtgtacaaatattttaagttgggagtgttgagaaacttgaaatttatatgggaacttcttttccctttctgaagccattcttcagaaaaaaaattcaaattcttgtcacaattcagatatgggaaattattttgctttattttaaaatgaatttttttgttaagtctgtattccctttattgtgtaaatcaaaaaaaatgaccgaggcaagtctcagtcattttaggtttatttgccaaagttaaggatgtgtgcctgggaggcaggtctatgcctttctctgaagatgattttgagggcttcaatatttaaagaggaaagggcaggatattgggaaatacacaattttcatgtgagaagtgggaaaacagtcatttatgcctttgtctggattagtgaatctgcatttttacataagacaacatagacaaatagagcagaagaagcaatgagatatacatttgtctcaggtgaacggagggatgattttgagttctgtcctatgtccccacacctgtgaagataagctatgaatttacatcaccatggtgagcttcaccggaactggtttaaggtagagaycttggggcccacaaggatttcctcatgggccaagtgtgagggaggtgtgtagtttttcatctttgtagccatcttatttaggagccaaaatgggaggcaggtttgcatgacccagcttgacttttcctttaggcttagtgagtctggggttccaagatttattttcctttcacagatgtctttatgtgtaagtatttagatgttttatctgatcaggaagattatataaatgccagtttagtggtttttaggaagtgat

SEQ ID NO: 85922 - DNA, 598 bp, Homo sapiens
acagtgttttaatgggggtgtttcttcattctttttttcttactggtttttactttttaaatttgaaagctttgcagggatcataaggatctgttcaggcaaagaacatgaaagggtttacatttttatcattttagtgtttcttattctctatatcaaaaacattcacagataagttaacaagatcctcatcaggaggaaaagtaaattgttcactaccatcctctagtatcctaatctggtcttgttgttggctaacttcagcagttactattctgtgactggtgtaatattaaccaaataaattactggatttgttcyacaaatattatgtcttagattggttctttcctgtctctgaaaataaagtcttgcaatgaaaataaattattttacaacagttaattagcaatgtaaaatttattgaaaatgtatttgctttttctgtaaatcatctgtgaatccagaggggaaaaatatgacaaagaaagctatataagatattattttattttacagagtaacagactagctagagacaatgaattaagggaaaatgacaaagaacagctcaaagcaatttctacacgagatcctc

SEQ ID NO: 85923 - DNA, 519 bp, Homo sapiens
aatattttatttagaatgtctgcatgtgtcttcttgaaggatattgcactacaacttaaccttgcgtccgtgttcatgttggtattttctttctaggtttttctcaccgcataaaatatgttatagagtagtccatctatttctcttccatggaagagttcatctggtagattggactaccacttttccttgtgagtatattgattatgtgtccctacctgttattatttgacttacactctctctgtccctgagagtattcctcgtgcattagcgttgggattsgatacacaatttatatgagaaataaatctttgttgttgcagatcactgacacacgtgagattttttgcaactatagcataaatgaactgacacatcattaaaaattaaaattacatttttctttaatgtctgatagaaatcacctacaaaattatttttctcttttaaatgagatttttaaaaagatattaattagtttaataattgtaggtctatatgggtcttaaaaattta

SEQ ID NO: 85924 - DNA, 550 bp, Homo sapiens
gttttgccatgttgcccaggctggtcttgaactcctaggctcaagtgatccacccattttagccttccaaagtgctgggtttacagttgtgagccaccatgcctggccaacatgaatgatttttgcatatatgatacctgtatgagtaagtggcttttttcctcaccttcaacaggctgatataaatttagtgccctgataattttgtctttctttccatttgaatacttgtgttttcaatttgctgagccactctttctggcttcatcagaaagaagtctgacacccttayactgacagcaagttaagtttctctttcctggtctctttttcttctgtttttaattttcagagtagaattaggctttttaaaataatacatatttttaaactgacaaataaaaattgtatatatttactgtgtacaacaggatgtttcaaaatatatatacataccctactggagtgggtaaatcaagctaattaccatatgcattaccttatatacttattattttcattatgagaatctctttcctcttctaaatgc

SEQ ID NO: 85925 - DNA, 550 bp, Homo sapiens
gttttgccatgttgcccaggctggtcttgaactcctaggctcaagtgatccacccattttagccttccaaagtgctgggtttacagttgtgagccaccatgcctggccaacatgaatgatttttgcatatatgatacctgtatgagtaagtggcttttttcctcaccttcaacaggctgatataaatttagtgccctgataattttgtctttctttccatttgaatacttgtgttttcaatttgctgagccactctttctggcttcatcagaaagaagtctgacacccttatactgacagcaagtwaagtttctctttcctggtctctttttcttctgtttttaattttcagagtagaattaggctttttaaaataatacatatttttaaactgacaaataaaaattgtatatatttactgtgtacaacaggatgtttcaaaatatatatacataccctactggagtgggtaaatcaagctaattaccatatgcattaccttatatacttattattttcattatgagaatctctttcctcttctaaatgc

SEQ ID NO: 85926 - DNA, 1005 bp, Homo sapiens
tctctgtatagataggaacctgatgctcagagactgatgcgtggtgatatttcaaagaaatggtcaagctaggtttccaacccagatccccgactctaaatctaggcttcttttaatgaaaagcccagtgcaaaatgaagtcatgtgtccatataacagggagtcagcttctagaatgctaaacctagaacttatttcatgggtcctaattatcagccttaacctccacccccagcatgagttaaattcctgacagatttctaaaatggtctttgcatttctataacaccaggtttgcattactaaaaagcatgctttcactttatcgtcattcattcttattctcactgtcaagccaactgtgtaatcccctggaagacatagcccaagacttgatgttatctacagattacattgccttgctccagcagttcattcaggaactagaatattagcaggcttccttcccttcagctggtttttaattttttacccccagcttaccatagcagcttagtggtgagcattctggcaaggttgtgactttaacaccatcacctgggtctgtggtttatgacaaggtgatctgtccttatccatggctgttggatcactagagtcccaggtaatgagaagagcagttaatctcacatgtatagtagtgagacctaaatgcctcctgtgctccttactaaaatgatttgaaggtgaccaagaacctcccatgaagrtcacagaagagcagagtgtactggagctgaaagacatgtgttcaggtgtttgtttctctaaggaagcagtagagaatgtgaatagatgtgctacctcatctctctgatcatgtgtcctcatgtttaaaatggagataatgatcccagtctgaacaaccttgctggttggccaggagaaaatatatgagctaataatgtgtgtaaaggcactaggtaagttacaaaattctgtaccagtgtgagatcattatttgccttctataaacataaaaag

SEQ ID NO: 85927 - DNA, 1112 bp, Homo sapiens
ttagaattttcccattggagtttatttattaacccaggtttacctttttattatatgttaatgattttactaagtagatagattaaactaaacttataaattattaatggattcatatatgaatactactgttaggaacaggagtctcacaaaggttcaaactttccacgtatcagtatcatctagttcaagggtcagcgaactatggcccacgggccaaatcctattgaccatatctggccctttacagaaaaagtttgccaacctctggtctagttcaacacttagcataagctactgctcatacctaccctattttggcctgtgttctggcactgattgattactaaaattggtttgccattctcaattctcttcacttgtactaactatcatttatgacttcagacctgctagttaacttctctgagatacaggtrcctcatttgcaaaaaggggacataatgcagttttcatcattaagcatcaagcgagtttacatatacgggtttagtaccccttagccccaaaaagcttgggaccagaagtgtttctaatttttttttttaattttggaatatgtgcatgtgcatgatgagatatttgggggataggacccaagcctcaacatgaagttcttttgtttcatatacaccttatgcacatagcttgaaggtaatttgatacaatagtctaactaattttgtgcatggaacaaagtgctgactgcagtttgactgcaactcatcacgtgaggtgaagtgtggaattctccacttggcagtactcaaaaagtttcagattttggagcattttggatttcagactggggatgctcaacctgtataaataaccttagcgtgttgtctggcagttagcagaacctttcttctttctacctcttccctaaagggtatgaccatttatccacggaaaaaaaaattgaatggcactgccgtgtagaagtaaatttgctgtcacttatcctgggtttaaatcactgttctgccacttactagctatgtgaccttgagcaagaggctttatctcattaaacctcctctaaaaccagagataataatagtatctatgtcctaagtacaactgtgact

SEQ ID NO: 85928 - DNA, 782 bp, Homo sapiens
gaaacagatgaaatgaaagctgtagtcacttccctttttgccttttaaaaaatatatgttcaggggaaaaaacacaygtcagaaatggagtcatttgaagctaagtgtcacccatctcggaataattgtccgccagcactagattttacaaagtgattggtggcacagagcactcttcctgatggacaacactggcccggcagtgtaggagggaacgcaggccactggcagagcagcagagtctggggtgggccgtggcctctcctctggccccagttcttcagtcgtgacacctggggatatgtcctttcatctcttgggctctctgcatccccaccttgaagggaggactggatggaatccaaagactgatcacaggcggctgtgtctgtgtttgcagttgttcctggcaggcagaccacactggatgtgtcttagtcgtaatctgggggcctgggcgtgatgagctcttgttccttctactgtgtaacttgcactagaacctaaggaggcctctcaaccagggtccttttttcagctgtcaccaagggtacaattaatggcacaaatcggttcttccctatgacgcactttgtgtgagatgcctggatagcaaaggcaacacttgcactgtgcgttttccctcctggattccaatagctttccagttagttcataggtttcaagggatttggatggtgcaaaatggaggccttttggaagaaattaaaaatgcgaagcctgataagcgtaaccaccattcttttttttggttttttttt

SEQ ID NO: 85929 - DNA, 602 bp, Homo sapiens
gcctgcctcagcctcccaaagtgctgggattacaggcgtgaaccaccacgtccggccgaatacaagtacttttaaattaactctcctcttctctccatcttcttctaaatcatcatttttgcctaagcaacagctagggtctaatacagatgtgacgactcacttcaaagtgggggaagcccccatgtgcacccaaacctcctgctgccttggcccagggttcagagactggaccatcattctggaggcttgctggagatctgagccagggcatcattctctgttgcctttaaacaaaggctggtgctcgcccaggctcgtgagctccaccgaggatctatttggaaggcagaattctgagatgaccccttaggttcttgccctggataaatgccaggtgtaatctcctctsccctggagtgtaggcaggacccgtggcttgcttctaatctatacctatggaaaagttgaagggattttgcagatgtaactaagcccctaatccattcactttgagttaatcaaaagagagattattcagggtgggcctgacatcttcaggtgagatcttcaatgagggtctggaggagagagactccttc

SEQ ID NO: 85930 - DNA, 585 bp, Homo sapiens
tgactagtaccagtccatcgcccaggggcaggggaccccagccatcggtgacaaaagacttcaataaaatccttagaagacaggaagaggacagatgggggtgactgacctaacaggacagaagaagttaaggccagtggcctgtatgaggcacagctgatgaaactggtttgtcttgctctgaagatcacctacagggttcaaagcttgaagccactatattctgtgagcagacagatgaggcaatgggctgcaaactgagtggattcaaattccrttcacccagctactcacatgggagtcaggaggttcacactcaggacagtttcagtcccaaggctctgagctcagggatagcagtcccagtatagaccaggagaagagaggatgggaaatgagggaagatccacacactgaatggcaggtcttcagcctctcatggactgctcccatgctcctttctggagaagccgaagagtacaaccatcacaagtccctcaggaagaaggctggctaactggtgagccttctgtgaagccagccttcaacaaacccagccttgtttgtttaggtttttctctaaaa

SEQ ID NO: 85931 - DNA, 962 bp, Homo sapiens
atacatagtgcacattcccattttaacagtggctcatttaggcagtgacttacaattgcagggaaaggggaccataccagattgtgggaattgggtaattaccatattctctctggaagaaatactgcctcagggatgaataacaaagtgatttgtgacttctaagcaaatttcctagtctgcatacgtttccttatctgcaagctggaagacattgagtataataaatagatgtccttttaatatcattttacttccttaaaaatggaagtagtagaattgcttaatggaagtttaggaatcctcacagataacatttacctgatttcacttattctccagctctgctctttgaaggtaaatacaggagttggttgtttttagcaatgttagggcaaaaagataaatgcttcgttttttaagacatgtgttatacattagttaacctctgccaggagagttgggttttttggtattgttttctgtgccgtctgccctctagagactattactggaaaatgtttaccgaagtattttgcactggcgatcattgtgtgagcctgagagggtatctggttgtgttgtgttctcttaccacctccaaaatattctgggaggcycagtgtggtgggtcatgactgtaatcccagcactttgggaggccgaagtgggaggatcacttgagctcaggaatttgagaccagcctgggcaacaatgtgtagtcccagctacttgggaggcttaggagggaggatcacttgtccctgggagatccaggtctgcagtgagctatgtttgcaccactgcactcaggcctgggcaacagagtgagaccctgtctcaaaacaaaacaacaaaatgtgtaggatatgttccattaggtaactggttaatagttcttatgtacaatttctattaggtggaattgcaggccatttttaaattggaatgttaacctgaa

SEQ ID NO: 85932 - DNA, 1236 bp, Homo sapiens
tgtgcatatagtttgtgtttacattggatgatatttttctcatgatttctcttattaaatatctactacaatttggaatgggttaattggataataatttatttcagaccacttgagtcacataagtgctgctaaggagactggctgcaggttctagacaagaatgggtttgtggagtgaggcagcagtggggtgtgtggagagctggggttgcatgcgacttgcgatttctctcatagatggggcgggggcagggatcaatcccgttagtgattacttttgctggaaggaataatgagtgtgttttccaaaacctggccctgatgttatcctgcttggaatgagttgtctatggttttgtcgtcagtgagaaggacattcaagtttgggggtttgtgatttgtctacactattgcaccgcaggaaaccttactaggattatagctgccacagtcccaccatcaatcaatcaatcaacacacaaataaatacatgcaagagtgactcagcatcagatttatttatttaaatccatataactagcttgactgctcattcatggaagaaataaataaattgaactcaagttaaatggctgtattgacaggatgacttcacccgtatgaccatccatctgaaaacctatttagggtgtgatggaactggttcatgatagtcacagctttttgttttataaacagtttgatgcacattgattggtgtactctgctttcagaggtaggccatggtgcagccacagagcgaaggccctcctggttttctgtgcaatagtacgtattttgtaccttcatccttctgtccataagaaggtgacatttttgggcagggtcctcagaaacagagcaagcccactattgggaaagtgtcagcatttctgagggaccagaggagtattattttattttgttttattttattttagagatggagccttggtctgtcacccaggctggagtgcagtggcatgatctcagctcactgcaacctccgcctcccggattctatcaattttcctgcctcagcctcctgatttgctgggactgcaggtgcatgccaccatgcccagctaatttgtttgtattttagtggagatggggtttcactgtattacccaggctggtctcaaactcctgagctcagacaattcacctgcctcggcctcccaaaatgctaggattccaggaaygagccaccatgcccagcccagaggagtat

SEQ ID NO: 85933 - DNA, 794 bp, Homo sapiens
tcctaaattccaattgcacgtgttgggctatttgatattatctctcatatgtcactaaggctctgctaatttcttttcagtgtttcgtcactctgtgactcagtttgaatggtttttattgatttgtcttcaagctcactgacattttcttctgccagtgtccaaactgctcttagatccatccagtgaattctttttattttttcttttcctttttttttttttttgtttgagacagagtytcgctctgtcatcaggctggagtgcagtggcgcaatcttggctcactgcaacctccacctccccgattcaagcaattctcctgcctcagcctcctgagtagctgggactacaggcgcatgccactacgccaggctaatttttgtatttttagtacagacggggttttgccatgttgatcaggctggtctcaaactcctgacctcaggtgatccgcctgcctcggcctcccaaagtgctgggattacaggcgtgagccattgcacctggccatccaaccagtgaattcctcatttgagataatatatattctagcttgggaattaccatttggttgtttcttaaattgccacttctctgctgaaattcctatttgtgcactcactatgtttgtatgggttggtatttatcgaccttttctctttgttattagtctcattgtcctgcctgtctagtgatttttttaattgtatgctggatattgcagataataatttgtttgaagagtgctgagttttattctggcagagagttagttgactggcatagcatct

SEQ ID NO: 85934 - DNA, 1201 bp, Homo sapiens
ttttacagagaatttctatctttccattaattccaagagtactcatttttacttcttagaatgtggcataatagttgctttaaagtctttgtctaataattctaacatttgaatcctctcagggttggcatttgttgattgcctttttcctcgagaattttttaggctttcctggttctttgtatgttggataattttggttcatatcctacagattttgaatattatgctgagacttggtccttctaaaattctcaaaaggttttgctgtgctcattctagtcagttttacgcatgtgcagctcagggatgagcccagaacttcatacacacatttaaaggatatctaactcagatgtctcctttctgtaatctccactcctcaaggttctatggctagaaagccaaggtttagcctctctgcactgtagcaccttcttgtgactgggaccacctcaggacagagtggcaagggaaaggagcctgcaggacccccaaccaccatacctgttgctgctgtctgtgctaatacgggggtatagcttcattwttgggtttctctgggggtaatgtctaaagagtcaaaagagctctgacccataggagctgctgtggggagaggcaggtactcacttggagtgctctaggctggtgcatacttggagcagggctggaagggctaaaggaccgttgccctgcagagggtactgctaccatcttcagcaggggtgaggggttggccacttcactgatgaccaaagattaggactgaaagaatcaagagttgtgcctcacaagggacattactgccactgccaccagggcaagtagtttcagcttgttgttggcatttgcctggcatagggatgagagaatagaaagaactccatcctgcagggatgctgccgccaagagggatttgctgcttagttgctggtgttcacttggagtagggccaaggctgtccaacaagctctgtcccataggggctggtggtgggggggtgcagtaggatctgggctaggaaagtcccaggagctctggcctgcaggggttgttgataccaccagtggcagagcgcagaggtgttacttcactgctcacacttgctatggagtcaacactcaggtcctgatctatctcctcaggctaccagctcctcctcttacctacctttcagagtcccctgatactcacttta

SEQ ID NO: 85935 - DNA, 672 bp, Homo sapiens
tatttcctacctccagtgtaaaaaaatgactctaggggaattgatgatatgggtctgtgttcgttagaaattcttgggctggaggggagatcgcttagtccatagcttcacagaaatatcaatatgatggctgttttctttctatccctctcaacctccccagcagagacagacagacagacagatgtgaggagcatacatagactaacgcacactccattcaggctttttctaaacttyggaatccagttctccagtctgttatctccctgatttccagaaatattaagcctaaagtagcagtacgagaaacaaaaaaaaaaaataataaagaagaaaaagccaatgtttctaggtatcaataagtcttttcaagtgaatatgtttctgattcaagttttcaggttgataggatcagatagagtctcaatgctcttaaatgctatttcacatggattgcttccaagccaaattctctcttcataattcccagtgttttaaattctgtaaccgtattaaagacagtattaagtaaaaaacaaatctccagtttccacagactgactctggaacaaccatttccattgatgttgtatcccttctagtctttgttctgtgtacataaatatttgtatataattataattttaatatgtatagatttcttacact

SEQ ID NO: 85936 - DNA, 1181 bp, Homo sapiens
tgagggccaggatgtactccacagcactaatggcaggtgcttcaggaaaggtgactgacttcaacaacggcacctacctggtcagcttcactctgttctgggagggccaggtttccctgtctctgctgctcatccaccccagtgaaggggtatcagctctctggagggcaaggaaccaaggatgtgataggatcatcttcactggcctgtttgccaacagaagctccaatgtcttcactgaatgtggcctgaccctaaacacaaatgctgaactgtgccagtacatggatgacagagaccaagaagccttctactgtgtgaggcctcaacatatgccctgtgaggccttgacccacatgaccactaggacaagaaatatttcctatcttagcaaggaagaatggaggcttttccacaggtaaagaggcttttaaatacaatagcagataaaaagaggtatccgaccaaactctgcctagtagttttgcctaatcaaacttttgtatcatgtcaattatgttgactaaattataattaggtcctcagagtcagttcagcttggagtgtgttcacagggatccatacaagtcacccctagaactatttgctgacaggagtataaccagtgaagcacttaatatagacctatagttctccatggtttgcaatacttccaggttcagtaattttttatagaccagtattttctataatgtgttccagggaatactaatcctatagagtattaatagatgctgtacaataaaaaagtggtgaatgatatcattgttcagtcgagctttaccccttacatccagtgaatcatcaagctctatacattatccctcccaactatctcctgaacccagccatttctgtctaccaccattgcctctatccttgtataacctgccatcatacctcagatccttgcaacaatccccagagctgatttctctgccctcagtcctgtttcttccaatctattctccacactgcacctagactaatgtttttgaaatgcagttatgtcttttactatttcctccttaaaagctttaagatgaccccacggctctaaaggtgaaatttaaactctttaatatktttacaaggactttcctcccttggcagcctcttgtctcacctttatgctgccttgccctctgtccgtcaatgga

SEQ ID NO: 85937 - DNA, 496 bp, Homo sapiens
ttgtgtggtgtctaatggttcaaaatgcttcatgttcaaacttctgagcttaaaaaaaatcctctattttttctactttctatatattttcttatcattagtattttaaactttctcatgctgaatcttrttggaagaaagttcatggaaatactatagagaaaaatgctcaattctttcaaaacataacttttaaggtattggtaaagaaattgtgtcttttggggaggccgaggcaggcagatcacgaggtcaggagttcgagaccagcctggccaacatggtgaaaccccgtctctactaaaaatacaaaaattagctgggcatggtggtgggtgcctgtaatcccagctacttgggaggctgaggcaggagaatcatctgaacccgggaggcggaggttgcagtgagctgagatcatgccattgtactccagcctgggcgacagggtgagactcacaaaaaaaaaaaaaaaaaaaaaagaaaagaaaaaaga

SEQ ID NO: 85938 - DNA, 793 bp, Homo sapiens
attcttcccagtggaatgtgaggggaagggtgcaccctctctccaggcctctatgcaatcttctgtatatcatctgtggaattctccatgctctcgctttctgcttcagacacctgacactgatgcccactcatggtcatattggaagccatctgctgaagatggcagagtctctgtcagcctaggaccctcattgatttcctcttccatctgccttcctcccacaggtggactgtctataagcaagaaacagatttcatttgtattatgtcatcgagattgcaggggttactattgaaacagctagcagtaccttaactaatacatgagggcaatgaaagaaatcaaagcctactacagcaatcaatcattcatgtcacaaatatttatggagcacctactatatccagggccctgtactaaggttgggggctagacagacatagtcgaacactcacagagcttacacagaagttccttaatttctaaatcatcttgttttcctaagagcacctattctgttgcatttcacctgacatctctgaagtaggaaagtaatttatgtgtattttacacatgaggaagctacagccgaagcagaatgtggcatttgggtaagccaaatccatcttcctgacagagcttcttatacagcatggtctggagaaccaccaagtaaagtagaactggcttcttgatatagtttagatatctgaagcccaaatctcgtgttgagttgtaatccccagtgctggaggtagggcctggtgggagrtgtttggatcatgggagt

SEQ ID NO: 85939 - DNA, 784 bp, Homo sapiens
aggatcctctccaacatatgttctaatctgactgcaatcaaaccagagggttttgtctacttacatttctgtaaatataaatatcaggcacacaaactaaacacaaaaatattcttcactctagtttcctcataactgcattttcaaagacaactatagaaggtacttgtgggtatgggtgtgctctatgaaatctgacccaccagacacataccttctactatctagctcaccaaatacacacatagcaaactctaatcctagttggtctttactaaatctagagagagttctrtctaagatgccctagaagcagaaaaagagaagagcccagaaggctttttccttttttttttttttttgagatggagtcttgtattgtcacccgggctggagtgcagtggcgtgacctcggctcactgcaacctctgcctccaagcgattctcctgcctcagcctcccaagtagttgggattataggttcctgccaccacgcccagctaatttttatatttttagtagagacagggttttgccatgttggccaggctagtctcgaattcctgacctgaggtgatccacctgcctccgcctccctaagtgttgggattataggtgtgagccaccacgcccagccctttttaagaaggtctttctactgccttgaaaaaaattcagattgctttaggaatcattactttctccaggcctacacctctcacagggaagaaaaaagtgcatgtctcctaagaagtgccagagcagttaactaaagcacttgctt

SEQ ID NO: 85940 - DNA, 784 bp, Homo sapiens
aggatcctctccaacatatgttctaatctgactgcaatcaaaccagagggttttgtctacttacatttctgtaaatataaatatcaggcacacaaactaaacacaaaaatattcttcactctagtttcctcataactgcattttcaaagacaactatagaaggtacttgtgggtatgggtgtgctctatgaaatctgacccaccagacacataccttctactatctagctcaccaaatacacacatagcaaactctaatcctagttggtctttactaaatctagagagagttctgtctaagatgccctagaagcagaaaaagagaagrgcccagaaggctttttccttttttttttttttttgagatggagtcttgtattgtcacccgggctggagtgcagtggcgtgacctcggctcactgcaacctctgcctccaagcgattctcctgcctcagcctcccaagtagttgggattataggttcctgccaccacgcccagctaatttttatatttttagtagagacagggttttgccatgttggccaggctagtctcgaattcctgacctgaggtgatccacctgcctccgcctccctaagtgttgggattataggtgtgagccaccacgcccagccctttttaagaaggtctttctactgccttgaaaaaaattcagattgctttaggaatcattactttctccaggcctacacctctcacagggaagaaaaaagtgcatgtctcctaagaagtgccagagcagttaactaaagcacttgctt

SEQ ID NO: 85941 - DNA, 993 bp, Homo sapiens
taataggaccatgaggatataaatgtgcatctgactgcatccctgccctcaaggagttgaagtgaacacaggtcaacagtataaaggataaacagtaccctgggagagatgcagcacagaaagcacaacagtcaggctcagaggcagcagaggttacttccaggtggggaaggtcaaagaagacctagtgaggctcccagctctggctcaacaagctcaatgcccagaggcctttcttacttctagggctgacgccctggagtggaggctgctggaatactccctagaaaagtgagcttttacagtattcactttggaatatacactgaaacatgggggcatccctaatgaaaattcacagcatttcgaagtactaaagtcacattgtgaatccctcatgttagaagtgccagctggctcagccccccttctctgaggcgggagagatgccttcccaggctaccaggctatgtcttggaagatcagaggtaatgggtgatggtatcaatagatgggcagaggaacaaaaaaggatgccagggagaaaatccaagaggaccctgggacctcagacaagccactcaccttctctgggcctcagtttccccagctgttaaatgaagaggtggaaaatctctaggattctccccagagtaatattccacagatgtagctgtagaacagctacagtatctgaccatcaytctgacacgcatttggtacctctgtgttttcctttttaattaataaatgtcttgaaaataagtatatctcacttgaaaattcatctctaggaaacatgaaatattacaaaatacggaataacttaaaagtaatcagcaactaaaaaggagcattcaagaaatcttttgagttatctggttgagggaaaataatgagtttaaccactggcttgagtaacatgtagtgaactggttgaggtatgtagttcaaattttgaaagagatgtaacattagaacaaagttaatgca

SEQ ID NO: 85942 - DNA, 902 bp, Homo sapiens
ttgtttcatatacattatatgtttgggatttaccagtggtaacacaggtagatctaagccacagtcattttaactggaacacagtatttaattgtataagtatatgtaaatcttagcgatgtgtctttgtgcacaggtatgwgcttttttctcctagggcacataccaaaaaaacaaaaaaagggggtgtgtagatttttgggtcatcagaaatgcacatcttcaactttactagacattgccaaattgccaatttatactcccaccactagtaaatgtgaatcctaatttctccaaaccttctgtactagaatgattaagaataattttctttttggaaatttgacttaagcatctcttctctggcttccatgtgctcagtctacatactgaaaataaagtggaaaattgtagccatcatcattctaatggaggtggaaactgcctagataattatctcttagctctgttaaccttgactttgtagatctggctaaagagatacctgtcgtcaaaataatagaaaaggttaggctatggtttgaaaaatttggctagctcttcctagtcagctggggtggagacatctgacaatttcccagatacttcaggccccaagcaacactttctcaaactgttcacaacaaacacagggctgaaatcttaatctcttcaatctcaatttgcgtagatatgaccaaactactgcaaaaaaaaaatttttaagtctcttgagtcataaaaattaaatagcatttatttggtacttaagagaatattgagcgtggtgaccactattatcttgtacttaggttaacacgagacactgcatctaagaatttataatagaaaaagtaaaaccaatattaactgaaattagtaggatcaaacctaaacatgca

SEQ ID NO: 85943 - DNA, 902 bp, Homo sapiens
ttgtttcatatacattatatgtttgggatttaccagtggtaacacaggtagatctaagccacagtcattttaactggaacacagtatttaattgtataagtatatgtaaatcttagcgatgtgtctttgtgcacaggtatgtgcttttttctcctagggcacataccaaaaaaacaaaaaaagggggtgtgtagatttttgggtcatcagaaatgcacatcttcaactttactagacattgccaaattgccaatttatactcccaccactagtaaatgtgaatcctaatttctccaaaccttctgtactagaatgattaagaataattttctttttggaaatytgacttaagcatctcttctctggcttccatgtgctcagtctacatactgaaaataaagtggaaaattgtagccatcatcattctaatggaggtggaaactgcctagataattatctcttagctctgttaaccttgactttgtagatctggctaaagagatacctgtcgtcaaaataatagaaaaggttaggctatggtttgaaaaatttggctagctcttcctagtcagctggggtggagacatctgacaatttcccagatacttcaggccccaagcaacactttctcaaactgttcacaacaaacacagggctgaaatcttaatctcttcaatctcaatttgcgtagatatgaccaaactactgcaaaaaaaaaatttttaagtctcttgagtcataaaaattaaatagcatttatttggtacttaagagaatattgagcgtggtgaccactattatcttgtacttaggttaacacgagacactgcatctaagaatttataatagaaaaagtaaaaccaatattaactgaaattagtaggatcaaacctaaacatgca

SEQ ID NO: 85944 - DNA, 902 bp, Homo sapiens
ttgtttcatatacattatatgtttgggatttaccagtggtaacacaggtagatctaagccacagtcattttaactggaacacagtatttaattgtataagtatatgtaaatcttagcgatgtgtctttgtgcacaggtatgtgcttttttctcctagggcacataccaaaaaaacaaaaaaagggggtgtgtagatttttgggtcatcagaaatgcacatcttcaactttactagacattgccaaattgccaatttatactcccaccactagtaaatgtgaatcctaatttctccaaaccttctgtactagaatgattaagaataattttctttttggaaatttgacttaagcatctcttctctggcttccatgtgctcagtctacatactgaaaataaagtggaaaattgtagccatcatcattctaatggaggtggaaactgcctagataattatctcttagctctgttaaccttgactttgtagatctggctaaagagatacctgtcgtcaaaataatagaaaaggttaggctatggtttgaaaaatttggctagctcttcctagtcagctggggtggaracatctgacaatttcccagatacttcaggccccaagcaacactttctcaaactgttcacaacaaacacagggctgaaatcttaatctcttcaatctcaatttgcgtagatatgaccaaactactgcaaaaaaaaaatttttaagtctcttgagtcataaaaattaaatagcatttatttggtacttaagagaatattgagcgtggtgaccactattatcttgtacttaggttaacacgagacactgcatctaagaatttataatagaaaaagtaaaaccaatattaactgaaattagtaggatcaaacctaaacatgca

SEQ ID NO: 85945 - DNA, 855 bp, Homo sapiens
aggctgggtggaccagcaaatgaactcaggagaactgttatggatcagaacaggggagagttgggaaactggtggttcccataatgacaaagagcaattgtaatttaaaaaaagggataaattagccaaaaattaaacatatattagcttttattttttactttgtaggctcaatgcatcaatatttgcatgtatatgagtatcacatatttttaaaaacttaaaaacttttaaaaactgagagaatatrttgatttattcattaaagtttcccttaaatgattgtcctcttacatcttaatttccgtgtccttcatctctaactatagttgattatcaaagagcacatgcttcatactctactgaaggaacaacacaagacagaagtagtggtatttagcattctttaacatttcattgttttgaattaatgttccattacctgagacatcttagcacacattttatacctgacctctatataatgaaacattcaattgtaatggaaatttcttcttctgcagactttacaaagaacatccacaccaaagctgaaccaaagacaaaattattacacgctggtatcctgaaaacatctactatatcataaggtagccatttccaatgaaaacatttgtcttgtcagagagcacctaataatacccagtaaagattatatgataagcaagtgtcctagttttccattcagaaagggaatttacatggaatagatttaatgttttagttatgattagacactttctttaatacttaaacttggcacacaatttctttatctaatctattttcattttaaaaatacatacacgaggtttcaatttcacacagtgagtg

SEQ ID NO: 85946 - DNA, 971 bp, Homo sapiens
gctgcctcactataaattactgggactagctttctgtgctagagttttatactgacaatagcttctagggttataacattttcattataactgctcatgttaactggcaagcattacatcattgacaaatctccaaatcacagtgactgctgagtgtatccattcaacaaaaatatcattgcatattgttttgaagaatagccttaagagcagaagtgtatctcatcttaccaaatgctttccccatctttaactagttattctttctgataaccttatgacagagtccactatgaacatgcccacttgaaaaaaggaagaagagagaggaaacattctacagaaagggctgtgtcagaggctacatgttgccagtgtcatgttctgttgggaacagctgcctttcaatgatttgcctctttcaatggtcaattatgttccagaatggctgatcagatcaataatagttcttaaattgctgaggaatmtgaggctgggttgacagttaagaacatcctctcctcctcatttcagtcaaatcaatcagccacaggcctcctacaaggtaacaaaattggcagggctgtgaggtctgatattccaattgtccttccagggaggaaaatcatccctggagtctcagagtcacagactcttatagtttaaaagaaatatccagtggttcttaaccatatcttggatcatggactcctgtgaatccaacacaagccatgtatggcatctctttccccaaaaatacacataaaatcttcctgtaattaaagctcattcatgaaactcacctttgctttttcagatgatgaaatacagactcaaaaaggtgaagttacatgcccaggttcacataacttccaaccagggcccccatcaaattctctattgatacctcttgagaggtctgaggtaataaggtcttctttatctgttctaggaaacagtactctggttct

SEQ ID NO: 85947 - DNA, 745 bp, Homo sapiens
gttaatattttcacgttgagcaggtattaacctgagtaaatcaccttgcagacattgatacccacaatcctaaagcattagatagggatataagtggtaccctgaaactgcttctgttgcccagtgtgggcgtctgacgtctttgttacctgggcagtgttaccagtctacgaaagtactcctgttggccagcatgacagtctgtgtatgtctcagggagttttggaggctggatccaaaagacttctgtgaaaagagtagcagccagcacattgttctcctttgcacctgtcccaattgccarctctcattctgtcacagaatgtaccagacactctttactgtccttcctccaagagaataagataaagccaagagcagctgactagttagtatataaagctgtagtagtatttgaaatattatataagggctgttttctgaggtgaacagttcagtcattgaagaaatctttttattgagctcctgcccaagcgccatgctgaggagacagcttctcctcccaaggagcttacaatctagtgggggatcaaatccagagtgatgggggcagttacttggtgggggcacacaggacactatgaaagcaagtagaggacccggcctgtgtttggttgtttagttcctcatctctgcttggaatgttgacatgtcgtttttcagacaacacatatgtgggtgtacttgggagcaaaagctcaaaaagcattttgaagatcctgct

SEQ ID NO: 85948 - DNA, 1201 bp, Homo sapiens
agcttttacttacttctaggcttggagatcacagtctcaggtgaagagttctagaacagtagcaccagcaacactgattctaggtttcctccagtcacttaacaatcttttctatccttacttcttaatacagaaatgcaaatattggggcactaaaaaaaatcctgaatttttggactaatttcaggagaactggaaaaaaaagtgttttgaaatctaaaagggattttagaaaatggtattacgtagtttgtcttcaaagatggcaagacagagcagcatttagagaaacatatcttctctacacatgaagagttgaggaagaagaaacctaaagaatacagtgagtggtggcagagtccaagagagaagagaacacagtgagattctgggatgcttcgtacagaagaaagtaagatacatggagatgctcacttttggtaacttctcagggaccttggaggaaaaccctaaaatgatcatggattatctcccactaaatttttagatcttttgaataaagtttgagacttatttggagtcactgttatgcacattccctattgttgtccttaaagtttcaatgaatgaggaagatcagatggatgaaagaatgaaaggaagacagaagaaagagaagaagggaaggatggagaaattggggaaagaaatgaagaaaactttgaagcttctacagagcactaaagctatgatgatccattttaagagaacttctcaaattagaaaagagagtgaaacaaattatctgcaaacatcgaatagagtgcaggggtagtaaaattccagttggagttcaggtgagcctggstttgctacttatcagctagtgatgctgaccagcttatttaacatcactaagcctaaatttccccatctataaatgggcatagggtctttattacaggattggtaagaaaattgaatggaattgtgtttgtcttgttttagtaaataaatcttatgctttatcttttaaacaccttattgaggtataatcaatacactggccattatattttaaaataacctttctttctccttctctctgtcttttcctctgaaatatctgtaatgtgtatgttggcgtgcttgttggcgccccacaattcccataggttttctttaagctttttaattattttttctttttattcttctgactgaataattttaagtgacg

SEQ ID NO: 85949 - DNA, 762 bp, Homo sapiens
accatcttgttttgttgcttgcctgagacacagacatgggctctgttactagttcctattaaatgtttcttcttgagaaactggatatgccagcctctttctttggcctctcagcttcattggacttctaaagtaggtttgcatagacctgctcaccatggaacagcatacaagtggtgctatcagagctcctttccttattctgtggaatacacatttgtatttcaagatgcagcacaaatatcaacttttaaggggaagattttctctacatttctcacctgcagtcctgccccactgcactgttatgtatttcttcttcattttatagatatgatggaccattaaggcatataagaaaaagagtgcagtgaggcacatttaraaagatagctggtaatggtgcagagagcatattaaaaagaaaaaatatgacaaccagaagattagttacaaagtatattagtcagaataggctaggctatgctgtggtaacaaataaaccctgacatttcagaagttgttcccatcatctctgacttatagaagacatttcctctccctttttgaagctgtagcatctggaacacattcaacctgaaagactgatggggcaggaagaaaataattgtggaggaagcacttctacttttaaatttctcaggctaggagagacacacactaattctattaaaagtccattggccagtattgttcagtacctctacactaaccacaagtgagtctgggaaatataaagaa

SEQ ID NO: 85950 - DNA, 762 bp, Homo sapiens
accatcttgttttgttgcttgcctgagacacagacatgggctctgttactagttcctattaaatgtttcttcttgagaaactggatatgccagcctctttctttggcctctcagcttcattggacttctaaagtaggtttgcatagacctgctcaccatggaacagcatacaagtggtgctatcagagctcctttccttattctgtggaatacacatttgtatttcaagatgcagcacaaatatcaacttttaaggggaagattttctctacatttctcacctgcagtcctgccccactgcactgttatgtatttcttcttcattttatagatatgatggaccattaaggcatataagaaaaagagtgcagtgaggcacatttagaaagatagctggtaatggtgcagagagcayattaaaaagaaaaaatatgacaaccagaagattagttacaaagtatattagtcagaataggctaggctatgctgtggtaacaaataaaccctgacatttcagaagttgttcccatcatctctgacttatagaagacatttcctctccctttttgaagctgtagcatctggaacacattcaacctgaaagactgatggggcaggaagaaaataattgtggaggaagcacttctacttttaaatttctcaggctaggagagacacacactaattctattaaaagtccattggccagtattgttcagtacctctacactaaccacaagtgagtctgggaaatataaagaa

SEQ ID NO: 85951 - DNA, 775 bp, Homo sapiens
ttcctttataaattaccccgtctcaggtatgtctttattaaagcagcatgagaacgaactaatacaattgtcctaagaagagctgcaacagagagattgggagtggtcatggagtaaggaaggaactagaataaatggttttatagaagccaaaggggaaagataagaaagatgtcaactgatgaatgcacgaaacatcttgtaccaagtccactgcttggagagacgactagaagccttgctagagctgtttcagtggaaagcagaggtagggaagtgtctamgccagagagcagtgaaatgatctgtgactatagcacatttttaataagtttagctgtgttgtacagaaagcagagataaaatttcctccataattttcccttattccataccattgtaaatctttttggaatacaagtgattcactttgtccagaagcaatggagtcagcaaaagaaaaacagtcatgtttagagcaaagaggtacgcagagcacatatgtctggttggataatgcacagatccatagggagccctaattcaataatatagctaatgctcaatgtccttctctttctttaaacaaagtaagaaatagatagactaatgtgttttttgtttccttattcacattccaagctggcaacatgtactttatactttttcctaccccaaatactaaactttctataaatgtccatttaaaagtcaatgaaggaaatgttcacaaataaatatggaaattgtcaagttttgattatgctacaaatca

SEQ ID NO: 85952 - DNA, 775 bp, Homo sapiens
ttcctttataaattaccccgtctcaggtatgtctttattaaagcagcatgagaacgaactaatacaattgtcctaagaagagctgcaacagagagattgggagtggtcatggagtaaggaaggaactagaataaatggttttatagaagccaaaggggaaagataagaaagatgtcaactgatgaatgcacgaaacatcttgtaccaagtccactgcttggagagacgactagaagccttgctagagctgtttcagtggaaagcagaggtagggaagtgtctacgccagagagcagtgaaatgatctgtgactatagcacatttttaataagtttagctgtgttgtacagaaagcagagataaaatttcctccataattttcccttattccataccattgtaaatctttttggaayacaagtgattcactttgtccagaagcaatggagtcagcaaaagaaaaacagtcatgtttagagcaaagaggtacgcagagcacatatgtctggttggataatgcacagatccatagggagccctaattcaataatatagctaatgctcaatgtccttctctttctttaaacaaagtaagaaatagatagactaatgtgttttttgtttccttattcacattccaagctggcaacatgtactttatactttttcctaccccaaatactaaactttctataaatgtccatttaaaagtcaatgaaggaaatgttcacaaataaatatggaaattgtcaagttttgattatgctacaaatca

SEQ ID NO: 85953 - DNA, 775 bp, Homo sapiens
ttcctttataaattaccccgtctcaggtatgtctttattaaagcagcatgagaacgaactaatacaattgtcctaagaagagctgcaacagagagattgggagtggtcatggagtaaggaaggaactagaataaatggttttatagaagccaaaggggaaagataagaaagatgtcaactgatgaatgcacgaaacatcttgtaccaagtccactgcttggagagacgactagaagccttgctagagctgtttcagtggaaagcagaggtagggaagtgtctacgccagagagcagtgaaatgatctgtgactatagcacatttttaataagtttagctgtgttgtacagaaagcagagataaaatttcctccataattttcccttattccataccattgtaaatctttttggaatacaagtgattcactttgtccagaagcaatggagtcagcaaaagaaaaacagtcatgtttagagcaaagaggtacgcagagcacatatgtctggttggataatgcacagrtccatagggagccctaattcaataatatagctaatgctcaatgtccttctctttctttaaacaaagtaagaaatagatagactaatgtgttttttgtttccttattcacattccaagctggcaacatgtactttatactttttcctaccccaaatactaaactttctataaatgtccatttaaaagtcaatgaaggaaatgttcacaaataaatatggaaattgtcaagttttgattatgctacaaatca

SEQ ID NO: 85954 - DNA, 775 bp, Homo sapiens
ttcctttataaattaccccgtctcaggtatgtctttattaaagcagcatgagaacgaactaatacaattgtcctaagaagagctgcaacagagagattgggagtggtcatggagtaaggaaggaactagaataaatggttttatagaagccaaaggggaaagataagaaagatgtcaactgatgaatgcacgaaacatcttgtaccaagtccactgcttggagagacgactagaagccttgctagagctgtttcagtggaaagcagaggtagggaagtgtctacgccagagagcagtgaaatgatctgtgactatagcacatttttaataagtttagctgtgttgtacagaaagcagagataaaatttcctccataattttcccttattccataccattgtaaatctttttggaatacaagtgattcactttgtccagaagcaatggagtcagcaaaagaaaaacagtcatgtttagagcaaagaggtacgcagagcacatatgtctggttggataatgcacagatccakagggagccctaattcaataatatagctaatgctcaatgtccttctctttctttaaacaaagtaagaaatagatagactaatgtgttttttgtttccttattcacattccaagctggcaacatgtactttatactttttcctaccccaaatactaaactttctataaatgtccatttaaaagtcaatgaaggaaatgttcacaaataaatatggaaattgtcaagttttgattatgctacaaatca

SEQ ID NO: 85955 - DNA, 775 bp, Homo sapiens
ttcctttataaattaccccgtctcaggtatgtctttattaaagcagcatgagaacgaactaatacaattgtcctaagaagagctgcaacagagagattgggagtggtcatggagtaaggaaggaactagaataaatggttttatagaagccaaaggggaaagataagaaagatgtcaactgatgaatgcacgaaacatcttgtaccaagtccactgcttggagagacgactagaagccttgctagagctgtttcagtggaaagcagaggtagggaagtgtctacgccagagagcagtgaaatgatctgtgactatagcacatttttaataagtttagctgtgttgtacagaaagcagagataaaatttcctccataattttcccttattccataccattgtaaatctttttggaatacaagtgattcactttgtccagaagcaatggagtcagcaaaagaaaaacagtcatgtttagagcaaagaggtacgcagagcacatatgtctggttggataatgcacagatccatagggagccctaattcaataatatagctaatgctcaatgtccttctctttctttaaacaaagtaagaaatagatagactaatgtgttttttgtttccttattcacattccaagctggcaacatgtactttatactttttcctaccccaaatactaaactttctataaatgtccatttaaaagtcaatgaaggaaatgttcacaaataaatatggaaattgtcaagttttgattatgcyacaaatca

SEQ ID NO: 85956 - DNA, 529 bp, Homo sapiens
tatgcatgccatttgtttttcaaagattaaccacatacatttacttakttgatcaaagcaccttcccttgcctgaaaattcggttcaatttaccttgagaatatttggtctcaggcagtcacaactggccacagtaggaatggcttttaaacagcagtgagcaccctgtcaggaatataacaaagtttagcaggtgttgctttggttttctggaactgtaaataaattccagagatattcatacttacacatgctgagggcttggcgaaactgtgttcaaaaatcacacaccacttaataaatgggttcataatttctttcagctaaagacactgtggatggatatgcaatgtctgattaaaaataaggaatagggattaattttgattatttggaaagaatgtggctgcatatcaaataacgtctttaatctgactttttaaaaaactggctgaaaaatcactgaaaagcatggaacccagtggaaaattggatcagatgtgctatatttatagccacacaaataaac

SEQ ID NO: 85957 - DNA, 539 bp, Homo sapiens
  misc_feature (1)...(539): n = A,T,C or G
acatattataataattctatgaatatacgaactccatcatacagataaaaacctgaggctgaaagaacttgagcaaatgaaaagtggtagaaccaagatctctgtttgggtctggtgagtccaggtccatttcttaccctatatyaggctgcctgatctctaaatccctagtgaaatgagtacagaatgtgtagtaagtgtattttaaacatttcaatgctttccttgaagtcttttangcatcctataagatcatcttaatgcgattcatgttgtggactgctgtggcaacaactaacaggaaagtaaaaactactgcaatgtggaaaagttgtatgcggtgtgtgaaaataaaaagtgtgtattcatgacaagataccaattacactgaaactagttgaattttttaagtagatttttaaatttgaggactggcagagaccttttacatcttgtgtgcattttacaggtaaagcaaatagaagcctgaaaagagaattgatttgcattaggctccccagaggagtagtcccagaatt

SEQ ID NO: 85958 - DNA, 539 bp, Homo sapiens
  misc_feature (1)...(539): n = A,T,C or G
acatattataataattctatgaatatacgaactccatcatacagataaaaacctgaggctgaaagaacttgagcaaatgaaaagtggtagaaccaagatctctgtttgggtctggtgagtccaggtccatttcttaccctatattaggctgcctgatctctaaatccctagtgaaatgagtacagaatgtgtagtaagtgtattttaaacatttcaatgctttccttgaagtcttttangcatcctataagatcatcttaatgcgattcatgttgtggactgctgtggcaacaactaacaggaaagtaaaaactactgcaatgtggaaaagttgtatgcggtgtgtgaaaataaaaagtgygtattcatgacaagataccaattacactgaaactagttgaattttttaagtagatttttaaatttgaggactggcagagaccttttacatcttgtgtgcattttacaggtaaagcaaatagaagcctgaaaagagaattgatttgcattaggctccccagaggagtagtcccagaatt

SEQ ID NO: 85959 - DNA, 1172 bp, Homo sapiens
acacatatccatccactcaccacttacttagtgctaagtatgtccttgagaataagctggatgctggggatacaaaaagtgagacagacatgatatctaaaagacgcttataaaccagtagtcagaaaataatatgttgcagatactaagaaagggcatattgaaaggaaagagtggttaactatcacaaagtagctcttagagcaggtagtgattaagttgcgtctccaaagataataaggattactttaagcatactaagtcaagaatgaggactggaacagaatgatgaggcaaatcctggaagaggatgcactatggtaaagacatgaagaactgagacagccaggtgtgacaagatagtatgtcatgactggtgtccagggtgagagggagcagggggaatggacatagataaggccaggagatttaacaggagtcttaccggaaggggatgtgtatgtcatgctgataacatggacacttttgcctacagtattaggaaaccataggctgattttaaattggagaacttcatatgcaaatttcaaaatgtcattccatggttgtggaaaatgaattagaggggacactaataagacagggaatcattttatgactttgaaagttgctgcagtgattctggcgacatctcgtttcttgaaataatgacctctgttctcaacatgactacaaatgcaacataaactttcattaatttttaagcaataaaatcacactgttcactaataggaaagcaaaaatcaactcacactctagctattttttcatatgattagcaaatttaaaactcacgattctgtccaaatggaattatttagcaatctaaatatctagatttacatacagcattatcttctaacttaagtctatttttcctaccatcaagaaatgtttttcttaattgtccctaaatttgaaattattcaaatttttcaatgatttaatctatcactttaaatattattattttamtgttaacttagcacttattaaccttctacaaaaatataaactgagtgaggggagctgttattacccaaattcatgcaactaaatgtggcagaagaaaaccagaaaaccagactgacccagtctctgcatgccttcaactacgtgacagcttttagtcagtgagtattcccacacag

SEQ ID NO: 85960 - DNA, 1203 bp, Homo sapiens
ggaaaacagtgaagtacaggtggcatatcgaatgacatagttcatatctctaatgtcttctccctaaagaattaatgatatatttgacagtgacaatgagtggctatygtattaattccttcctgataatacctatattctcttcttctatcattagtcttcattattcatctttcttcctctgtttccaccaatctctctcagaataggcagttaattgttttagggcatttttagtagctggttatttgtaatctgcggttgttcaatgagaaactttaaatttataggtcttatctcctcttcatacagcttcagctaatgttgtttctaattgcccactggtacagaatgtaacgcaaaatcttatattggttcactcttctccattttattctataaaaaattgctacaaatggcttttaccagaaatgcccctaaatattaagataaaaatgccgatatatacaaatgaatagttgttaccttaagagaacagcttgtatactaacttgaaattatctcttcctatgcaaaggcttttcctctgcatcatcctatgtaacattatcaactcgcacacctgtatgtagtcacctgtttcatgaccatttgaactatgtcacttcaatttcaaaatcttaaactcagtagaaacaaaatgaaatgttaaatccattcccttcaaacctcctcatatctcggactttttcttgccacttaacaaccttcagatcacattgtcaattagaaatcctaaggctcacctcatttcttgttttacagtaagcatggttttcaaaacaaacgcaaattctgtgaccttttagatacttgtaccacctcttcttccactacactagccaccccctccatcaggccactcccgtattcctcctaatagctctcatgacctttctaaagcatcacataggcaagttcttagcaaggcacatcagatgacactgccatcatttaaaaattctggagcaattttctattgcaattgtttataccatgctaaataacgacttatgattacctctcttatatcttctgtaatggaatattttctttctctcaaacagggaatgcttgtccaattctcagagctttgcacaagctggatctattgtttggaactctttttacccagatctcatacatagcttattttcattattcaggtcacaaatcaaatga

SEQ ID NO: 85961 - DNA, 1835 bp, Homo sapiens
cctaatgcacaattccagaaatatgtacaatgtttaggtaagttgtcaaaaagcacagaaagtggtaagaattgccataattggctttcttctcctaagcatcgtgatagcagcattttttgaacctaaggaaacatataaaagccaaacaagtgttaacaataatttgggctaaatgtacagagtttattttacttacattgtgtgctacgttgctggttcagactccagaaggtttgctgtcattgttaacaagaaaaaaaaaaaagttaatgagccaataaattcattcagttaattcgcgcgcgcgcgcgcgtgtgtgtgtgtgtgtgtgtgtagcagtattagaagtgcactaagtatctaatttcattcaaggatttatcatttatcaagtctacatggtttatatggatgtttagaaagaattctctgactattcatctagaatcaatcattgcaactaagttggaaaaggcaagattctagcctgtaattcattagcttaaatagcaccttaatattgtttgttttattctgattgtattctatattgctcattttatcagaaatttagtatattcaagtaatcatagacaaaattctgttaataaatttatttggctcactgtatatttttctgttcaaattttatatataaaaacaatgttaatatgtcattgtcaaaataagtttttttctttgcataatgtacattatgacaagttcagaatcatttccattattttaattgacatttaaatacaatttaataacatggatatttataagaacttctaaaagttaaagaataaatcaaagttataagacagtaattagcatttcaaaatgcttatatgaatggtgataaaattatctttaatatcttaaaatatgttaatgcatatttttggggaaaaccagatgaacagcaaaaaatatcatctcattcaaagcttcccttgaagactatctggacaaaccaagtggagtgaagagtaaattaggttttgagtatattaaattccgattgcttgaaacgaaaattaaattttttttttattttgaagaaaaggacttctggtagatttaagcgtaggaattcatatgaagacgtatctctcagaccccagaatataaattacttaatccttgacacataaataattactgatactaggctcttctaacagactaggtaattaaagtaaaatattaggttttcctaaattatctctactctgcctatggataactaaaccgttctggttttacataggctttgaaagaataattagaggagtaacccagtagaaaaagtaaaggagagtccagagaagtggcaaggagaagtttgggygcctctgactaatcaaagtggggtctggagtgcagggaaatcatcaaagcttgatgtccagccaagtcttctaataaattgtccataattcagactataatatcattgagattaaggtgatattaaagtggtttaaagcaaaagtctctgtaatatttgaatatttgtcttgcaaagccatcaccacctccgtaactgccataaccaaccagcacaatgatactaccactaataaatctgttattattattaatgtctttatagcactatataactctgtcaaatatcttcctatacacttggtgaaaacacatgacttacattctattattataccctgtttatgttgaagaaatagaagcaaaagatgtaaagtactttgattaaagttgcgctaatcagtgatggtatgaagagttggaacaaagcacagaatagctctagagtctatgttcatagacatcatgctttccta

SEQ ID NO: 85962 - DNA, 359 bp, Homo sapiens
cagtaaatagcatactaaacatagctgaggagagaattagagaacttgaagataggtccatagagatttcccagaatacaacacagagaaacaatatataaaatgtgaaagagacgttaagagatgcagaagataaaacaagaagtttcaatagcaaatcagggtccaggaggaaggaatagagaaaatgggagagagaacaaattaaagatttctttctagaacaatgaaaaatgagtacattgacgcagtaagcatcccatgacagtctccagaaaatacaaagacagtaaatccaactgtaggcatattgaaagtawcatgctgaacaccaaaaacaaacagaatctcttaaaggc

SEQ ID NO: 85963 - DNA, 706 bp, Homo sapiens
ctagagcccaggagttcgaggccagcctgggcaacatggtgaaaccccatctctataaaaagtacaaaaattagctgggcgtagtggcatgtgcctatagtcccagctactcaggaggctgaggtgagaggatcacttgagtctgggaggttaaggctgcagtgagccgagattgagccactgcattccagcctagggcacagagtgagaccctgtctcaggaaaaaaaaaaaaaaaaaaaaggaaaaaaataatctaatttgaacctttcacatttttacatgaaactggggcatagagcactagtatgacttacccaggggctgggactctgagagcattttctactttgctgccattggataacttgaatcaaacttcaaggactgaataattgaatgaattaatgaacaaaggacaatgacgggaggcatacaattgatagagccctaaaccaacagttaggaaattgggctctaggcttgttctgtcttttttgacccatatggccttgaacatgttgcttaactctttctgattcagtttctccatttccataatgggagtcrtagtgaatttcctgccctagagagtttgttgcaaaaatcaaatgaagtaatacacgttaaaattactttgcaaattgcagaaaattttataacgtaaatcatttaaaatccatgtgcatttaaaagtacatacagtt

SEQ ID NO: 85964 - DNA, 664 bp, Homo sapiens
tggggattttgactcctaaccaccattccatgctgcttctttaagaaragaatataaagctgaccttcacatctttgacatcatggtccatattgataagcatagtaactcctttgtgcaaagaaagctgaagataaaatattttaaaaaataaaaactaaatcaaaatggtttgaatcagtcatttttttcaaatctcagattcaagccacagccccttttacatccaacggaaagttttagtttaaaggggaaaatttgcaggaaaaagcctaattcttcccagttcagatttcaaacagtctctcttctaacctagtgtatctttaggtcccctcttgcctagcaggattgtagggagtgctgtttttgaagttccatcaatctattaaacattagacagaaggttttaggaaacaggccatgtgtattgtgacgtacagtcctggaaagaaaaatgatcaatctgtgtatttgccttttaactagttgtagacaagttggccacatccttggcacattaatgaattctgtcatgtctcatctccactgctctcttattatatgaattcagttctccgtttggcaataaaaataaagtcgctgatttaagtttctactttcaagctagggctcatggtccttaataatcaagagactggat

SEQ ID NO: 85965 - DNA, 664 bp, Homo sapiens
tggggattttgactcctaaccaccattccatgctgcttctttaagaagagaatataaagctgaccttcacatctttgacatcatggtccatattgataagcatagtaactcctttgtgcaaagaaagctgaagataaaatattttaaaaaataaaaactaaatcaaaatggtttgaatcagtcatttttttmaaatctcagattcaagccacagccccttttacatccaacggaaagttttagtttaaaggggaaaatttgcaggaaaaagcctaattcttcccagttcagatttcaaacagtctctcttctaacctagtgtatctttaggtcccctcttgcctagcaggattgtagggagtgctgtttttgaagttccatcaatctattaaacattagacagaaggttttaggaaacaggccatgtgtattgtgacgtacagtcctggaaagaaaaatgatcaatctgtgtatttgccttttaactagttgtagacaagttggccacatccttggcacattaatgaattctgtcatgtctcatctccactgctctcttattatatgaattcagttctccgtttggcaataaaaataaagtcgctgatttaagtttctactttcaagctagggctcatggtccttaataatcaagagactggat

SEQ ID NO: 85966 - DNA, 664 bp, Homo sapiens
tggggattttgactcctaaccaccattccatgctgcttctttaagaagagaatataaagctgaccttcacatctttgacatcatggtccatattgataagcatagtaactcctttgtgcaaagaaagctgaagataaaatattttaaaaaataaaaactaaatcaaaatggtttgaatcagtcatttttttcaaatctcagattcaagccacagccccttttacatccaacggaaagttttagtttaaaggggaaaatttgcaggaaaaagcctaattcttcccagttcagatttcaaacagtctctcttctaacctagtgtatctttaggtcccctcttgcctagcaggattgtagggagtgctgtttttgaagttccatcaatctattaaacattagacagaaggttttaggaaacaggccatgtgtattgtgacgtacagtcctggaaagaaaaatgatcaatctgtgtatttgccttttaactagttgtagacaagttggccacatccttggcacattaatgaattctgtcatgtctcatctccactgctctcttattatatgaattcagttctccgtttggcaataaaaataaagtcgctgatttaagtttctactttcaagctagggctcakggtccttaataatcaagagactggat

SEQ ID NO: 85967 - DNA, 1094 bp, Homo sapiens
gatagaaactctcctgtcacatgggccgtgaacataaaactgctccaaataatatctatttttgaaaagtacattaagtgggataatagaaaatatcatctaaagaaatgttatcaaaccaaaggaaaagtccgtatttatccataacttatgaaagataaaaaaagactgtggttgcttgacttacatgttaaaaataaatatggatattttatagccaacctttaagtgctatagtcttaagagcaattattcacttcttccagagattactgaagatgaaatgagcacacatccctcgacctttggccaaaccttggtcagagacctttggcattggagttggcagagtgatatagagagaaaaaaagtttaatgtatctaacagttctctactttattagcgattgaaaatttttttaatttggagaaactgatgccttggaaaaacaatcattaggttttctaggtatacaaaaacaaagcaaacagaaatrgaaatatttcagaacactgcatggttatataaattactgctttagtgatgaagaaaacaaaaccaaaattatcaccaataccacacaaaagcacatgcatgcatgtattcaggcacatgaacacatgaacacacacaagtatgaggcacacagtatgaagaccggcaagtcttatttcaataaattagagtacacttgagatagatggatcaaaactgaagagcaaggaggttaatagagtcgacacttcagcattggttcttcatccaatttttttacttctgaagaatcaaggtctggaagcccagtgacatcttgtgagaagctagtaataagaaggtgcctgggtgataatatgttcctgtagtaagggaagtgactagcttgcctggctctttatatactctagttctttaatgacacccagaaggctgtatgaacatttggattgtaatttttgaatggcctttactttctcatgatggtgacttttgaaagtctgtagtggttacaagtttcttgaagaagactcaggaacaggggatattaacatgtgacagccagaaagagaaaaaaaaatactggactggttattaa

SEQ ID NO: 85968 - DNA, 799 bp, Homo sapiens
gcattctaaagtacttagaatcctcaaactaattccaatttgtaaatctttatccaygtgtcaccttctgagaactgaccaacatgtaggtaaattaatagaggtttgattgatctataacttaattattcaataaatttctattaatcttctttaggttctgggaagtcctgaactgtaccaattcttccatgaactagtcatatgcctctgggaattcaagcccttcaagtgaattgagggacagttctttccagtaatatctgtggttggggtgtgggttggaggtgtagggagacaaaaaatagataagttaagcctcaaagggatctttcagagaaacactcattttattggcttagttaatatatattttaaagaggccaaatttgattcagtgtttttcttgaagatctcagcataacaataagagaaagcagcagatcattgaatgttttattattttcccttattttctaaggctattttattagttagagttattcagaaaaacagaatttatgagagagaaagaaaggtatttaaggaattggctaagtccaacaaccatagagcaatgttgtcctgactccatagtcaagacacagctcaacataaaatttcttaaaacatcatatacactttcaatttgttccaatcatggggcattttctattgcatccctcatgggtttttctatttctaaattttaaattctctgaagagtaaaatttttgattcagaaacatatattatttttgtttttgttgtttttgccttctcaccacttttgatgtaa

SEQ ID NO: 85969 - DNA, 799 bp, Homo sapiens
gcattctaaagtacttagaatcctcaaactaattccaatttgtaaatctttatccatgtgtcaccttctgagaactgaccaacatgtaggtaaattaatagaggtttgattgatctataacttaattattcartaaatttctattaatcttctttaggttctgggaagtcctgaactgtaccaattcttccatgaactagtcatatgcctctgggaattcaagcccttcaagtgaattgagggacagttctttccagtaatatctgtggttggggtgtgggttggaggtgtagggagacaaaaaatagataagttaagcctcaaagggatctttcagagaaacactcattttattggcttagttaatatatattttaaagaggccaaatttgattcagtgtttttcttgaagatctcagcataacaataagagaaagcagcagatcattgaatgttttattattttcccttattttctaaggctattttattagttagagttattcagaaaaacagaatttatgagagagaaagaaaggtatttaaggaattggctaagtccaacaaccatagagcaatgttgtcctgactccatagtcaagacacagctcaacataaaatttcttaaaacatcatatacactttcaatttgttccaatcatggggcattttctattgcatccctcatgggtttttctatttctaaattttaaattctctgaagagtaaaatttttgattcagaaacatatattatttttgtttttgttgtttttgccttctcaccacttttgatgtaa

SEQ ID NO: 85970 - DNA, 799 bp, Homo sapiens
gcattctaaagtacttagaatcctcaaactaattccaatttgtaaatctttatccatgtgtcaccttctgagaactgaccaacatgtaggtaaattaatagaggtttgattgatctataacttaattattcaataaatttctattaatcttctttaggttctgggaagtcctgaactgtaccaattcttccatgaactagtcatatgcctctgggaaytcaagcccttcaagtgaattgagggacagttctttccagtaatatctgtggttggggtgtgggttggaggtgtagggagacaaaaaatagataagttaagcctcaaagggatctttcagagaaacactcattttattggcttagttaatatatattttaaagaggccaaatttgattcagtgtttttcttgaagatctcagcataacaataagagaaagcagcagatcattgaatgttttattattttcccttattttctaaggctattttattagttagagttattcagaaaaacagaatttatgagagagaaagaaaggtatttaaggaattggctaagtccaacaaccatagagcaatgttgtcctgactccatagtcaagacacagctcaacataaaatttcttaaaacatcatatacactttcaatttgttccaatcatggggcattttctattgcatccctcatgggtttttctatttctaaattttaaattctctgaagagtaaaatttttgattcagaaacatatattatttttgtttttgttgtttttgccttctcaccacttttgatgtaa

SEQ ID NO: 85971 - DNA, 1006 bp, Homo sapiens
ctttgtttttaaaaacacgctaaggagtactaaaagaaaccatagcgttggattcaaaactgaaataggtcaactttgcttttataatcacagacaatgcaatttaacatcatcaataacaacatgctttttgccttttctttctacacttttggctacatatactttgaatgtatctgcatatgccaacaattttataatattatttttaaaacagaggctagaaaataatacatatttcttctagtgcaattgaaatttgtttgtaaataattattattcatactttagaaaagtttttttttaactttaaaactcattactgtaaatcttaagcaacttgttaagattgtggtaaaattttagaaaacctttattgttatttttcatatatgtatgaacaacactgtgcatttcaaaacttttggcatagtaacttaaatgcttttggcattggcaactgtctttaatccttaaattaagtttgttcttgaattttcattacaggatgaactactatgattttatattatgctcatggaggttagtatcttggatcaaatcactaagaaacaaatactttctaatgctcacatatgatacaatttcttatgaaaatacatgtcttgcctttagcaaatgtttgcttttggtatgatataaaagttactttattataattaacttccaaaagtcaaagtaattcctatttaggttattgttaattttatcacttcatttcatattttccattacattttacttattttttgtcagttagttctttaataaataaatgtaaaagtgaatgagtaggctaccattcatataaatacaagtcagaattcttcaatgtctttcattttattgaaataggctaaatgtcttgccaaattgttcttaaaattttttgaactcagagtcttgamtgttttgcatttcatttaaatttaagtttctcatccaatctttaaaaatatagcttagagcctttaaaatgttgctt

SEQ ID NO: 85972 - DNA, 2315 bp, Homo sapiens
tcaagcctacaactaaatcataaacaagtatgttatttctcaacatgttctgatgtgaactgttccaaccaatctctaaccccaaatattgcctatcttaccttctgtcaccttgtaaatccttttttgacaaaattaaccaaagagaaatagtttaatgcatatcctttgtcataggttcttaaatatccaaggattttttttttttttttttttggagtctcgctgtgtcacccaggttggagtgcagcagcgcaatcttggctcactgtaatctccacctcccaggttcaagtgattcttgtgcctcagcgttagcctcccaagtagctgggactataggtgtgcaccaccaacccagctaatttttgtatttttagtagagatgggttttcaccatgttggctaggctggtctcaactcctggcctcaagggagccacccacctcggcctcccaaagtgctgggattacaggtgtgagccatcatgcccagccataaaatccaaggatctttaagtccacttctaaataacttttctatgcctaaaagtttgaactgacgttaggggagtcactcttaactagctgtcatatgatcgctctacaagccagatgggacacaaagcctggatcattcttttccttttcctggatcattactttttcctttgggcaggggagtgggcggcagggggtgggggggaagcatgcaagttgcttctccataaacagtgtatcacactcacaatatgtcctctgaaaatattatctttcctatctgtaactctgcaaataatagcagtgatgtggagggtgggaatgtttaatggtattttgcaggaagtgttacggtgctatgcaacagagatattttcagctctggctcaatggtgaaagatgtgactttccagggtaacagaggtttacaagtcctaccacataccaaaagttggttacagcagaaagagtacagccaccaaaaagaacacatatataaaatacttctgtgtgggcaaggggaggcatgacataatcatttctgttaattaatataccagccagctaagattttacagaacatatgaactagtaagactgtattctacagaaatacaggccaggtgaggcagctcacgtctgtaatctcagcactttgggagtctaaggtggggtgaattgcttgaggtcaggagtttgagaccagcctcggcaacatagggagaccctgtctctacaaaaaatttaaaaattaggtgggcatggtgatgcatgcctgtggtcccagccagctacttggaaggctgaggctggagcatcacttgagcctaagaggtggtgactgtaccactgcactccagcctgagtgacagagtaaggccctgacttaaatttaaataaggaggaaaagaaacacagtaacaactacccaaaacaagaagtgacattcctcagtaggatccaaacacattggtaaagttaataaatcattattcatgatttagttttaaaaatacagttaaaggctgggcatggtggctcacgcctgtaatcccagcactttgggaggacgaggccagcagatcacgaggtcaggagttccaggccagcctgaccaacatggtgaaaccccatctctactaaaaatacaaaaatcagctgggcgtggtggcgtgtgcctgtaatcccagctactcaggaggctgaggcaggagaatggcttgaacccgggacggggaggttgcagtgagctaagatcacgccactgcactccagcctgggcgacagagcgaaactccgtctcaaaaataaataaataaataaataaataaataaataaacaaayaaacaaacagttagaaactatcctctttatttttaaagtatgagtgtaataattctcaaaaatcatttatgttcttaggctcatcaactcttaataaaattacccaagattttggtaggcaaaaacaaggaaataacactccccaaaacttctgcattacagaatttgtttcttatgttcaggtttgctaagcattaagcttaaatatcttacacagtcatgtagctgcctgatgaggtttcagtcaatgattgactgcattatatgacagtggtcccataacagctgaaaaattcctatcacttagtgctttgtgttacaaatacctactgtattcaacacagtaacatgctgtacaggtttatagcctaagagcaataggctatatcacatagattactatgtagttgactatactatctaggtttgtgtaagtactgtacactctatgatgtttgcacaatgacaaa

SEQ ID NO: 85973 - DNA, 2315 bp, Homo sapiens
tcaagcctacaactaaatcataaacaagtatgttatttctcaacatgttctgatgtgaactgttccaaccaatctctaaccccaaatattgcctatcttaccttctgtcaccttgtaaatccttttttgacaaaattaaccaaagagaaatagtttaatgcatatcctttgtcataggttcttaaatatccaaggattttttttttttttttttttggagtctcgctgtgtcacccaggttggagtgcagcagcgcaatcttggctcactgtaatctccacctcccaggttcaagtgattcttgtgcctcagcgttagcctcccaagtagctgggactataggtgtgcaccaccaacccagctaatttttgtatttttagtagagatgggttttcaccatgttggctaggctggtctcaactcctggcctcaagggagccacccacctcggcctcccaaagtgctgggattacaggtgtgagccatcatgcccagccataaaatccaaggatctttaagtccacttctaaataacttttctatgcctaaaagtttgaactgacgttaggggagtcactcttaactagctgtcatatgatcgctctacaagccagatgggacacaaagcctggatcattcttttccttttcctggatcattactttttcctttgggcaggggagtgggcggcagggggtgggggggaagcatgcaagttgcttctccataaacagtgtatcacactcacaatatgtcctctgaaaatattatctttcctatctgtaactctgcaaataatagcagtgatgtggagggtgggaatgtttaatggtattttgcaggaagtgttacggtgctatgcaacagagatattttcagctctggctcaatggtgaaagatgtgactttccagggtaacagaggtttacaagtcctaccacataccaaaagttggttacagcagaaagagtacagccaccaaaaagaacacatatataaaatacttctgtgtgggcaaggggaggcatgacataatcatttctgttaattaatataccagccagctaagattttacagaacatatgaactagtaagactgtattctacagaaatacaggccaggtgaggcagctcacgtctgtaatctcagcactttgggagtctaaggtggggtgaattgcttgaggtcaggagtttgagaccagcctcggcaacatagggagaccctgtctctacaaaaaatttaaaaattaggtgggcatggtgatgcatgcctgtggtcccagccagctacttggaaggctgaggctggagcatcacttgagcctaagaggtggtgactgtaccactgcactccagcctgagtgacagagtaaggccctgacttaaatttaaataaggaggaaaagaaacacagtaacaactacccaaaacaagaagtgacattcctcagtaggatccaaacacattggtaaagttaataaatcattattcatgatttagttttaaaaatacagttaaaggctgggcatggtggctcacgcctgtaatcccagcactttgggaggacgaggccagcagatcacgaggtcaggagttccaggccagcctgaccaacatggtgaaaccccatctctactaaaaatacaaaaatcagctgggcgtggtggcgtgtgcctgtaatcccagctactcaggaggctgaggcaggagaatggcttgaacccgggacggggaggttgcagtgagctaagatcacgccactgcactccagcctgggcgacagagcgaaactccgtctcaaaaataaataaataaataaataaataaataaataaacaaacaaayaaacagttagaaactatcctctttatttttaaagtatgagtgtaataattctcaaaaatcatttatgttcttaggctcatcaactcttaataaaattacccaagattttggtaggcaaaaacaaggaaataacactccccaaaacttctgcattacagaatttgtttcttatgttcaggtttgctaagcattaagcttaaatatcttacacagtcatgtagctgcctgatgaggtttcagtcaatgattgactgcattatatgacagtggtcccataacagctgaaaaattcctatcacttagtgctttgtgttacaaatacctactgtattcaacacagtaacatgctgtacaggtttatagcctaagagcaataggctatatcacatagattactatgtagttgactatactatctaggtttgtgtaagtactgtacactctatgatgtttgcacaatgacaaa

SEQ ID NO: 85974 - DNA, 2315 bp, Homo sapiens
tcaagcctacaactaaatcataaacaagtatgttatttctcaacatgttctgatgtgaactgttccaaccaatctctaaccccaaatattgcctatcttaccttctgtcaccttgtaaatccttttttgacaaaattaaccaaagagaaatagtttaatgcatatcctttgtcataggttcttaaatatccaaggattttttttttttttttttttggagtctcgctgtgtcacccaggttggagtgcagcagcgcaatcttggctcactgtaatctccacctcccaggttcaagtgattcttgtgcctcagcgttagcctcccaagtagctgggactataggtgtgcaccaccaacccagctaatttttgtatttttagtagagatgggttttcaccatgttggctaggctggtctcaactcctggcctcaagggagccacccacctcggcctcccaaagtgctgggattacaggtgtgagccatcatgcccagccataaaatccaaggatctttaagtccacttctaaataacttttctatgcctaaaagtttgaactgacgttaggggagtcactcttaactagctgtcatatgatcgctctacaagccagatgggacacaaagcctggatcattcttttccttttcctggatcattactttttcctttgggcaggggagtgggcggcagggggtgggggggaagcatgcaagttgcttctccataaacagtgtatcacactcacaatatgtcctctgaaaatattatctttcctatctgtaactctgcaaataatagcagtgatgtggagggtgggaatgtttaatggtattttgcaggaagtgttacggtgctatgcaacagagatattttcagctctggctcaatggtgaaagatgtgactttccagggtaacagaggtttacaagtcctaccacataccaaaagttggttacagcagaaagagtacagccaccaaaaagaacacatatataaaatacttctgtgtgggcaaggggaggcatgacataatcatttctgttaattaatataccagccagctaagattttacagaacatatgaactagtaagactgtattctacagaaatacaggccaggtgaggcagctcacgtctgtaatctcagcactttgggagtctaaggtggggtgaattgcttgaggtcaggagtttgagaccagcctcggcaacatagggagaccctgtctctacaaaaaatttaaaaattaggtgggcatggtgatgcatgcctgtggtcccagccagctacttggaaggctgaggctggagcatcacttgagcctaagaggtggtgactgtaccactgcactccagcctgagtgacagagtaaggccctgacttaaatttaaataaggaggaaaagaaacacagtaacaactacccaaaacaagaagtgacattcctcagtaggatccaaacacattggtaaagttaataaatcattattcatgatttagttttaaaaatacagttaaaggctgggcatggtggctcacgcctgtaatcccagcactttgggaggacgaggccagcagatcacgaggtcaggagttccaggccagcctgaccaacatggtgaaaccccatctctactaaaaatacaaaaatcagctgggcgtggtggcgtgtgcctgtaatcccagctactcaggaggctgaggcaggagaatggcttgaacccgggacggggaggttgcagtgagctaagatcacgccactgcactccagcctgggcgacagagcgaaactccgtctcaaaaataaataaataaataaataaataaataaataaacaaacaaacaaacagttagaaactatcctctttatttttaaagtatgagtgtaataattctcaaaaatcatttatgttcttaggctcatcaactcttaataaaattacccaagattttggtaggcaaaaacaaggaaataacactcccyaaaacttctgcattacagaatttgtttcttatgttcaggtttgctaagcattaagcttaaatatcttacacagtcatgtagctgcctgatgaggtttcagtcaatgattgactgcattatatgacagtggtcccataacagctgaaaaattcctatcacttagtgctttgtgttacaaatacctactgtattcaacacagtaacatgctgtacaggtttatagcctaagagcaataggctatatcacatagattactatgtagttgactatactatctaggtttgtgtaagtactgtacactctatgatgtttgcacaatgacaaa

SEQ ID NO: 85975 - DNA, 641 bp, Homo sapiens
tttatattcctttgtgtatatacacagtaatgggattgctgggtcaaatggtagttatatttttagttctttgagaaatttccaaactgctttccacaaaggttgaactaatttgcattcccaccaaaaagcatataagcattcccttttctctgtatcctcaccaacatctgttattctttaacttcttaatattagccattttgactggtgagacagagtatctcattgtgcttttgatctgcatttctgtaatgattagtgatgttaaacgtttttttatctgtttgttggctgctttcttcttttgagatgtgtctgttcttgttctttgcccactttttaatgggccaacagttgttttaaatgcaagatttcaagtgaatccttgaatattactagactcaaytgaagcccttggacatgtcctgaagagttcaaattagaatttattccgagcagacactgagttctcctcatcactctagggtttagatctgtgttttaacatccttgttggcactggaatccctggcttcctgcttccttggagctgccttagaggcaagagtcccctggagtacaaacagggacaccacaagcatgacattgctctgccatttgcaccaccagcttccctt

SEQ ID NO: 85976 - DNA, 929 bp, Homo sapiens
tgcacccctactagtgccaggccctgttccaagccctcatgatagagaagcaaaaatattaagttcctactttcactgagcttacattatatgaagaggaaaataatagtaagcaagaaaccaggttgggcgtggtggttcacacctgtaatcctaccactttgggaggccaaggcaggaggatacccttgagcccaggaattcgagaccagcctgggcaacatagggagactctgtctcagaaaaaataaataaattaaaaagaaaccaaacagacaaacaaacatacattaccatgttctggcaaatgctatgatgcaatatatagctaggtaggtggaaatggaacatgggatgaggacatagaaataaatctgtggtgaaacaaatggcaatattattttttgtggttttgtgcttaagaaagacagctctagaggcaagtgtgagggccagtctgaatgatggtaagactggggtctgatggttagatatcattgcagctgtttagggcagagatggcaatggctatgctaaggtggtgacagtggagtagagtataagtaaatagagagaaagcatatattctatatagtcaagcaccacataatgacatttgcatcaacagtgagccatatataccactatggcaccataaataagattataatgaagctgaataattcctatcacttagtgatgtcacagccrttgtaaagtagtgcaatgtattaccttttctattcagatatgtttaagatacacaaatacttattgttgtgttacaattgcctatgttattcaatacgccatatagatttgtagcctacgagcaatagtctctgtggtataggcatgtagcaggctataccatctaagtttgtgtaagtgcaccctgtgatgtttgcacaatggcgaaatcacctaag

SEQ ID NO: 85977 - DNA, 1298 bp, Homo sapiens
aaagatagctgccattactaatgatcaagcacagttcaatgagtacagtcaaactttaaacataagcataaagcaaaacactaaagataaattagggctgtaacgaaactcagtttcaataaagcatctcatgaaatatctatattcagcttcagtctaatacactagaaaatacttgcttctgagtattaactgtggaaagcctacataacaaatattcacactttaacctgtcactcakcctgcaagtaaacctaaacctaaatcttgaaacataacctaaaaacctttgatggaaactctacataaatataaatttacagaatttatccttttttgtgaggcacattttatgaattggttattatctgcattagcatggtacaagaaatatgttaaatgttttaattatttgatccagatttcctgtctgctttcatactaaataaaataactaaaagcattttcaagataatattgttcatagtttacaattgtttctctaaatgtgagaaagggtctgatttacagcattatgctcctgtgttttcttatcttattaaatgatgcaattttctgcctttgtcaccaaaacagcatctgctagtcacaaaactagaaacacatcttttaattaaatgcttattttattttccctagggacaatgaattatagaattactttctcaagagttactgtttccttttcctttatctcagcccccagtatatattcagtgtgtcctctgaagtaacaaccatcccatctggctgagaagtgatggacacggctccttaaccacactgtaccctctgttcttggcacctctctaccagaaagatatcaacaaattggatggaattcagagaacagtaagaaaaatgattaaagagatggaggcagtgacttatgaggaaagatgaaaaggactaaatctatgtagcttggcaaagcaacaactgaggtggcgtatgaaaactgtctacaagcatttgaagaatataaacaccaagggaagagagggaactttttagaatggtctggggaataagcagagtaagaggacagaattgaagaaaggagagagatatgctaagttgggggtgggggcgttttctcatcaattgtaaattttgataaataacaaaattaagtctggagagaaagagttgcatctcatgcttttaggttacaatcagtgttgacctgcactgagaaaatggtaagtgagagaataaatagtatctgtttgtatgtagacatataatatttgagctgtctttttcagcttaccaag

SEQ ID NO: 85978 - DNA, 643 bp, Homo sapiens
tgtttacaaaggtgtgggctgggccaaggggaaccatgagggatggcgcaggtccctggtgttagcgtcatctgggagctgtcaccacactccaggctgatggggccatagagaagctgttccaataactcagagggagaatctacagctgaaagaggaggccaggggacacatcactccctgtgccctttgactgcgtgtggatgcccccaccgaccacactaccatctccttattagattggagaggctgcagagtggggttctaagcctcctattgtggctcacctccaacagtgagtcagcagcagctcccctagccccacagcccagggtccacttagcccctctatcctgtacggtccccttccccactgggaagcagatacccaaatgagcagcagaatcctgtctctccctgcaggtccctctgctccttatgagtggtgttttgtgggtgtcctcccttggtttaggatgggaaacaaccttttcccttccacagggattgtttctgtstaccccaccctgagttttcccctggtgggacaacgggcaggtggggatggtgggacgaactctttagaaccagcaatgccaaacacatcccactctggggaagttcattctaagtgtcatggatc

SEQ ID NO: 85979 - DNA, 845 bp, Homo sapiens
attctatgggttctttttaaagtaagtactgtgaaaaataaagtgcatgtctctttatttcctaagggtattttagtataatggaattggtgggtaaagggcwtacacactttttaaatgtagtacttaccattttcaaatgagtactttgaaaagtaatcagcaacttaaactttaagcagcagtataaaacatcctcacaaatattgtggatagaaaactgtttcattcctcttttaaattcttataccagaaatgcaaaggattttttcctatgtatataaataacttgtagatctggaaaaaggtactttgcccacttttagagtgtttgatgatttgatttgaaagaattctctgtaaaatgaagatgtacttttcatctcatgtgtatatataactgatatatataacatatctgttatatatgtatacatatcagtaatatatatatatatatatcttacgatatataataaacaacataggccaggcgcggtggctcacacctgtaatcccagcgctttgggaggcggaggcaggcagatgacttgaggtcaggagttcgagaccagcctggccaacgtggtgaaactaaatatacaaaaattagccaggcatgctggcacctgcctgcaatcccagctacttgggaggctgaggttggaaaattgcttgaacccggcaggcagaggttgcagtgagccaagattgtgccattggacaccagcctgggcaaagaagcgagactccgactcaaaaaaatatatatatatataatgaattccctataaaatgaaaacatacttttcatctgaaaaaatatatatatataatatagtaaa

SEQ ID NO: 85980 - DNA, 845 bp, Homo sapiens
attctatgggttctttttaaagtaagtactgtgaaaaataaagtgcatgtctctttatttcctaagggtattttagtataatggaattggtgggtaaagggcttacacactttttaaatgtagtacttaccattttcaaatgagtactttgaaaagtaatcagcaacttaaactttaagcagcagtawaaaacatcctcacaaatattgtggatagaaaactgtttcattcctcttttaaattcttataccagaaatgcaaaggattttttcctatgtatataaataacttgtagatctggaaaaaggtactttgcccacttttagagtgtttgatgatttgatttgaaagaattctctgtaaaatgaagatgtacttttcatctcatgtgtatatataactgatatatataacatatctgttatatatgtatacatatcagtaatatatatatatatatatcttacgatatataataaacaacataggccaggcgcggtggctcacacctgtaatcccagcgctttgggaggcggaggcaggcagatgacttgaggtcaggagttcgagaccagcctggccaacgtggtgaaactaaatatacaaaaattagccaggcatgctggcacctgcctgcaatcccagctacttgggaggctgaggttggaaaattgcttgaacccggcaggcagaggttgcagtgagccaagattgtgccattggacaccagcctgggcaaagaagcgagactccgactcaaaaaaatatatatatatataatgaattccctataaaatgaaaacatacttttcatctgaaaaaatatatatatataatatagtaaa

SEQ ID NO: 85981 - DNA, 658 bp, Homo sapiens
gatccaaccccaaatccgctatttcaaatctatgatctactccacaatccgcgatccagcccggtccaccacagccttcagcagcgacactggcagcctccgacctctcagaccgagtgagcctcgcaaagccgttgggcgcgcgcctgcaccgcggttgctgccrggctcccggaagacgctccctggcggcgcgcgccggcaggtagggctgcagctctgggcaggcgccgatgggctctccggttctcctgggatcgcccgggcggccccagaatcgcaggcgcgcagccagcccggcctgaggaggagggcctgtctggccttgcagcccgccccgctcctcctcggaagagagggtgctggcaagggccctccgcggccacctgagtggcttcgcggattgtctggctgaacgctgaggctctggccctggagtctgtgtggctagtgtaaggtagctggagaggcatggaggcagagtcaggggctgctccttcccccacccgccctcactgctgccagtgccacacgcgcggtttgcaactgcagatctggcactggcgcaggatggcggagcttcccttggatggcctcagggccgcagagcgcacagcccacctggcctcaaaggtccgctcctcttggacacctttct

SEQ ID NO: 85982 - DNA, 658 bp, Homo sapiens
gatccaaccccaaatccgctatttcaaatctatgatctactccacaatccgcgatccagcccggtccaccacagccttcagcagcgacactggcagcctccgacctctcagaccgagtgagcctcgcaaagccgttgggcgcgcgcctgcaccgcggttgctgccaggctcccggaagacgctccctggcggcgcgcgccggcaggtarggctgcagctctgggcaggcgccgatgggctctccggttctcctgggatcgcccgggcggccccagaatcgcaggcgcgcagccagcccggcctgaggaggagggcctgtctggccttgcagcccgccccgctcctcctcggaagagagggtgctggcaagggccctccgcggccacctgagtggcttcgcggattgtctggctgaacgctgaggctctggccctggagtctgtgtggctagtgtaaggtagctggagaggcatggaggcagagtcaggggctgctccttcccccacccgccctcactgctgccagtgccacacgcgcggtttgcaactgcagatctggcactggcgcaggatggcggagcttcccttggatggcctcagggccgcagagcgcacagcccacctggcctcaaaggtccgctcctcttggacacctttct

SEQ ID NO: 85983 - DNA, 1321 bp, Homo sapiens
aatcacttcactttgaggcataaattaagccacagacttggtcaagttccttctaatggattctctaattaggatattcagttttgtggtggaaagaggtcttgaggaataacctcaatccatcaacctttttcaaccacaacactttgtaatagttccacctccagctcagaagttttatgaaaatatttgtataggtctgtatagagaatgtacagtgagaagttatttgcatagaccatatattcttctgcgtaggccatatattcttctgcaaaccactttaatgatgacagagtgagcattagctaaaaatattaagcataggttgagccaaaaaaaagtatctgagaagaaattatctgaaatactagaagttagacgaggtgaaatacatagttcttctgtcttaagtagaaggtctaaaagctagaagcaagagttcaagtttctggctatcacttcctaaactacaactaaagtcaacgaaccaatamaagagtccagcacataattccaagatgtgacaggtccaaggatggttttcatgcctgggttccataaggagcatctctattattcactaatatgctcataagtgcagaactgtttagatctgtcttccctgctccctatagctaattccttccttgcctagcactagttcaaccaataaagactaagttagcacaaaatggcaagaagtgccccttgttttttaagatattaaaaaaaattgtaaagtagtcttagtagaagtttacattaagaattatgtctattatttaaaaactcacattattagttaaaaaattgtgattgctaaagttttcttatgaatttcttatgattctgtgtagttcatttagcatctagtataaatacagagtatctaacaacctctaaatctagaagggcggacagtacatccatctactccttagggaccaatgagagcaggtagcttccagaagttaattgcttagaaatggtaacatagttcacatagagggctggaaatcctgacaaatgattgcaaatatgggcttcccttaagcaggatgatgaccaaatgtttaacaaagtgcatggtagaagagcaaccaaacaaaacagatgctcactcagaatgatgctggcctacagcagtaccttatggtacctgcctgcagaatacaggtcccacaaggatggacagaccctcaggataccagaatcaatcctaaagagcagaacactcaagatcccacagcctggcacctgtacatttttctggcctttttaaagcttcactgtttagctttttctgagtttatatgca

SEQ ID NO: 85984 - DNA, 726 bp, Homo sapiens
cttgaggtcaggagtttgagaccagcctggccaacatggtgaaaccccatctccacaaaaaaatgcaaaaattagccaggtatrgtggtgcgtgcctgtaagcccagctactcaggaggctgagtaaagagaatcgcttgaacccgggaagcagagggtgcaatgagccgagattgtgccagtgcactccagcctgggcaacagagcgagactccatccccaccctgcaaacaacaaaaaaaaaaacaaaagaatggggttggggggcatcctgttagcatctagcgggcagtcagaggccagggatgctgttcaacatcctacactgtgcagaacagcccgcccacagaattatccagccccaaagatcactgtgctgggctgggaaagccctgcccctggccaaactgggccaaggacctatgaggagaagtgtgttaggacttctgggaaagaaggtccctcactcttaagcaaacgcctttcaccccaggggccaatgagtgagccagtctccccataaatactgttatccatctggaatctatgcatgagtgcccagagacaagctcagccacgggtgggcacagtgagggaaggggctgtgcttttatcccaggggttggcccagtgaggggcccgggagaagctcgcctggatctcaccttgccgctgcccttccagccatgtgagccagtggacttcctcagtgcgcgagggttttct

SEQ ID NO: 85985 - DNA, 726 bp, Homo sapiens
cttgaggtcaggagtttgagaccagcctggccaacatggtgaaaccccatctccacaaaaaaatgcaaaaattagccaggtatggtggtgcgtgcctgtaagcccagctactcaggaggctgagtaaagagaatcgcttgaacccgggaagcagagggtgcaatgagccgagattgtgccagtgcactccagcctgggcaacagagcgagactccatccccaccctgcaaacaacaaaaaaaaaaacaaaagaatggggttggggggcatcctgttagcatctagcgggcagtcagaggccagggatgctgttcaacatcctacactgtgcagaacagcccgcccacagaattatccagycccaaagatcactgtgctgggctgggaaagccctgcccctggccaaactgggccaaggacctatgaggagaagtgtgttaggacttctgggaaagaaggtccctcactcttaagcaaacgcctttcaccccaggggccaatgagtgagccagtctccccataaatactgttatccatctggaatctatgcatgagtgcccagagacaagctcagccacgggtgggcacagtgagggaaggggctgtgcttttatcccaggggttggcccagtgaggggcccgggagaagctcgcctggatctcaccttgccgctgcccttccagccatgtgagccagtggacttcctcagtgcgcgagggttttct

SEQ ID NO: 85986 - DNA, 795 bp, Homo sapiens
aggcatccatttatcacagatggtggtattatttatgatggaaacttacattaaccctgagagtcccaattatctcaattcatataaataaaaaggacaccattcctgttctttatgatggcctttttcctcaaaaataaagagcttatttttaatatagtccacatattttctttcccactaattacagataatttttaaaaacttgtgtgtaccaaagagtcttccgcatttttcccccacatgtgagtttcatctgcttgctagttagcatctgtagttttgtttggttataccagcatttagaatgattatattaatgacaagtcttaggggacaaagtagaaaatgctttcctgatggttgagtaaacaaaaagagaaaakaatacaccagaagataaaagcaattttctctttcattttaaagcctttaacgtgtgaaaaggacatttaaactgagctttccaagagggaatggggaattataagggagaattctgaaaagtcagtggggaaaaatatccgttaagtggaaggtgaaatcttttatccttgtgacacctggattatcaagacaggaggaggacaacagtaaaaccatcactcaacaccctgttggtccgggtgctgcatatcatatatcgacttctttgtactttcaacatccctatgcgtgaagtatctttattatccctaattttcacataaagagattgaggcccagagagattgagtaattcagccaaggtcacacagctaagaattctgaaatcagaatttgaactcaggatcc

SEQ ID NO: 85987 - DNA, 1071 bp, Homo sapiens
tgggccttcagttaaactaataggcaggcaagttgctgcctggcttcagcagattttaaagcactaatgaaacacactgtacgaaacaacagtgacaaaaactttttagcaggggaagaaaaataagattccagaagaggtttcctagtttttaataaataaaaataaacagaaaatgtgttttactgactcattctgatgcttctattgtcttctgtacataatatattttaagaacagtgaaatattcgtgccaaattttccaaagcaactaatttgtgtataaaaattatgcagaggaagacaaaatcagctagttgccattatgaatcaggcagttgtgcatgtaaaacaggtaatggcatattttgtaccagcaattacctttcttgcacctgtgagtctctgttttgcatatgtaagtaggtccctgtttattgcatttaaagctgctacctcagcttctttaggtaaactttatgttttactaaatgtcattccaaaacaaaaaaaaaggggcatttctatggtgggtttatgtgtatgtgggcacgtgtgtgcctgtgtgtatgctttttaaataactgtaaaattgatgctaactttatttggttttaactactgtaccttgcagggccatgttcgatgatacaaaatatttccttttggttttatgacacaaatgtctaaatgtcctgcttctgagatgtatcaatcaaatcaaaggttcaaatttaatattatccaggtgccaggatgagagggaaaatgatacttcagttyacagtcaaccgatgcagaatgacttcacagtcaataacaggctcctgcatatatctcttgtagatccattacttcagggttcataaagtggaatgcagcacttctgacaatgccttaggattttttctctccctatatattttttaattgttacttgcatagaaaagggaaaatatcaaattcacttttcataggataattttatataggcattataagcaattaaaatccacagtgtttcaaggacacttcacagcttttcaataaactgaagcaaacccctgaatc

SEQ ID NO: 85988 - DNA, 1071 bp, Homo sapiens
tgggccttcagttaaactaataggcaggcaagttgctgcctggcttcagcagattttaaagcactaatgaaacacactgtacgaaacaacagtgacaaaaactttttagcaggggaagaaaaataagattccagaagaggtttcctagtttttaataaataaaaataaacagaaaatgtgttttactgactcattctgatgcttctattgtcttctgtacataatatattttaagaacagtgaaatattcgtgccaaattttccaaagcaactaatttgtgtataaaaattatgcagaggaagacaaaatcagctagttgccattatgaatcaggcagttgtgcatgtaaaacaggtaatggcatattttgtaccagcaattacctttcttgcacctgtgagtctctgttttgcatatgtaagtaggtccctgtttattgcatttaaagctgctacctcagcttctttaggtaaactttatgttttactaaatgtcattccaaaacaaaaaaaaaggggcatttctatggtgggtttatgtgtatgtgggcacgtgtgtgcctgtgtgtatgctttttaaataactgtaaaattgatgctaactttatttggttttaactactgtaccttgcagggccatgttcgatgatacaaaatatttccttttggttttatgacacaaatgtctaaatgtcctgcttctgagatgtatcaatcaaatcaaaggttcaaatttaatattatccaggtgccaggatgagagggaaaatgatacttcagtttacagtcaaccgatgcagaatgacttcacagtcaataacaggctcctgcatatayctcttgtagatccattacttcagggttcataaagtggaatgcagcacttctgacaatgccttaggattttttctctccctatatattttttaattgttacttgcatagaaaagggaaaatatcaaattcacttttcataggataattttatataggcattataagcaattaaaatccacagtgtttcaaggacacttcacagcttttcaataaactgaagcaaacccctgaatc

SEQ ID NO: 85989 - DNA, 1071 bp, Homo sapiens
tgggccttcagttaaactaataggcaggcaagttgctgcctggcttcagcagattttaaagcactaatgaaacacactgtacgaaacaacagtgacaaaaactttttagcaggggaagaaaaataagattccagaagaggtttcctagtttttaataaataaaaataaacagaaaatgtgttttactgactcattctgatgcttctattgtcttctgtacataatatattttaagaacagtgaaatattcgtgccaaattttccaaagcaactaatttgtgtataaaaattatgcagaggaagacaaaatcagctagttgccattatgaatcaggcagttgtgcatgtaaaacaggtaatggcatattttgtaccagcaattacctttcttgcacctgtgagtctctgttttgcatatgtaagtaggtccctgtttattgcatttaaagctgctacctcagcttctttaggtaaactttatgttttactaaatgtcattccaaaacaaaaaaaaaggggcatttctatggtgggtttatgtgtatgtgggcacgtgtgtgcctgtgtgtatgctttttaaataactgtaaaattgatgctaactttatttggttttaactactgtaccttgcagggccatgttcgatgatacaaaatatttccttttggttttatgacacaaatgtctaaatgtcctgcttctgagatgtatcaatcaaatcaaaggttcaaatttaatattatccaggtgccaggatgagagggaaaatgatacttcagtttacagtcaaccgatgcagaatgacttcacagtcaataacaggctcctgcatatatctcttgtagatccattacttcagggttcataaagtggaatgcagcacttctgacaatgccttaggattttttctctccctatatattttttaattgttacttgcatagaaaagggaaaatatcaaattcacttttcataggataattttatataggmattataagcaattaaaatccacagtgtttcaaggacacttcacagcttttcaataaactgaagcaaacccctgaatc

SEQ ID NO: 85990 - DNA, 720 bp, Homo sapiens
atcatgtactaggcgatsttgtgagctctgggttttatagcaatgaatgaaacagacaaatttctgactttattgagcttatatgttaatagctaagtggggattcaggagacaaggaataatttttttaagtaatttgttggagggtaagaagtgctaaaaagagaaatgaagtactacagagagaaaaggatggggaatcctattataaggattaagatactcagaacactattttagaagagtgacctcttgaagactgagggattgagttacactactatctgagggaaaggacactccaacaaataattcaaataattcaaaaacatggttgcctttgccataaaaccctaaaccctaaagctgcaacatgtctacatcagagaaaaaaatgatatctttctactgagtgtaatttatactctgagataaatatgcttattttgagaaataagcaggcatgggaatgtttaaggaacagtgttgagaccagggtagctgagtagagtatgaacatatatttagcaagagtggtgggaaaggtcagaaagatagtcctatgatagaggagtaatcacattaagcaaggctctgtttattcagaacttctcttgctagttctcttcctctgaaaggagcatttatatttgaacttttgttttttactatgaatttcacatgcttatttaggtctttgtcaaattaaaaatggagatt

SEQ ID NO: 85991 - DNA, 720 bp, Homo sapiens
atcatgtactaggcgatcttgtgagctctgggttttatagcaatgaatgaaacagacaaatttctgactttattgagcttatatgttaatagctaagtggggattcaggagacaaggaataatttttttaagtaatttgttggagggtaagaagtgctaaaaagagaaatgaagtactacagagagaaaaggatggggaatcctattataaggattaagatactcagaacactattttagaagagtgacctcttgaagactgagggattgagttacactactatctgagggaaaggacactccaacaaataattcaaataattcaaaaacatggttgcctttgccataaaaccctaaaccctaaagctgcaacatgtctacatcagagaaaaaaatgatatctttctactgagtgtaatttatactctgagataaatatgcttattttgagaaataagcaggcatgggaatgtttaaggaacagtgktgagaccagggtagctgagtagagtatgaacatatatttagcaagagtggtgggaaaggtcagaaagatagtcctatgatagaggagtaatcacattaagcaaggctctgtttattcagaacttctcttgctagttctcttcctctgaaaggagcatttatatttgaacttttgttttttactatgaatttcacatgcttatttaggtctttgtcaaattaaaaatggagatt

SEQ ID NO: 85992 - DNA, 1210 bp, Homo sapiens
tttcacgatagggttcacattgagaatctaatgccacagctgatcagacaggaggcagagttcaggtcgtaacgtgagcaatgggtagccattgtgaatacagatgaagcttggctagctcgcctgccactcgcctcctgctgtgcggcctggttcctaacaggccaccaatcagtactcatccatggcccaggggttggggacccctgcactaggagaccaattcagccttgatgcaaatgtattgcacaggaatccatggcctctcgaggaaaatcagtgtctctggtgaaaggccactagccaaacttgcatttgcaacttctataactggaccaagaccaactatcatcatttcttttctatgtgcagctgctactttaattccttcaagactagaggggagtgtggcaaaagacaagagagttaggaatgggtggggactagaaccaggggaaacatggacacaggcaggatgtctgctcctgttcagaactcaggccaggctttaagaaaaaggcagagaaactatggtaggtgaggaatggacgcattccacttccgttctttggtgagaatttacctcttccccatatattgggggaaccacccccaatatttcagtgtaggttctattttccataagtgttggctggctgagaaataaagagagacagtacaaagagaggcattttacagctgggctgccagaggtgacatcccatattggtaggaccatgatacccacctgagcctcaaaccagcaagtttttattaagggtttcaaaaggagagggggtgtaagaacagggagtaggtacaaagatcacatgcttcaaagggcaaaaagcagaactgctaataagggtctaacaaagatcacrtgcttctgaggaaacaggacaaagggcaaaagcagaactactgataagggtccaacaaagatcacaaggcagagggcaaaagcagaactactgataagagtctatgttcagcagtgcaagtattgtcttgataaacatcttaacagaaaacagccttcacgagcagagaaccggtctgaccccaaatttaccagggcagagtttttccccaccctagtaagcctgagggtactgcaggagaccaaggtgtatctcagtccttatctcaatcgaataagacagacattcccagagcagccgtttatagacttcccccagggaatgca

SEQ ID NO: 85993 - DNA, 1210 bp, Homo sapiens
tttcacgatagggttcacattgagaatctaatgccacagctgatcagacaggaggcagagttcaggtcgtaacgtgagcaatgggtagccattgtgaatacagatgaagcttggctagctcgcctgccactcgcctcctgctgtgcggcctggttcctaacaggccaccaatcagtactcatccatggcccaggggttggggacccctgcactaggagaccaattcagccttgatgcaaatgtattgcacaggaatccatggcctctcgaggaaaatcagtgtctctggtgaaaggccactagccaaacttgcatttgcaacttctataactggaccaagaccaactatcatcatttcttttctatgtgcagctgctactttaattccttcaagactagaggggagtgtggcaaaagacaagagagttaggaatgggtggggactagaaccaggggaaacatggacacaggcaggatgtctgctcctgttcagaactcaggccaggctttaagaaaaaggcagagaaactatggtaggtgaggaatggacgcattccacttccgttctttggtgagaatttacctcttccccatatattgggggaaccacccccaatatttcagtgtaggttctattttccataagtgttggctggctgagaaataaagagagacagtacaaagagaggcattttacagctgggctgccagaggtgacatcccatattggtaggaccatgatacccacctgagcctcaaaccagcaagtttttattaagggtttcaaaaggagagggggtgtaagaacagggagtaggtacaaagatcacatgcttcaaagggcaaaaagcagaactgctaataagggtctaacaaagatcacgtgcttctgaggaaacaggacaaagggcaaaagcagaactactgataagggtccaacaaagatcacaaggcagagggcaaaagcagaactactgataagagtctatgttcagcagtgcaagtattgtcttgataaacatcttaacagaaaacagccttcacgagcagagaaccggtctgaccccaaatttaccagggcagagtttttccccaccctagtaagcctgagggtactgcaggagaccaaggtgtatctcagtccttatctcaatcgaataagacaracattcccagagcagccgtttatagacttcccccagggaatgca

SEQ ID NO: 85994 - DNA, 705 bp, Homo sapiens
cttgagcccaggagttaacaatcagcctgagcaatagtgtgaaaccccaactctacaaaaaaaaaatgcaaaaaaaaaattagtcaggcttggtggtgcatacctgtagtcccagcctctcaggaggctgaggtggaaggatcacttcagtctgggaagtcaagactgcagtgagccataatcacaccatcgcactccagcctgggtgacagagtgagaccctatctaaaaaaaaaaaaaagaaaaccaagagcaagttgccaaaatattacacaaggatttctagttttattttctgtttcactgtgattgggtaaaagtaaagatatataaatataagacataaatgcattttattctttggaatctaacatcttcaattaaaaatgaaaaatttctaacaggaaggatcaagagattggraagtagcctaataagtctttaaaatagtgtttctaggaatctgatataccaaaagcaaggagcaataggaaatacagataaaggcaggaaaaggtagattttgttacaacactattgtggtttctgaaggagtttggcctcattgggtgatgcacatcagtgttaatttctaatactcagaaaattagtaacctttgtacccaagaagtgaacattcagagttcaaagaaccacccaccaccccaaatcattcaataattttcactggtgttctactacaag

SEQ ID NO: 85995 - DNA, 1121 bp, Homo sapiens
gtttacttcaaaatatatccaggactaggtaccaaygctctgctgcctaatcatggtttaatcactctttctcatgtatagttaaattaacaacaaagactactaaagactatttatactgtacttgtgcctgaatctgggtaatgtattgcttattttttttcttttcaaaacttagcttttcaatatatggtcttattaatatattggatgttgctatttaaaaatcaccttgggcttcctgttacatgaattaccagaaccacagaagctgagagcccagcaggtggtaaactgaagtaagagagatactgctggagttccaaggacattcccttaagagaaatgcttatgagtttaggagctctcgtaagagagtcagggagaaaaagaaggaagtgaggcttgtgtgtgtatgccttagatatgataggtatacaccttacaggatcactcctcatttctaatttaacaagattgattctgtttgacaaagacaaaggctttaacattacctattactatcagcaatgcagttataaatgtcactcctagtcattcattttatagccactttgaaaggtctatcagtttactctgtagaaacatcccattacacattgcagatacacatttaaatcactgaagaactttacaagaaaaaattgacaaactagttagaaaaattttgtttcatttcaaataatgaatatctactaaaatgtaattgtaatttttacttggctattacttgagaaaatttagtaatttatttaaatatgaaacaaatgaatttatttgtatattgtatttacctaaaataaagaccactaactggaatataagtagataatgcttatgtagaaccattatctcactctcttaagacaatttataaacatttgagaaaaataattgacgtttcacatcatgccataattctgtccaaagaatttacaatgtaaatgttaacgaaattgtgttaatgtggtgcacgtatatcactataatgtaggttactatctaaagtcacaggactgaaattgacttaaatcttaccatacagtcacattcttatattgttgtaagaacacttagacaagttagtggggcagactcca

SEQ ID NO: 85996 - DNA, 1079 bp, Homo sapiens
ggtggtttgctgtgtagacactaaaacaaactactttctcttatttctatcccttcccacttctttttttactttcaagctttttttcctattagttaaaaaagtataggatctcactgtattgcccaggctagtcttaaactcctagcctcaagtgatcctcccaccttggcctcccaaaatgctgggattaggcatgagccaccacacccagcctyaacaaatttttatcaaatagttactatagtttttgttttgtgtgaagtatcttcctagggcaccttcatgggtcaaccctgtcctactcttgatgtggagtcagtgcaggggaagaagtcctgggacaaggaggaagctatgggttctcttcactgtctgagcaggaggctcctcctgcagcagaggaagagagggtcttgcaataataattaaatgcccccacccagaagtgacacgtggcatttccactcacagccaatttgccagaacactatggcccatctaacttgcaaaagcagaatcactgtggtcttctttggttaggaggaaagaaaaattagaatacgcaagccctaaaaagctctactacaggaatcatttggtgatcttaggaaaaaatacagataccatggtcttgccagtagaaagtctgattccattgccctgaagtggggcctgagaataaaaatttggcaaatgttccaaatgattctgatgcaagtggtacatgggtggacatttgggaaccactgctttagaaaacccaatcccccttggggtgactattggctgtataggtgataagactgatatgtgtccaggaatatgaaaaacagtcaatgtataactcagtgccaaaatatgaagcataccataagtgctccagtccctacagggactcagcaaacacttcactgcccctcctgatacttattttgcctcttatttagtgcctttgccagacaactcatggtaagacctggtcttgtggaggtgatggagaaaggtcttgggcagaggtggggtcaggacctcttagcagattaaaagcaggagtacatatgtgaagatgtgagcat

SEQ ID NO: 85997 - DNA, 660 bp, Homo sapiens
gacttggacctaggtggaagagagaaagaaaaaaagatttctagaccctgagacaaactcatacatctgtccataaatctgctcatttcattttatagaaacaaagaaatatgcttagtgggtagatttaaatactcagacaattaaagtatacgatactttgcatggcaacaattagtggtgagaagagtagggagaggtcctgattctgcattccccaagagcctgatctgatcacaatcttttgttgaaattactcaattgttatttttaagtatttaatttttccccgccttttgtaaaaataaaacagacagayagacatacactgtgaagctaaaggctaagattcagctgattttccaatgctaatcatgagagtggaggttgtttatggaagctgaacaatatgactttcatcaccaggcagtggcccctgggcaaagactccagggtctctggataagaagaaactgatagggaaaaatggagagcacttagttcaccatggcagaaatgctgcaataaacaaacctaatgaagaagaaacataaatccagatcaaaccaagaatggttattttagcttccttctcctccttctccttctcctcctgcttctcctcctcctccggattttttttgtccctttatcaatgca

SEQ ID NO: 85998 - DNA, 660 bp, Homo sapiens
gacttggacctaggtggaagagagaaagaaaaaaagatttctagaccctgagacaaactcatacatctgtccataaatctgctcatttcattttatagaaacaaagaaatatgcttagtgggtagatttaaatactcagacaattaaagtatacgatactttgcatggcaacaattagtggtgagaagagtagggagaggtcctgattctgcattccccaagagcctgatctgatcacaatcttttgttgaaattactcaattgttatttttaagtatttaatttttccccgccttttgtaaaaataaaacagacagatagacatacactgtgaagctaraggctaagattcagctgattttccaatgctaatcatgagagtggaggttgtttatggaagctgaacaatatgactttcatcaccaggcagtggcccctgggcaaagactccagggtctctggataagaagaaactgatagggaaaaatggagagcacttagttcaccatggcagaaatgctgcaataaacaaacctaatgaagaagaaacataaatccagatcaaaccaagaatggttattttagcttccttctcctccttctccttctcctcctgcttctcctcctcctccggattttttttgtccctttatcaatgca

SEQ ID NO: 85999 - DNA, 734 bp, Homo sapiens
aaaggaaatactcactctgaaaaagcaggtgggatccgagctctcagagagcctttctgtgctctgggggccgacttagccaagcctgctgtgccccaggccatctggcatctcccaccttttgggcaggggccccttccgctgcctggaggagcaatccgagcctggccagctactccagctcacccaggaggtggcccagaaaaaagggaggagactgcttcacgcttcccctgaaacaccctcctgccctgtcacccccacctctgcataactccatgtctctgctcttggcctaagggattgaatcagtaaaaatatgctttttaataggtcttacttcttgtcaaaaatatcacaggctgggcatgtgtgtatctacccgaatgtgtttgtaactcagataaaaacaatacactccatgaaaatgcccaagcaaaacaaatctttaatgacataactgcagtgacacatgcacgaaatcctggacgaaccccccccccsgccccctgccgctgatggggcccttcccaggtgttccttcagatctgaagcatcctgggccccacgtgcacatgcactgctgccgtgtgactgggaagggccctcgctggaggttcctggtcctgtatcacgacgtttttgggaggcgctgtaaacacccaacatcatggaccctgatcctgtcctgagtatagccaccctcatttccaggtttgctcgtggacattgaa

SEQ ID NO: 86000 - DNA, 519 bp, Homo sapiens
ccatctacctaaaagcttctctcctcactgtcttttcacaaaaccttctctccctcctgcttgccactctctcttccccctccctctctgcaccctcttttctccttccacttgtcacccttttcccccctccatctactcaaaatctttttacctacagtcttctttmcctttcttctctccccaccgtatttttgcaaaccttctctccttcctgctcatccccgttccccactcacgaccctctcttacccccttccatctacccaaaaactttttcactaccgtctttctgtgaaaccttccgtccctcctgttcaccaccctgtttttccccctccatctacccccagttttttttttcccaacatcttttcctcaccatctttatgcaatgccttctccagctcaccatccttttttccttttggcactaaccaccctctttaccctttcatctatcccaaaactattttccctttcctaccgctccagccacactacagtctctgtcaccac

SEQ ID NO: 86001 - DNA, 519 bp, Homo sapiens
ccatctacctaaaagcttctctcctcactgtcttttcacaaaaccttctctccctcctgcttgccactctctcttccccctccctctctgcaccctcttttctccttccacttgtcacccttttcccccctccatctactcaaaatctttttacctacagtcttctttccctttcttctctccccaccgtatttttgcaaaccttctctccttcctgctcatcccckttccccactcacgaccctctcttacccccttccatctacccaaaaactttttcactaccgtctttctgtgaaaccttccgtccctcctgttcaccaccctgtttttccccctccatctacccccagttttttttttcccaacatcttttcctcaccatctttatgcaatgccttctccagctcaccatccttttttccttttggcactaaccaccctctttaccctttcatctatcccaaaactattttccctttcctaccgctccagccacactacagtctctgtcaccac

SEQ ID NO: 86002 - DNA, 519 bp, Homo sapiens
ccatctacctaaaagcttctctcctcactgtcttttcacaaaaccttctctccctcctgcttgccactctctcttccccctccctctctgcaccctcttttctccttccacttgtcacccttttcccccctccatctactcaaaatctttttacctacagtcttctttccctttcttctctccccaccgtatttttgcaaaccttctctccttcctgctcatccccgttccccactcacgaccctctcttacccccttccatctacccaaaaactttttcactaccgtctttctgtgaaaccttcygtccctcctgttcaccaccctgtttttccccctccatctacccccagttttttttttcccaacatcttttcctcaccatctttatgcaatgccttctccagctcaccatccttttttccttttggcactaaccaccctctttaccctttcatctatcccaaaactattttccctttcctaccgctccagccacactacagtctctgtcaccac

SEQ ID NO: 86003 - DNA, 668 bp, Homo sapiens
agctggtggaacattccatggccatctgtaggtctaaggtggctgcccaagttgtcatccttttccagcaagggtaaaaagggggaaagtatggagagcaagcaacttccctatttaaaagaagggaagaaaagctggatgttgcacacatcagtttacatagtccacaggtcaagtcacatggccacacccacccataaggaagctgggaaatggaggaggaaatgggaaccatttggggtttttattaaggaaaaatggggagaatggatactagagaacaagtagaaatttaccttacacaatttgacaatgcctgaaaatcttagataaaaaaggattcaaggccagatgtagtggctcacacctgtaatcccagcactttgggaagcyaaggcaggagaatcgcttgaggccaggagttcaagatcagcctggtcaacatagtgagaccccatctctattattttttttaataaaaatgaattgtcggctggacacagtggctcaacgcctgtaatcccagcactctgggaggccaaggcaagtggatcacctgaggtcaggagttagagactagcctggacaacatggtgaaaccccatctctactaaaaacacaaaaattagccaggcgtggtgggcacctgtaatcccagctactcggga

SEQ ID NO: 86004 - DNA, 668 bp, Homo sapiens
agctggtggaacattccatggccatctgtaggtctaaggtggctgcccaagttgtcatccttttccagcaagggtaaaaagggggaaagtatggagagcaagcaacttccctatttaaaagaagggaagaaaagctggatgttgcacacatcagtttacatagtccacaggtcaagtcacatggccacacccacccataaggaagctgggaaatggaggaggaaatgggaaccatttggggtttttattaaggaaaaatggggagaatggatactagagaacaagtagaaatttaccttacacaatttgacaatgcctgaaaatcttagataaaaaaggattcaaggccagatgtagtggctcacacctgtaatcccagcactttgggaagccaaggcaggagaatcgcttgaggccaggagttcaagatcagcctggtcaacatagtgagaccccatctctattattttttttaataaaaatgaattgtmggctggacacagtggctcaacgcctgtaatcccagcactctgggaggccaaggcaagtggatcacctgaggtcaggagttagagactagcctggacaacatggtgaaaccccatctctactaaaaacacaaaaattagccaggcgtggtgggcacctgtaatcccagctactcggga

SEQ ID NO: 86005 - DNA, 1668 bp, Homo sapiens
gctgtgtcctgcatccattggctggagcaggacctcacaatcttaaactgatacccgatttgctaatagcctaaaactttcctaaataggtaagtgcagggaagaacaaagaagttgcttagaaaaggtttaaggaagcgataacatttccaaataaggaaggggcataggccgtgacctgggatgtgcctgtgagcatgtccaacagttatataggatagggcttaacaaagagttattagcacaaagcaaggaggcttgaagaaagttggtctttaaaagaaactattatttctaacacttatgatttattctttaacaagaaggggaactttgaaggggaaactttttactttctgcaatccctcctcttttactttatcgttttcctcttcaaacttgcttaacatgtcttggcttagttgttttgattaactcttggatgtatggtgcaacataatacctaagaagaaggagtacacttattatagttgttaaagaggtaagaagtgaggctacttttgtttttctctttctggttgctgaatgccagagtaaaagggatagccaattgaactagagcgtaagtactgctctgattatttggtaaagtgtccagtaaaggtcctccataatcccaccatacatccactcagggatgaaaaagggcagactgataggtcagctcttgaaagtgcctgacttcactgcatcctgttaagtctccaaggaatgccaaatttttccccttgtcgttggagacaccaggtaaaattggttttggaagatggaggctggacggcccttgggggatgacccacagggtgtcactccagcctgggcgacagagcaagactccgtcaaaaaataaataaataaataattaaaaatatatataattttagcttgtagtatgtattttaattggtaatgtaaaggtaccaaaccataaattcaaacagtatagaatagaatgcaatgacaagtaaacctccttccccatcctagtaccctggccagcctgggactcttcttccagacaacttgtgtgagcaagttcttcagtgtcttcccagcaakggactaatatgtccaattactttattatgcatcttggtcttttaaattaaagaatttatctcggtgttcattccataaagataacgagcttctttattctgttaatagttgcatattatccttttataggaataaactgcaatttatttaactaggcttttgtggatagacatttagattagtgtcagttttttttacatctataaaataaattcttaggcgttaccagattataggcatcatttctcctggaagtaagagctttgtaattggtgttccctcatctactctcaaccactgtaatcctttttgtactctgcagcctgaatgatcatttttccacatgggtatccagttgtatcagcaccatttgttgaaaaaagacaatcttttccctcattgaattattttacatctttgcgaaaaaatctattgacttatctgtctctctttttttatatgtgtgtgtatatatgtatgtatgtatgtatgtatgtgtatatatatttatctttaggtatctttctttatatctacctgtttatccattcatccatccctccatccatccatatataaactcttttg

SEQ ID NO: 86006 - DNA, 290 bp, Homo sapiens
cagatgaccttgatccaggtggtacgaaggccccaatttgagaaacaaaatcaactcctaaaattctataatcaaagttgtttgycacatgccagagttgaacaaataacagatctggaacatataagttgtgtgttgtttactttactactgacctttctttacctagaaccctttcccataaaccttattaatatagagagtttcattaacattgttgaggacatatttatttgaaacattttttaaaataaagtagatggccggatgcggtggctcatgcctgtaat

SEQ ID NO: 86007 - DNA, 290 bp, Homo sapiens
cagatgaccttgatccaggtggtacgaaggccccaatttgagaaacaaaatcaactcctaaaattctataatcaaagttgtttgccacatgccagagttgaacaaataacagatctggaacatataagttgtgtgttgtttactttactactgacctttctttacctagaaccctttcccataaaccttattaatatagagagtttcattaacaytgttgaggacatatttatttgaaacattttttaaaataaagtagatggccggatgcggtggctcatgcctgtaat

SEQ ID NO: 86008 - DNA, 1457 bp, Homo sapiens
ttggtgcttctcagataagacaaaactacttaggaagcaaaactgtgatgggaatagtggatcacatataagagaaatattttttttatttatagtttcctcttggtttaatttactttttcattataggattatagctctagataagacatgatctacaaactaaaccacaagccacttagagacaacaggaccatgaaaatcaattttccgctaatttgttgttgttgttattgttgtgacagatgtgattcatctctggcaaaaaaaaaaaaaaaaaaatgctccaggtgagagaaatcaaaattaaatactgtctggagtttaatactgccacgagattgcatctttaggttgatttttttgtcctgtttattttatcaattgattacttgattgagaaaaggattgtctgtatcagttatactacaggttgcattgtacaagataccaaaatcattgcagaaccactgtttttcgttctgacagttttactcaatagacactgtacctctcagataactaggaaacgagagtaaagtcttccgtcaataatgtcagaacactaatttactctcccacttctttccttttcctgcagctcagacggcatgggaacccattacaactccctcatagtggaaagcaagctgaggatgcttgcattgggcctgactcaggaagtggtatcaagcgtcaggtccctggggcagctcttccattcctctctctgatgtttgcccccagaggaatgaagattcttctagattttagtacagaatggaggctgtcagtgatacccatatgttagaaaaagccaacagagcaataatgtctccaaaaaatgaaacatgaagcttttagaatgattggaaattacagttcgattttgaattatttgcaagccacttgaagatttcataaacctattgcatcaactctaacaatagtcctttactggtataattatctgcattttgcaggagtagagattgaggtacaaacagaggacacattttgcttgcctgaggcttcgatgaaacttctgacaatatcaggggacatatttatacttctaacagtatttttagctatttgatagacaacagttgcttctcttttcaaagatcacagccattgaggaatccaccatatttctgtagcaggaagaatgtttatctctgtgtcttgtctttctggttaaaggtatttacttccatcacactacctgacttcaaactatattacaaggctacagtaacaaaaacagcatggtactggtaccaaaacagatatatagaccagtggaacataacagaggcctcagaaacaacaccacacatctacaaccatctgatctttgacaaacctgacaaacamcagaaatagggaaaggattcccaattatataaatggtgttgggaaaactggctagccatatgcagaaagctgaaact

SEQ ID NO: 86009 - DNA, 648 bp, Homo sapiens
tacaactccacagcttggacaagcacccagtccttctctagtaagactcatggccatttacttatgttacaacacactaggcaaagatgaatatatactcagttatttcaaggactgtgagacataggtctgagttgacattaatctttcaggacgagaagtttatatttttgttgttgtttctttttgttttttcatgttccttcctttatagtgagtcatatagatttaaggttataaatggagtttgggttcaagttttgcttacagtgcatccactgggtccataagtcaatctggtgctttttttccttttccaaaatatataatttgttggacatacttgagagttgtcagaattcatattgttccttggctatgggataaaagctaccgtgctggtaaaagcctatgctacagcaaataaaatagattaacactctgggggataatgaataygttagtaaacccaaagagattaatccatttagaaaacaactaaaaacctggacataaggcaatacaagacatgagttgtgcatgtttacttgaagaacaagggaataggagcctctacaagtaaattccttactacctgattttagcctcaggagaaaggtcatcctgactgtgcacacaacagcaata

SEQ ID NO: 86010 - DNA, 615 bp, Homo sapiens
tgagggtcattctgtgagtgccagcctggaatatggtgccaaggttactttgacagatccagtgttgcagtccatgrcaaaatcctgtgcttactttcctccctttttcccaagtacatggaatctctctctgtgtatattgcctatagtagggggaatggtgacatgggtagtgtaaaactgtccttcttaccctcttcagtgtatcttttcgtattattgtactacaatcaggttctgtgatcttttacctgcttttcatagctcttgtgaaaatatttttggtgtgaatacttgttcaaatagatgtttctgcagggaaatgataactggagggtcctactccacctttttgctctatctctctctttctcaatgcttaaatatttcaaatgtgttttatgcacttttgcagacttaaaaaatttattgtacatggaacttctaattttattcatgaccaaaactgagaaacaatcaactctcctctgttacaaaaccacgttaccttcaacaatccagctacttactgctaaactagtctatatagtaatccattgttgctatgaagaacaaggctgggctgtctctgaagtaccattacgacacttgaaa

SEQ ID NO: 86011 - DNA, 699 bp, Homo sapiens
tatacgcagaaaaacatagtttaaaaatcaaatggaacaggccatataatgaaaaacattttttgctttacatctatattttaaaacacatgcttactttgctgcttcttgatttatgaactyacttaaaaagtaatctatatactccctcctataaatgagaattttgttgtttgtttatactctcatactctttccagtttggttccccagctttcctcccaccctcagctcccggtttgtgtcatttgtacttcaacttttacattgtcaaggttgattgcatttacattctatgccataactataatttaggcatcaaatctttagctctagattaattcttcctctgcccccaagcactccagtaaaatgtgtttacatagtgatgatagtgtaactattatttactaaaaatcccaagtagatttccattattatatattcttttctttttccacagtaaggttttgtgccattccaagaaaaatattaatatcaatcatttttttcttgtactttatcatgctacttcaagccatattatgcctagcttttcatgtatattattaattttatgttaaaattttgttagactttctgatttccatcctttattcttcttgagagaaacatatcttctcttccatatccctggtagcttccagttttttatctactccagctttgcttggatcc

SEQ ID NO: 86012 - DNA, 699 bp, Homo sapiens
tatacgcagaaaaacatagtttaaaaatcaaatggaacaggccatataatgaaaaacattttttgctttacatctatattttaaaacacatgcttactttgctgcttcttgatttatgaacttacttaaaaagtaatctatatactccctcctataaatgagaattttgttgtttgtttatactctcatactctttccagtttggttccccagctttcctcccaccctcagctcccggtttgtgtcatttgtacttcaacttttacattgtcaaggttgattgcatttacattctatgccataactataatttaggcatcaaatctttagctctagattaattcttcctctgcccccaagcactccagtaaaatgtgtttacatagtgatgatagtgtaactattatttactaaaaatcccaagtagatttccattattatatattcttttctttttccacagtaaggttttgtgccattccaagaaaaatattaatatcaatcatttttttcttgtactttatcatgctacttcaagccatattatgcctagcttttcatgtatattattaattttatgttaaaattttgttagactttctgatttccatcctttattcttcttragagaaacatatcttctcttccatatccctggtagcttccagttttttatctactccagctttgcttggatcc

SEQ ID NO: 86013 - DNA, 737 bp, Homo sapiens
atactgttctgttttcttaaactttttgtatataaatgaccccaaacttctacacttaggaacgctgacttccattctttggaatctgtatttcttggtaggccctcctcaaactttgccttygaacaaactctctttaaactaaattttgacctttttgattgttttaggttgatatcattatattgtctttcttgattctaccttaacattatttgtattttctttagtcaaactaacaaaaatttgcctattttattggccttctgcaataatcaattttgtatttacttgattgctttattgatttgtattttttttttttttttttgagacagagtcttgctctgccgcccaggctggagtgccgtggcgtgattttggctcactgcaagctctgcctcccgggttcactccattctcctgcctcagcctcctgagtagctgggactacaggcgcccgccaccactcctggctaattttttttgtatttttagtagagatggggtttcaccatgttagccaggatggtctcgatctcctgacctcgtgatccgcccacctcggcctcccaaaatgctgggattacaggcgtgaccaccggccaatttctattttttttttttaatgaacaaggtaactccaaagaatcagttaaaaaactaattttttatactaaaaaaattggctagaaacatgttggtgatcgaaatggaggccaaacaggtccaaacca

SEQ ID NO: 86014 - DNA, 567 bp, Homo sapiens
tttatctatgccacttagaaaacattcacatataaagaaggtcaatggtttttagaaaggagcrtaatgactaaactgaaaattgtcagtacaaggcaacatattactcaaatgttcttgacactaatagattttctgcctcttgctgttgatacatggatcatatgtaaaataagaaggtccaaactggagctgctttatgtctgccaagatttacataacagaaaatgtctgtaataatttccaatagcagccctgctttgtgaatgaaactgggggggaagcaaaggaaaggaaatgctaagtgccaggtctgtgtgtagcactcctctagggagaagaacacacctttggatgaatactgggctctcggaagtctctctgtaacaactagatacttggatgaggcagcagtctcttaggccctgctcttcaagttttaatgctttatgcagcttcctttgtgggtgatcccatgaatttaatgcctggctgtgaatttaatctctgaagtcaattttctagtaaaaacatgtaattattcttttttgaatgacatatttatgt

SEQ ID NO: 86015 - DNA, 753 bp, Homo sapiens
atgaaggcaagaaggtgagatagccaggtgtggtggctcactcgtgtaatctcaacactttgtgaggctgaggcaggtggattgcttgagcccaggagtttgagaccagcctcggcaatgtggcaaaaccctgtctctacaaaaaaaatttaaaaattagccaggcatagtggtgtatgcctatagtcccagctacttgggaggctgaggttgggggattgcttgagcctgggaagcagaggttacggtgagctgagatctcaccactgctcttcagcctgggcgacaaaaaagagaatgtctcaataaataaataaataaataaataaattagttaattaattaataaaggagagataggaaccttytcctttgttgaatccaagtttagtaggatgttcctttcttttctctctctttctttttctctctttctctctctctctttctttcctttctttctttctttctccttccttccttccttccttactttctttcttccttccttccttccttttttctttctttcttgacaagatctcaccctatcatccaggctggagtacagtggtacaatcatagctcactgcagccttcagctcttgagcttaaactatcctcccacctcagctttccaagtacctgggactctaggagcaagtcaccatgcctggtggatgttcttttctattgaaagtctagagtaattcatggccaatacttaattttagcagctttgttccttttgaa

SEQ ID NO: 86016 - DNA, 753 bp, Homo sapiens
atgaaggcaagaaggtgagatagccaggtgtggtggctcactcgtgtaatctcaacactttgtgaggctgaggcaggtggattgcttgagcccaggagtttgagaccagcctcggcaatgtggcaaaaccctgtctctacaaaaaaaatttaaaaattagccaggcatagtggtgtatgcctatagtcccagctacttgggaggctgaggttgggggattgcttgagcctgggaagcagaggttacggtgagctgagatctcaccactgctcttcagcctgggcgacaaaaaagagaatgtctcaataaataaataaataaataaataaattagttaattaattaataaaggagagataggaaccttctcctttgttgaatccaagtttagtaggatgttcctttcttttctctctctttctttttctctctttctctctctctctttctttcctttctttctttctttctcyttccttccttccttccttactttctttcttccttccttccttccttttttctttctttcttgacaagatctcaccctatcatccaggctggagtacagtggtacaatcatagctcactgcagccttcagctcttgagcttaaactatcctcccacctcagctttccaagtacctgggactctaggagcaagtcaccatgcctggtggatgttcttttctattgaaagtctagagtaattcatggccaatacttaattttagcagctttgttccttttgaa

SEQ ID NO: 86017 - DNA, 753 bp, Homo sapiens
atgaaggcaagaaggtgagatagccaggtgtggtggctcactcgtgtaatctcaacactttgtgaggctgaggcaggtggattgcttgagcccaggagtttgagaccagcctcggcaatgtggcaaaaccctgtctctacaaaaaaaatttaaaaattagccaggcatagtggtgtatgcctatagtcccagctacttgggaggctgaggttgggggattgcttgagcctgggaagcagaggttacggtgagctgagatctcaccactgctcttcagcctgggcgacaaaaaagagaatgtctcaataaataaataaataaataaataaattagttaattaattaataaaggagagataggaaccttctcctttgttgaatccaagtttagtaggatgttcctttcttttctctctctttctttttctctctttctctctctctctttctttcctttctttctttctttctccttccttccttccttccttactttctttcttccttccttccttccttttttctttctttcttgacaagatctcaccctrtcatccaggctggagtacagtggtacaatcatagctcactgcagccttcagctcttgagcttaaactatcctcccacctcagctttccaagtacctgggactctaggagcaagtcaccatgcctggtggatgttcttttctattgaaagtctagagtaattcatggccaatacttaattttagcagctttgttccttttgaa

SEQ ID NO: 86018 - DNA, 687 bp, Homo sapiens
gaaagagatgcacaaaagaaaatggtaggtgttgcttgcaggagtgtgataatagtgttgctcttctaaactggcaactttatgagtagatcatcaaagccaaggtattttactttgtggaataagaaacgatcacaccraaaataataaaattcagcactgcaggttttctgccctttataaatgtttttcaaagacggaaccgaaagaatagcttgagtgataacaagcttttcagaaggagctctggaaattaatatgggacaggtgatggagcaagactttcagcatgaagaagcccaggaactgggaaaacacaagtctttacttcagaatcaccccatagcctccaagtagtgtgttgcaggttgaatctagctgaaaatggcataaaacagaatattaatagctatatccacatatcactaaactaggtacattcttgatgttcctgaatataaggagattataaattaaaatgattctgaaaaactacagacattgatgcaagtttctagtttcaaccaggataatatcacatctcacctcaaacaaaaggcattttcttcagaaaggaactaaaaaaaaatggcctttattctatacttgcttatggttctggtttaaaaacaaaaacaggttccagaagactacttattcaaagaccctgccccacattcctcttga

SEQ ID NO: 86019 - DNA, 923 bp, Homo sapiens
gcataagaaaaatacacaccaattttattgtgatggtcatctataggaaaggagagagacaagtaggatagatagtggtgttacccttattacatttgatttatgaagaaaaaggaatttaagcaaatgtgcaaattcctttttctcaaaacgttattttgaatatgtgggaggtcatactattttttaagctttttggtatgttttaaatatttaaacataaaaacaaaatcaaatttaacaatgtaggccactctcctcaggaaatacattcttttatattttccaaaattttcattcgctccctttccttttctccctattttccccatcattcaccaaaatgctttgtaggtcttaactcctgaaaaaatttccagagtcctcactctgcctgcctctcccctctctgcacccctgctggatgtacacacacctctattatcttagctgtcatactgacatgtattgagctgaaccatgagagaytgctgcttttggtaggtcaaaacatttgaatatagggaatgtcatacagtttaactgataatgatatttacatatctgtctttgctatcagactctggaacccttgaaagtccatgtttgattcactgccctatccaaggattggtgcatatagggtgctcatttggacatttaaattaaattggtcccataattagaggcatttcctctgcacctctctttcagtttcttccccccagctttaaagggatagacatctgacacaaacattctccagcctagatcagaaaggaactgtagagtagtcattgttttggtatttgttccatggagttctacttatggaaaggactagaagtagcatatatgtgtgaagaattcataagagctgctcagctatgggacaaagggattcttggaaaactgagaagcca

SEQ ID NO: 86020 - DNA, 923 bp, Homo sapiens
gcataagaaaaatacacaccaattttattgtgatggtcatctataggaaaggagagagacaagtaggatagatagtggtgttacccttattacatttgatttatgaagaaaaaggaatttaagcaaatgtgcaaattcctttttctcaaaacgttattttgaatatgtgggaggtcatactattttttaagctttttggtatgttttaaatatttaaacataaaaacaaaatcaaatttaacaatgtaggccactctcctcaggaaatacattcttttatattttccaaaattttcattcgctccctttccttttctccctattttccccatcattcaccaaaatgctttgtaggtcttaactcctgaaaaaatttccagagtcctcactctgcctgcctctcccctctctgcacccctgctggatgtacacacacctctattatcttagctgtcatactgacatgtattgagctgaaccatgagagactgctgcttttggtaggtcaaaacatttgaatatagggaatgtcatacagtttaactgataatgatatttacatatctgtctttgctatcagactctggaacccttgaaagtccatgtttgattcactgccctatccaaggattggtgcatatagggtgctcatttggacatttaaattaaattggtcccataatkagaggcatttcctctgcacctctctttcagtttcttccccccagctttaaagggatagacatctgacacaaacattctccagcctagatcagaaaggaactgtagagtagtcattgttttggtatttgttccatggagttctacttatggaaaggactagaagtagcatatatgtgtgaagaattcataagagctgctcagctatgggacaaagggattcttggaaaactgagaagcca

SEQ ID NO: 86021 - DNA, 923 bp, Homo sapiens
gcataagaaaaatacacaccaattttattgtgatggtcatctataggaaaggagagagacaagtaggatagatagtggtgttacccttattacatttgatttatgaagaaaaaggaatttaagcaaatgtgcaaattcctttttctcaaaacgttattttgaatatgtgggaggtcatactattttttaagctttttggtatgttttaaatatttaaacataaaaacaaaatcaaatttaacaatgtaggccactctcctcaggaaatacattcttttatattttccaaaattttcattcgctccctttccttttctccctattttccccatcattcaccaaaatgctttgtaggtcttaactcctgaaaaaatttccagagtcctcactctgcctgcctctcccctctctgcacccctgctggatgtacacacacctctattatcttagctgtcatactgacatgtattgagctgaaccatgagagactgctgcttttggtaggtcaaaacatttgaatatagggaatgtcatacagtttaactgataatgatatttacatatctgtctttgctatcagactctggaacccttgaaagtccatgtttgattcactgccctatccaaggattggtgcatatagggtgctcatttggacatttaaattaaattggtcccataattagaggcatttcctctgcacctctctttcagtttcttccccccagctttaaagggatagacatctgacacaaacattctccagcctagatcagaaaggaactgtagagtagtcattgttttggtatttgttccatggagttctacttatggaaaggactagaagtagcatatatgtgtgaagaattcataagagctgctcagctatgggacmaagggattcttggaaaactgagaagcca

SEQ ID NO: 86022 - DNA, 1027 bp, Homo sapiens
tttggtttctcggtaataaccacatctcaatgagaccagccttcctggggaaggctattccatggtctatcagatcttttcattagggaaacttccctgctattccatctaagtagtttttcttaatttgatcctattacttccatgctttatacaaagatgagtatagcagttatcctcaataaacaaaaatgcaatacaaatgacactccaggctcatgtttccatccaatggccacatctctttacaaagtgagagtcaatgcaggtgtctgcagccagcttctataggtcccaaattttgatttagatgagcagtgccatcttcagtgtcaaatgtgtagccatcagtggcaccattctcgcaaacagatggcatgctcacagcacctcacccacattacaacaattgggactcagaggactgttcaagatggaggcacttaaggaattagmatgtgaccataactatcgactgagttatagatactgtgattttctggccttaggaaaaggaccatgaataagataacattagtctcatgaccatcaaatggaataagccaaggcagcagaagacattttgttcacacatcaggaagtacctgctgactagctagattattaggaaaggcaataaactgccaaaataggtggcatggcatcctccataggtcattaaaaacagtaatatgatcttctaagatttcctgcccaggcataagtgggtagataagatgaccttttcagattttaaaatgaagattttatgagtattcagaagatgcagtgagggaaaattgctcttaggaacaaaaacaaattctttggaagaggaaatgattcatttaaagaccattttaagaacttcagctgattttcctagaaataccttggtttcagagtaatttggaaataattcagtaaattgttatatctaaaataattaattagcttttaaagtcagatacttcattaatacacacacatatgtacatatacttcattaatacacacacatttatat

SEQ ID NO: 86023 - DNA, 1027 bp, Homo sapiens
tttggtttctcggtaataaccacatctcaatgagaccagccttcctggggaaggctattccatggtctatcagatcttttcattagggaaacttccctgctattccatctaagtagtttttcttaatttgatcctattacttccatgctttatacaaagatgagtatagcagttatcctcaataaacaaaaatgcaatacaaatgacactccaggctcatgtttccatccaatggccacatctctttacaaagtgagagtcaatgcaggtgtctgcagccagcttctataggtcccaaattttgatttagatgagcagtgccatcttcagtgtcaaatgtgtagccatcagtggcaccattctcgcaaacagatggcatgctcacagcacctcacccacattacaacaattgggactcagaggactgttcaagatggaggcacttaaggaattagaatgtgaccataactatcgactgagttatagatactgtgattttctggccttaggaaaaggaccatgaataagataacattagtctcatgaccatcaaatggaataagccaaggcagcagaagacattttgttcacacatcaggaagtacctgctgactagctagattattaggaaaggcaataaactgccaaaataggtggcatggcatcctccataggtcattaaaaacagtaatatgatcttctaagatttcctgcccaggcataagtgggtagataagatgaccttttcagattttaaaatgaagattttatgagtattcagaagatgcagtgagggaaaattgctcttaggaacaaaaacaaattctttggaagaggaaatgattcayttaaagaccattttaagaacttcagctgattttcctagaaataccttggtttcagagtaatttggaaataattcagtaaattgttatatctaaaataattaattagcttttaaagtcagatacttcattaatacacacacatatgtacatatacttcattaatacacacacatttatat

SEQ ID NO: 86024 - DNA, 1027 bp, Homo sapiens
tttggtttctcggtaataaccacatctcaatgagaccagccttcctggggaaggctattccatggtctatcagatcttttcattagggaaacttccctgctattccatctaagtagtttttcttaatttgatcctattacttccatgctttatacaaagatgagtatagcagttatcctcaataaacaaaaatgcaatacaaatgacactccaggctcatgtttccatccaatggccacatctctttacaaagtgagagtcaatgcaggtgtctgcagccagcttctataggtcccaaattttgatttagatgagcagtgccatcttcagtgtcaaatgtgtagccatcagtggcaccattctcgcaaacagatggcatgctcacagcacctcacccacattacaacaattgggactcagaggactgttcaagatggaggcacttaaggaattagaatgtgaccataactatcgactgagttatagatactgtgattttctggccttaggaaaaggaccatgaataagataacattagtctcatgaccatcaaatggaataagccaaggcagcagaagacattttgttcacacatcaggaagtacctgctgactagctagattattaggaaaggcaataaactgccaaaataggtggcatggcatcctccataggtcattaaaaacagtaatatgatcttctaagatttcctgcccaggcataagtgggtagataagatgaccttttcagattttaaaatgaagattttatgagtattcagaagatgcagtgagggaaaattgctcttaggaacaaaaacaaattctttggaagaggaaatgattcatttaaagaccattttaagaacttcagctgattttcctagaaataccttggtttcagagtaatttggaaataattcagtaaattgttatatctaaaataattaattagcttttaaagtcagatacktcattaatacacacacatatgtacatatacttcattaatacacacacatttatat

SEQ ID NO: 86025 - DNA, 612 bp, Homo sapiens
aaaaaawatatatatatatatatatatatttcttttctattaaaacaagctcaggcatattgctaaatggaaagcagactttgcattagttaatataaaacataatgcttccaaaaactatgggactagcagcagcccactttggtctgttcactgtcctttacttctaaggggttgcactggtttaattttctctgtgcccatcggagggcggtagttttctcctagcattgcagtgaaataggggaaattcatcccgattttctccacatgcaacctgaggaagaaagttttccaagttggaaagttacaagtcaaagtattgtcagaaaaggctcaaaactctaagctgttctcacaagtacctctttattggcatcacaagagataaaaagaaaatcaggaaaacagcctgtgaatcccagccctctcctgtaagcccatccttgcactttatgatttgcaagtttgttctttgttattattcagcagcagccgtgctacttgaaagtcaacaaaggtcgggcgtttagggagaagagaaacccagacacatgtttcaaacatgtcgtgctgctctcaggtggctcactggctcagcagctgagccat

SEQ ID NO: 86026 - DNA, 612 bp, Homo sapiens
aaaaaatawatatatatatatatatatatttcttttctattaaaacaagctcaggcatattgctaaatggaaagcagactttgcattagttaatataaaacataatgcttccaaaaactatgggactagcagcagcccactttggtctgttcactgtcctttacttctaaggggttgcactggtttaattttctctgtgcccatcggagggcggtagttttctcctagcattgcagtgaaataggggaaattcatcccgattttctccacatgcaacctgaggaagaaagttttccaagttggaaagttacaagtcaaagtattgtcagaaaaggctcaaaactctaagctgttctcacaagtacctctttattggcatcacaagagataaaaagaaaatcaggaaaacagcctgtgaatcccagccctctcctgtaagcccatccttgcactttatgatttgcaagtttgttctttgttattattcagcagcagccgtgctacttgaaagtcaacaaaggtcgggcgtttagggagaagagaaacccagacacatgtttcaaacatgtcgtgctgctctcaggtggctcactggctcagcagctgagccat

SEQ ID NO: 86027 - DNA, 2250 bp, Homo sapiens
ggctttccaaggttactctaatatcctccttgccttgtcattttgtgtggttaaaatctcttcctaccaccacaattcttgctgtcaaaggggaaagtactattcccttaaatatatttcttttactttcccgttttgcagaaaaaagttatgaaggagggtataggctttcccaatttttatgtaactgctgttttgaactatacaaatgacaatgcaacataattacagttttctttttctttttttttttttgcatcccatagtccttttaaaattcattcagagctaggcatggtggctcacacctgtaatcctagcactttgggaggctcaagtgggaggatcacttgaggccaggagtccaagaccagcctggacaacatagaaagcccctgtatctaaaaaaatacaaaaattagctgggtgtggtgctatgttcctgtattcccagctattcaggaggctgagatgggaggattgcttcagcccaggagttttaggctgcagtgagctgtgatcacaccattgtactccagcctgggtgacaatggggtcctgtctcttaaaaaaaataaataaaatttattcagtggcggaaatctcctgtccccacttccttaggcttatggtttttctgactcctcttagataatataatagaaagttctcagatggcttaagttgcaaacaagacttgaacacagaaattagaatgtcaaggccaagatattgaacaatgaagatttaacatcaaattctctgtttcctttttagctggggcttgcagctcaaggctggcagctggcaggagggccggggcatggttgactgctttctgtgtttctgtcttccaccttccttcccttcttcccagcttgctagctaattgctgactcttccaagttcagagaggtgagacagaagagggggaagatgataggaaaagtctaccttgaactagcactagatgaaactggtctctaactctttggcacaacagctatttacaggtgattctttctctccagggcaatattgaagtctattttagagattcacattctggagaccttgctccatagttcttttgagtgaggaaaatgcatttcctacccccaattttgggtccttctatagtctctagacatctaacatttacttccaactgtcttgtgggtatctctgccctgttagacagccccagggaacaagacctgtgcaccctgtaagctggtgccctttcatatatggcccccatctgctaatgtcagccagtcctgtcagctacccctatcactgcaggctgattagctttgtcaggcctgtctcaggaaccagtcctctgctcccagctgcagtgagtacatttcaagccactagctttttattcattggtcaatttaagtaggtgataaaattgctcttccttcgagggttatcttggacaaaagaccaatacagggttctgttaaaaaggagggataggcaaacaaacaaaatcaaggctcaggaaatccaagcttctatgactctgcttttgttgttgctgttgtttttactcactgaaggttttcttgctctcccaggttggggtgaggctggtcacctccttacttaccattggtgcagaagcacctggagcagtatctcccaaagcttcctgcttctctttgccttccctagtggccaagccaggttaatcctagtaggcatctcatttctaagtgagattcacttgacttcccgcaactgccctgtgaaatcgtagacatgggaaaagtgactcaaaaatgttcactgacatgttttctatctgagaacatgtctcactttctctttgattttccctattccaaaccttaacacatggttctaagctctttatatcaagctgccatctgatactgagcaggttcccacagacactggcctgcatctctggctctcagaatctctgtgtctcctgtgaacagatttatggagaacctrggaattatcaaagccatacatacagtatttggcattttcttcccggcatgggaaggaacaggagccacttcctttctggctaggagatgacttagttttatatttcatatcttctattcaaagggcatccctgttactttctggccagtctcccttctgggccctttaaaatcttaccattataaacaaaacttctctggctgcatggacacgttttctctttacatgagttatgctgcagatatacccagggcacac

SEQ ID NO: 86028 - DNA, 2250 bp, Homo sapiens
ggctttccaaggttactctaatatcctccttgccttgtcattttgtgtggttaaaatctcttcctaccaccacaattcttgctgtcaaaggggaaagtactattcccttaaatatatttcttttactttcccgttttgcagaaaaaagttatgaaggagggtataggctttcccaatttttatgtaactgctgttttgaactatacaaatgacaatgcaacataattacagttttctttttctttttttttttttgcatcccatagtccttttaaaattcattcagagctaggcatggtggctcacacctgtaatcctagcactttgggaggctcaagtgggaggatcacttgaggccaggagtccaagaccagcctggacaacatagaaagcccctgtatctaaaaaaatacaaaaattagctgggtgtggtgctatgttcctgtattcccagctattcaggaggctgagatgggaggattgcttcagcccaggagttttaggctgcagtgagctgtgatcacaccattgtactccagcctgggtgacaatggggtcctgtctcttaaaaaaaataaataaaatttattcagtggcggaaatctcctgtccccacttccttaggcttatggtttttctgactcctcttagataatataatagaaagttctcagatggcttaagttgcaaacaagacttgaacacagaaattagaatgtcaaggccaagatattgaacaatgaagatttaacatcaaattctctgtttcctttttagctggggcttgcagctcaaggctggcagctggcaggagggccggggcatggttgactgctttctgtgtttctgtcttccaccttccttcccttcttcccagcttgctagctaattgctgactcttccaagttcagagaggtgagacagaagagggggaagatgataggaaaagtctaccttgaactagcactagatgaaactggtctctaactctttggcacaacagctatttacaggtgattctttctctccagggcaatattgaagtctattttagagattcacattctggagaccttgctccatagttcttttgagtgaggaaaatgcatttcctacccccaattttgggtccttctatagtctctagacatctaacatttacttccaactgtcttgtgggtatctctgccctgttagacagccccagggaacaagacctgtgcaccctgtaagctggtgccctttcatatatggcccccatctgctaatgtcagccagtcctgtcagctacccctatcactgcaggctgattagctttgtcaggcctgtctcaggaaccagtcctctgctcccagctgcagtgagtacatttcaagccactagctttttattcattggtcaatttaagtaggtgataaaattgctcttccttcgagggttatcttggacaaaagaccaatacagggttctgttaaaaaggagggataggcaaacaaacaaaatcaaggctcaggaaatccaagcttctatgactctgcttttgttgttgctgttgtttttactcactgaaggttttcttgctctcccaggttggggtgaggctggtcacctccttacttaccattggtgcagaagcacctggagcagtatctcccaaagcttcctgcttctctttgccttccctagtggccaagccaggttaatcctagtaggcatctcatttctaagtgagattcacttgacttcccgcaactgccctgtgaaatcgtagacatgggaaaagtgactcaaaaatgttcactgacatgttttctatctgagaacatgtctcactttctctttgattttccctattccaaaccttaacacatggttctaagctctttatatcaagctgccatctgatactgagcaggttcccacagacactggcctgcatctctggctctcagaatctctgtgtctcctgtgaacagatttatggagaacctaggaattatcaaagccatacatacagtatttggcattttcttcccggcatgggaaggaacaggagccacttcctttctggctaggagatgacttagttttatatttcatatcttctattcaaagggcatccytgttactttctggccagtctcccttctgggccctttaaaatcttaccattataaacaaaacttctctggctgcatggacacgttttctctttacatgagttatgctgcagatatacccagggcacac

SEQ ID NO: 86029 - DNA, 2491 bp, Homo sapiens
ttcagcaatgacccaggaccttccttcttaaccccctaaatatttctgtccaactttctatgtcctgactcttgattctgtcactsctttgcacttgttgactgatcttgaattccctgagttatcctttcagtatgcaacaagcaatttagttcagactcacatttgtctggaaataatagaataattgctcccagttctgggccaactttacccaaagaaacagtaagaggttgtttatgtaatgtgatttctgagaccctgtgaaagtattactttcacccagtagctaaaaggcttatatgaaaaaatagttttataaatttgtcttaagcatcaccttttttttctttttttttttttgagacggagtctcactctgtcacccaggctggagcgcagtgatgtgatcttggctcactgcaacctccacctcctgggctcaagtgaatctcctgcctcagcctccctagtagctgagattacaggcacacaccaccactcccagttaatttttgtatttttagtagagacagggtttcaccgtgttggccaggttggtcttgaactcctgacctgaagcatcaccttgttttaaaatgggtaatcatgatgtgtatttagccagaaaaacattcaagtgcaaggtcgagaagaacaagttgtaccacttttaatctataattttgttttcacaattggcatacataaatttgaaagtacttcagttattgatttagctgcagaattatgaattttagataaacaataaataacttttagtttaagtatgtctcaaatattgcatgggacatacttatactaaaatatatattgttaatctaaaattcaaatttagctgggcattctgtatcttgattgcttgatctggcaactttatttgctggagcttccagcctgactacccataagcagctctcagataaaatgaacatcttctaaaacgcattatggtttggtttggtttggtttttgagacgaagtctcactcttgtcccccaggctcgagtgtaatggcgcgatctcggctcactgcaacctccggctcccagattcaagtgattctcctgcctcagcctcctgagtagctgggattacaggcgcctgccaccatgcctggctaatttttgtattttcagtagagaggggtttcaccatgttggccaggctggtcttgaactcctgacctcaggtgatccacccacctcagcctctcaaagtgctgggattacaggcgtgagccaccacaaccggccatgcattatgtttttaaatggcagtaatagatttgcatagtaatatgctgaggattgacctctgctcaattgagttcaaataatcaataacatcttctttctagtcttcctaagaaagaaaaggaggatggaaaccagattaacgaagatgagaaaacagtactgcaatacatagtttttacagtaatttcatctcagggatttctaggaagcctccaaaaatatatagggtcattgagaataactttggctgcaagtaacagaaaatgtagattcaaactggcttaaataataaggaaatgcaggaacacctgtaactggaagcccagaaagataatgatgccatgaaatcctaggttgtctctactactcccttctgcactcctcagtggcagcttcctctgagagctgcttccctttgtcacagcaagcatggctccaagtgacaaccagagctgcacacttccctgaccacattcagtaggagagaacataagcttctccctccagtctgattgagccagctcaaagcgtgactgcatccgtggactagtaactctcgttatgagaatggcatgtgcttatctgtttagaaatcagggttcctcctggagctaaggatgggatggaaatctaaacaaaaatgagatttgaaaagagttgatgaattttaggtaggcaacaagacctactaaaatatattattggttacttaatttcttattcaagtgggccattaatttgatgagaaatctgcccttaatgtgtctaaaagattgtaaaaccactgtattttgtttgcataacctgatgacttacatctcctttggtaacatacacctggattagaaatataggtaaacacttcaatagttttatatacacgggttttactttttttttctgagactttgaaacatcaacatgtttaaagtcattcttgaatctttcttttatgaaaaataataatgatgatgacacattaaatttgaatacattcttacttgaaacatttttatattcatctcatttgtgtttcacaataacctaaagaaagggcaggtattattagcctcatttttctgacaaggaaattgagacctaccttgataaagagaactgtccaagatcacattcaattacattggaaaatagaacaagaatctatttccttttgtcacaccttcttgctgcatggagtggaaaatttttat

SEQ ID NO: 86030 - DNA, 2491 bp, Homo sapiens
ttcagcaatgacccaggaccttccttcttaaccccctaaatatttctgtccaactttctatgtcctgactcttgattctgtcactcctttgcacttgttgactgatcttgaattccctgagttatcctttcagtatgcaacaagcaatttagttcagactcacatttgtctggaaataatagaataattgctcccagttctgggccaactttacccaaagaaacagtaagaggttgtttatgtaatgtgatttctgagaccctgtgaaagtattactttcacccagtagctaaaaggcttatatgaaaaaatagttttataaatttgtcttaagcatcaccttttttttctttttttttttttgagacggagtctcactctgtcacccaggctggagcgcagtgatgtgatcttggctcactgcaacctccacctcctgggctcaagtgaatctcctgcctcagcctccctagtagctgagattacaggcacacaccaccactcccagttaatttttgtatttttagtagagacagggtttcaccgtgttggccaggttggtcttgaactcctgacctgaagcatcaccttgttttaaaatgggtaatcatgatgtgtatttagccagaaaaacattcaagtgcaaggtcgagaagaacaagttgtaccacttttaatctataattttgttttcacaattggcatacataaatttgaaagtacttcagttattgatttagctgcagaattatgaattttagataaacaataaataacttttagtttaagtatgtctcaaatattgcatgggacatacttatactaaaatatatattgttaatctaaaattcaaatttagctgggcattctgtatcttgattgcttgatctggcaactttatttgctggagcttccagcctgactacccataagcagctctcagataaaatgaacatcttctaaaacgcattatggtttggtttggtttggtttttgagacgaagtctcactcttgtcccccaggctcgagtgtaatggcgcgatctcggctcactgcaacctccggctcccagattcaagtgattctcctgcctcagcctcctgagtagctgggattacaggcgcctgccaccatgcctggctaatttttgtattttcagtagagaggggtttcaccatgttggccaggctggtcttgaactcctgacctcaggtgatccacccacctcagcctctcaaagtgctgggattacaggcgtgagccaccacaaccggccatgcattatgtttttaaatggcagtaatagatttgcatagtaatatgctgaggattgacctctgctcarttgagttcaaataatcaataacatcttctttctagtcttcctaagaaagaaaaggaggatggaaaccagattaacgaagatgagaaaacagtactgcaatacatagtttttacagtaatttcatctcagggatttctaggaagcctccaaaaatatatagggtcattgagaataactttggctgcaagtaacagaaaatgtagattcaaactggcttaaataataaggaaatgcaggaacacctgtaactggaagcccagaaagataatgatgccatgaaatcctaggttgtctctactactcccttctgcactcctcagtggcagcttcctctgagagctgcttccctttgtcacagcaagcatggctccaagtgacaaccagagctgcacacttccctgaccacattcagtaggagagaacataagcttctccctccagtctgattgagccagctcaaagcgtgactgcatccgtggactagtaactctcgttatgagaatggcatgtgcttatctgtttagaaatcagggttcctcctggagctaaggatgggatggaaatctaaacaaaaatgagatttgaaaagagttgatgaattttaggtaggcaacaagacctactaaaatatattattggttacttaatttcttattcaagtgggccattaatttgatgagaaatctgcccttaatgtgtctaaaagattgtaaaaccactgtattttgtttgcataacctgatgacttacatctcctttggtaacatacacctggattagaaatataggtaaacacttcaatagttttatatacacgggttttactttttttttctgagactttgaaacatcaacatgtttaaagtcattcttgaatctttcttttatgaaaaataataatgatgatgacacattaaatttgaatacattcttacttgaaacatttttatattcatctcatttgtgtttcacaataacctaaagaaagggcaggtattattagcctcatttttctgacaaggaaattgagacctaccttgataaagagaactgtccaagatcacattcaattacattggaaaatagaacaagaatctatttccttttgtcacaccttcttgctgcatggagtggaaaatttttat

SEQ ID NO: 86031 - DNA, 1136 bp, Homo sapiens
ataaaaagactgagaaaatgaataatggttttctctgaggatgatagaaatgtttattcttattcttctttgcttctctctgctaagttttccacatgactatacattgcttttgtaattataaaaataacttatttagaatataaatttcttacatttaggtaataaatgaaactaagtaaataaccagagatcatattcttgagaatgtagacaagatatgagagatgttgaaaattaatagtaatattataaatccttgaggggatggataccccattctccatgatgtgcttatttcacattgcatgcctgtatctaaacactttatgtaccccataaatatatatacctactatgtacccccaaaatttttttaagaaaaaaataatatttatctatatattaagggcattgataggagcattatgttcctaactctcaaagtatatagtgttatccacatgttacaagaatgaaagccaaggctcaggaaaatacataagttgtctaagtttgtatagatcatcaggatcaaggaagataaatcctagatccctgtgacttcaaaatgtttgtcattgtcacggtgctatactgccttaattgaagtgcatttctatacacagttgaactaccacatttattcaattttttaatagagaagtaatgactccmagccccaatgatattaataaatcaaaagcatatttctaaattatttttatccttacttttttattttatttatttattgatttagaaatagaagcttgttctgtctcccaggctggagtgcagtggcacaatctcggctcactgcaacctctgtctcccaggttccagcgattctcctgcctcagcctcctgagtagctgagattacagtcacccaccaccatgcccagctaatttttgtatttttagtagagatggggtttcaccacattggccaggctggtctcaaactcgtgatctcaggtgatccacccacctcggactcctaaagtgctagattacaggtgtgagccaccatgctcggctatccttgctttttaaaaaaagtatgtgcatgtgtaaattaatatattaattatttccattacaattaatgagcatgttacagtttacgatgca

SEQ ID NO: 86032 - DNA, 1136 bp, Homo sapiens
ataaaaagactgagaaaatgaataatggttttctctgaggatgatagaaatgtttattcttattcttctttgcttctctctgctaagttttccacatgactatacattgcttttgtaattataaaaataacttatttagaatataaatttcttacatttaggtaataaatgaaactaagtaaataaccagagatcatattcttgagaatgtagacaagatatgagagatgttgaaaattaatagtaatattataaatccttgaggggatggataccccattctccatgatgtgcttatttcacattgcatgcctgtatctaaacactttatgtaccccataaatatatatacctactatgtacccccaaaatttttttaagaaaaaaataatatttatctatatattaagggcattgataggagcattatgttcctaactctcaaagtatatagtgttatccacatgttacaagaatgaaagccaaggctcaggaaaatacataagttgtctaagtttgtatagatcatcaggatcaaggaagataaatcctagatccctgtgacttcaaaatgtttgtcattgtcacggtgctatactgccttaattgaagtgcatttctatacacagttgaactaccacatttattcaattttttaatagagaagtaatgactcccagccccaatgatattaataaatcaaaagcatatttctaaattatttttatccttacttttttattttatttatttattgatttagaaatagaagcttgytctgtctcccaggctggagtgcagtggcacaatctcggctcactgcaacctctgtctcccaggttccagcgattctcctgcctcagcctcctgagtagctgagattacagtcacccaccaccatgcccagctaatttttgtatttttagtagagatggggtttcaccacattggccaggctggtctcaaactcgtgatctcaggtgatccacccacctcggactcctaaagtgctagattacaggtgtgagccaccatgctcggctatccttgctttttaaaaaaagtatgtgcatgtgtaaattaatatattaattatttccattacaattaatgagcatgttacagtttacgatgca

SEQ ID NO: 86033 - DNA, 1136 bp, Homo sapiens
ataaaaagactgagaaaatgaataatggttttctctgaggatgatagaaatgtttattcttattcttctttgcttctctctgctaagttttccacatgactatacattgcttttgtaattataaaaataacttatttagaatataaatttcttacatttaggtaataaatgaaactaagtaaataaccagagatcatattcttgagaatgtagacaagatatgagagatgttgaaaattaatagtaatattataaatccttgaggggatggataccccattctccatgatgtgcttatttcacattgcatgcctgtatctaaacactttatgtaccccataaatatatatacctactatgtacccccaaaatttttttaagaaaaaaataatatttatctatatattaagggcattgataggagcattatgttcctaactctcaaagtatatagtgttatccacatgttacaagaatgaaagccaaggctcaggaaaatacataagttgtctaagtttgtatagatcatcaggatcaaggaagataaatcctagatccctgtgacttcaaaatgtttgtcattgtcacggtgctatactgccttaattgaagtgcatttctatacacagttgaactaccacatttattcaattttttaatagagaagtaatgactcccagccccaatgatattaataaatcaaaagcatatttctaaattatttttatccttacttttttattttatttatttattgatttagaaatagaagcttgttctgtctcccaggctggagtgcartggcacaatctcggctcactgcaacctctgtctcccaggttccagcgattctcctgcctcagcctcctgagtagctgagattacagtcacccaccaccatgcccagctaatttttgtatttttagtagagatggggtttcaccacattggccaggctggtctcaaactcgtgatctcaggtgatccacccacctcggactcctaaagtgctagattacaggtgtgagccaccatgctcggctatccttgctttttaaaaaaagtatgtgcatgtgtaaattaatatattaattatttccattacaattaatgagcatgttacagtttacgatgca

SEQ ID NO: 86034 - DNA, 784 bp, Homo sapiens
tttcaagtcctggaaatggccctgagggcaaacaaaacaagaacaaaaatacaacttttaaaccaacagaagaaaacttgatgtgcccaacagaaagcaaaggagaggaatgaaaataagcgagaagcacgtataaatcaactgcatttctctacacgaacatgaacatgtggaaacccaggttaaaagcacaacagcacccctgtcactttaaggaaaaagtacttcgatatacatttagcaaaacatgtaccagatctgtgtgacaaaattcacaaaataccgggaatgtccattctcccaaaattgatctacagatgtcatgtaattcctatcaaaatcccagtatgtctttttgtggtcataaacaaggtactatatgtgtgtgtatgtgcgtaaaggacctcaaatgactagaatgttttggaaaaaagaattagagaaatcgctctacccagcgtcatggcttgttgaatagctacagtcatcagactacgtggtgctcatggaggaagagaaacayggatggagcgaaatggagactgtggagcgagacccacacagctacagccttttgatttttgacaaagataccaaagcaattcagtggaggaaggagaggcttttcaacaaagggtgctggcacagtggggcctcaataggcaaaaaagtgaacctcaacctatatctctcacctcatacaaaaattaactcagcatggaacttaggccgggcgcagtggctcacacccataatcccagcactttgggaagctgaggcgggt

SEQ ID NO: 86035 - DNA, 784 bp, Homo sapiens
tttcaagtcctggaaatggccctgagggcaaacaaaacaagaacaaaaatacaacttttaaaccaacagaagaaaacttgatgtgcccaacagaaagcaaaggagaggaatgaaaataagcgagaagcacgtataaatcaactgcatttctctacacgaacatgaacatgtggaaacccaggttaaaagcacaacagcacccctgtcactttaaggaaaaagtacttcgatatacatttagcaaaacatgtaccagatctgtgtgacaaaattcacaaaataccgggaatgtccattctcccaaaattgatctacagatgtcatgtaattcctatcaaaatcccagtatgtctttttgtggtcataaacaaggtactatatgtgtgtgtatgtgcgtaaaggacctcaaatgactagaatgttttggaaaaaagaattagagaaatcgctctacccagcgtcatggcttgttgaatagctacagtcatcagactacgtggtgctcatggaggaagagaaacacggatggagcgaaatggagactgtggagcgagacccacacagctacagccttttgatttttgacaaagataccaaagcaattcagtggaggaaggagaggcttttcaacaaagggtgctggcacagtggggcctcaatagrcaaaaaagtgaacctcaacctatatctctcacctcatacaaaaattaactcagcatggaacttaggccgggcgcagtggctcacacccataatcccagcactttgggaagctgaggcgggt

SEQ ID NO: 86036 - DNA, 784 bp, Homo sapiens
tttcaagtcctggaaatggccctgagggcaaacaaaacaagaacaaaaatacaacttttaaaccaacagaagaaaacttgatgtgcccaacagaaagcaaaggagaggaatgaaaataagcgagaagcacgtataaatcaactgcatttctctacacgaacatgaacatgtggaaacccaggttaaaagcacaacagcacccctgtcactttaaggaaaaagtacttcgatatacatttagcaaaacatgtaccagatctgtgtgacaaaattcacaaaataccgggaatgtccattctcccaaaattgatctacagatgtcatgtaattcctatcaaaatcccagtatgtctttttgtggtcataaacaaggtactatatgtgtgtgtatgtgcgtaaaggacctcaaatgactagaatgttttggaaaaaagaattagagaaatcgctctacccagcgtcatggcttgttgaatagctacagtcatcagactacgtggtgctcatggaggaagagaaacacggatggagcgaaatggagactgtggagcgagacccacacagctacagccttttgatttttgacaaagataccaaagcaattcagtggaggaaggagaggcttttcaacaaagggtgctggcacagtggggcctcaataggcaaaaaagtgaacctcaacctatatctctcacctcatacaaaaattaactcagcatggaacttaggccgggcgcagtggctcacacccataatcccagcacttygggaagctgaggcgggt

SEQ ID NO: 86037 - DNA, 920 bp, Homo sapiens
aaaattatagccaggtaggaggaataaattatagtgttctatagacctggaattgtttcttaaagggaaactctgttgtatgaaaagtaacaataataacaagcaccattttaagtgcattacataccttaactcattttaacttcacgatgatttgatgaggtgagtatgattattaactccatcttgtagatgaatttgagtgagatagaggttaataaattgccattttaccagattagcaagtggtstaaccagaatttaaacccaaacgctttagctccagaatccaggcccttgtttacctgggtacactactagttgaaggtactaaaaatgtttctctttctaaaaaatgtttatttatttgatctgagagtatcgggggaaccagcccccaatatttcaatgtaggttcttttctattttccctaagtgtcagccagtctcagaaataaagagaaagagtacaaagagaagaattttacagctgggctgctggggatgacatcacatatcagcaggttccatgatgcccacttgagctgcaaaaccagcaagtttttattagggattttagaaggggagggtatgtatgaacagggagtaggtcacaaggatcacatgcttcaaagggcaataaaagatcacaaagcagagggtagagcaagatcacaaggcaagggcgaaattagaattattgatgaaggtccatgtctcactgggcactcattgtcttgataaacatcttaacaggaaacagggtttgagagcagacaaccagtctgactagaatttaccaggctggaacttcccaagcctagtaagcctgagggcactgcaggagaccagggcttatttcatcccttatctcaaccacataagacagacattcccagagcagccatgtatagacctac

SEQ ID NO: 86038 - DNA, 755 bp, Homo sapiens
aaaaagtcctggagatggacagtggtgatggttgcaaaacagtgtgaatgtacttattgccactgtacatttaaaagtgaacttttaagtgaattgtacacttaaaaatggctaacgtggtaaattttatgttacgcataatttatgactataaaagatgaaaaaacctctcttttattgatcctctatttcataccaggaactattataagcattttcacttatctacacaagtaccagctgaaatgatattgcccccaatttttgtactccaagacacagccgaggttaacagctaatcgttagtggagactgtgttggaaccatggtcatcctccctttaatcaaggctcccttttgctgactttgttgctctttgaaaactcttgcaaagtactgctctagggaagcctagaggagagtaagtgtgtgatagaaggggaggtgtggtaggcacaggcctctctagctgcagtggaggtaggtgtgatctctgttcccgtaattgyagtatgggtccctaagtgtggttccatgacctcctgtaccaataaggaacttattcaaaatgcaaaattttggctctatcacaccttttctagaaatctgaatttaacaatcctggaggattcttaagcacagggaagtttcagactcactgcactggaaggaaggcagcgtatcctttccaccagaggtgtgatcaggagaagcagcaattaaacaggctgaaggatttgtgagttcttaccaga

SEQ ID NO: 86039 - DNA, 755 bp, Homo sapiens
aaaaagtcctggagatggacagtggtgatggttgcaaaacagtgtgaatgtacttattgccactgtacatttaaaagtgaacttttaagtgaattgtacacttaaaaatggctaacgtggtaaattttatgttacgcataatttatgactataaaagatgaaaaaacctctcttttattgatcctctatttcataccaggaactattataagcattttcacttatctacacaagtaccagctgaaatgatattgcccccaatttttgtactccaagacacagccgaggttaacagctaatcgttagtggagactgtgttggaaccatggtcatcctccctttaatcaaggctcccttttgctgactttgttgctctttgaaaactcttgcaaagtactgctctagggaagcctagaggagagtaagtgtgtgatagaaggggaggtgtggtaggcacaggcctctctagctgcagtggaggtaggtgtgatctctgttcccgtaattgtagtatgggtccctaagtgtggttccatgacctcctgtaccaataaggaacttattcaaaatgcaaaattttggctctatcacaccttttctagaaatctgaatttaacaatcctggaggattcttaagcacagggaagtttcagactcactgcactggaargaaggcagcgtatcctttccaccagaggtgtgatcaggagaagcagcaattaaacaggctgaaggatttgtgagttcttaccaga

SEQ ID NO: 86040 - DNA, 755 bp, Homo sapiens
aaaaagtcctggagatggacagtggtgatggttgcaaaacagtgtgaatgtacttattgccactgtacatttaaaagtgaacttttaagtgaattgtacacttaaaaatggctaacgtggtaaattttatgttacgcataatttatgactataaaagatgaaaaaacctctcttttattgatcctctatttcataccaggaactattataagcattttcacttatctacacaagtaccagctgaaatgatattgcccccaatttttgtactccaagacacagccgaggttaacagctaatcgttagtggagactgtgttggaaccatggtcatcctccctttaatcaaggctcccttttgctgactttgttgctctttgaaaactcttgcaaagtactgctctagggaagcctagaggagagtaagtgtgtgatagaaggggaggtgtggtaggcacaggcctctctagctgcagtggaggtaggtgtgatctctgttcccgtaattgtagtatgggtccctaagtgtggttccatgacctcctgtaccaataaggaacttattcaaaatgcaaaattttggctctatcacaccttttctagaaatctgaatttaacaatcctggaggattcttaagcacagggaagtttcagactcactgcactggaaggaaggcagcgtatcctttccaccagaggtgtratcaggagaagcagcaattaaacaggctgaaggatttgtgagttcttaccaga

SEQ ID NO: 86041 - DNA, 755 bp, Homo sapiens
aaaaagtcctggagatggacagtggtgatggttgcaaaacagtgtgaatgtacttattgccactgtacatttaaaagtgaacttttaagtgaattgtacacttaaaaatggctaacgtggtaaattttatgttacgcataatttatgactataaaagatgaaaaaacctctcttttattgatcctctatttcataccaggaactattataagcattttcacttatctacacaagtaccagctgaaatgatattgcccccaatttttgtactccaagacacagccgaggttaacagctaatcgttagtggagactgtgttggaaccatggtcatcctccctttaatcaaggctcccttttgctgactttgttgctctttgaaaactcttgcaaagtactgctctagggaagcctagaggagagtaagtgtgtgatagaaggggaggtgtggtaggcacaggcctctctagctgcagtggaggtaggtgtgatctctgttcccgtaattgtagtatgggtccctaagtgtggttccatgacctcctgtaccaataaggaacttattcaaaatgcaaaattttggctctatcacaccttttctagaaatctgaatttaacaatcctggaggattcttaagcacagggaagtttcagactcactgcactggaaggaaggcagcgtatcctttccaccagaggtgtgaycaggagaagcagcaattaaacaggctgaaggatttgtgagttcttaccaga

SEQ ID NO: 86042 - DNA, 685 bp, Homo sapiens
agtgttatgtgctggtattgaagaggtaaaacctacctcttaatagcattgtaattttatttgccttttagttcatctacttatatatttgtactttttctgatatttagattcacagttctttttccttccttctcaatcaattgtaacctccttgaagggagaaaattacctgtgaaacctaggtaatattttgttgcacagtctgaaatcaacaaatctgggctcaaattctagttctacctcttatttactagatgtgaaatttgggcacgttttctagcctctgagactaagtgcgatcacctgaggggtggggacgacagttgctgagagtggaatgagatgctgcttgcaacacgtctggcgcagggttgcccctctggctctgggcagtggccttttctcctgcccttctcgacactgagtagccccagacatcacggtgattcaggttcagggcaggttgggsaaagtatcaggagacagtgcctcggagtggtttggttttcttctgttctgtttctcattttgaaacttccatggaaagatttcatgatatgctggaaaatgtttacatttttgttgttttaaaattttatttaagatatgctttcaaattccctttttaaaccacaaggaaaggtggttgatatggtaactaagctttaagaagaaacatgca

SEQ ID NO: 86043 - DNA, 1333 bp, Homo sapiens
ctgggttaagtgttaaaattctgggttggttttttttcctctacatccagtctcatgagaaattctaagagttctaagttacatacttgtcattgctaatgtgtcttgaaatgagctgaaggggaattggcaccaaaatcaagattgagtgttagctaaatgattaagaaagaatatactgagcttagagtgctttgtgcttttattttagagcagatactgctccttctctcctggccaggttcagtattatttcttccgtcctagccagcctcacaccaacactaagcattgcttaagtatttgccatgtttaagctggaaaggaaatgtgtttcttcacctttggaaagatcgaggtgctagttttcattcttgttgatggtgtttagtatttgctgcagctgtacacaaattcctcaaacttcatgagcataaattgtttgcctttagctttctcaagtttggaatctgcttcttagcctcatttctcaacattgaaatttgtataaaccttaacagcaccagtctggaagtcagttatactcatttagtcaaacagccattattaagaacctattatgtagatgaatatggtctttatctttgagactcagtctcactctgtcgcccaggctggagtgcagtggcatgatctctgctcactacaacctccacctccagggcttgagcaattctcgtgcctcagcctcccgagtagctgggactacaggtgcataccataacrcccagctaatttttgtatttgtagtagagatggggttttaccatgttccacaggttggtctcgaactcctgacctcaggtgatctgcccaccttggcctcccaaagtgctgggattacaagcatgagccatcgcacccggcatggtctttaaagctccaatgaaaaatcatttttctctcttacttagaatggtaccaaaccaccactggatgcagatgtaaatttggaagcaattgctggtgaccttcgctgtgattgctatacgtaagtgtttaaatcttaagtcaattcactctctggggttcaatttcctcatctataaaatgaggggtgatgatgctcacctcagcagattgttgggaggattaaatgaggtatcccatgaagcacataaagtgtctggcatctcccttcttagagaagagactgcacatttggaggccctgaaggaattcctgggaacaggggagtcctttcatatgttgactcttggtacttaacctaccctaaccagcactgctgtcctttacaaattgtactggtgcgtcagcatttaaaagagactaatctacaagtgccacattt

SEQ ID NO: 86044 - DNA, 1333 bp, Homo sapiens
ctgggttaagtgttaaaattctgggttggttttttttcctctacatccagtctcatgagaaattctaagagttctaagttacatacttgtcattgctaatgtgtcttgaaatgagctgaaggggaattggcaccaaaatcaagattgagtgttagctaaatgattaagaaagaatatactgagcttagagtgctttgtgcttttattttagagcagatactgctccttctctcctggccaggttcagtattatttcttccgtcctagccagcctcacaccaacactaagcattgcttaagtatttgccatgtttaagctggaaaggaaatgtgtttcttcacctttggaaagatcgaggtgctagttttcattcttgttgatggtgtttagtatttgctgcagctgtacacaaattcctcaaacttcatgagcataaattgtttgcctttagctttctcaagtttggaatctgcttcttagcctcatttctcaacattgaaatttgtataaaccttaacagcaccagtctggaagtcagttatactcatttagtcaaacagccattattaagaacctattatgtagatgaatatggtctttatctttgagactcagtctcactctgtcgcccaggctggagtgcagtggcatgatctctgctcactacaacctccacctccagggcttgagcaattctcgtgcctcagcctcccgagtagctgggactacaggtgcataccataacgcccrgctaatttttgtatttgtagtagagatggggttttaccatgttccacaggttggtctcgaactcctgacctcaggtgatctgcccaccttggcctcccaaagtgctgggattacaagcatgagccatcgcacccggcatggtctttaaagctccaatgaaaaatcatttttctctcttacttagaatggtaccaaaccaccactggatgcagatgtaaatttggaagcaattgctggtgaccttcgctgtgattgctatacgtaagtgtttaaatcttaagtcaattcactctctggggttcaatttcctcatctataaaatgaggggtgatgatgctcacctcagcagattgttgggaggattaaatgaggtatcccatgaagcacataaagtgtctggcatctcccttcttagagaagagactgcacatttggaggccctgaaggaattcctgggaacaggggagtcctttcatatgttgactcttggtacttaacctaccctaaccagcactgctgtcctttacaaattgtactggtgcgtcagcatttaaaagagactaatctacaagtgccacattt

SEQ ID NO: 86045 - DNA, 1333 bp, Homo sapiens
ctgggttaagtgttaaaattctgggttggttttttttcctctacatccagtctcatgagaaattctaagagttctaagttacatacttgtcattgctaatgtgtcttgaaatgagctgaaggggaattggcaccaaaatcaagattgagtgttagctaaatgattaagaaagaatatactgagcttagagtgctttgtgcttttattttagagcagatactgctccttctctcctggccaggttcagtattatttcttccgtcctagccagcctcacaccaacactaagcattgcttaagtatttgccatgtttaagctggaaaggaaatgtgtttcttcacctttggaaagatcgaggtgctagttttcattcttgttgatggtgtttagtatttgctgcagctgtacacaaattcctcaaacttcatgagcataaattgtttgcctttagctttctcaagtttggaatctgcttcttagcctcatttctcaacattgaaatttgtataaaccttaacagcaccagtctggaagtcagttatactcatttagtcaaacagccattattaagaacctattatgtagatgaatatggtctttatctttgagactcagtctcactctgtcgcccaggctggagtgcagtggcatgatctctgctcactacaacctccacctccagggcttgagcaattctcgtgcctcagcctcccgagtagctgggactacaggtgcataccataacgcccagctaatttttgtatttgtagtagagayggggttttaccatgttccacaggttggtctcgaactcctgacctcaggtgatctgcccaccttggcctcccaaagtgctgggattacaagcatgagccatcgcacccggcatggtctttaaagctccaatgaaaaatcatttttctctcttacttagaatggtaccaaaccaccactggatgcagatgtaaatttggaagcaattgctggtgaccttcgctgtgattgctatacgtaagtgtttaaatcttaagtcaattcactctctggggttcaatttcctcatctataaaatgaggggtgatgatgctcacctcagcagattgttgggaggattaaatgaggtatcccatgaagcacataaagtgtctggcatctcccttcttagagaagagactgcacatttggaggccctgaaggaattcctgggaacaggggagtcctttcatatgttgactcttggtacttaacctaccctaaccagcactgctgtcctttacaaattgtactggtgcgtcagcatttaaaagagactaatctacaagtgccacattt

SEQ ID NO: 86046 - DNA, 805 bp, Homo sapiens
attaatttccctgaatgtcatttctcagtgttaattttctgtgaccttgtactgatttttccaattgcctctcattgcttaattccaaagatgcacctttttatatgtcttttctgacggccttcagcctcagtgaagactcactcttataaaatgtcccattttcaaacaacaaatttattcaaaagtcattctaactcataatggcattatttgaaacactatagtttataagtatacataaaaatagttacaccatgtaaaaattccttaccctacggtattatgtactttgcacagtgacctctgctccactttgtatttcccatccaactaagaataggaggggagaaaactatgccaaaaaagttgactcaggaaacaattccaaaatctcacgcacttgaaaatatgtgtagctagtacggaattgaggaaaatctgaatgaaaatgatgtagaatcaaaacataaattacacaagactcccctgaaccatgccagtagycgtacctttagagctggctagagatgctgcttagttgagccctgtgctttagatggcctgcatattataaacacatattcagaaaaattcattaaagacacagggggacacctaccatcggtatcttgtgctcaaggctaacagagctcaatataaaatcccaaatattaatccttataactaacactattcagggcgaaaaaagacagctgcatccaaatgtcatgaaggtttatgggttatgctgctgcctacagtacagactgaaagtgcttagtttaacaacaaaaaaatcaaa

SEQ ID NO: 86047 - DNA, 805 bp, Homo sapiens
attaatttccctgaatgtcatttctcagtgttaattttctgtgaccttgtactgatttttccaattgcctctcattgcttaattccaaagatgcacctttttatatgtcttttctgacggccttcagcctcagtgaagactcactcttataaaatgtcccattttcaaacaacaaatttattcaaaagtcattctaactcataatggcattatttgaaacactatagtttataagtatacataaaaatagttacaccatgtaaaaattccttaccctacggtattatgtactttgcacagtgacctctgctccactttgtatttcccatccaactaagaataggaggggagaaaactatgccaaaaaagttgactcaggaaacaattccaaaatctcacgcacttgaaaatatgtgtagctagtacggaattgaggaaaatctgaatgaaaatgatgtagaatcaaaacataaattacacaagactcccctgaaccatgccagtagccgtacctttagagctggctagagatgctgcttagttgagccctgtgctttagatggcctgcatattataaacacatattcagaaaaattcattaaagacacagggggacacctaccatcggtatcttgtgctcaaggctaacagagctcaatataaaatcccmaatattaatccttataactaacactattcagggcgaaaaaagacagctgcatccaaatgtcatgaaggtttatgggttatgctgctgcctacagtacagactgaaagtgcttagtttaacaacaaaaaaatcaaa

SEQ ID NO: 86048 - DNA, 805 bp, Homo sapiens
attaatttccctgaatgtcatttctcagtgttaattttctgtgaccttgtactgatttttccaattgcctctcattgcttaattccaaagatgcacctttttatatgtcttttctgacggccttcagcctcagtgaagactcactcttataaaatgtcccattttcaaacaacaaatttattcaaaagtcattctaactcataatggcattatttgaaacactatagtttataagtatacataaaaatagttacaccatgtaaaaattccttaccctacggtattatgtactttgcacagtgacctctgctccactttgtatttcccatccaactaagaataggaggggagaaaactatgccaaaaaagttgactcaggaaacaattccaaaatctcacgcacttgaaaatatgtgtagctagtacggaattgaggaaaatctgaatgaaaatgatgtagaatcaaaacataaattacacaagactcccctgaaccatgccagtagccgtacctttagagctggctagagatgctgcttagttgagccctgtgctttagatggcctgcatattataaacacatattcagaaaaattcattaaagacacagggggacacctaccatcggtatcttgtgctcaaggctaacagagctcaatataaaatcccaaatattaatccttataactaacactattcagggcgaaaaaagacagctgcatccaaatgtcatgaaggtttatgggttatgctgctgcctacagtacagactgaaagtgcttagtttaacaamaaaaaaatcaaa

SEQ ID NO: 86049 - DNA, 718 bp, Homo sapiens
tgtgacaccatcatgagggcctcaccctcttggcctcatctaaccctcattacctctcaaagcccccatgtccaaataccattacattggggcttagggcttcaacatatgaattttggggaacacaattcagtctatagcaatttataaagaaagyggctagaggtcaaggggaaacatgataggggatgggatgggttgtgaaggcttttttaatgaaaagagttagggctttcctttatagacaaaaggtagtcactgaacacctattctattatatattagctgggtgcccttgagcggtttctgtatacctcatcttcctattataagtattgattaattaatactaccatctgggtgtgataacagtcaatagtataatgcagtaattttgcaatatgagaggtagaaaattctgttaaaccttattattgggggaatcaaactagtttgaaaaaagatgcatcaactaagagctaagagaggaggagttagaaatggggagaaaaaggctgcatctcaataccggctatacgctgaccttagtttcaggcactgtggaggaagatggggctggatgaaatcgggattgaataagggaaaagactgtcctagaaagctagaccctttatagaggtgcagagcttcccacagttgctagtccctagatcttctacgttgctttttgattcccttaatcctacctattaacatt

SEQ ID NO: 86050 - DNA, 533 bp, Homo sapiens
tgcatgataatgctagaaataggtaataaaactctcaggaggaaaatttcaccataaaaaataggaagtatgaaggttagaataagttaaaataatttcaatgtactttttaaaaacatatgactaaatgatgaaaggaagtcgtatacaagattaagaacaagcattttttaaaaccaggaacactaagtaaaaaataaaaaataaattcaattaaaatttggaaagtagaatagctaaatagaataagaaataaagttaaataacaaaacaggtaagatttgaagaggaaataaagtccaaggtcattcaagtagcatagaattctaagatgtgagcagagtaggtgaatagccgagtagatctcccaagggcagaaccaagaaggctacttcttacccttagcccacattcttaagctcttgtctgacccacctctwcgctacaggtttgcgttataccagcggtcagacagacgtctgcatgttattcttggtctgcccagagtgaccgtcctctctgtttccgtgttg

SEQ ID NO: 86051 - DNA, 539 bp, Homo sapiens
ggaggtctggtgaccattaaacacaatagggatgaaacattcttggtctgttttccatttcccgcccaaactcaacatgggactgaatttaagctggctttagwgtgtgtgtgtgtgtgtttgtgtgtgtgtgtgtgtttttagtatgatacatcttctcatttccaactatagtactgctttcaccatctgtttgtgatttctctgtggcaaacctctcagatccccctgagaaggggcgttgtttaccactcctttgttggtcttctcctctgttgacatctactcagcttaaatcccagagggttaaattccacaaatatttacagaaaaactcctttgttcagggtactgggctggacccagcagggaatttaggggtaagagacattcttgctttgccaaaagcttaagatctagttaaaaaaaaaaaaaaaaaagaataatgataataaaataactgacctgagagatgcaggtctattcagaggacaaaaggattggggagaatcgagaggttttatagtggaggctgaatt

SEQ ID NO: 86052 - DNA, 1102 bp, Homo sapiens
  misc_feature (1)...(1102): n = A,T,C or G
tctaagaaaacaaaggctaatactgcrtaaaaacatgctcattgctacagtatttattatagcaaaaaaaacacaaaacctaaatgttcttcaatcgggaaatggtttacaaattatagtacaggggatgattatccagtcagtacaatcatgtttttaaagattatattatgacatagggaaatgtataaatataatgttaaatagaaaatcagagcacaatcacacatttgacttgtagccaatttcgtgaaatgtctacattaaaagattggaaggaaatacaaatatttcatgctatccaaactcatatcagtttctgaattcagataataagaatttggacagttagaaataactgtatattaaaagagttaaaaagtacctgtctctgaatgtaggaatgggagattacttttattttcttctatttttgtaaattatgcacacttgctaaattaaaatacactaaatgtactgctaaatttaaaggtacttttcattctttgatgtcaagtgattagagaaaaacatgaacaaaagataactaagtagttaagtagactacaatgacccaaccacatgtattatttagagtcttctcttttattgggcatataagtgatcgaactctaagaactgtccatgtctccttcttcgaaatctttgaatctgtctgcttctttcactgtgacactgttacctagccagttcacggcactttttctgcatcnnnnnnnnnnnnnnnnnnnnnnnnnnnnnnnnnnnnnnnnnnnnnnnnnnnnnnnnnnnnnnnnnnnnnnnnnnnnnnnnnnnnnnnnnnnnnnnnnnnngaaaaaatgtaaaatatctcattttttatattgatcatatatcaaaattgcaatattttttatatattgggttaaatgataaatattattaaaattaattttacctctttttactttttaacaaatggttaagacaagacctcaagtattttttggaaactgtcctattgtttcattgtgtgttaaatacaggaaagactatagaaagctagggaaatatttctccattgttggactcctaagacaaaaagggtgacatagttgggttt

SEQ ID NO: 86053 - DNA, 1102 bp, Homo sapiens
  misc_feature (1)...(1102): n = A,T,C or G
tctaagaaaacaaaggctaatactgcgtaaaaacatgctcattgctacagtatttattatagcaaaaaaaacacaaaacctaaatgttcttcaatcrggaaatggtttacaaattatagtacaggggatgattatccagtcagtacaatcatgtttttaaagattatattatgacatagggaaatgtataaatataatgttaaatagaaaatcagagcacaatcacacatttgacttgtagccaatttcgtgaaatgtctacattaaaagattggaaggaaatacaaatatttcatgctatccaaactcatatcagtttctgaattcagataataagaatttggacagttagaaataactgtatattaaaagagttaaaaagtacctgtctctgaatgtaggaatgggagattacttttattttcttctatttttgtaaattatgcacacttgctaaattaaaatacactaaatgtactgctaaatttaaaggtacttttcattctttgatgtcaagtgattagagaaaaacatgaacaaaagataactaagtagttaagtagactacaatgacccaaccacatgtattatttagagtcttctcttttattgggcatataagtgatcgaactctaagaactgtccatgtctccttcttcgaaatctttgaatctgtctgcttctttcactgtgacactgttacctagccagttcacggcactttttctgcatcnnnnnnnnnnnnnnnnnnnnnnnnnnnnnnnnnnnnnnnnnnnnnnnnnnnnnnnnnnnnnnnnnnnnnnnnnnnnnnnnnnnnnnnnnnnnnnnnnnnngaaaaaatgtaaaatatctcattttttatattgatcatatatcaaaattgcaatattttttatatattgggttaaatgataaatattattaaaattaattttacctctttttactttttaacaaatggttaagacaagacctcaagtattttttggaaactgtcctattgtttcattgtgtgttaaatacaggaaagactatagaaagctagggaaatatttctccattgttggactcctaagacaaaaagggtgacatagttgggttt

SEQ ID NO: 86054 - DNA, 1089 bp, Homo sapiens
ataagaaaaccaaatccttggagtcagaagtgagtttccggttagagtataatcttcaaaaaggtaaaagtatgcctcatacaaatagtgaacatrtttcaaagattttattgaactcattagttagcggggaaacaataagattgagaaccaccccgaagaacatttgagaagctaggtctatacaagcaatttaatagcttggtgtgtaataagctatataaagactggtttacatttaataggatcataaactgtacactttggggctattagttccactgggcagagattatttatatgtctactgaactaaatttataagtgaggctttcctttacagtgaagtaaaataatccagtaaatagaaagttaggttcagcactgaaagattacccaataatctctttggcctgtatgtaaatttcagatgattttttaaaaattgttcatggtttcactgataaccgatagcagatatataatgataaagtctcattatgctcaacccaatatttttgtccttgcaacacaatccagaaagaccaagatgtccaagagttaaatttagggaagaggtggatctcctactccctgttagcccagctcacctacccttcctaaagtgctgcttatggaaacactgaccccatgaggaagcccaaacttcccacattctccaaacccaaggcaaggtctccatactttccttcttccttccagcatcccacaggatcccttggccaccctactgttacagatagttaggcatgagaggggcatgagagggctcttcccccacccactagaaatgtcgggtgacagtttggcaattatcgcattgcctctctaaaagtgataaattgacagccagtgccagggagaggccatctcctgaggatccgcgcctgttaacatcaaaatgttaattgaatgcaggccccaaggagaagccccttgggcacgcatgttaagagatgaaatggtgaagtatgacattctgggggcacatgccactggaaaaagggaaaaaagcctcataaactcataaactctctaaacgcactgtgcatgctcaattcccaaggg

SEQ ID NO: 86055 - DNA, 1089 bp, Homo sapiens
ataagaaaaccaaatccttggagtcagaagtgagtttccggttagagtataatcttcaaaaaggtaaaagtatgcctcatacaaatagtgaacatgtttcaaagattttattgaactcattagttagcggggaaacaataagattgagaaccaccccgaagaacatttgagaagctaggtctatacaagcaatttaatagcttggtgtgtaataagctatataaagmctggtttacatttaataggatcataaactgtacactttggggctattagttccactgggcagagattatttatatgtctactgaactaaatttataagtgaggctttcctttacagtgaagtaaaataatccagtaaatagaaagttaggttcagcactgaaagattacccaataatctctttggcctgtatgtaaatttcagatgattttttaaaaattgttcatggtttcactgataaccgatagcagatatataatgataaagtctcattatgctcaacccaatatttttgtccttgcaacacaatccagaaagaccaagatgtccaagagttaaatttagggaagaggtggatctcctactccctgttagcccagctcacctacccttcctaaagtgctgcttatggaaacactgaccccatgaggaagcccaaacttcccacattctccaaacccaaggcaaggtctccatactttccttcttccttccagcatcccacaggatcccttggccaccctactgttacagatagttaggcatgagaggggcatgagagggctcttcccccacccactagaaatgtcgggtgacagtttggcaattatcgcattgcctctctaaaagtgataaattgacagccagtgccagggagaggccatctcctgaggatccgcgcctgttaacatcaaaatgttaattgaatgcaggccccaaggagaagccccttgggcacgcatgttaagagatgaaatggtgaagtatgacattctgggggcacatgccactggaaaaagggaaaaaagcctcataaactcataaactctctaaacgcactgtgcatgctcaattcccaaggg

SEQ ID NO: 86056 - DNA, 1089 bp, Homo sapiens
ataagaaaaccaaatccttggagtcagaagtgagtttccggttagagtataatcttcaaaaaggtaaaagtatgcctcatacaaatagtgaacatgtttcaaagattttattgaactcattagttagcggggaaacaataagattgagaaccaccccgaagaacatttgagaagctaggtctatacaagcaatttaatagcttggtgtgtaataagctatataaagactggtttacatttaataggatcataaactgtacactttggggctattagttccactgggcagagattatttatatgtctactgaactaaatttataagtgaggctttcctttacagtgaagtaaaataatccagtaaatagaaagttaggttcagcactgaaagattacccaataatctctttggcctgtatgtaaatttcagatgattttttaaaaattgttcatggtttcactgataaccgatagcagatatataatgataaagtctcattatgctcaacccaatatttttgtccttgcaacacaatccagaaagaccaagatgtccaagagttaaatttagggaagaggtggatctcctactccctgttagcccagctcacctacccttcctaaagtgctgcttatggaaacactgaccccatgaggaagcccaaacttcccacattctccaaacccaaggcaaggtctccatactttccttcttccttccagcatcccacaggatcccttggccaccctactgttacagatagttaggcatgagaggggcatgagagggctcttcccccacccactagaaatgtcgggtgacagtttggcaattatcgcattgcctctctaaaagtgataaattgacagccagtgccagggagaggccatctcctgakgatccgcgcctgttaacatcaaaatgttaattgaatgcaggccccaaggagaagccccttgggcacgcatgttaagagatgaaatggtgaagtatgacattctgggggcacatgccactggaaaaagggaaaaaagcctcataaactcataaactctctaaacgcactgtgcatgctcaattcccaaggg

SEQ ID NO: 86057 - DNA, 1089 bp, Homo sapiens
ataagaaaaccaaatccttggagtcagaagtgagtttccggttagagtataatcttcaaaaaggtaaaagtatgcctcatacaaatagtgaacatgtttcaaagattttattgaactcattagttagcggggaaacaataagattgagaaccaccccgaagaacatttgagaagctaggtctatacaagcaatttaatagcttggtgtgtaataagctatataaagactggtttacatttaataggatcataaactgtacactttggggctattagttccactgggcagagattatttatatgtctactgaactaaatttataagtgaggctttcctttacagtgaagtaaaataatccagtaaatagaaagttaggttcagcactgaaagattacccaataatctctttggcctgtatgtaaatttcagatgattttttaaaaattgttcatggtttcactgataaccgatagcagatatataatgataaagtctcattatgctcaacccaatatttttgtccttgcaacacaatccagaaagaccaagatgtccaagagttaaatttagggaagaggtggatctcctactccctgttagcccagctcacctacccttcctaaagtgctgcttatggaaacactgaccccatgaggaagcccaaacttcccacattctccaaacccaaggcaaggtctccatactttccttcttccttccagcatcccacaggatcccttggccaccctactgttacagatagttaggcatgagaggggcatgagagggctcttcccccacccactagaaatgtcgggtgacagtttggcaattatcgcattgcctctctaaaagtgataaattgacagccagtgccagggagaggccatctcctgaggatccgcgcctgttaacatcaaaatgttaattgaatgcaggccccarggagaagccccttgggcacgcatgttaagagatgaaatggtgaagtatgacattctgggggcacatgccactggaaaaagggaaaaaagcctcataaactcataaactctctaaacgcactgtgcatgctcaattcccaaggg

SEQ ID NO: 86058 - DNA, 1375 bp, Homo sapiens
ccgcctaagaggagtgtggcatgagataagaaggcagaactcggaagaacactaacaggcatagaagaaagaatccaaaggctatttagaaagtggcaggcaacttgaggaaataaacaaaaccaaacaaaaccaggactgtgcagtawgacagaagtcaaagaaagatgatttcaaataggccacaatatacaatttatagtatacactaggaagatggagaatcacctagtggacttagcaacaaggagtttgaaggcgactatgttgagatgggctttagtggtgtattggggacagaaatcagagggggtgtgttgagaagtagctgaaagggaaggaagcagagtgatgagtgtaagcagctcacttgagaaatgtggttatgacagggagatcaatgatagtgggaaggggatacagggttaaggttggggtcatttgagacaagaaagacttactttaacatgtttaagcgctgagtggaaggggccaacaacaaaaaattagatacacagagcaggggaaattaaaatgtcaagatttgggggaagcactgaagtcattattcaacatagattgaaggatgcttctactatccaagtaggagcaaaggataaaaacatgggtacagaacacagagagtttataggtttggtggcataaactttaggaaattctcatttgaagatttcagctttctctgtgaaggaggtaaggtcatttcctgagagtaagccagtgaaacagcagagttgaaattttgtggatagtggacacagtttgaaatagctgtagtaaagtgggaaaaaagaaagcagagagatttatggaccatacggaaggctctactgagataggggaacataaatgtgcaatgccatgaatgtatgtgtgtatgtgtgtgtgtgtgtgtgtgtgtgtgtgttttcctaacagcactcagcaggcttgaataaagtggggagtagattaatcctaggttgagatttttacaagcaatatgggacaattcctagtgtcgaactacatttttttaaactagagagagaaggaggtaaaggcagcagagcactgatggatggagaggtcagggatttgcaaggtctaatactggacttggtggaagtagctgaattggagagctggatgtggttagacagatagatagcttggaatatgacaaggtctagtatgtggccatgaaactggctgacttacataaatggaggtgaagggcactgaaaatgaatggggtcaggagtgtaggatggattttcttcatcaaacctgacttgtcttggcagaataaatgtatatcatgcctctttgcttaagtgcagattctaagtaatgtcttgctttgtttcaattc

SEQ ID NO: 86059 - DNA, 1375 bp, Homo sapiens
ccgcctaagaggagtgtggcatgagataagaaggcagaactcggaagaacactaacaggcatagaagaaagaatccaaaggctatttagaaagtggcaggcaacttgaggaaataaacaaaaccaaacaaaaccaggactgtgcagtatgacagaagtcaaagaaagatgatttcaaataggccacaatatacaatttatagtatacactaggaagatggagaatcacctagtggacttagcaacaaggagtttgaaggcgactatgttgagatgggctttagtggtgtattggggacagaartcagagggggtgtgttgagaagtagctgaaagggaaggaagcagagtgatgagtgtaagcagctcacttgagaaatgtggttatgacagggagatcaatgatagtgggaaggggatacagggttaaggttggggtcatttgagacaagaaagacttactttaacatgtttaagcgctgagtggaaggggccaacaacaaaaaattagatacacagagcaggggaaattaaaatgtcaagatttgggggaagcactgaagtcattattcaacatagattgaaggatgcttctactatccaagtaggagcaaaggataaaaacatgggtacagaacacagagagtttataggtttggtggcataaactttaggaaattctcatttgaagatttcagctttctctgtgaaggaggtaaggtcatttcctgagagtaagccagtgaaacagcagagttgaaattttgtggatagtggacacagtttgaaatagctgtagtaaagtgggaaaaaagaaagcagagagatttatggaccatacggaaggctctactgagataggggaacataaatgtgcaatgccatgaatgtatgtgtgtatgtgtgtgtgtgtgtgtgtgtgtgtgtgttttcctaacagcactcagcaggcttgaataaagtggggagtagattaatcctaggttgagatttttacaagcaatatgggacaattcctagtgtcgaactacatttttttaaactagagagagaaggaggtaaaggcagcagagcactgatggatggagaggtcagggatttgcaaggtctaatactggacttggtggaagtagctgaattggagagctggatgtggttagacagatagatagcttggaatatgacaaggtctagtatgtggccatgaaactggctgacttacataaatggaggtgaagggcactgaaaatgaatggggtcaggagtgtaggatggattttcttcatcaaacctgacttgtcttggcagaataaatgtatatcatgcctctttgcttaagtgcagattctaagtaatgtcttgctttgtttcaattc

SEQ ID NO: 86060 - DNA, 978 bp, Homo sapiens
gtttcctgatcttatcctcagttactccctaaaagtctccactttgattttgaaaatgacaaaatccaatttgtcattttctccctcaaaccagctccttcacctttatctgctgtgtcagccaagggccttattgccatcacctactagcacagccagaagcctggatcccaagctgctcctctttctccttctttttctgaacattgaatcaaacaaatcaccataccctgagaattcttcttagtgaattaatatcttttaaatccttccattccctctgctagcacactacttaggtcaccattatctctgtcctccctgattctctaatctgttttctaagctgtacacaaagtgacgttttgggtattcagtggcaatttcatcatgccaatccctcaattaataccattgtttcttctttagagcaaggccaaacttctcaactttaccccataactcttcatggcctggtctcttacctcttcagaccaaggtttttcaactttggcactcctgacattttgggccgaataattccttgttggggaggttgtcctgtgcgttgtaggctgtttaacagcatccatggcctctacccactagatgtcagtaacaccaccatgccaattgtgataattaaaaatgtctccagacattgccaaatgttctgtggagggcaaaattcaccctggttgagatttaccacgttaaactaatttatcactacatcctacaccctatatgtttgaagttctagccatacttaactttcctctactctgctaaggaaccattttcattttttaaaaaatgtgtaatagytttattgagatataattcacatagcatactatccattcatttaaagtatacaattcaatggcttgtagtataatcacaaagggggacaaccatcaccacaatccatttaagaacattttattaaccaaacagaaacattatacccattgg

SEQ ID NO: 86061 - DNA, 629 bp, Homo sapiens
aagcaaagaatctttgttaatagctgcaaggtcccttgaggcctaaatttggaaatagtatactgcttttaaygcatcgtatacttgttgtcagaccaagttaggccaatcaatgagcagtgaagttacattgcagaattatctgtgtgcagaaatggaagaaagtattgtgaataatttttgcaaacaatgtattattatctatcttagggacaaaataattcttgtcctttgcatatgtgaaatgtgcttttgccccttctctcaaagttttatcccattagccgttcaggcttgaactccaggacctcatgatctaaatcatgtctagaattagatgacacacaaaggtatagctcttgaagtatatctcttcttgatctagagatctctgaacccaaaagaaaagttatttgctctccacatgctcaatatctccttgtcttggtgagagaagaataagataaccacaatagaatttccattgaaaaatggaaaaaatgagaggcatatagcaattactgctccatagtaattctgaaatttagccaggcacatgttgccaactccagataccaagaatgttccttgattagagcccagttctgcttccttggaggggtgagagt

SEQ ID NO: 86062 - DNA, 629 bp, Homo sapiens
aagcaaagaatctttgttaatagctgcaaggtcccttgaggcctaaatttggaaatagtatactgcttttaacgcatcgtatacttgttgtcagaccaagttaggccaatcaatgagcagtgaagttacattgcagaattatctgtgtgcagaaatggaagaaagtattgtgaataatttttgcaaacaatgtattattatctatcttagggacaaaataattcttgtcctttgcatatgtgaaatgtgcttttgccccttctctcaaagttttatccyattagccgttcaggcttgaactccaggacctcatgatctaaatcatgtctagaattagatgacacacaaaggtatagctcttgaagtatatctcttcttgatctagagatctctgaacccaaaagaaaagttatttgctctccacatgctcaatatctccttgtcttggtgagagaagaataagataaccacaatagaatttccattgaaaaatggaaaaaatgagaggcatatagcaattactgctccatagtaattctgaaatttagccaggcacatgttgccaactccagataccaagaatgttccttgattagagcccagttctgcttccttggaggggtgagagt

SEQ ID NO: 86063 - DNA, 744 bp, Homo sapiens
tcaagcaagaagcatctggcctcaggaagaagagcatctgaaaagcattaggttgctaaaagcctgctctcccaaagttgccaagaaaactcaaatgttccatgatgtctaaaggattgtcaaaagcacccaggccaaggagtgtagcctggccatttggaaccaggaggaggcccacactcatagtaggtctacctccaagacccaagcaccctgcctgggaagggccatgcaagcatgttcttagccagcgggggcctggtgccgaagaccttctgctcattggccagaggcatttggctacaggaggctggtggtgcatgtgcatgctcagggtgcaactcagtggaacgaagtttgctcagatctttctccttcccctaaaggtactacacagctcctgggtgcaatgatgggtggcccagagtagggtccatgcatcattgcttatagattatgccacctttccccaaccctggatgccctggggcttaatccatgggcatcaatttatagcaagattctgttaggacagagaagaaaaggtttgagggcctatgcccatggtcttaatatctgttaagtccgtgtgggatacaagacttagaatctagttaagctyctgctatctgacttaagagtcatatccttttgggctagtcacttaaactcaggaggtttactcacctagaaaatggtgatggccaaggcaaataaaatgaaaattaaaggatctctggaatt

SEQ ID NO: 86064 - DNA, 693 bp, Homo sapiens
tccaaacttttggggattttgtctctgtggcaccctgtgtaaccactcaaagcccaataaatattatgtgatttatcagacatttgggcttaatcttcagcaccccctcctcygagccccccatccaactgcatagtacaggaggggtgagggcccaggctgtggttggcagcctgggaagcatcactccctccccatactggggaattaatttggctcctaaaataatggatggggtcatcactagaaggaagaaaggtaccaagagaaatttatcagcacctgaccaagccatgagtattagcagtcaggcctgatagccaacttggcatcagaaacagaaaaatgtttatttcataaacactgtacacactgagcttattctcacgcacacagacatctgacctaggaaggctcagcaaaagttgctgataacaaaatcagtcatcccttgaaatggaaaaggctttttccatgtgttgatcattaattgttgccaaaggccaaaaggggctttcaggaatgctaaatgtaatctctggcctttcctgaacctcctttcatgttctctgccccatctacacaccacattttcgccctcagtgaattcagacactttcagtttagaggataatgccctctgaacaacctcaggccaaaagggcagagacagagaagcctctggaggttcgg

SEQ ID NO: 86065 - DNA, 693 bp, Homo sapiens
tccaaacttttggggattttgtctctgtggcaccctgtgtaaccactcaaagcccaataaatattatgtgatttatcagacatttgggcttaatcttcagcaccccctcctccgagccccccatccaactgcatagtacaggaggggtgagggcccaggctgtggttggcagcctgggaagcatcactccctccccatactggggaattaatttggctcctaaaataatggatggggtcatcactagaaggaagaaaggtaccaagagaaatttatcagcacctgaccaagccatgagtattagcagtcaggcctgatagccarcttggcatcagaaacagaaaaatgtttatttcataaacactgtacacactgagcttattctcacgcacacagacatctgacctaggaaggctcagcaaaagttgctgataacaaaatcagtcatcccttgaaatggaaaaggctttttccatgtgttgatcattaattgttgccaaaggccaaaaggggctttcaggaatgctaaatgtaatctctggcctttcctgaacctcctttcatgttctctgccccatctacacaccacattttcgccctcagtgaattcagacactttcagtttagaggataatgccctctgaacaacctcaggccaaaagggcagagacagagaagcctctggaggttcgg

SEQ ID NO: 86066 - DNA, 693 bp, Homo sapiens
tccaaacttttggggattttgtctctgtggcaccctgtgtaaccactcaaagcccaataaatattatgtgatttatcagacatttgggcttaatcttcagcaccccctcctccgagccccccatccaactgcatagtacaggaggggtgagggcccaggctgtggttggcagcctgggaagcatcactccctccccatactggggaattaatttggctcctaaaataatggatggggtcatcactagaaggaagaaaggtaccaagagaaatttatcagcacctgaccaagccatgagtattagcagtcaggcctgatagccaacttggcatcagaaacagaaaaatgtttatttcataaacactgtacacactgagcttattctcacgcacacagacatctgacctaggaaggctcagcaaaagytgctgataacaaaatcagtcatcccttgaaatggaaaaggctttttccatgtgttgatcattaattgttgccaaaggccaaaaggggctttcaggaatgctaaatgtaatctctggcctttcctgaacctcctttcatgttctctgccccatctacacaccacattttcgccctcagtgaattcagacactttcagtttagaggataatgccctctgaacaacctcaggccaaaagggcagagacagagaagcctctggaggttcgg

SEQ ID NO: 86067 - DNA, 720 bp, Homo sapiens
tacaacaggcattcatttattgctaatttttactttccctcgaataactcatatttattttcaaaagttactgtgaatattaagttagtgcctgaaagtcttcaagcagtttgttttcctctgatatctgggcagaggtggcccctgtagctgggggctatttcccctgctcaatgagaaaagtccatattttgcttgcttataagttgcaccactaccttcagccacatatttccctcttttcctgacctactttaagagttttaaacctatcactcaacctgcttcccaataagattttatttgtgaaacgctaaaactatggagcaagtaccctgctttttttccccagaagcataaactcacatccatcttctggtctttacccaattacagaaaattttttctccttttgctctctacgacgacccagcttctgttcaagcctgaagcatgtttaactagttaccaatagaaattgagtatccctaatccaaaaatccaaaatctgaaatgctccagaatctgaagctttttgagtgccgacatgatgccacagaccagaatacctaygttagcagttaaacagcagtggcacaaacaacagcaggttttcagtttccatctataatgctgtgttttgattaaagggttactgtgcacttactttactgttctaggtgagaagaaacatgagatgcagttgggggaccaggaagt

SEQ ID NO: 86068 - DNA, 587 bp, Homo sapiens
acaatgtagattagcatcactccagcttcatttcatttaagccaaaaggggaaaaaagttcagtttgtagttggatagtctttattcctctattttgtagctatataatttccttttcttccccgcttaccttgctrtgtgtgagtgggtgccttatttggggtttatttttatttttaaaaattctgtattgtatctataaggaaaaatatacacattgaataaaattgcattaaaaattaactttacattgttgctttagaggtttggaatttgatttttttaagagaattagaatttaattaattaaggaaaacaggagagagtatttggctcatatgccacatgctaatctatacatccagaaaaacataccaatctaagttaagaagaaagacagcctgacagtgagtgggatagttttaagagtgagtctcatccgaggccagaaaggcacacatcagccagggtcagcctgatggctctcagcagctctatgggtctcctgtcatctcatcaattcttctcctgaccctactttttaggcttccattcaatgcaaaaaataagtctataattgcacaatc

SEQ ID NO: 86069 - DNA, 1928 bp, Homo sapiens
ctctctgaaccccatcatttaggggttttaatggagatttcattatgtaggcatgattgattaaatcattgctcattagatattaacttaatctccagttccttttgtcttcctggaggtggggggaaggagagctgaaagttctaatcttttaattatgctttggtttttctggtggacagcccccatcctgaagttatctaggcctcccagacaccagtcatctcattagcatataagatactcatcacttcagagattccaaggatcttaggacttgtatgtcaggaacctggacaaagaccaaatatatattttttattatgccacacagggtcaaagagatgcagttgctgaggtcacatctgcatggaggttttcagtttttctttcaattattctttgctgattcctcatattaagatcccataaatgaaagacaagtacaaatataaatattattaattttgaaattaaccaaaaacttagtaacctggttaaggaaattgatgaaaagtttacctaaagacagtggaagagctagaaataatgaatgctgggatttagcactattgctattttcttttcttctgcaaagaacagcaagcactattgagcttgcgttctgttgagaagagcagggtattagcaatgactgatgtagggaaagcaagtgggatcagacatctggaactggggtagagacaaggaagaggcagggccaggcatccatgccagaagggtttgttgtaattctttaatgccattcctactgtcattatcataccttctttatctctactctttactcatctctgttggttactcataggtaccaccactgcaacaccccttagatacctgaaagttctttgaggtgaaggattctatcatgtacatctttggatcctcctgatcacccagtaattcactattgaggcttgataatgatggatgaatgggtggatgatggatggatggatggaaaaattgatgatggatggataataaaaacagaataaatactgacagaaacccagaggtagcaaggaaaatcataacaacttactctccctgtcagcagggtccaagcatattttggagtgacttttcggagatatgttgggtttattttattttaatatcctttaatcctgagattaccaactgattgcccatggaccaaattcaacctaagcatctgtttcatttgcccttgttattaagtctgtctactgttaaatacacagggaaakaaataaacttatatcatattgaatgcattgccaacatataaaaattgagagatgtattattttaaaagaattgatatttttctggaaactcagcaatagtggcctcattattctactccctgtaaatagggcaggcactgtcctatgtgccacaataatgatcactggcataggtaacagtcagttgccatctattactcatgttcaaaattttaaaaattctaacccatgcttcttgattaaattgccttcttggcccattaggcttcagggtttacaaaactggctttagccagtaacacagcaccttctccacactaaaggaaagaacaagatcaaaggagagaaattttaagaaagtaatagtaacaacaacgcttaacgggctttcaccattcattgtgaactgtgctattttacatatactcacactatactctgtgaatcagctatattcttgtcacagtttcatagctgaggaaactgtgacttagatattgggtaacttgcccaagactgtagttcataagtattcataatccagatatttctgcctccaagtctgtcattggaaccactacactgcctttgtactctttcttaacatataaatgatgaaatcagcactataatatgctttcttcatctcttagaaaaagcaaataaatattg

SEQ ID NO: 86070 - DNA, 796 bp, Homo sapiens
cttcttagaagttccaggaggtaatcttgagacagacagaccaagcatggagacctagctgcaaaattccagagattacttccatgcagctaattaacaactcggccactgttgagatgatgtcagcctgaggtccaggtggactggcaccaaagataatcataaaaacaagacccagagatactgtactcagcacaattctcttgcatgccctccttaatcaagttttcctcttttaaacccctcccttcccccgaaatagtcaaagtggttgctttgatgggaatctggccacttcccctttactagttgtggttaataaagtcactttctatctaccaggcctcactcttgttaactggactctgcaggcagtgagcatgtggacctgcattcagttacaattttagtggcccatacagtgtgctctgggggcccaagcccatggtctggtttctattggacagggcctgtggggctgcctgtaggctccagttgcttgtggctacctgaccccttggctggaatgctagggagtctcctgcagctgcctagatgcttttgtcttggggatcctctctttctcttcctgctgcagtgcctgctacctccaatatttcactggtgcactgaaagtgacttttagagaagtgacaaactttggaattttggaactttgaaactttggaacttggtgagttagtcggagtgcatttgaccaccrtctgcctcttttgggatgtcactgggactctgctctatttagacttggccactagtgacaccatttgagcat

SEQ ID NO: 86071 - DNA, 1516 bp, Homo sapiens
gggggctgcctccctcacatcttgcagcctggaccacctgcaacacttttccctgtgcccaagacagtcttcaaagtacagaccacaaaaggcaaatggtaaacacaggggagtccttggcacaggtcacacccaatactgtcccactttgatttacatacctccagtgatggggagcttactacctctgcaggttgcctcagtgaaacattggttgaatcataacaatgatgtcacaagagtagcaacttctttaaatggactaattcatttaatccccacaatgactctttgaggtaggtgctgttatctcattcacagatgaggaaactgaggctcagagagtttaaccaactggtttaaggtcttatgattaaaaattgaaagagccaggatttcagcacaggcaggcaggctggctgcaaaggccacactcttgatcctagcatragcctcgcatctcacctgcctgggttaataaacaagtgcagagcaaacaaatgaactgcaggagagcccagtggacatttgtggacgtacaaatgacggaaagaacgcgcggcaggtactaacacgacgggatgaacacgtgtgcgaggggcatggaaggatgaagaggtgctgacgggtttgtacaggatgaacaaggagggaaagaaagaaaggaatgcatgtgagctcatcaattttgctgaatggaatgtgcccttgctctttcattcccagaacccactttgcagctgcctggggatcccttttagtatgttttatctccaggcagctagacaagcctgcgtactcaggcaccgcgagagggcagggcatcatgggaggggtgctcgtgggccctggtgggatccgccttcccagacgtacacacacggacccaacccagacaggaagagctggccggctgctggcaagcagggtcaggaggcgcatgttgtgccaacggctagaggcctagggcaaacatgtctgcagcaggcattcagcccagcaccatgggcccgtgtgcccagtggtgaaaggcgaggaaggaaggggatatgtccaggctggacatggtccccaagcacagagaagacaaacggggctctggtcacatgccctgaacgcactaggttctgatcctacttctatacctttatttgagctgttccttctacgctgcatgcccttactgatttccaaatgctaacccgatgccaccagctggaatgacctcgccctctgcgcgtgtctctgtgatggcatttaccaccgtctgccctgagtcccagctactttgggtctatctccgtttgggaccacaaactggaggacacaagggtttacagttctctgaaaacatcagaggctgcagacatgtacgcacagagcactcccagagccacggcgcctggcccacatggggcctaagagaggagaaggaagaggcatcactgagcaccaacccgggcgatgtgcaggccaggtgccgggtatgagccctcacccagtcctttggccccac

SEQ ID NO: 86072 - DNA, 1516 bp, Homo sapiens
gggggctgcctccctcacatcttgcagcctggaccacctgcaacacttttccctgtgcccaagacagtcttcaaagtacagaccacaaaaggcaaatggtaaacacaggggagtccttggcacaggtcacacccaatactgtcccactttgatttacatacctccagtgatggggagcttactacctctgcaggttgcctcagtgaaacattggttgaatcataacaatgatgtcacaagagtagcaacttctttaaatggactaattcatttaatccccacaatgactctttgaggtaggtgctgttatctcattcacagatgaggaaactgaggctcagagagtttaaccaactggtttaaggtcttatgattaaaaattgaaagagccaggatttcagcacaggcaggcaggctggctgcaaaggccacactcttgatcctagcataagcctcgcatctcacctgcctgggttaataaacaagtgcagagcaaacaaatgaactgcaggagagcccagtggacatttgtggacgtacaaatgacggaaagaacgcgcggcaggtactaacacgacgggatgaacacgtgtgcgaggggcatggaaggatgaagaggtgctgacgggtttgtacaggatgaacaaggagggaaagaaagaaaggaatgcrtgtgagctcatcaattttgctgaatggaatgtgcccttgctctttcattcccagaacccactttgcagctgcctggggatcccttttagtatgttttatctccaggcagctagacaagcctgcgtactcaggcaccgcgagagggcagggcatcatgggaggggtgctcgtgggccctggtgggatccgccttcccagacgtacacacacggacccaacccagacaggaagagctggccggctgctggcaagcagggtcaggaggcgcatgttgtgccaacggctagaggcctagggcaaacatgtctgcagcaggcattcagcccagcaccatgggcccgtgtgcccagtggtgaaaggcgaggaaggaaggggatatgtccaggctggacatggtccccaagcacagagaagacaaacggggctctggtcacatgccctgaacgcactaggttctgatcctacttctatacctttatttgagctgttccttctacgctgcatgcccttactgatttccaaatgctaacccgatgccaccagctggaatgacctcgccctctgcgcgtgtctctgtgatggcatttaccaccgtctgccctgagtcccagctactttgggtctatctccgtttgggaccacaaactggaggacacaagggtttacagttctctgaaaacatcagaggctgcagacatgtacgcacagagcactcccagagccacggcgcctggcccacatggggcctaagagaggagaaggaagaggcatcactgagcaccaacccgggcgatgtgcaggccaggtgccgggtatgagccctcacccagtcctttggccccac

SEQ ID NO: 86073 - DNA, 1516 bp, Homo sapiens
gggggctgcctccctcacatcttgcagcctggaccacctgcaacacttttccctgtgcccaagacagtcttcaaagtacagaccacaaaaggcaaatggtaaacacaggggagtccttggcacaggtcacacccaatactgtcccactttgatttacatacctccagtgatggggagcttactacctctgcaggttgcctcagtgaaacattggttgaatcataacaatgatgtcacaagagtagcaacttctttaaatggactaattcatttaatccccacaatgactctttgaggtaggtgctgttatctcattcacagatgaggaaactgaggctcagagagtttaaccaactggtttaaggtcttatgattaaaaattgaaagagccaggatttcagcacaggcaggcaggctggctgcaaaggccacactcttgatcctagcataagcctcgcatctcacctgcctgggttaataaacaagtgcagagcaaacaaatgaactgcaggagagcccagtggacatttgtggacgtacaaatgacggaaagaacgcgcggcaggtactaacacgacgggatgaacacgtgtgcgaggggcatggaaggatgaagaggtgctgacgggtttgtacaggatgaacaaggagggaaagaaagaaaggaatgcatgtgagctcatcaattttgctgaatggaatgtgcccttgctctttcattcccagaacccactttgcagctgcctggggatcccttttagtatgttttatctccaggcagctagacaagcctgcgtactcaggcaccgcgagagggcagggcatcatgggaggggtgctcgtgggccctggtgggatccgccttcccagacgtacacacacggacccaacccagacaggaagagctggccggctgctggcaagcagggtcaggaggcgcatgttgtgccaacggctagaggcctagggcaaacatgtctgcagcaggcattcagcccagcaccatgggcccgtgtgcccagtggtgaaaggcgaggaaggaaggggatatgtccaggctggacatggtccccaagcacagagaagacaaacggggctctggtcacatgccctgaacgcactrggttctgatcctacttctatacctttatttgagctgttccttctacgctgcatgcccttactgatttccaaatgctaacccgatgccaccagctggaatgacctcgccctctgcgcgtgtctctgtgatggcatttaccaccgtctgccctgagtcccagctactttgggtctatctccgtttgggaccacaaactggaggacacaagggtttacagttctctgaaaacatcagaggctgcagacatgtacgcacagagcactcccagagccacggcgcctggcccacatggggcctaagagaggagaaggaagaggcatcactgagcaccaacccgggcgatgtgcaggccaggtgccgggtatgagccctcacccagtcctttggccccac

SEQ ID NO: 86074 - DNA, 1516 bp, Homo sapiens
gggggctgcctccctcacatcttgcagcctggaccacctgcaacacttttccctgtgcccaagacagtcttcaaagtacagaccacaaaaggcaaatggtaaacacaggggagtccttggcacaggtcacacccaatactgtcccactttgatttacatacctccagtgatggggagcttactacctctgcaggttgcctcagtgaaacattggttgaatcataacaatgatgtcacaagagtagcaacttctttaaatggactaattcatttaatccccacaatgactctttgaggtaggtgctgttatctcattcacagatgaggaaactgaggctcagagagtttaaccaactggtttaaggtcttatgattaaaaattgaaagagccaggatttcagcacaggcaggcaggctggctgcaaaggccacactcttgatcctagcataagcctcgcatctcacctgcctgggttaataaacaagtgcagagcaaacaaatgaactgcaggagagcccagtggacatttgtggacgtacaaatgacggaaagaacgcgcggcaggtactaacacgacgggatgaacacgtgtgcgaggggcatggaaggatgaagaggtgctgacgggtttgtacaggatgaacaaggagggaaagaaagaaaggaatgcatgtgagctcatcaattttgctgaatggaatgtgcccttgctctttcattcccagaacccactttgcagctgcctggggatcccttttagtatgttttatctccaggcagctagacaagcctgcgtactcaggcaccgcgagagggcagggcatcatgggaggggtgctcgtgggccctggtgggatccgccttcccagacgtacacacacggacccaacccagacaggaagagctggccggctgctggcaagcagggtcaggaggcgcatgttgtgccaacggctagaggcctagggcaaacatgtctgcagcaggcattcagcccagcaccatgggcccgtgtgcccagtggtgaaaggcgaggaaggaaggggatatgtccaggctggacatggtccccaagcacagagaagacaaacggggctctggtcacatgccctgaacgcactakgttctgatcctacttctatacctttatttgagctgttccttctacgctgcatgcccttactgatttccaaatgctaacccgatgccaccagctggaatgacctcgccctctgcgcgtgtctctgtgatggcatttaccaccgtctgccctgagtcccagctactttgggtctatctccgtttgggaccacaaactggaggacacaagggtttacagttctctgaaaacatcagaggctgcagacatgtacgcacagagcactcccagagccacggcgcctggcccacatggggcctaagagaggagaaggaagaggcatcactgagcaccaacccgggcgatgtgcaggccaggtgccgggtatgagccctcacccagtcctttggccccac

SEQ ID NO: 86075 - DNA, 580 bp, Homo sapiens
ctcggctcactgcaagctccgcctcccggttcacgccattctcctgcctcagcctctcgagtagctgggactacaggcgctcgccatcatgcctggctaattttttttgtatttttagtagaracggggtttcaccgtgttagccagaatggtctcgatctcctgacctcatgatccgctggcctcggcctcccaaagtgctgggattacaggcgtgagccaccgcgcccggccccatacttattgcacttttgataattactgagatactgagatattaagatggcctgatgctccaacccaaaatgtgttggttatactttgataacaacccaagaagtggggccctgctgatatatgagattgtgagggttacaggaccaaagtgaagcagacagagagagaatcagggatcaaaacctcaaaaataagttacacgttcagaacctcatcaaattgtttaagtctgatattttctatccacagattgtgatagctgaagggcaacttagtgatcatcattcaatacccactatttagtagacaaagaaactgagtttgcagacagcactcatcatgc

SEQ ID NO: 86076 - DNA, 1004 bp, Homo sapiens
cttctaaatgaactggcccaaaaccagtcagattttacagttggatggtaggtttctttactgaactatgaaaacagcagtgccaatggggaaaatgtgattgctgcattaagaaaaaataaataaataaaagaaagaaactccaacaccagcagccttaaagtatatttttagccagaccagttcagacatagctagaattctgcttctctaaaaataaaagattctgcctgtcaagaagataccagtgaaaattctcaccccatgccaacagggctgrattgtgggagagacactaggtagtgtacgtcagagcaaatagggaacagttgaagtaaggagactggtgttgggggtcagccaagactttgtatctccatctagtcaacagatgtttattaagaccattccttgtactagaagctgggaatgcttaaaaagatatagcccttgttgtcactgtcttatcctgttgtctgtgtcgtcctgtgttgtcatagccccattatctgcataggagacagtctttagttctaaaatgggatattagaatggtttaaatctgacagttgcattccctgcaagctgcaattttaattagaatcctggtttagttgaaggaattcaagatttgattgttaaatcaaatgaatctaatgaaagcactttctgaactaatacacagtaatatggttgaggccacgtgcaatcccagcactttgggaggccgaggcgggcagatcacctgaggtcaggagatcgagaccatcctggctaacacgatgaaaccccatctctactaaaaatacaaaaaattagctgggcatggtggcgggcgcctgtggtcccagctacttgggaggctgaggcagaagaatggcgtgaatccaggaggcggaggctgcagtgagccgagatcgcgccactgcagtccagccagggtgacagaacgagactccatctaaaaaaaaaaaaaaaaaaaaaagtaataataataatatggt

SEQ ID NO: 86077 - DNA, 644 bp, Homo sapiens
atggttttttttcacattttggaaatttaaaaccttaattggtttgtgcaagatcacttacatttaaatcttgaaatatatatataaaaattcaaatttgaaatattttattaattttctattgctttattcatgttttttcatctttaaaatttttctcaaatttgttgtttttttttactgtgacttttttcataaaagactcctttttcacagtatagctatatacttttctttttattaggcaaattaaatgttagagcaaattggattaaataaattttttaaccgacataactgtttttattccaaaaagtttttattttgaggtataagtagtaaaatacacaaatcttaagtatatggcttagtgactgtaaagatatatatatacatacatgtaactaccactcagattaaaatatttaacattaaagctgggcgtagtggcacacgcctgtaatcttcygggggctaggcgggcggatcacttgaggtcaggagttcgagaccagcctggccaacatagtgaaaccctatctctaccaaaaatacaaaaactagctgggtgtagtggtgtgtacctgaatggtactcaggaggctgaggcaggagaataacttgaacttgggaggtggaggttg

SEQ ID NO: 86078 - DNA, 1868 bp, Homo sapiens
  misc_feature (1)...(1868): n = A,T,C or G
annnnnnnnnnnnnnnnnnnnnnnnnnnnnnnnnnnnnnnnnnnnnnnnnnnnnnnnnnnnnnnnnnnnnnnnnnnnnnnnnnnnnnnnnnnnnnnnnnnnggctcaactaaatgtgggccaggatgtgaccttgtgtggaaatagggtctttgtagatataattagctaagatgaggttatagtagattaagttgaatcttaaatcccaaaactgatgttcacagagggtcatgtgcagacacagatacagagaacaaagccacgtgaagaccaaagcagaaacggaaactgatgcaggtacaagccaaggatgctggcaactgccaaaagccaggatgaggaaagcaatgagtcttcctgagggccttcagagggagcatggtcccgacaccttgatcttggccttctggcctgctgttttaagtaatccagtttatggtaaattgttacaacagacccgataaactaatacagaagccaataaagtgaagcagacagatattacatccacattacctaaaagttaaaaaatcagaatggccaagcaaatgagcatgcatataagcaggtatcataatagcattgatacatttttagtatctcacgctgtcaggattcatccagggaaaaagagagaaagcgagagagagcaagagagctccctagacatttaaacagaatttagcatagggaaatggttaaacaggtatgggagaactgctggggcaaagagcacactgaggcagagagtacctgcagaagcagcttcttctgctttgtctgagagaacaaaggaaagaaagctgtggttacaagaacccagaataagatggtgaggttacatccagctaattctgagagtggcaagatctgaaattgaaaccaacttctgctgtcagggtgaaaaagaattgctattaaaaattggggccgggtacggtggctcacacctgtaatcccagcactctgggaggcagaggcaggaggatagcttaagcccacgagtttgagatcagcctggccaagagtgagaccccgtctctacaaaaaaataaattagccaggcatggtggcgcttgtgtatagtcccatctacttgggaggctgagctggaaggattgcttgagtcttgggagatcgaagctgcagcaagctgtgactgcaccaccgcgccccccagcctgggtgacagagcaagactctgtctcaaaacaaatatataatatgataataatataagtaatatgaattggaagaaaaagggaagaagtccttttcccatacatgtagtttgaagagtcacagccccagtgtcacatggcaagagtgtgacagggttagagcccaaagagtagaacttagtaaccggcaccctctatatttttagatgtgttggttattaattagcacaactggtgtccaagctaatatttcaccaaggcaaccaaacctatgtctgtaacatttcttaatccttcctcaatagaaagcagaggtggcaaactgctttctattaatattaatgtcatactacttgccaaattgatttttttacatctaacttctatcatatgttagaagraaaaaaaagacccagcctgggctacaagagcaaaactctgtctcaaaaaataaaaaaacaaaaacaccactccctttgcataggaatgggtgtactaccctactcacctcttcccctagtctcctagccaggcttatcgcttatccctcatgtctggaactcacattttatgacaaaaattgcttcttccatttttcaaacaggttcaaagggggattcaaagcttttgttgcaattttaataatcagcaagcatgcaaagatattccttgggctgagagtcac

SEQ ID NO: 86079 - DNA, 1017 bp, Homo sapiens
atgatgggttggcaggtgcagcaaaccaccgtggcacacgtttacctatgtaacaaaccagcacatcctgcacatgtagcctataacttaaaaaaaaacacccacttcaaacagaaaagaattatttttaacactccttttaaataaaaatttaacacacacacaactaaaaaaataaaaaatattggcatggatgtggagaaatgggaacacttatacattattggtgggaatgtacattagtacagccattttggagaatagtaagaaagttcttcagaaaaatgaaaatagaactgtcatataatccagtaatcccactactgggtactatcccaaagaaatgaaattggtatattgaagagatagctgtactcccatgtttattgaagcactattcgcaatagccaagatttagaaacaacatgccactcaacagatgaatggataaagaaactgttacacatatatacaatggaatactgttagccataaaaaagaataaaatctgtcatttgcagcaaccttcakgaactgggagaacattatgttaagtgaaataagccagggacagaaagacaaatataggatgatatcactcatctgtggaatttttttaaaaaaataaactgatctcatagaaccacagagtagaagaccagatactagagactggggaagggtggagaaaggtggagactgggagagattggtcaatgagtagaaaattacagacaggaggaacaggttctggtgttctattgcatattaggatggctatagtcaacattattgtatgtgtatgtcaaaataactagaagagaaaattttgaatcttctcacaacaaaacattttgatatttaaggtgatgtaaaagctaattaccctaatttttattacacaatgtatacacatatgaaaaaaatcacattgtaccctctaagtatgtacaattatgtgtcatttaaaaataaaacattttaagaaatagatgaaacattttcaaggagatttgt

SEQ ID NO: 86080 - DNA, 2126 bp, Homo sapiens
tgcctcctgagagctcagtgactagcatctgggaggtgataactgggccacctatagggctggcctgtgtaagccagctcttcctgctgtgctgccagcctggtgggcttcttgctgtcaacctctcagctggagccactggcctcccttggtccagcacagtgcacttctagctccttctagtcagggtcagatggcaagggcatatagagcccagatcttggtatccaggcactggagccctccctccttgcaagtggaatctgcccagcagttccttggtgcacacaccacccgagtgcagacaggacagccctgcaggccagtgattagctgcttcttggccggataggatggaaccttggatgcttgctacatgaagctctgcattcctgaatctggagtccctatttatggctgttcagattgttccaaagtaggtgtggcacccgttagagaaagggaggaagagtggaaactagactgccatgaggaaactctcctagtggaaacagacacagcatgaatggtgcccccctggggtggtactcacagcagctccagaaagggccaaccaggggaataagaagaatccagagttcctccccgcctcccattcacagtgctagcactgccaccattaaccagcaggacattggatccagaggacagtgatgaggcatccaggcaggaagctctttcagactctcctgcaatcttccttctaccttcctctattcaagtggccatcccaattatggaaaaccgagtctttggggctgggcagatgccagataagggcactctctccctgagacccgctgtgtgcaccatctcagcacatgctctgtgtaccttcttaacacatgtgcagagggcagtgcccagggggtagggtttagtcctgactcttggtcagagtggaaagggagagtggggagggaaaaaggtcacgagggttgtcaacaaaaaacaggaggaggctggcatgacatatctccacaccattggccaggtgtcctgttaaagcaggacatatgtcatttctctgcttaaaacctccgcttgaattcttttgctcggatgttcgtggctgctatgaattccttccctccctgcatgcatggagaggtggagtctgtccctccattgctgggaacctgggctggcctgtgactgctctggctaatggagccctgcagaagtgctgctgtgctttatggagactggctgtttaggcttccggccagttggaagcctttagttgctaagtgagaaaccccggtgggttctgctgaagagagaggccacatagaaagcaacacagtgccagacatatgagtgaagaaggctctcagcagaaccttatgggtgcctccagccccagcctctagctggctgcagccccatgggggaacccactaaagaaccacccggctgaacccagtcaactaacagaaacatgagaaagaatattaaatggttgtgttaagccactacattttggggtggtttcttatacagaaatagagaactgaaacattcgagtaggagcaaaagttgacatctggtcccccatttcctctctaacctcatcccccgccctagcccatatactctgctctcaccacacagggctccctgccattccttgaacctacccagcaggctcccacctcagggcctttgcattggctgtttactgtgcctgaaatgcccttagctcgggtagcctcagggttcacttcctcacccctttctggtgtttctatgtccccttctcagtgaggctgtccctaatcacactctatgaagtttgtacccttccccttcagtattatctacctcttccttgctttattttcaatggcatttaccatcatctgmcatactatagatatcactggttgcttggtttctgtctcccatacactagaaggtcagttccatgaggtcagggatttttgcctgccttgtttactgctatatcccagccgctagaacaatccctagtacacagtagacactcaataagtacttactgagtgaatgaaggtccactcctctgtttggaccaagacctgctcagctatttagtcagctgctttgaccagaaaaaaacagtg

SEQ ID NO: 86081 - DNA, 681 bp, Homo sapiens
tcccacctcagcctccyggtagttgggaccaccggcacgcgccatcgagcctggcattttttttttctggtagagacatggtctcactacattgtccaggctggcttgaactctgagctcaacctattcctcccacctcagcctcccaaaatgtcgagattacagggatgagccacctcacctggccctagatccattttttcctttttttttttttttgttttctttgtgtgagatggagtctcgctctgtcgcccaggctagagtgcagtgttgcaatcttggctcactgcaacctccacctcctgggctcaggcgatcctcccacctcagcagctggtacagggaggcaccatcacggccggctaatttttatatttttagtagagacggggtttcaccatgttgctgaggctggtctcaaacccctgatcttaagtgatccactcactttggcctcctaaagtgcaggtattacaggtgtgagccactgcgcccagccctactttctaaataaatctatccacttctcattatctctactgacacctctctacttcaagctgtcagtcatctccttcctacttcatcttcttcacaaaccactataataaacttaattaattcctccacattcattcttgttttacctcagtatatacatggccatataacatacat

SEQ ID NO: 86082 - DNA, 974 bp, Homo sapiens
gtttagcacaatgaactcttaagaaaaaaaatactttaaaaataaaaattgctctrtgtcactaattttactcgagcattgtaaatctaataaatttctatatataatgattaatgttgttcacctctctatgtgcagatatacttgcaaagtgaaacttattttagtcatgactttaaattttatgcaaataaaaaacaaattaatttatccacaatactttaattaaatgggttaaaacaatcttattattgattacttataagtaccctgcacacactgtatgcaattcttcaaactgtgttctaaagcacacacttgcataggatgggtgagaattgatattctaagtcttgtgtattagtttaaatagtaaacctaaatataatatgttttatcttaaatatgagttaaattaatatttaaaaacaggatacagttgagaataacaatttgttaaactgattagctaggctgaaaaatctagaaaaaatgagaattattcaacttgatcacattatatctgaataacttctcattttctcttaaactgttacatttgctgttttatgaactataatatggaatatcttatttacatatttctattactgacatgtaaaaatgatattcctcttaagtggtcaaagttgcaaggacaaatactgaaatacgattttgcattagaatatgtaatcggttcctttaggataatcttgattctagttgttgcacgcagttgaaaaggtttgttgcattcgttgttgaaaggttaaaagtagtattgctaggtaaagctatgcttaatttatcatgtactcaaggggctcttttaggctgacgtactgcttagatatgatcttgtttgactgtatttattttgcaattgaaattaatccttttgtattgaatgacttttatgatagaagaatgagggaatcaagacctttttggaacatttgggtatatacgtg

SEQ ID NO: 86083 - DNA, 934 bp, Homo sapiens
gaaagaagattcaagagaattgcattgtccttcaatgctgttttttttttttttttttttttttgagagggagtctcgctctgtcgcccaggcgtgatctcggctcactgcaagctccgcctsccggtttcccgccattctcctgcctcagcctccagagtagctgggactacaggcgcccgccaccacgcctggctaattttttgtgtttttagtagagacgggttttcaccgtgttagccaggatggtctcgatctcctgaccttgtgatccgcccacctcggcctcccaaagtgctgggattacaggcgtgagccaccgcgcccggtctcaatgctgttttaaaaatgtactttgctcctctggatatagtgtttggagtcgtgtcttttatacctgtgggtcgctgcagctcccaaagacaacacctagaaccagaggttcagtcacaaacaccttacacaagagcttgttgctgatactacatcttcttactatttgcatcatgagttcctttctcaagtaaattcttctcaatggcattcaaacattttctcatctttaataagatgatgctattcaaaccaattgtctatattgatgtctccactttctcatttcccattcttctttttttctgtatttatatattgttgtgattactaagactatacacaaattcttgaaaaatcatataatgtacatgcctttcttcagactactgtctacagactacaaagtaacacaatgtaaataatatatttgcttcccatctttttcattatgaaaacaaactacaaataaagttgaaatttcatgcgggtttctttcccagttctagtacccgtgtagttctccaaaaacaactaccatcataaatcagccatataaccaggaaatatatatatgtttatatgtgggcgtgtgtatgca

SEQ ID NO: 86084 - DNA, 934 bp, Homo sapiens
gaaagaagattcaagagaattgcattgtccttcaatgctgttttttttttttttttttttttttgagagggagtctcgctctgtcgcccaggcgtgatctcggctcactgcaagctccgcctcccggtttcccgccattctcctgcctcagcctccagagtagctgggactacaggcgcccgccaccacgcctggctaattttttgtgtttttagtagagacgggttttcaccgtgttagccaggatggtctcgatctcctgaccttgtgatccgcccacctcggcctcccaaagtgctgggattacaggcgtgagccaccgcgcccggtctcaatgctgttttaaaaatgtactttgctcctctggatatagtgtttggagtcgtgtcttttatacctgtgggtcgctgcagctcccaaagacaacacctagaaccagaggttcagtcacaaacaccttacacaagagcttgttgctgatactacatcttcttactatttgcatcatgagttcctttctcaagtaaattcttctcaatggcattcaaacattttctcatctttaataagatgatgctattcaaaccaattgtctatattgatgtctccactttctcatttcccattcttctttttttctgtatttatatattgttgtgattactaagactatacacaaattcttgaaaaatcatataatgtacatgcctttcttcagamtactgtctacagactacaaagtaacacaatgtaaataatatatttgcttcccatctttttcattatgaaaacaaactacaaataaagttgaaatttcatgcgggtttctttcccagttctagtacccgtgtagttctccaaaaacaactaccatcataaatcagccatataaccaggaaatatatatatgtttatatgtgggcgtgtgtatgca

SEQ ID NO: 86085 - DNA, 934 bp, Homo sapiens
gaaagaagattcaagagaattgcattgtccttcaatgctgttttttttttttttttttttttttgagagggagtctcgctctgtcgcccaggcgtgatctcggctcactgcaagctccgcctcccggtttcccgccattctcctgcctcagcctccagagtagctgggactacaggcgcccgccaccacgcctggctaattttttgtgtttttagtagagacgggttttcaccgtgttagccaggatggtctcgatctcctgaccttgtgatccgcccacctcggcctcccaaagtgctgggattacaggcgtgagccaccgcgcccggtctcaatgctgttttaaaaatgtactttgctcctctggatatagtgtttggagtcgtgtcttttatacctgtgggtcgctgcagctcccaaagacaacacctagaaccagaggttcagtcacaaacaccttacacaagagcttgttgctgatactacatcttcttactatttgcatcatgagttcctttctcaagtaaattcttctcaatggcattcaaacattttctcatctttaataagatgatgctattcaaaccaattgtctatattgatgtctccactttctcatttcccattcttctttttttctgtatttatatattgttgtgattactaagactatacacaaattcttgaaaaatcatataatgtacatgcctttcttcagacwactgtctacagactacaaagtaacacaatgtaaataatatatttgcttcccatctttttcattatgaaaacaaactacaaataaagttgaaatttcatgcgggtttctttcccagttctagtacccgtgtagttctccaaaaacaactaccatcataaatcagccatataaccaggaaatatatatatgtttatatgtgggcgtgtgtatgca

SEQ ID NO: 86086 - DNA, 1043 bp, Homo sapiens
tattgtgcaaccatttgctttatatttatattgttgcaaaaattttttgaattatcataatatgggtatgcctagggagtaaattatgaatgcaaatgtctattatttcttagataaaaataggctgagagtcattggcatagacccaaaaaaatttgggaaggaagagatcaaattggtatgagctggcatacttcacttaatactcattcaaaaaagaatgagtttaggcactgaaagcatgtggcatttgaataatcaaggaagaattggaaaggggttgctgatgcacctcagaagtaagcttgactgtgaaataatatgaattgaagcaggtgtcatagctgtcccttttattttagtctaagactggatttttttacctcaaaaagtaatagagaaggtacccatactacctacgtatttacaagaagataaagagttcttcagcatatgcccaaatttctcttcacacccaatacactgaagttgacaaaacatcaagatatccataattaatcagcaatattgtgattaaaaatacactactaacaatagattttctatattatgacattcaaaaggtcattctgaataattacaaaatatatgagaagatcataatcattaccatcattttttatcacaatgagaaaattatcctttgtttagcagcctgggagcttgagtttttctattaccctaagatattatttctttaatggcatcaatctttttrgaaaagcccacttcaggacacttagttccaggggttctagtttctagtcttgactacaactcttatatctcctaaatagatatttaattttgaataacttactaatatttcagtttccttattttaaaaatgaggggtgttacattatacaaacaactcacagggttgttgtagaaaaacaaatataacagcattcaaagatggtctgtgaaaataatatatgattttacatgtgtatatatgtattttttttctgggactgctacattctgagctgcaaatattctaattttggtatcatttt

SEQ ID NO: 86087 - DNA, 599 bp, Homo sapiens
atgtgtccacaggcagccaggcagtggctgagctcgcaaccatgcttccttcagatgtggccatgctggggctgattcagggagaaacactgcctcttattgagtcacgagcccatcctggaacttcactgggctttgcttggatgacttgcccggcgtccatggtccagaccttccccagcaggcagcagagtccaatgaggcagaacaggtagtctgccaggggtggtggtgggtggtatkgggaagggtatgttactattcaaaaggttcagtcaattcagaaaggttttggagaaaaatttaaaattcatcagactcacccaaaagcagatacaaatctgaagaagatttattaaaggccctttatctctgtttgaacctggtccctttccttgggcaggatagtgacttagaaagtgagagccaggctcattcatgctgggtgattattttattctcatgaaatttttcttgaaaatttgatgtatacttgctgactcccaatctattgaacctgcccactaattaaggtcaatcagtctttcttttggtgaatacttagtgagtttttcaatgtcagataatgtggtaatcac

SEQ ID NO: 86088 - DNA, 508 bp, Homo sapiens
  misc_feature (1)...(508): n = A,T,C or G
gnnnnnnnnnnnnnnnnnnnnnnnnnnnnnnnnnnnnnnnnnnnnnnnnnnnnnnnnnnnnnnnnnnnnnnnnnnnnnnnnnnnnnnnnnnnnnnnnnnnnaactgcattctgctccctgttacatttatatgatagcatctcttttgatattgtcaagtgtgttatgccaggttgcatagcattaccgataacaaaattctttggaaaattgtttttttttttyttttcacacaccaaatagcagcagctgaaatcagttggagttcttggctggccaggaagtaaaaagtgcttttcatataaaattcctaagaaaccctagaaacatgatgcaaagcatttgtaccccttttactttcaaactagtagaatttatgtgacttttgaaaattatatttgttatactgataaaaatgcagtttcatatgaagagtaggagaccctaaagggacttgcctaagattttcatttgaatttagtacattatgagttgtcatagtataaga

SEQ ID NO: 86089 - DNA, 1104 bp, Homo sapiens
aatactaatactacggttagaaggtttgacagtctttgcaatgatttaatagaaaaaaaattcaaaaattagtataaataaaataaatttcatatgacaaaataatcattttagaaataatatttttgcatgtaacatattatttaagcatgaggataaaggggaaaaagttgctttcatgttcttaaacctaagatttccttatttaagaaataaactcaattacacaaaaaaaaaacaagaaaaatatgtcaattcaacacactatcaggtactggtttattcccttttaccaacatttttcagaaaacatttattttcatttatttactatgcactctgtgtttcattataatagattattaaactttttcagtacaattaaaataatctgaaagagaatcctgagctaacatacctttaggagtatatttatctaataatttcattttaagcttaagtaatgaataaatttcctaatctccactttaaaaatgtagagcagaaattctattttaaaagaaagtaactactccatatacctgcttctatttgtgacaatatgaatcattacttttgttacagaaaagcatttaaaatacacagcttttaaattgctaaagaaaaacttcgtgttaacctctctttcattttyatactgtattaccattcttttacagcagttaaaaaccttttcatgacatttcttgaactatccaaacaaggctattaagatttttaaaaaagaattaatgactgagtaatgagcagctggaagccctcaaaacaaatgaatacgtatattttgattgcctgtttcttaggacagttaaaactcctttcctgatgctaatttttaaaagttcacaaatagctagcagttagttgctgtggcttattttggttgtttttcttattattatagtccgtttttaataagtgggtacaggattactagttgcaagaccaagattctaaatccagtcctgcatcttatatttacaaaagattaggcaaattaattagcctaaaaaccatgaaaactacaaaatgacaaacacggggggagatattactcacttttgtttttattataattattat

SEQ ID NO: 86090 - DNA, 1104 bp, Homo sapiens
aatactaatactacggttagaaggtttgacagtctttgcaatgatttaatagaaaaaaaattcaaaaattagtataaataaaataaatttcatatgacaaaataatcattttagaaataatatttttgcatgtaacatattatttaagcatgaggataaaggggaaaaagttgctttcatgttcttaaacctaagatttccttatttaagaaataaactcaattacacaaaaaaaaaacaagaaaaatatgtcaattcaacacactatcaggtactggtttattcccttttaccaacatttttcagaaaacatttattttcatttatttactatgcactctgtgtttcattataatagattattaaactttttcagtacaattaaaataatctgaaagagaatcctgagctaacatacctttaggagtatatttatctaataatttcattttaagcttaagtaatgaataaatttcctaatctccactttaaaaatgtagagcagaaattctattttaaaagaaagtaactactccatatacctgcttctatttgtgacaatatgaatcattacttttgttacagaaaagcatttaaaatacacagcttttaaattgctaaagaaaaacttcgtgttaacctctctttcattttcatactgtattaccattcttttacagcagttaaaaaccttttcatgacatttcttgaactatccaaacaaggctattaagatttttaaaaaagaattaatgactgagtaatgagcagctggaagccctcaaaacaaatgaatacgtatattttgattgcctgtttcttaggacagttaaaactcctttcctgatgctratttttaaaagttcacaaatagctagcagttagttgctgtggcttattttggttgtttttcttattattatagtccgtttttaataagtgggtacaggattactagttgcaagaccaagattctaaatccagtcctgcatcttatatttacaaaagattaggcaaattaattagcctaaaaaccatgaaaactacaaaatgacaaacacggggggagatattactcacttttgtttttattataattattat

SEQ ID NO: 86091 - DNA, 575 bp, Homo sapiens
ttgaacagaaatccttaatattgacataatctatttagtacattttctgtcttaatgttggtttgtgcttttagggttttattttattttttgaggcagggtctcgctctgttgcccaggctggagtgcagtggcatgatcttagctcacagcaacttctgccccctgagttcaagtgattctccctcctcagcctcccaggcagctgggactacagacgtgtgccaccacgcctagctaaattttgtatttttagtagagatggggtttgtttcaatactgatccataraaggacatctggtatatttccacttttggctattgtaaatatggctgttatgaacattgatgtacagatttttgtgtgaatataagcttttattcctctaggataaatgcccaagtgtactcttgttgggtttcatggaaagaaagaccaagacatgctttgaagcttggaactttcagccccagccccattctccatggaggagagaggagctgaatacggagctaataatcaatcgcgcctacatcatgaagcctccctaacaatccctaaaatatggggttg

SEQ ID NO: 86092 - DNA, 896 bp, Homo sapiens
gtggtctccagcctcaggtctcagcatcaacctccgtctccacccagcttctagaatcaattctcacatgcaaacctggtcagtccatgcctcctgcttaaaacccaacagtagcttcccactggcttcagggcagttctacacattaaggccttctgtgttctaatttctgtctacctttgcactttcaccagctgctggttcccaattccaggcacagtgtcagtctcctgcctctggccctgggctcctgtgctcctccttcctcttacaatgccccctcctcacatttgcccagtgaactcctccctgctcaccttgctagaccacggccaaccatttcctgctctgggactcttatctgacacaccaggcagatgggatggcttggcaatatgtcaattattactcttatttgattttacgccaatctttctcccaagggtctggtggctgtcctctgctcatctctgtagcttagacctagcacagtgactggcagacagtaagtaggtgtccaatagactaggatctaacttgaatgaactgtttttggtagaggaggccaaagtgtttatcaaagcatatgagaaaacagatgcttatctctagtccagtgcagtgggctgagtggtggccccacaaatatacatccatgtcctcatcctggagtgtgcaaatattactcaaatggcaaacayatgattaggttaaggatgttgagaggaggacctgggtcctaaatgcaatcacacatgtccttgtaagagtgtggaagatggagttttgggatgcacacataggggaaggcctgtgaaggtggaggcagagactgtgtagtgatgtggccacaagccaaggagcactggcagctgccagaggccaggagaggcgtg

SEQ ID NO: 86093 - DNA, 670 bp, Homo sapiens
aaaaaaaaaaaaaagtccttctgactcctttctttacagaataacaagaggtgatatggattgaggtatatgtccctcaccttgaatttattttattcccctctttctttctctccatctctccttcccccactcatttttctcccttcttgccaggaaaatagaaaatacgtgctgattaattgagtattctatgtaaagaattgccaagtaatttaaaaaattctgtagatatcctaaaaatattcctaataattttgagacattatctacttcattagtaatgccattatttttccttcagaaatgttcataagcaaagaaatattcttccccctcattggtaaattcctaatagttatacttagttatgttcaagtgaaaaggaattgaattatgcacgttcttcatatgagacttactttttgaaaactgacttttcctccagatctctgttctctgtgaatctgtgctacagctcagctggtctaacaaccaagctgtcttgtggcgacagcrccctggtgtctacagtgaggaacaatctgctacctttctttctccagagataaacctgatataaattcccatcactttacctactagctatgtgaccacatgtatctatggttctcagttttctcatctataaaatgaagataacaatagt

SEQ ID NO: 86094 - DNA, 943 bp, Homo sapiens
aataaatcctctcgcttaggccacggctttaggagcctcattttttaaaagagagagagaaaaaaaggaaactttttagcagtgtctttcggccacgtttcaatttaatctcacatttgagttccacaattgttttttaatacgtaccctttgcgccatcggcctctctggctcccttcctacttcaacttctaatatatcctctttaaggccagtgtgaaaagaaacaaatattcaaactcccccggaaaaaaaaaaaaaaaaaaaaaaaggcccgacgaaaaatcccttaacgtctccagcaacgtgagctactggtcccaaatcttcggtctacgggacctgaagcaaagcgcccgagtcactgagcataaaagcgctccgtttccaagacagcagcgggggcaaaaaaaagcagatcttctctcccccaaaaatcagtttaaaaaaaaaaaaagaaagaaagaaagaaarggaaaaaaaagagcgcccctcagacccaactaccaaatctcatggctttctgccactccagctgtcaatcacaggcgaggttgtcaacgtggtgaatgaatgatcatccgctctgtcttcttctggtcagaacacctcaaatgttaatattcaaatgcacaaagccctagcgctcgcttcccttgaatcagtcctaattcctaatcagtttctctcttctctctctctctttctttctctccctctctctccctctttgcaagtgctgcactggaaggagattagagaaggagggttaaaaaaaatgtctgtctgagtttgtcttaaaggagccacgatcgatgctgcccgcttgcagtccccgtgcgtgtgtaaagtgtgtgttgcacaggcggagaggtggattccgaccagaatgctagaacccggaagtagtggtggccataacaggtcgcgtcttacacaatgc

SEQ ID NO: 86095 - DNA, 420 bp, Homo sapiens
gaattcatagacctaaaatcagatgtatattttattgctatgtgcatatgtacttttttttgactcttcacccccaaaagtattctgaactctacccaagttgaaataaagatactggcaggatttcctaattgttttctgtttttagttttattttaaattgacaaataataattatatatataaatatttatagggtagaatgtgatgttttgatatatgcaaacattatggaataccaaatcaagcctattaatatatttatcatctcaaatacttattgtttatttgtggtaataatttttatcaaattttaatttttattttaagtctctgggcacatgtgcrggatgtgcaggtttgttacataggtaaatgtatgccatggggtttgctgcacctatcaacccatcacctagg

SEQ ID NO: 86096 - DNA, 1483 bp, Homo sapiens
ctatgccattttttatcaacatccacagattttggtatctgtgggaagtcctggaaccaatctcccagagatactgaggcagtggctattgcaagatttgctaaaattttgttcacaaactttccatctgtattcaggaaaaatattagtctatcgtttccctttcttataaagtcttggctggttttggtatcatgttaatttaggcctcagaataaatcgggatgwatttctttcctttcaatggtattgtatggtttgagtagaatttgtattatttcttccttaaatgtttgcttaaattcacaaatgaaaccattccggcctgttgctattatttattttttgtttgttttttggtgggaaggtttttgatagatatcagtttattttacagatatagggatattcagatgatacatttctttttgattaagctgtggtaattttgtctttcaaagaactgcctatttaatctttcaaataatttgcctgttgaatcaagttgttgaatttgttggcataaagatgtacagaattttcccttatcctctgtaatgtgggcacctgtcttattatcccctctccagtactctcttctatgatcccatgagctctggctgccttggtattcctagagtctcagctccatctcttcaactcaaggagtcttctgagctctgcctgcattccttctctttgcaaaaaatcgtatggcccatctcattttttcttctcatctggggaccaccctccttcactgctctacattcagtgctttgaaaactattgtttcattttttcttgctgtgctttggttgttttaggtaggaggataaatctggttcttgtttctccgtcttagccacaagctggagtctcacttggtttttaatgccttaaaaaaatagaccctgctttaacatcacgtgcttatattttccccggataaacctggctttttcaagagtctctgcctatagtttttaaaagccagtacttttcagaatcaccagggaagcacaatagaaatgcatattcctatgtctgactccagggaactctgggtgtgttattctggggtgagctgagtcatgggcccctgagtattccgatagaggtagtctgagggccacactttgagaaacactgcagttattttacacagtatttcctctgcctagaatcctatcttactttaaagttagcctgtcttctgtaaagccttcaccagctcctccaggctgagtcagttactgtttacacctcactttttattttgcataattttgtatctatactttctccatgtgtataattatttgtgcatttatctctatcactagattgtgaactccttaagctctgaaaaagtgcctggcacataggtgatgcttggtaaacttttgtgtttggaatatgtaaataaatgattggaccagagggacaaaggcttccaataaacgttcaagtttgcaaccct

SEQ ID NO: 86097 - DNA, 988 bp, Homo sapiens
gggaaggcatgattggattttacaatgtaagaaaaacatgcaatttgagaggggccagggacagaatgatatagtttggctattttgccccacccaaatttcatattgaattgtaattcccaatgctacaggtgggtcctggttggaggtgtttggatcatgggggtagatmccccatggcttggttttgtttttgtgatagtgagttctcatgagatctgatcatttaaaagtgtgtggcacctgcccctcactttcacttgcttgctcctgctttcctcatgcaacatgcctgctccacctttgccttccatcatgactgtaagtttcctgaggcctccctagaagctgagcagatgccagcaccatgctttctgaaagcctgcagaaccatgagccaaataaccctctttcactataaattatccagcctctgatatttctttatagcaatgcaagaatggcctaatacagtggtgaattgttttctgatgggtaacagatggcacatccttgccttctatgaggatacgtgaaattcactctgtgaatctaaataatgacaaattagtgagaatgattattcattactggtagaaagtgggggtgggggagcttaaaggtattattcttaagtgcaaacatgtaaaatagtttacacttaggtactctgtgaacacttctcctgatcttatccagatagtggccatagtggtgacctgggatggcccaggcatggtgagagcctcaacagatcaaaggccgccactcatctacatgtatgcatatagcaaaacaaaatgtattaacattggtgtattcatcaacttgtctgctcctttcattcaccaaagaggatcccaaaatttctggtccaacttcccttccttccagcgacacccagcctctgaggagaggccactctgcgcagttcctcctgaagtttatatgaaaaggaagtcaaaggaggaggaagagtttgtaggga

SEQ ID NO: 86098 - DNA, 988 bp, Homo sapiens
gggaaggcatgattggattttacaatgtaagaaaaacatgcaatttgagaggggccagggacagaatgatatagtttggctattttgccccacccaaatttcatattgaattgtaattcccaatgctacaggtgggtcctggttggaggtgtttggatcatgggggtagataccccatggcttggttttgtttttgtgatagtgagttctcatgagatctgatcatttaaaagtgtgtggcacctgcccctcactttcacttgcttgctcctgctttcctcatgcaacatgcctgctccacctttgccttccaycatgactgtaagtttcctgaggcctccctagaagctgagcagatgccagcaccatgctttctgaaagcctgcagaaccatgagccaaataaccctctttcactataaattatccagcctctgatatttctttatagcaatgcaagaatggcctaatacagtggtgaattgttttctgatgggtaacagatggcacatccttgccttctatgaggatacgtgaaattcactctgtgaatctaaataatgacaaattagtgagaatgattattcattactggtagaaagtgggggtgggggagcttaaaggtattattcttaagtgcaaacatgtaaaatagtttacacttaggtactctgtgaacacttctcctgatcttatccagatagtggccatagtggtgacctgggatggcccaggcatggtgagagcctcaacagatcaaaggccgccactcatctacatgtatgcatatagcaaaacaaaatgtattaacattggtgtattcatcaacttgtctgctcctttcattcaccaaagaggatcccaaaatttctggtccaacttcccttccttccagcgacacccagcctctgaggagaggccactctgcgcagttcctcctgaagtttatatgaaaaggaagtcaaaggaggaggaagagtttgtaggga

SEQ ID NO: 86099 - DNA, 881 bp, Homo sapiens
tcggggatggagcaggcagtcagcctgggttaggaggagagcccaaactcaaggacacatagatagtcacatcaaactaaacagccctagtagatgagcaggatgcaggtttcagggttttgctggcagaacagaagagagtgaaacacaacacaccactttccagaacactatgcaatgtgtagatggaaagtaatttttaaggaaatgactggaaattattgacattgatttttgaaatcatccctctttgtcagctggtaaaacacctggaagctaatgcttccaagcactctaatttaaagtcggctttagctgatgttcatacccttagctggatacmacagctaatacggtagaagacacttagttaatttttgatgagaaaaatgctaggcaaaatgcaatgcttttacagtgggcatttggaaaggtgagagaggtagcatggaaaaacccttctctcacctttgctttttcctttcccatcccttttccttttccttcttcttcttcttcttcttgctttttttttttttttttttactttgttgcccaggcaggagtgcagtggtgcaattttgctcactgcagcccccaactcctgggctcaagagatcctcccaccttagcctcctgagtagctgggaccacaggcacacaccaccatatccgaataatttttgtatttttttgtagagatggggttttgccacattgcccaggctggtcttcaacccctgggctcaagcaatcctctctcctcggcctcccaaagtgctgggattagaggcatgagccactgcacctagccttcttataaagttatgtcctggctgggcacaatggcttatgcctgtaatcctgaccctttgggaggc

SEQ ID NO: 86100 - DNA, 866 bp, Homo sapiens
acaaaaaacaagactgacatcccctgagggagaaggagctctgccagcagactgcctttggacttgaactgcaacatgagctccttcctgggtccagcctgccaggccaacctgtacattttgaacttgccattctccgtaatcacatgagccaatttcttaaaaaatctctctccctctatttacatacatcttattggttctatttctctggaggaccctgactaatatattgaccatactctttttttgtatacatgccattcaaaattatataatattttgcaagtgaaactacttaattacttctgtattataagctacctctctcaattttaattttctcacctgtaaaatgagagaagtatggtaaaaattgttagtcatccaccaaaatctactctccccttcttcatggatacattatcctgcatytcccacccccagcagtcaagggggggctgtgggaacacatgactatgttctttccagtggcacgtgagtgaaaggtatatatggcaattctgggtctaggtcttaaaacagtgggtaaccttcatctgtgccatcttcctgccagggatggatctgtggcctcccagattttgaccataaaaatacctgagagaatggcggagctgcgctacaggaggactcacaatccccgaatgactgtgtggagcagaactgtgtccacaacctcgaccattcgcctcaacactgttatgtgaatgagcaatacatttctttgctctttaagccattgtattgttagtctccatatagtagctcagcctttgccctaactaatacagggtgatgacagcagttgtcttacctacctcataagatttttaaaaaaatcc

SEQ ID NO: 86101 - DNA, 866 bp, Homo sapiens
acaaaaaacaagactgacatcccctgagggagaaggagctctgccagcagactgcctttggacttgaactgcaacatgagctccttcctgggtccagcctgccaggccaacctgtacattttgaacttgccattctccgtaatcacatgagccaatttcttaaaaaatctctctccctctatttacatacatcttattggttctatttctctggaggaccctgactaatatattgaccatactctttttttgtatacatgccattcaaaattatataatattttgcaagtgaaactacttaattacttctgtattataagctacctctctcaattttaattttctcacctgtaaaatgagagaagtatggtaaaaattgttagtcatccaccaaaatctactctccccttcttcatggatacattatcctgcatttcccacccccagcagtcaagggggggctgtgggaacacatgactatgttctttccagtggcacgtgagtgaaaggtatatatggcaattctgggtctaggtcttaaaacagtgggtaaccttcatctgtgccatcttcctgccagggatggatctgtggcctcccagattttgaccataaaaatacctgagagaatggcggagctgcgctacaggaggactcacaatccccgaatgactgtgtggagcagaactgtgtccacaacctcgaccattcgcctcamcactgttatgtgaatgagcaatacatttctttgctctttaagccattgtattgttagtctccatatagtagctcagcctttgccctaactaatacagggtgatgacagcagttgtcttacctacctcataagatttttaaaaaaatcc

SEQ ID NO: 86102 - DNA, 1330 bp, Homo sapiens
caaaggtgcagagaactcactctgattggatttcatcattgtaaaagaaaagacgattacttaaaagaggtatctatgctactgatgggatttcaggctttagtggacacaatattttaaaaatcaagagcatttccacacatgagaagacagacagatgtacccaaacattgcctctgtttcaacccatttcaaatgaggagcaggattaacacttcttagagttcagggtargtaatccacttaccaaggtgttcataaacaatgtgcaggaataggaggaagggtttcatgttacccagtggatcgcattttacttcaaaatttcacctctgactctaccgtcagtcctccacaaatacgcctgtgtcccttttccacatctccaaacttgccactggcatccctctggcctaacaacaaggctttccaaatacctgggctccccctcctcagaagacaaggagagttttccgtcacacataaaagaggtcaggctgtgagataagaactggaaagttgggctttttttcttcgtgtatgtaaattcttagttgaatatgcatgtaatgttaaaaaagactcttcatggatatttaccagttcaaatggtttttccagattgttttccagcatgaaaaaaaaagcaattggaaccagccttaaattagaattaaaaacagatacttcttgaaagtatatgtaaaaaagctctaggttactgagattttttaatcacgacaactttaaaatgtgccatctgtgcgcagcaatagggttctcatcagttgaaaggttaatcgtaagctactgaagagctgactccaagcttagctctgagtggagaatttattacatagtcatgatcttatttagcatgcagggtaaatcgcctcattaggaatataatgtgaaggagattcacaacttttccgacaggttcagagaggtcaactaaggaaaagaaggaggccagtcatggaaataggactctggcttgctgtgggtgtatacttgtcttgtctagtgcctgtaaacttactcattttaagaatgatatctgtcaagaaaggagaaaagtccccattagaaggtgaagacccagaaaaacctttcagaggtttgtcccagaggtcataggtatgaaatgcagtaatagacatccagttgagggagtctgaaaggcaagggtgagaaagcatagcaagaggtaacaatctgttggattaacagtagctttcattaaccctgagccgtccctcagcacaggtgggagggaaggaaaggttgttttcttttgtccagtttcatttctttatcctgtatgaaa

SEQ ID NO: 86103 - DNA, 1129 bp, Homo sapiens
taccaaagctgcagcaaattaactaatttctgtcagatctgcctcttagtggcagagtatggcctgtccatccaggttcatgatgcaggtctatccttaaaagattacatgccaaagttggaggtgagcaaaagtactccattcagaatatggaaagagaggtttctaactctgatggaacacagccagttggtctgctgggaaaagtcacatctagcagtgacatgctgaacaatctggcccagaccatatcctatcacctaaaggcccacatttgctccttctggatgaaaggagagaatgagagaggaggcgtgtccatacaggcatgagaggcctacagatccagataatacccttgctgataagcatattaaagacaagaattatggaaacaatgatgctggagctggagcatagaagcttctaaagcaggctttaacgatgcctcatctagatccaccagaggataaggctatcaccacactatatgttgatggtctggaggrtatcattactgagaccaagctaacaaatcatccctacctatgtagagagatctggatgatcactgtacagagacagcagtgtgcttttatttttatttaattatttttatttttattttattttattttattttttgagacagagtttcattctttgttgcccaggctggagtacagtggtgtgatcttggctcactgcaacctctgcctcccaggttcaagcaattctcccgcctcagcctcccaagtagctgggattacaggcatgtgccaccacgcccagctaattttgtatttttagtagaggtgggatttcaccatgttggtcaggctggtctcgaactcctgacctcaggttatctgcccgcctaagcctcccaaagtgctgggattacaggcatgagccaccatgcctggccagcagtgtgctgcttttccacagggcaggctgcagaagtggctactgagaagtcctttaataaattgactgtcaatggctgcaggctcaaggtaaaatggggaagatcacaagcagccaaaggaaaagaaaaaaaggacagaaccacagactctgggatccagctagagctcattccagctctgctaggagctccttctcc

SEQ ID NO: 86104 - DNA, 600 bp, Homo sapiens
caccgcatgtcattagcctggaaaaaagatcacaattcaaaattcaaagcacaattattactgaaygtatatcactttgacaccatcataaagtcaaaccttcataagtctgggaccatctgtatatatttctgtgcgtgtgttgctgttattgctgttgttattcatttattggctttgtgtctttctttttgcatatgctgtttcatatgcctggaatcacccacttctccttttcacctggctgaccccactcatcttttgaacttccgtttaggtgtcagccccttgagggagccttcactcccccttcccactccaggctggatcagtcgcctatgtgctcctgtagcaccggcgcacacccacatcataacattcttcacaccagataaggggtattgacattgtgattttgaacactgtttagatccatgataattaataatttgcaataacacaaaatgattattttataatgattgtatgaatatatgattacagtattagtccattctcaggctactaataaagacatacccgagactgtgtaatttataaaggaaagaggtttaattgactcacagttcagcatggctg

SEQ ID NO: 86105 - DNA, 600 bp, Homo sapiens
caccgcatgtcattagcctggaaaaaagatcacaattcaaaattcaaagcacaattattactgaatgtatatcactttsacaccatcataaagtcaaaccttcataagtctgggaccatctgtatatatttctgtgcgtgtgttgctgttattgctgttgttattcatttattggctttgtgtctttctttttgcatatgctgtttcatatgcctggaatcacccacttctccttttcacctggctgaccccactcatcttttgaacttccgtttaggtgtcagccccttgagggagccttcactcccccttcccactccaggctggatcagtcgcctatgtgctcctgtagcaccggcgcacacccacatcataacattcttcacaccagataaggggtattgacattgtgattttgaacactgtttagatccatgataattaataatttgcaataacacaaaatgattattttataatgattgtatgaatatatgattacagtattagtccattctcaggctactaataaagacatacccgagactgtgtaatttataaaggaaagaggtttaattgactcacagttcagcatggctg

SEQ ID NO: 86106 - DNA, 571 bp, Homo sapiens
caaacaagccactcgaggtaactatctttatttcattttatggatgatgaaactgacattgaaagttgacggaactcactgaagtgacacagcatataaatgatggggtaggatgaagccctgacaatttccacccaggagccacacagagtgagaaagcctctcattgtaacggctgttgtggctcatttgggaaatttttacaaagtttcttcctaccaaataatagaggtttatttcagctcacttcctaggccactgtgagatgaacagctgtttgggccatagaagaaatagatgcctgtgttagatatttgtgggggtaaaaatggaaaattctcccccattaacatatgagtacaaataaacatcaaaaaacagaaaatgaacttcctattatgcactgtgcagaaaatcagtaccgagtcctcctgcagccacgtttttctgactcccaagttacttgctaccttctttttcacaygtttccattctctctacttcaggaattttctttctctttcttcagaaactacatagttcctccccatccatgccataaatcttccct

SEQ ID NO: 86107 - DNA, 660 bp, Homo sapiens
gaaatattaggtttaatattcaattcagtaagactggcaacattttcattatgaagagggggttgtttatgtattcctacataaattagtgtgcattcacatgtacatttcaaaagaaacatttttctgatgagtgtattaatagcaaaataacagtagatactataacatttcgaaaatctactaggatagcaaaccattagaactggcaatagcaaaagttacaataattatgttgaaacagatgcaacctcagccctggtgatgtcagtgataattggttccatataggtggagaaattagtcctcatggagcaacaaacataactatatttatattaaatagtctatttcttccatgcctaagaatttatctttaggcaatattcattatagcatgaaatagttaagcagagaaaagtttaaaamctaaaagtccaacagtaggagaatatgtaaatatatgagggtaattcacttttgttcagatatgtgtttactatctatttaatgcaatatcaggacaagcaatttcatacacatgatgattttcttaataaaacatatccaaacatattgtggaggctaaggtgttagaaatgaaaatagactcagctatggaacacagatatttcttcttgctttgaaaggtaactgctc

SEQ ID NO: 86108 - DNA, 922 bp, Homo sapiens
ttgtattacaaagtaattaatagggtcaaatattcataataaataccataagaaattgtagagaaaattcaaggaaggtaaggagttgtttccacaactgtaatccctacacctggaaaacagcctggcgtagggttgcttacaataaatgccaggtgaatgaatgagttaggaaaactgcatggacaagtgaacggttgagctggacctttgcgggtaggtttcacacaggtctgtgatggtgatggatatttgatccagaggaaactaacagcatgggcactaagcaggagcatggaaacctcacctttgtgtgctgaagggcaggtagtacagctggactctggtaagcaccgtggaggggaacactgacagatgaggayggagagatcggtgcattctgcatatggaaggccattatcccatgctgaaggtgtgaacttacagtctcagtttgtcaactgcagccctgggataatgacatttgcgtaacacagcttgtacaggcattggaataagtgaatgggaaaagtgatttgaatgcactttgcagggtggaaaggagtaaaaatgttacaggaattcatgcttatgttataaatgagagaagatcatgatgaatacataggtaatccccaaacagaaccatttgaaattctatgtcccttagctacctttttctaaacagtattaatttagaaaaaaaaaaatccacatgctagctatatcagtttacttttgtcagagttctagctcctccaacttattctacttctcttaagtgaatgtaataaaacaaatgttttccacccagaattcatgtttgtagaaacagaatttgaaagtgtactgctaaggttttcatccattgtccatgttccatattccaatactccgactatagactttacctctacttaat

SEQ ID NO: 86109 - DNA, 922 bp, Homo sapiens
ttgtattacaaagtaattaatagggtcaaatattcataataaataccataagaaattgtagagaaaattcaaggaaggtaaggagttgtttccacaactgtaatccctacacctggaaaacagcctggcgtagggttgcttacaataaatgccaggtgaatgaatgagttaggaaaactgcatggacaagtgaacggttgagctggacctttgcgggtaggtttcacacaggtctgtgatggtgatggatatttgatccagaggaaactaacagcatgggcactaagcaggagcatggaaacctcacctttgtgtgctgaagggcaggtagtacagctggactctggtaagcaccgtggaggggaacactgacagatgaggatggagagatcggtgcattctgcatatggaaggccattatcccatgctgaaggtgtgaacttacagtctcagttygtcaactgcagccctgggataatgacatttgcgtaacacagcttgtacaggcattggaataagtgaatgggaaaagtgatttgaatgcactttgcagggtggaaaggagtaaaaatgttacaggaattcatgcttatgttataaatgagagaagatcatgatgaatacataggtaatccccaaacagaaccatttgaaattctatgtcccttagctacctttttctaaacagtattaatttagaaaaaaaaaaatccacatgctagctatatcagtttacttttgtcagagttctagctcctccaacttattctacttctcttaagtgaatgtaataaaacaaatgttttccacccagaattcatgtttgtagaaacagaatttgaaagtgtactgctaaggttttcatccattgtccatgttccatattccaatactccgactatagactttacctctacttaat

SEQ ID NO: 86110 - DNA, 922 bp, Homo sapiens
ttgtattacaaagtaattaatagggtcaaatattcataataaataccataagaaattgtagagaaaattcaaggaaggtaaggagttgtttccacaactgtaatccctacacctggaaaacagcctggcgtagggttgcttacaataaatgccaggtgaatgaatgagttaggaaaactgcatggacaagtgaacggttgagctggacctttgcgggtaggtttcacacaggtctgtgatggtgatggatatttgatccagaggaaactaacagcatgggcactaagcaggagcatggaaacctcacctttgtgtgctgaagggcaggtagtacagctggactctggtaagcaccgtggaggggaacactgacagatgaggatggagagatcggtgcattctgcatatggaaggccattatcccatgctgaaggtgtgaacttacagtctcagtttgtcaactgcagccctgggataatgacatttgcgtaacacagcttgtacagrcattggaataagtgaatgggaaaagtgatttgaatgcactttgcagggtggaaaggagtaaaaatgttacaggaattcatgcttatgttataaatgagagaagatcatgatgaatacataggtaatccccaaacagaaccatttgaaattctatgtcccttagctacctttttctaaacagtattaatttagaaaaaaaaaaatccacatgctagctatatcagtttacttttgtcagagttctagctcctccaacttattctacttctcttaagtgaatgtaataaaacaaatgttttccacccagaattcatgtttgtagaaacagaatttgaaagtgtactgctaaggttttcatccattgtccatgttccatattccaatactccgactatagactttacctctacttaat

SEQ ID NO: 86111 - DNA, 955 bp, Homo sapiens
ggaagccatccaaatcctgactctcttgtgacggttgtatgagttaatagaaaagccttgaagagttcccttataacataattctctgctgaagtaccttaagctccaggtcaacctcattctccaattccatctccctcccatggctatacatctactgcctcttcctgctggggtccccctgaccagcaagaagctaagtagggtggccgaagtctgcttaccttctatgatatatgcctgacttcatctttgctacaccagatggtgggagtgcagtctgtctccattctgccaacaatctcttattgtattctcattcattgaaatagaccaagagatagattagcacactggctaagcagacattcaaacaggaaacaaaatcccagccagtttctccttctggtaggaacctccattctttatgagtgactctcttagagcccctccttctcccagtttggctttagaaagaaaagaatctccatttctcccctaaggaggagtaagggatatatctaacacaatcactgcatgtatgacactttccatctctctaacctattcatttcatataagtgaaagatcataatacagaagggttagttccatcacttactactaactctgaaggaagtgtaaattatgggtacttaatacctcagacttttcagctttgaccctaaacattgaacattgagtcccactgaatatcctgatacaaaagcaaaatttaacatttttaatgctatcccacagcttttgtctactattttctaaagttgtattttgctttgtttttctaaaagcagtcaggaaaataaatattktattaaacccacagttatttgcatacaactaataattgaattttccagactactatgcaagaagtatatttactattttgctggctttaagctaaagtttttaaaccattaggttttaatat

SEQ ID NO: 86112 - DNA, 661 bp, Homo sapiens
ttcaaggaaactaggaattttgtaaaaaaaaaaaaaaataacagcaatgtgtgatgtttcacaatttaaaaaatttttaatcattggcactggctcagctcatagttcatcaaaagcattgtatttgttccatttttccctcaaccatgaaaagctggtgatagccaaaggatgttctctctgcatgagaccaataggcagagtggggtggggagggattaggaatacagcaccccataaataagacctgctcctttgcaggtaatgtctgtggggggaagacagctggcctgggacagcattctccagcaacagtcatgaaacacagctgacaagaaatgcatgggaaccgctggtgggcaaaaaggacgagaaaatgggggtcccttgtttacacagtaaaatatgttgaagaaaaacatttgacaatcacatttctatttttacttttagttttgagacagggtctgggctcggctgcccaggctggagtgcagtggcatgccctccacctcctgggttcaagcaattcttgtgcctcagcctcccaagcagctggaattacaggtgtgygccaccatgtccagctaattttttaatatttttagtagacagggtttctctatgctggccagggcagtctcaaacttctggcctcaag

SEQ ID NO: 86113 - DNA, 741 bp, Homo sapiens
ccctgctcaattggatgatctttccttgcctctgagcttttggtggctattggcattccttggctcatggccacatgtctctccactctgtcttgtcattgctttctcctgtgtgtgtctgcgtgtgaactgtccccgccactctgatagaaacacatgtgtttatgtttaaggcccacacgtctgagttttgcatgctgctcttacactctgtactgtctctaaattcctttcagctggaatcatttgtgtgtgtgtgtatttttctagatggtccatatattagaatcatttcatctgcaaacagttttacttactcatttccaatttgcatgccttttatttcattttcttaactaattcctgtggctaggacttgcaggaaatcttgaatagaagcagtgaaagcagacatccttgtcttcttctggaatttaatgggaaagattttagtctttcaccattgagtaggacatwagctgtgggttttacctacagtccttccttatgatgaggaagttcctggccattcctatcttactgagtgtttttatcattaaagataaatggattttgccaagtggttgttctgtatcaattgagatgatcaaatggattttcaccttcattctatttctgcatatactacattgattgattttcttacgttactataccttgcattcctgggaaaaatctgacttggccctggcatataataatgtgctgttgggttgaact

SEQ ID NO: 86114 - DNA, 685 bp, Homo sapiens
aaggtgatagtattaggaggtagacrctttcaaggtgattaggtcatgagattgtagccctgacatttgggattagtacctttataagacaccagagatcttggctagcctctcctactacgtgaggatacagcaagagagtatcttctatgaggaagtagaccatcatcaaaaaacctgttactgctttaattttgaacttcccagccttcaggactgttagaaatatttgttatttataagccaccagtttttggtattttgtaatagcagcttaaacagagcaagacagaggaaaaggagaggtagtaaaaattaaggaaatgagactaataaaaatatggtcagagtgaagcggaaataaatcacattaattatacttttaagtattctacttctgccctgatcttcaagcaaacaggtgaaataatttaacaaatatcgttcattatacccaaatgggaatttcctactgaataaataataatgattgagcaaatgaatgagctccaggatataaaaatagacagttcttagatcatctttgattttactcactacatatattaaattatctgtcataagagctgcaaagaaaatacttcatccacttaaaatcttaaggtatatagctcctatttgagacaatatctccctcaaatagaaaaaaaatgagctgcctctg

SEQ ID NO: 86115 - DNA, 674 bp, Homo sapiens
ttatggctcatgatctcttaaagtaagaaatattttttacccccagcatttcctaaaactggctgtgaatagtcctgcttggatcacatacctgcctgtgacccaatcactgctcaaggggacaggaaacagggattgatgtgtttgggtggtttgtccacccctgtggaataggaggtgatatagccccacataatcccatggattagtaatgggcagttcaaccaaagactggatagaaggtaataaatgtccacagtaatcctgtgagttttaaaacttcattttttccccccacattgctgctcctttttttttttttttcctgatcactttgtttaaaggcctatggattggataatgtctrtcctcaatcagcctgcccttctattctcccctaggctggaagcctgaaaactacatttcccagaatccttttcagcttattctgttaggatcttccaacaggaggcactggcaggagactggaaagtgagagaaagcaagcagccatttattccccatttctggtaatgcctttgggagtcacagggtcggggtgaggactcttgaggagggtggggagagaagaggttgtacaggcaaaggctgtcaccaacgggggcggacgtctgggtatggtagcctcagaggcacaatgtttctgggccccg

SEQ ID NO: 86116 - DNA, 1468 bp, Homo sapiens
tgcattaccaaacctaatgctcaccacaacccttgtcgggtggtacagctgtggatatctattcagttgactgtcattggcacggctaataatgaaaaccatcagcatgcctgtgtctatgatgggctttatatcctacatacacataaagtgccttagatgaattaacttaggtgattactacaactacctatgagatccatactatcatccccattttatagatgaggaaactgacacacggagaggtttaacttgctcaaggatatcaaactaataagaggcagacataaaaatcaaacccaggttatctaactccagactccagaattgtgccctctaggctgtactgaatctgaggttcaggaaccataaattggcagccagggtctcactgtcagcaaagctgcaatggatcggaaacaccagactcagggcctcttggtgcctctgtttcmccagttttctctgcaaggctgattgctccccttaccccacctcccggtagcgctcaatctaattaatgcttgtgaagctgcagggcagcttatttaacaggtgttcccagagcacaaatgttttcatctttcctcctcaaatgctccagacaagtaagcacttcccagctcagaaacgtgtattaaccaccatatgttcttattttctgtattcttgatggtttaacatcttaagggtcttgcccagctggggaaagactacccttcccagggccagctaattcctagagatgagtgtgcctttcatatgcaaaccaacaagtccacctcttaagcagagatagtaatggtacctccatggatagaacactgccttctacatagtactcagtaaatgatggctttaaaaaaatgcatgtaattgacacgtaagtaaatactcagtagctgttagtcagtaaacataaatgtactgtgcccaactatctcctttatggagctcacattggtcacccctgccctaatcaccccaggtaacaggcaactaaaggcagttcatacacctcagagcctgctggaattattcaaattagccggtcctaaaccagcttagcctgtttactctgcctcgcccgttccttcctgggaaaaccacaataaaggctttcacccttacttttccctcaccccttctgcctcctggctgaccctgtgtctccctgtgtggccctgcaaagggtggcatgcccccttctcctgggacctgtgagtaacaaacagtcttctcaatggcaggcatctcctggtctgttggcttcatcatatctgagtgatagtgagacacatcccagcctgccttgaggaagggtggcctagtcaggggggcacctatgacatcataaatctctacctaggagtcccctctctctatggcctgcaaagtccccttctacctagcacagcccctcagactctgttcttcttatatttgcttcaatgagagattttgc

SEQ ID NO: 86117 - DNA, 1468 bp, Homo sapiens
tgcattaccaaacctaatgctcaccacaacccttgtcgggtggtacagctgtggatatctattcagttgactgtcattggcacggctaataatgaaaaccatcagcatgcctgtgtctatgatgggctttatatcctacatacacataaagtgccttagatgaattaacttaggtgattactacaactacctatgagatccatactatcatccccattttatagatgaggaaactgacacacggagaggtttaacttgctcaaggatatcaaactaataagaggcagacataaaaatcaaacccaggttatctaactccagactccagaattgtgccctctaggctgtactgaatctgaggttcaggaaccataaattggcagccagggtctcactgtcagcaaagctgcaatggatcggaaacaccagactcagggcctcttggtgcctctgtttccccagttttctctgcaaggctgattgctccccttaccccacctcccggtagcgctcaatctaattaatgcttgtgaagctgcagggcagyttatttaacaggtgttcccagagcacaaatgttttcatctttcctcctcaaatgctccagacaagtaagcacttcccagctcagaaacgtgtattaaccaccatatgttcttattttctgtattcttgatggtttaacatcttaagggtcttgcccagctggggaaagactacccttcccagggccagctaattcctagagatgagtgtgcctttcatatgcaaaccaacaagtccacctcttaagcagagatagtaatggtacctccatggatagaacactgccttctacatagtactcagtaaatgatggctttaaaaaaatgcatgtaattgacacgtaagtaaatactcagtagctgttagtcagtaaacataaatgtactgtgcccaactatctcctttatggagctcacattggtcacccctgccctaatcaccccaggtaacaggcaactaaaggcagttcatacacctcagagcctgctggaattattcaaattagccggtcctaaaccagcttagcctgtttactctgcctcgcccgttccttcctgggaaaaccacaataaaggctttcacccttacttttccctcaccccttctgcctcctggctgaccctgtgtctccctgtgtggccctgcaaagggtggcatgcccccttctcctgggacctgtgagtaacaaacagtcttctcaatggcaggcatctcctggtctgttggcttcatcatatctgagtgatagtgagacacatcccagcctgccttgaggaagggtggcctagtcaggggggcacctatgacatcataaatctctacctaggagtcccctctctctatggcctgcaaagtccccttctacctagcacagcccctcagactctgttcttcttatatttgcttcaatgagagattttgc

SEQ ID NO: 86118 - DNA, 689 bp, Homo sapiens
tcacgaggcagaggaggagctatggccttcttttgacagatgagtaaactgaggctcaaagaggggaagtgacttgctcaaggtcatagagcaagtcagtgacagtcagaactagacctacagtttggtgtcttccagacctgtgctctttccccccaaatctcaggccaagtgagcgacaagccatcccatcctgccccaatagtgtgcgtacactccgacactgaagaggaagctgctgttgtcttccttatcaaccccagcccaggtcttttcctgggagtcctactgccccatgcasagagctggtctgggcttctgtcacgccttgtggatatatctctgaggccaaacatcagaagcaaacagtggccagaggtcatgagctgggaggaagtgaagggagacagaaacagaaggcagtttccctctctcctctttaacaccattgcacaggcctgctcccacttgttgactgggcagattccagccacaagggaaagtcctggtgcctgaaatccccacactgtgagcatggtttctctcatctaaccctcaagcaaatgtcctgggagggtcaggagctaagatgtaatccagagaagcaagaccagctggaaggaatactctgagtccagtgctcttttctgccatcactgtccagggaaggaagaccccatccttgggag

SEQ ID NO: 86119 - DNA, 713 bp, Homo sapiens
ccagccctcctgccctgtcctgccctcgcctgccctggagtggctagggcgtgatgctggaggtgggctgaggtgtgactgaagccgagctttcgtcaacccctctctctgccmccatccccacatccctcagagctggtcctccgtaaacactcccagaatgctttgtcctcagacctttgcctgagcccggaatgtgcccccactctgattttctggcccagaacaagcccgctttttttgaagaagcctttcccatcaaaatttatttcttgaccaggtgcggtgtttcacagctatgattctaacactttgggagactggggtgggaggattgcttgagtctaggagtttaagaccagcctggacaacatagtaagactgtttctacaaaaaaattaaaaaattagccgggcatgatagcatgcacctgtggtcccagctactccgtaggttgaggtgggaggatacttgagcccgggatgttgaggctgcagtgagccgtgatcacgcctctacactccggcctgggtgacaaagcgagatcccgtctccaaaaaaaaaaagaaaaaaaaaatcagttccttttcctgtgacttcatggttttatttgtacctgtctctgccactctcacctgtgacatggccaggtctgatcaggtgatgttttccggagcctgcaggaggggagggaaggctaggctggtaggatc

SEQ ID NO: 86120 - DNA, 677 bp, Homo sapiens
caggagacatttagcatcaggataaactcacctaacacattgcaaaacccctaagactcgacaggatgagattgatgtttgttttaatgaccttgatcctgggacaggttaattaacgtccagcctcctccctctaagaagtagacggatgtagacaggaggcagattccagagaaaaggtgtctttatagtgtggtcatttaaaagtatagatgttcccggacttatgatgggattacgtcccaataagtccatcgtaagttcaaaatatcttaggtcgaaaatgcacttaaaacatctgatctacagaacatcatggcttagcgcctaacctagcttaaatgtgcggaaaacactttcattagcctacactcgggcaaaataatccaacacaaagcccattttgtaataaagagctgagtatctcatggaatrtattaaataccatgctgaaattgaaccatggaatggttgtatggctactcaaagtctggtttctactgagtgtgtatgactttcacgctgtcttaagtaaaaaaatcataagttgaaccattgtgagtcggggaccttctgtatcgttttgtctgtcttgttcccttatatatactcaacaccacaagcggtgcatggtacatggtgggtgcttaacgatttgttttaaaattttcatcaat

SEQ ID NO: 86121 - DNA, 677 bp, Homo sapiens
caggagacatttagcatcaggataaactcacctaacacattgcaaaacccctaagactcgacaggatgagattgatgtttgttttaatgaccttgatcctgggacaggttaattaacgtccagcctcctccctctaagaagtagacggatgtagacaggaggcagattccagagaaaaggtgtctttatagtgtggtcatttaaaagtatagatgttcccggacttatgatgggattacgtcccaataagtccatcgtaagttcaaaatatcttaggtcgaaaatgcacttaaaacatctgatctacagaacatcatggcttagcgcctaacctagcttaaatgtgcggaaaacactttcattagcctacactcgggcaaaataatccaacacaaagcccattttgtaataaagagctgagtatctcatggaatatattaaataccatrctgaaattgaaccatggaatggttgtatggctactcaaagtctggtttctactgagtgtgtatgactttcacgctgtcttaagtaaaaaaatcataagttgaaccattgtgagtcggggaccttctgtatcgttttgtctgtcttgttcccttatatatactcaacaccacaagcggtgcatggtacatggtgggtgcttaacgatttgttttaaaattttcatcaat

SEQ ID NO: 86122 - DNA, 686 bp, Homo sapiens
agtcaaggtagcctgcctggtggaggtggcatctgaatgtagagcctatagagcttaacattataggcacaagcatggaggcagggaccaaaacctctagcatccgtgtacccactcccaatccaagcctcagtttagggcatggcatacttctgttgaaggtggatggcccacagccctggctccagattcagcagaagctgcagtgcccagcgcttgcatggccttacctagtgaaggcatgcaggtcacggggcatgcagcatccgscctcgctgtgcctggcttttcaaaaacacaattactcacccttcagagatgccgtcggtgttggtaaactccagccgctaaactgcattacactgatctctccagaaacctttgcagttattaatagtttattgatcacagcccattgctgatgagagcaggcctcctcaccctcacccccctcgggtccctgctatctgtggaaagccttctattcatcatgcagatcaatgccactcaattctggggaaagggagtctctgggccacttaatccactttagaaagaaaacagaaaagaccaaattttagatgaggtgctgagaagaggtggattggtcaaaatcaaagctgtgacctggcagctgtttggtctgccaatgagaactagaatctgccttggttggaagtgggggg

SEQ ID NO: 86123 - DNA, 548 bp, Homo sapiens
tgtctacagttaataaacaaacacttctaaaaggacgartgaataattaagtcaagcccttacttgaggtgcttgaaacatgccaaagtgcattcaacatcggaactaacttcccattactccccccagggtgcttcctggcactgggctacaattcctgatggctgattctgggtgaagatgctgtctctggaaggcccctgatcaaggcaagccactacccagaggtgggaacaggtgaccccagtgcccccaccctattccatgagcatagggctcagcctcctcagctggggaggctgccgggggaggaaaattctgccttaacggggagctctcagctcttgtgcaagtcgcttctcttctctgggctgcacctgagccccctaaatagagtctgagatctgcactgcacaggatggttgctagggtttgatcaaacaatgggtggggaagagttttgctgaaatcataattccatatttggataacctgacagcccattaatttaacgagcctttcctgagacccgttgctgggcactgaga

SEQ ID NO: 86124 - DNA, 928 bp, Homo sapiens
cccctggagggacgagggggctgggtatgcacccaataaacagtcattggtcaaggctgctcccggggtggcgtcaactccccggcacttctcacctttctcatgtgcaggctgagtggtctccagtgccctgagaaagccctgtggaagcaccaaggatgctggcactgccaggaagagcgaggggtaagaggaagtgggcagggtgggataactgtcggccacatctgcctcctccctttcacagagggctccttcctgccctcagttctccacccaagtgccaccttcctcgatggccctgcctgaccacccatctaaatggcacccagcatctcattccttcccggtactgcaccccacttgccccttcattacacrcccatggtttagaatcacttctttgcagaatgtggaatgatgtattcatctacattttgccatgtctctccgactagattgcaaagccgtgcttttctcattccccctgtatccctgggcaccttccaccaagccaaggtcctagtaggtgctcaactaaatagccttggagggaatacattcttgtcaattccaacctgggagttctgggctctggggctaagacctagaaaagcatttgatagatgtgcctctgggacgctctatccagagaggcagtgatctgtccaaggtcatacaaccagggatacacacctgcaccccctgggggcagaagtcctgatgatccacccgacttccatccctccagggccccatcagtgggacaaaaagctccaggagtccttggggctcctctaggctacccgcgaaattgctctcagccaattcttggtaatcttctcagtctcattctctccctactttccccagctgaagaggaaacggctcagacagctgtggagctgggactctctctcgttgagat

SEQ ID NO: 86125 - DNA, 707 bp, Homo sapiens
aattagagtgaatttaggttggaagaaggttctttcttcatctttctttatctctgaataatttcaaagttgacagaccatggttgctgacatctttattgagaaaacaagagttttgcccacgcttatttaaatgtacttatattttcctgtttgctttacatattacatatgatgaacttttgaggatgggggtcataatttcctttttttctatctttctgaactaaaatatatatgtaaaaactcaataaatgatagagaattaattactgaacatatgtttgtattcacacagaaaggyggtaaatatagaagttgataggcagcttctagagccagatcacttgtgtttaaatcccagcattgctatgtggcttcaagaaagttactcaatttctctgtgcctcagtgacttcaattcaagtataacatgaagaaaataatgctactcatctttggagtggtgaagtgacttaatgcttaccaaacacttagaatatgctggcatatggcacatttagctattatcatttcaagataatttccttgctaagtgactataatgattacaactcataactgtagctttgaggaatacgtacacatattcaaagctgggaattgtttgttggcagctctactggtatatggagggatacagaagaaaatcatcatatgtacagctaatcaccaagagatttatg

SEQ ID NO: 86126 - DNA, 1615 bp, Homo sapiens
ccaggcctagcatttcttttaaacctcacaacagaccaaagatgcaggtactgcttccatttttccagttttacagatagagaaactgaggcccagagaggttaggcactggtgatgtacccagtgccatatggtgggtaactagtggctctaggtttagaatccagcctagcaccactcctgagcctggtcctccctcttaattaaatactctgctgcctttgacaaaagtctactcaattacagtcctttcaaatggtttgcttcatccatcctcacaagggttatttccattgtatggatagggaaactgagcacccagagaaactgtttctcaaaggttgcatagcaagcagggaatctgggacttgagctctattctttggctcccaacccaggctctctctctattttgcttcctcccctttctggcctacaggacaccgatatgcctaaaacatcctctcctgtatcctggaggcctgaagctcccttgagagtcatggcacttggaaaggtggagacaggttatagcagggcctcagctggatgggagcctactgaatggagaaagcaggccttgattcacagctggtgtaactgaaccaccgtccagtcctttccatctcaacctctgctgcttggccaggcctctgctgacttgtgactctgtggccttgakgcctggggtctctgctctgatgtcacaagcatacactggccgggggcactgcctcctgaaatgtccctgcgggctctgacaatgagcctttggatccatgatcctgaaagccatctggggcccatcgggattctagccacatctcaccccagacttttccttggagttgcagttaaagatgcatcagtggaattgttcctcccacatccatccctgcgtccagattgtgcactcagggatcacgtctgtctttttcaccctggtaagcagcaccctatgggtgttcagtttaggtctgttgaatgtataaccaaaggactcacccttctctaacaaacacactttcttttgagcacctcctatcttcctggccccatactagggtactcatatatacaaactcaatgtaattcttacaacaaacactgaggcagagagaggttatgcagcatgtctgaaaccacacagctgaggaatggggacatgggtcagaacccaggcattcagacttcacagtccttgctttccactagaccacagcctctagcccacccttgagtgtctttatctgggggtgggggtcccagcccaaggtgtctccaggacacgagtgccctggccaagcctgcagccagctaggagcctccatcaacagcagtgagtggaatctgcttttcccaggctgccacagagtcatattctttatactaaaggccatttgaaaaatgaataactaaatgcaatgtcagttttatacctatgtaagatgttgcatataaagaaattcacaaatcagggaaatagccctcatccttatttttgcatcataaaacgtggtctcagcaagcatccctcctctcctctggggttattatcagcttcttcctgcaagcgggaagtctctggatccagggagccaatgcttatgggatg

SEQ ID NO: 86127 - DNA, 1615 bp, Homo sapiens
ccaggcctagcatttcttttaaacctcacaacagaccaaagatgcaggtactgcttccatttttccagttttacagatagagaaactgaggcccagagaggttaggcactggtgatgtacccagtgccatatggtgggtaactagtggctctaggtttagaatccagcctagcaccactcctgagcctggtcctccctcttaattaaatactctgctgcctttgacaaaagtctactcaattacagtcctttcaaatggtttgcttcatccatcctcacaagggttatttccattgtatggatagggaaactgagcacccagagaaactgtttctcaaaggttgcatagcaagcagggaatctgggacttgagctctattctttggctcccaacccaggctctctctctattttgcttcctcccctttctggcctacaggacaccgatatgcctaaaacatcctctcctgtatcctggaggcctgaagctcccttgagagtcatggcacttggaaaggtggagacaggttatagcagggcctcagctggatgggagcctactgaatggagaaagcaggccttgattcacagctggtgtaactgaaccaccgtccagtcctttccatctcaacctctgctgcttggccaggcctctgctgacttgtgactctgtggccttgatscctggggtctctgctctgatgtcacaagcatacactggccgggggcactgcctcctgaaatgtccctgcgggctctgacaatgagcctttggatccatgatcctgaaagccatctggggcccatcgggattctagccacatctcaccccagacttttccttggagttgcagttaaagatgcatcagtggaattgttcctcccacatccatccctgcgtccagattgtgcactcagggatcacgtctgtctttttcaccctggtaagcagcaccctatgggtgttcagtttaggtctgttgaatgtataaccaaaggactcacccttctctaacaaacacactttcttttgagcacctcctatcttcctggccccatactagggtactcatatatacaaactcaatgtaattcttacaacaaacactgaggcagagagaggttatgcagcatgtctgaaaccacacagctgaggaatggggacatgggtcagaacccaggcattcagacttcacagtccttgctttccactagaccacagcctctagcccacccttgagtgtctttatctgggggtgggggtcccagcccaaggtgtctccaggacacgagtgccctggccaagcctgcagccagctaggagcctccatcaacagcagtgagtggaatctgcttttcccaggctgccacagagtcatattctttatactaaaggccatttgaaaaatgaataactaaatgcaatgtcagttttatacctatgtaagatgttgcatataaagaaattcacaaatcagggaaatagccctcatccttatttttgcatcataaaacgtggtctcagcaagcatccctcctctcctctggggttattatcagcttcttcctgcaagcgggaagtctctggatccagggagccaatgcttatgggatg

SEQ ID NO: 86128 - DNA, 1615 bp, Homo sapiens
ccaggcctagcatttcttttaaacctcacaacagaccaaagatgcaggtactgcttccatttttccagttttacagatagagaaactgaggcccagagaggttaggcactggtgatgtacccagtgccatatggtgggtaactagtggctctaggtttagaatccagcctagcaccactcctgagcctggtcctccctcttaattaaatactctgctgcctttgacaaaagtctactcaattacagtcctttcaaatggtttgcttcatccatcctcacaagggttatttccattgtatggatagggaaactgagcacccagagaaactgtttctcaaaggttgcatagcaagcagggaatctgggacttgagctctattctttggctcccaacccaggctctctctctattttgcttcctcccctttctggcctacaggacaccgatatgcctaaaacatcctctcctgtatcctggaggcctgaagctcccttgagagtcatggcacttggaaaggtggagacaggttatagcagggcctcagctggatgggagcctactgaatggagaaagcaggccttgattcacagctggtgtaactgaaccaccgtccagtcctttccatctcaacctctgctgcttggccaggcctctgctgacttgtgactctgtggccttgatgcytggggtctctgctctgatgtcacaagcatacactggccgggggcactgcctcctgaaatgtccctgcgggctctgacaatgagcctttggatccatgatcctgaaagccatctggggcccatcgggattctagccacatctcaccccagacttttccttggagttgcagttaaagatgcatcagtggaattgttcctcccacatccatccctgcgtccagattgtgcactcagggatcacgtctgtctttttcaccctggtaagcagcaccctatgggtgttcagtttaggtctgttgaatgtataaccaaaggactcacccttctctaacaaacacactttcttttgagcacctcctatcttcctggccccatactagggtactcatatatacaaactcaatgtaattcttacaacaaacactgaggcagagagaggttatgcagcatgtctgaaaccacacagctgaggaatggggacatgggtcagaacccaggcattcagacttcacagtccttgctttccactagaccacagcctctagcccacccttgagtgtctttatctgggggtgggggtcccagcccaaggtgtctccaggacacgagtgccctggccaagcctgcagccagctaggagcctccatcaacagcagtgagtggaatctgcttttcccaggctgccacagagtcatattctttatactaaaggccatttgaaaaatgaataactaaatgcaatgtcagttttatacctatgtaagatgttgcatataaagaaattcacaaatcagggaaatagccctcatccttatttttgcatcataaaacgtggtctcagcaagcatccctcctctcctctggggttattatcagcttcttcctgcaagcgggaagtctctggatccagggagccaatgcttatgggatg

SEQ ID NO: 86129 - DNA, 1615 bp, Homo sapiens
ccaggcctagcatttcttttaaacctcacaacagaccaaagatgcaggtactgcttccatttttccagttttacagatagagaaactgaggcccagagaggttaggcactggtgatgtacccagtgccatatggtgggtaactagtggctctaggtttagaatccagcctagcaccactcctgagcctggtcctccctcttaattaaatactctgctgcctttgacaaaagtctactcaattacagtcctttcaaatggtttgcttcatccatcctcacaagggttatttccattgtatggatagggaaactgagcacccagagaaactgtttctcaaaggttgcatagcaagcagggaatctgggacttgagctctattctttggctcccaacccaggctctctctctattttgcttcctcccctttctggcctacaggacaccgatatgcctaaaacatcctctcctgtatcctggaggcctgaagctcccttgagagtcatggcacttggaaaggtggagacaggttatagcagggcctcagctggatgggagcctactgaatggagaaagcaggccttgattcacagctggtgtaactgaaccaccgtccagtcctttccatctcaacctctgctgcttggccaggcctctgctgacttgtgactctgtggccttgatgcctggggtctctgctctgatgtcacaagcatacactggccgggggcactgcctcctgaaatgtccctgcrggctctgacaatgagcctttggatccatgatcctgaaagccatctggggcccatcgggattctagccacatctcaccccagacttttccttggagttgcagttaaagatgcatcagtggaattgttcctcccacatccatccctgcgtccagattgtgcactcagggatcacgtctgtctttttcaccctggtaagcagcaccctatgggtgttcagtttaggtctgttgaatgtataaccaaaggactcacccttctctaacaaacacactttcttttgagcacctcctatcttcctggccccatactagggtactcatatatacaaactcaatgtaattcttacaacaaacactgaggcagagagaggttatgcagcatgtctgaaaccacacagctgaggaatggggacatgggtcagaacccaggcattcagacttcacagtccttgctttccactagaccacagcctctagcccacccttgagtgtctttatctgggggtgggggtcccagcccaaggtgtctccaggacacgagtgccctggccaagcctgcagccagctaggagcctccatcaacagcagtgagtggaatctgcttttcccaggctgccacagagtcatattctttatactaaaggccatttgaaaaatgaataactaaatgcaatgtcagttttatacctatgtaagatgttgcatataaagaaattcacaaatcagggaaatagccctcatccttatttttgcatcataaaacgtggtctcagcaagcatccctcctctcctctggggttattatcagcttcttcctgcaagcgggaagtctctggatccagggagccaatgcttatgggatg

SEQ ID NO: 86130 - DNA, 1445 bp, Homo sapiens
atatccataagctccatactccacagctgagagtttatagatgaggaaactgaggctcagagaagggagatgccttggctgtggtcacacagcggctacttgactgaatcagtttccacatgatcttgtcagtgctgtaagatgaaaggcatctcagagggtggcccagagacagagagagggtctccattttccagctttatttctgggtgtccaggaatgtgttttgagttggacttgaaaaagaaactsccttgacatcagagaggcagtactgggctgggccagtgtgtgccaaggctaactgggcatgcattcctggaccaactgctggaaaatgtgcaaacgtggaaatatttcccctgctgagttgtgtagtgtgccgctgtggaggcctgcaaagcttgtcagccatgactcaccccttccacaaagttggcctggtcatttcgggtgaggaccaggagcacacaaggttgaattggatgtttatggctcccaagggacccatcagacgtgctgcctgcctcccatcttctttctggctgagttttcagaaatgtaggttaggacaaagtcctggaaggaataacaggagaataaagggagtgtattgatagagtgcctactgcataccaagccctggttgagcagttctatatgttataaacttgctctttgaaggatgatcccagcagcatcaacatccctgcagagcccgttagaaatgcaggatttccagccccattgtagacctgctgaatcaaaatcttcgtctttaaccatatccacagggggttcatctacaaatcagccctgttaaaaatctcattgcattccctccaatgcaaacatgctgacccccattttacagagggaaactgaggctccgagcagccaagacttgcagaaggttcccccagtgaaggagaggctgcactgtcacctgcaatgtgtctatctatcccagaacccaggatctttggggcgcattacaagcaaaatggctcaaagccctgcggttgcaggaccataataaagaggagggatgatattgtggaaaaagcttttcagagtcagcagtttatgtctcagctctgccattatcttgctaagccatctccctaaggactcagtttcttcatccatgaaatgggggcaggcatcaaaccacatggcctctgcaatcatttttagctgggagattttgatttgaggacccagaggattggtggtgctcagggtctctcccatctcaacataaggttgaaccacacccaacctccactttccaagagcttcccaggggcctctcccattccccagtcaaacagaactgcccaaccgcctcaaacgccacacaaaatcacaggcaacagggcagaaaacccaattatctcagctgttacactgcttaatttaatatttccaacgagttccttgag

SEQ ID NO: 86131 - DNA, 1445 bp, Homo sapiens
atatccataagctccatactccacagctgagagtttatagatgaggaaactgaggctcagagaagggagatgccttggctgtggtcacacagcggctacttgactgaatcagtttccacatgatcttgtcagtgctgtaagatgaaaggcatctcagagggtggcccagagacagagagagggtctccattttccagctttatttctgggtgtccaggaatgtgttttgagttggacttgaaaaagaaactcccttgacatcagagaggcagtactgggctgggccagtgtgtgccaaggctaactgggcatgcattcctggaccaactgctggaaaatgtgcaaacgtggaaatatttcccctgctgagttstgtagtgtgccgctgtggaggcctgcaaagcttgtcagccatgactcaccccttccacaaagttggcctggtcatttcgggtgaggaccaggagcacacaaggttgaattggatgtttatggctcccaagggacccatcagacgtgctgcctgcctcccatcttctttctggctgagttttcagaaatgtaggttaggacaaagtcctggaaggaataacaggagaataaagggagtgtattgatagagtgcctactgcataccaagccctggttgagcagttctatatgttataaacttgctctttgaaggatgatcccagcagcatcaacatccctgcagagcccgttagaaatgcaggatttccagccccattgtagacctgctgaatcaaaatcttcgtctttaaccatatccacagggggttcatctacaaatcagccctgttaaaaatctcattgcattccctccaatgcaaacatgctgacccccattttacagagggaaactgaggctccgagcagccaagacttgcagaaggttcccccagtgaaggagaggctgcactgtcacctgcaatgtgtctatctatcccagaacccaggatctttggggcgcattacaagcaaaatggctcaaagccctgcggttgcaggaccataataaagaggagggatgatattgtggaaaaagcttttcagagtcagcagtttatgtctcagctctgccattatcttgctaagccatctccctaaggactcagtttcttcatccatgaaatgggggcaggcatcaaaccacatggcctctgcaatcatttttagctgggagattttgatttgaggacccagaggattggtggtgctcagggtctctcccatctcaacataaggttgaaccacacccaacctccactttccaagagcttcccaggggcctctcccattccccagtcaaacagaactgcccaaccgcctcaaacgccacacaaaatcacaggcaacagggcagaaaacccaattatctcagctgttacactgcttaatttaatatttccaacgagttccttgag

SEQ ID NO: 86132 - DNA, 1889 bp, Homo sapiens
atgcaaaaaacatgatgaattacatatcaaaattttaaataaagaacagttacaataccatgctgagacactttaaagactgaggcaaaaggaaaaatcagtaatactgatcctttatttaaaattttggtattttgttcatcatagatttttgcgttcatgtttatgtatcatagtagcaatatttttctttcttaggggcatttgaaattatagtttgccttagtatcggtggtatcttggatttgattaaatgctttccgggtgatatttgaaacaagcgtaactcctggcaaccaaaacccaacttgactttttctcccacagttttctttaaacatttattcagtgaaagtcaccttccctgctcatgaaggaaaactgggagtcccaagtcttttctgttcactcttaaataatggaaaagcctcacagccattttaggtcacaaacacagtctcagtttagtgattagaatgcataatcccaggccaggcaagatggctcaagtctataaacccagcactttgggaggccaaggcgggtggatcatgaggtcaggagtttgagaccagcctggccaacatggtgaaaccctgtctctactaaaaatacaaaaattagtctggcgtggtggtgcacatctacaatcccagctactcagaaggctgaggcaggagaattgcttgaacccgggaggcagaggttgcagtgagccgagatggcgccattgcactcttgcctgggcgacaacagcaagactcaatctcaaaaaaataaaataaaataaaaaagaatgcataatcccctgaaatcatcgaaactcataacttcccttagtagtaaatctcccctctaccagctgagcctggaaacctgcagtaggaagggaagaccgggccttctgctctctaccctccacccctctcacctctctcttccactcaatacctgatgttttgttctccctgaaaatgggaggagtttggcagggagaaagatgaagggaatagaccagttcttaacctcacttgatggcttcatattctctgggtgaggaagatggttaatgggaaccctttctttccagacatcttcattgacttgtcagagcttcccaatgggacyttatcttctcatgtaatgtttatccatctgggtggtgggtatgtggatgtttattatataattagctgtacttttctgatgctttatttttaattttcttaatcaaaaaaataagaactgagaagaaataaggggaaagaattctaactccacatgaaaacaacctttgctgaatagaaatgtgcttcatcagtctgtctctctctctctctctgtgtgtgtgtgtgtgtgtgtgtgtgtattaccaatcatttctcctctcctggccttcatttttatcacctacataggcctagaaacacaaaagtttgtctagattgagattaactcctttgccctgtcacatgctagtttatttcttactccttctgaataagcagagcaatacaccactggtttctaatttcttcaagaataaatggccctggccagaatccagtccactcccagtctcctggaaccttgtcaagagaactggaacatctctgctctcaacctctagggcagaaatcagcaagagtcccacagcaaaaaatgcactatggaaacagcagtgtcatcaaaagcagaaaacatctttttctcaccactgagagttccaccgtactgcctgtctccaagcattggaaaggaagagagagaagatggtgcagaggctaaatagttgttcccatcttaataaaacaattacttttattgtttagcttcacaataccaacaatatattactaatatccttgaatactccttctccatagcaa

SEQ ID NO: 86133 - DNA, 1889 bp, Homo sapiens
atgcaaaaaacatgatgaattacatatcaaaattttaaataaagaacagttacaataccatgctgagacactttaaagactgaggcaaaaggaaaaatcagtaatactgatcctttatttaaaattttggtattttgttcatcatagatttttgcgttcatgtttatgtatcatagtagcaatatttttctttcttaggggcatttgaaattatagtttgccttagtatcggtggtatcttggatttgattaaatgctttccgggtgatatttgaaacaagcgtaactcctggcaaccaaaacccaacttgactttttctcccacagttttctttaaacatttattcagtgaaagtcaccttccctgctcatgaaggaaaactgggagtcccaagtcttttctgttcactcttaaataatggaaaagcctcacagccattttaggtcacaaacacagtctcagtttagtgattagaatgcataatcccaggccaggcaagatggctcaagtctataaacccagcactttgggaggccaaggcgggtggatcatgaggtcaggagtttgagaccagcctggccaacatggtgaaaccctgtctctactaaaaatacaaaaattagtctggcgtggtggtgcacatctacaatcccagctactcagaaggctgaggcaggagaattgcttgaacccgggaggcagaggttgcagtgagccgagatggcgccattgcactcttgcctgggcgacaacagcaagactcaatctcaaaaaaataaaataaaataaaaaagaatgcataatcccctgaaatcatcgaaactcataacttcccttagtagtaaatctcccctctaccagctgagcctggaaacctgcagtaggaagggaagaccgggccttctgctctctaccctccacccctctcacctctctcttccactcaatacctgatgttttgttctccctgaaaatgggaggagtttggcagggagaaagatgaagggaatagaccagttcttaacctcacttgatggcttcatattctctgggtgaggaagatggttaatgggaaccctttctttccagacatcttcattgacttgtcagagcttcccaatgggactttatcttctcatgtaatgtttatccatctgggtggtgggtatgtggatgtttattatataattagctgtacttttctgatgctttatttttaattttcttaatcaaaaaaataagaactgagaagaaataaggggaaagaattctaactccacatgaaaacaacctttgctgaatagaaatgtgcttcatcagtctgtctctctctctctctctgtgtgtgtgtgtgtgtgtgtgtgtgtattaccaatcatttctcctctcctggccttcatttttatcacctacataggcctagaaacacaaaagtttgtctagattgagattaactcctttgccctgtcacatgctagtttatttcttactccttctgaataagcagagcaatacaccactggtttctaatttcttcaagaataaatggccctggccagaatccagtccactcccagtctcctggaacctygtcaagagaactggaacatctctgctctcaacctctagggcagaaatcagcaagagtcccacagcaaaaaatgcactatggaaacagcagtgtcatcaaaagcagaaaacatctttttctcaccactgagagttccaccgtactgcctgtctccaagcattggaaaggaagagagagaagatggtgcagaggctaaatagttgttcccatcttaataaaacaattacttttattgtttagcttcacaataccaacaatatattactaatatccttgaatactccttctccatagcaa

SEQ ID NO: 86134 - DNA, 911 bp, Homo sapiens
agctgggggagctggcgggcggcctggtgtgtcccggcctgcgcgaacggccactgttggcggggaagcctggcggcgagctcagggctagggagggccggccctggcgcccggcgcgccccgcgacctgcttggctgcccacggctgctgcacaagcctgtgacgctgccctgcgggctcacggtctgtgagcgctaagtggagctggggcccgcgcggccacaggcgcgggcgcgtgaacgtggtgctgagccgcctgctggagaggtgcttcccggccgagtgcccgctgcgcaggctggagggtcaggcgcggatcctgcagcgccagcagcagcccgaggccgcgctgctcaggtgcgaccaggccctggagctgtgacttggctgtggggctggcccgcctccctggcccctgtcaagccgagcggctggagctaacccgcgggcctgggcttttgagcgctttgtccaggcgtagggggtcactttgcttactaatgatgggaaggtgaaaggtgggggaggccactccctgcagtcagggtggcaggtgtcagaggccacatgcaacccactggttttgtcttttctaggatgctgataagtttcccgcggcccccggagcagctctgtaaggccctgtagttgcctttcattcccttctgctctattgaggagtgggaggatgacaaagtgtttttgctcaacccgaaggaaaatgcacatgggaggacacaccgggttactatttgagtagcccaggcaagagaccagcggctgcttcagccatgagaccacctcaggccaaaatagccttgtggttgttttacttcttttcaccaaatgggtctttttggggtttgtggcatgtcccatgtaaygatgatctcttggttcccctttctca

SEQ ID NO: 86135 - DNA, 2126 bp, Homo sapiens
cacctgcaacgccgtgcgctagactatgctactgaaggacctctaccgcggctcagccctggactaaggcaccggaggatccccgccctgccccgccccgcggtgtcctggactgtgcactgcagaacccccacccttccacaccctggactctggctcccgaggaccttggccccggctcgccctgaactactcctgcccctcagcgccctggactgtggttccagaggacctggtcctggggcaacttgtgctaccgcgtggactccaggaccccagtccttccacgccctagaccaaggcacgggagaacctctgactcgccgcccccgacctagggcaccagaggacccacaccttgccgtgccccggactacagcacggaaggacccccgatccgccgggcactgggctcctgcacagagggacccccgccatggaggtctggactacccctgccccaccgcaccctggactactgcacgccaagaccctcgcctgaacacgccctacactctggcatgggggaacccggccccgcagagccctggactctggcattggaggactcctcggctaggttctggactcctgcaccagaggactcctgccctgccacaccctggacacctgcactagagaaccctgccccgtcgccccctagactatggcacgggaggacccctgccaccgacttcggcacggtaagacccctgacccgccttgcactggattccagcactggaggaccccctgccacggcgctctctggactacccctgcgccaccgcgtcctgcactacagcacagcaggaccgccgtcccaccgcgcactggactgaggcacagcagcacccgggcctcgtggttggtggactgcaggacgaggtgaccccccgccccgctgcgcgttggactatggcacaggaggaccaccattcccgcatgccctggaccactgcaggacaggtcccccactccgcagcggcctggaatatggcactgcaggacccccgccctgctgctccacggactccaccactgaagaccctcgcccccctgcaccctggacaaaggcacgggaggacccggcttcaccgcccagtgggctatcacataggaaaacccccagcccacccccatcgcgccagagactctgacaagagagaacccctgccccctgctccccggactacagcaaggcaggaaccaccctcctccaggatcctcactatggcaactgtggaaccccgccctggtacgccctggactaagtcaccgaaggaccccgaccccaccacaccgtgaactccagcactggaggaccattgccttactgcggactcaagcactggactatcgcagggctggatccctgtcccgccatgccctacactatggcacgggaggacccagcctcactgagctctggactccagcaccggaggacacctacacggaggactcctgctccgccacgtcctggactcctgcacaagagaacccccgccccgcggcaccctggatatagcaaggcaggaatcccgccctgcagtgttctggactgcggcacctgagaatccatgccccatcgcgccctggactgctgctccacaggactcctgttccactgcaccctggactatggcaccagaggacccagcccctcgcaycctggactatggcaccagaggacccagccccctggcgtcttggactaaggcacagtaggaccccgcagcatcgtgtactcctgcacaggaggaccctcgcagggctgcgtcctggactgagctactgaaggagcctcacccctgcctcaccctggtctaaggcactggagaactcttgctccacagagctgcggactcttgcacgagagaacctgcgcccagccgtgccctggactgtggcacagtagggcccacaccgggccatggactcctgtactggaggaagagtggtgataaatgtccaggtttacaagttgaaaagtagcagtcaatgtgctacaatggatggatttgatgtaaaattacaaatgctgaaaacattatgtgtaattgcctagccagatcaattacacaagacaaagaaataaaagaaatccatatagggaaggaaga

SEQ ID NO: 86136 - DNA, 649 bp, Homo sapiens
gatgtttctgtactaatttgggggagacttgtgggccataaataaatgagatacacatcctaaaaataatggtaaaaattatcaagtaccactttcagatggttactcaagtatcaacttggtatgcaagtaagttcaccgatttcttcacctatgatttcatactcaaagtgctacatcttacttaggtactgataacatttagaaacctttataatcagcctcttaaagaaaatccagccttttcagatggtaaacttgtctttactaactttaatgcccgtaactatttygatataaccaaacaaaaatttttaaaaatatattccttacagctcctgattaacttattttctgatacattctgaggctagtaacaaaatttagaccagaataggttttcatatatcaaaaaaaggaaaggaacacggagagcacagatgagatgtatggaggctctatactatagacccatccttgctctgtgcgggaatcatcacaggaatcgcgcccattcgacttagattaggggcagctaccttagcaggtgggagagtcggactctgaggagtgcgttcaaagtcttcacttggtacttgtttatactgagtcttggaatatccttccatgttggaaggagatatggatc

SEQ ID NO: 86137 - DNA, 649 bp, Homo sapiens
gatgtttctgtactaatttgggggagacttgtgggccataaataaatgagatacacatcctaaaaataatggtaaaaattatcaagtaccactttcagatggttactcaagtatcaacttggtatgcaagtaagttcaccgatttcttcacctatgatttcatactcaaagtgctacatcttacttaggtactgataacatttagaaacctttataatcagcctcttaaagaaaatccagccttttcagatggtaaacttgtctttactaactttaatgcccgtaactatttcgatataaccaaacaaaaatttttaaaaatatattccttacagctcctgattaacttattttytgatacattctgaggctagtaacaaaatttagaccagaataggttttcatatatcaaaaaaaggaaaggaacacggagagcacagatgagatgtatggaggctctatactatagacccatccttgctctgtgcgggaatcatcacaggaatcgcgcccattcgacttagattaggggcagctaccttagcaggtgggagagtcggactctgaggagtgcgttcaaagtcttcacttggtacttgtttatactgagtcttggaatatccttccatgttggaaggagatatggatc

SEQ ID NO: 86138 - DNA, 649 bp, Homo sapiens
gatgtttctgtactaatttgggggagacttgtgggccataaataaatgagatacacatcctaaaaataatggtaaaaattatcaagtaccactttcagatggttactcaagtatcaacttggtatgcaagtaagttcaccgatttcttcacctatgatttcatactcaaagtgctacatcttacttaggtactgataacatttagaaacctttataatcagcctcttaaagaaaatccagccttttcagatggtaaacttgtctttactaactttaatgcccgtaactatttcgatataaccaaacaaaaatttttaaaaatatattccttacagctcctgattaacttattttctgatacattctgaggctagtaacaaaatttagaccagaataggttttcatatatcaaaaaaaggaaaggaacacggagagcacagatgagaygtatggaggctctatactatagacccatccttgctctgtgcgggaatcatcacaggaatcgcgcccattcgacttagattaggggcagctaccttagcaggtgggagagtcggactctgaggagtgcgttcaaagtcttcacttggtacttgtttatactgagtcttggaatatccttccatgttggaaggagatatggatc

SEQ ID NO: 86139 - DNA, 958 bp, Homo sapiens
aatgcatgttaacctcggtgaaaactcagaagtttaaacatggtcccccttgsgtcatgtggctaccccaggaccaatcattgcaccagacataggagataatctcaaaagccaggttggagtcaaggttctccagtggaatttccactttagaaatcagttttgtcaggctttgtgtttgcatattacagacatgatagccatatagctatctattccagtagagatgaaaacctaagagcatatgcccattcaaaggattttacatgaatcttcatagcagctttacttgcaacagccaaaacctgaaaatagtccaaatatccatggacaggtgaatttgtgacttataaacttactatggtatctgtatataatgaaataatactccctagtaagaacagaacaattgatagatgtagcaacatgaataaatctcaaaaatagtgatgctgagtgatcagaaagtatacataccctatgattttatgtatttggaaataaaaactcacggatagtgactagaagtggatcagtggttgcctgtggatggaatggggataggcaggaaaaagtgagtagaaaaagcacaaggaaactttggtggtaaaggtaatggatatgtttgctattttcatatgttgttggttttgtagagctacaaatgccaagaattatcaaaatgtacaattgaagtatgtgcagtttattgcatgtaaataaactttttaaaaattaaccgatacaaattgacttacatgaccagaaagctcttgaaaaactctcctgttttctcccctatttttattcttgcatgcccttatagcctgtgttaacacatttctcatcttaccgttattttgtgtctacatttcaccaagtcaatataactatcaccataatttcttggtttctctttagttcattagtaattatgagtaatgtattgaaatgttaa

SEQ ID NO: 86140 - DNA, 958 bp, Homo sapiens
aatgcatgttaacctcggtgaaaactcagaagtttaaacatggtcccccttgggtcatgtggctaccccaggaccaatcattgcaccagacataggagataatctcaaaagccaggttggagtcaaggttctccagtggaatttccactttagaaatcagttttgtcaggctttgtgtttgcatattacagacatgatagccatatagctatctattccagtagagatgaaaacctaagagcatatgcccattcaaaggattttacatgaatcttcatagcagctttacttgcaacagccaaaacctgaaaatagtccaaatatccatggacaggtgaatttgtgacttataaacttactatggtatctgtatataatgaaataatactccctagtaagaacagaacaattgatagatgtagcaacatgaataaatctcaaaaatagtgatgctgagtgatcagaaagtatacataccctatgattttatgtatttggaaataaaaactcacggatagtgactagaagtggatcagtggttgcctgtggatggaatggggataggcaggaaaaagtgagtagaaaaagcacaaggaaactttggtggtaaaggtaatggatatgtttgctattttcatatgttgttggttttgtagagctacaaatgccaagaattatcaaaatgtacaattgaagtatgtgcagtttattgcatgtaaataaacyttttaaaaattaaccgatacaaattgacttacatgaccagaaagctcttgaaaaactctcctgttttctcccctatttttattcttgcatgcccttatagcctgtgttaacacatttctcatcttaccgttattttgtgtctacatttcaccaagtcaatataactatcaccataatttcttggtttctctttagttcattagtaattatgagtaatgtattgaaatgttaa

SEQ ID NO: 86141 - DNA, 2149 bp, Homo sapiens
actccacaagtcctggaagttaaatgctcttaaatatttgatggtctggtcttagcaaaacggcaggtttttacttttacatttttagctatgttttaaattatttgtaatccagacactgaagttttattttgttgtgaattgaatctgggcagagtgtacaagggatctctctgtattatttttacaactacatgtgaatctataattatctcatcaaaaattcactgaaaaaggtatcacggagcccatgtttgctgttaccgtctttgctcctcccaggttacaatgccccgtgcctctcagtgcacagtgaaaatgcagcagacgtttttgatgtgagctccacggaatggatccagactgtccccttcaacaaggtaatttgaccttaagattatgcaactaatgagttaatgactgaaacgcggaaacagaaataatccattgtacatttactgtaatgggtacttgctagtttggaggcttaacaaagagtataaaaaacaaaaccctacaaaacattatattgattaattgcattactagtactagagccatttgtgacatctagttccattatataaagtagtattgttatagataaatatattatttatttataccatacagcacagcagttatttcccatattcagtttaaagttactttatcagtaatttttacttaccagtataatttgttccttttatacttaccagtataaaaaggaacactttacagggtaaaaggaacatttttacagggtaaaaaaagaaaaaagcatataaccaaggctgtgtttcagattctcagtaggatctcacaatggtgatgttttgcaaaacaaggacattgacagtaactccatctacttaccttaggcagattttcctagttttactttcactgtgtgtgtattaatgtctgtataattctaccacctgtgtgaattcatgtatccaccactagtcaatatactgaatggctccagcaccacagtgggtccctcaagagcccttttataatcactccccctccctcccacctccttccgctttcctaacccctggcaatcagtaacctccatttctaaaattttatcatttcaaaaatgtctaacaaatggcgttatatagtattcatgatttttatctgctaagtccaaatttatttttctaaaaaaaacaaactttggattagaaacccaggagaatcccattacaatattcttatcatatagcagctacatcaaaaaatttttggaatatatacagttcaaataaatagacaaaaacaagtgatgcccatcagtcagatgatagagtaacttcaattcatatggtccaagtctgacaaaaatgcattctaacacctgcatctaacaccagctttattgaataatttcatcacgtttcaaaatctgtgtctcctagaccagttgagctcacaacaaaaagcaattgtagagagttagaaaaatatatgaaattagtgaacaaaacagtgaaaccttccaaccaggaatgtttttggaactttctttgttagtaatagttccttatggttcctaaatattcaacctcccagcatgaatgtgtctcccatcaaaagagccacagaataaacacaacctcttttttcaacatccctcttcctatgctcacgtctcccatctttttcccttgtcttacagccaaattcctgaaattgttattgatattccttgccctccacttcccacccctattcacacctccatcacagggcaatctgacttacaccttaatcactccattaaagctgctctcatacaagttatcagccatcagttgtgaaaaccatctgacctgtttgtctcttcttggctgcccagcgacacctgacccttctttcttcagyccccacgctgctgctccctcgattttccccacttccctgaattctccttccctgttttctctgctcctcttcctctggtcgaagccctcttcctttctcgctctgcttactcagcatgtccaaagagtcaggctgacactaccagaagcgagtcatcgattttagcgtgacaagtgggatggctagagattgtgtgccatgcacagtactgttcatgaagtgttcctacaaccaggctttagagctc

SEQ ID NO: 86142 - DNA, 2149 bp, Homo sapiens
actccacaagtcctggaagttaaatgctcttaaatatttgatggtctggtcttagcaaaacggcaggtttttacttttacatttttagctatgttttaaattatttgtaatccagacactgaagttttattttgttgtgaattgaatctgggcagagtgtacaagggatctctctgtattatttttacaactacatgtgaatctataattatctcatcaaaaattcactgaaaaaggtatcacggagcccatgtttgctgttaccgtctttgctcctcccaggttacaatgccccgtgcctctcagtgcacagtgaaaatgcagcagacgtttttgatgtgagctccacggaatggatccagactgtccccttcaacaaggtaatttgaccttaagattatgcaactaatgagttaatgactgaaacgcggaaacagaaataatccattgtacatttactgtaatgggtacttgctagtttggaggcttaacaaagagtataaaaaacaaaaccctacaaaacattatattgattaattgcattactagtactagagccatttgtgacatctagttccattatataaagtagtattgttatagataaatatattatttatttataccatacagcacagcagttatttcccatattcagtttaaagttactttatcagtaatttttacttaccagtataatttgttccttttatacttaccagtataaaaaggaacactttacagggtaaaaggaacatttttacagggtaaaaaaagaaaaaagcatataaccaaggctgtgtttcagattctcagtaggatctcacaatggtgatgttttgcaaaacaaggacattgacagtaactccatctacttaccttaggcagattttcctagttttactttcactgtgtgtgtattaatgtctgtataattctaccacctgtgtgaattcatgtatccaccactagtcaatatactgaatggctccagcaccacagtgggtccctcaagagcccttttataatcactccccctccctcccacctccttccgctttcctaacccctggcaatcagtaacctccatttctaaaattttatcatttcaaaaatgtctaacaaatggcgttatatagtattcatgatttttatctgctaagtccaaatttatttttctaaaaaaaacaaactttggattagaaacccaggagaatcccattacaatattcttatcatatagcagctacatcaaaaaatttttggaatatatacagttcaaataaatagacaaaaacaagtgatgcccatcagtcagatgatagagtaacttcaattcatatggtccaagtctgacaaaaatgcattctaacacctgcatctaacaccagctttattgaataatttcatcacgtttcaaaatctgtgtctcctagaccagttgagctcacaacaaaaagcaattgtagagagttagaaaaatatatgaaattagtgaacaaaacagtgaaaccttccaaccaggaatgtttttggaactttctttgttagtaatagttccttatggttcctaaatattcaacctcccagcatgaatgtgtctcccatcaaaagagccacagaataaacacaacctcttttttcaacatccctcttcctatgctcacgtctcccatctttttcccttgtcttacagccaaattcctgaaattgttattgatattccttgccctccacttcccacccctattcacacctccatcacagggcaatctgacttacaccttaatcactccattaaagctgctctcatacaagttatcagccatcagttgtgaaaaccatctgacctgtttgtctcttcttggctgcccagcgacacctgacccttctttcttcagtccccacgctgctgctccctcgattttccccacttccctgaattctccttcsctgttttctctgctcctcttcctctggtcgaagccctcttcctttctcgctctgcttactcagcatgtccaaagagtcaggctgacactaccagaagcgagtcatcgattttagcgtgacaagtgggatggctagagattgtgtgccatgcacagtactgttcatgaagtgttcctacaaccaggctttagagctc

SEQ ID NO: 86143 - DNA, 2149 bp, Homo sapiens
actccacaagtcctggaagttaaatgctcttaaatatttgatggtctggtcttagcaaaacggcaggtttttacttttacatttttagctatgttttaaattatttgtaatccagacactgaagttttattttgttgtgaattgaatctgggcagagtgtacaagggatctctctgtattatttttacaactacatgtgaatctataattatctcatcaaaaattcactgaaaaaggtatcacggagcccatgtttgctgttaccgtctttgctcctcccaggttacaatgccccgtgcctctcagtgcacagtgaaaatgcagcagacgtttttgatgtgagctccacggaatggatccagactgtccccttcaacaaggtaatttgaccttaagattatgcaactaatgagttaatgactgaaacgcggaaacagaaataatccattgtacatttactgtaatgggtacttgctagtttggaggcttaacaaagagtataaaaaacaaaaccctacaaaacattatattgattaattgcattactagtactagagccatttgtgacatctagttccattatataaagtagtattgttatagataaatatattatttatttataccatacagcacagcagttatttcccatattcagtttaaagttactttatcagtaatttttacttaccagtataatttgttccttttatacttaccagtataaaaaggaacactttacagggtaaaaggaacatttttacagggtaaaaaaagaaaaaagcatataaccaaggctgtgtttcagattctcagtaggatctcacaatggtgatgttttgcaaaacaaggacattgacagtaactccatctacttaccttaggcagattttcctagttttactttcactgtgtgtgtattaatgtctgtataattctaccacctgtgtgaattcatgtatccaccactagtcaatatactgaatggctccagcaccacagtgggtccctcaagagcccttttataatcactccccctccctcccacctccttccgctttcctaacccctggcaatcagtaacctccatttctaaaattttatcatttcaaaaatgtctaacaaatggcgttatatagtattcatgatttttatctgctaagtccaaatttatttttctaaaaaaaacaaactttggattagaaacccaggagaatcccattacaatattcttatcatatagcagctacatcaaaaaatttttggaatatatacagttcaaataaatagacaaaaacaagtgatgcccatcagtcagatgatagagtaacttcaattcatatggtccaagtctgacaaaaatgcattctaacacctgcatctaacaccagctttattgaataatttcatcacgtttcaaaatctgtgtctcctagaccagttgagctcacaacaaaaagcaattgtagagagttagaaaaatatatgaaattagtgaacaaaacagtgaaaccttccaaccaggaatgtttttggaactttctttgttagtaatagttccttatggttcctaaatattcaacctcccagcatgaatgtgtctcccatcaaaagagccacagaataaacacaacctcttttttcaacatccctcttcctatgctcacgtctcccatctttttcccttgtcttacagccaaattcctgaaattgttattgatattccttgccctccacttcccacccctattcacacctccatcacagggcaatctgacttacaccttaatcactccattaaagctgctctcatacaagttatcagccatcagttgtgaaaaccatctgacctgtttgtctcttcttggctgcccagcgacacctgacccttctttcttcagtccccacgctgctgctccctcgattttccccacttccctgaattctccttccctgttttctctgctcctcttcctctggtcgaagccctcttcctttctcgctctgcttactcagcatgtccaaagagtcaggctgacactaccagaagcgagtcatcgattttagcgtgacaagtgggatggctagagattgtgtgccatgcacagtactgttcatgaagtgttcctacaaccaggcttyagagctc

SEQ ID NO: 86144 - DNA, 588 bp, Homo sapiens
attacataatgaacataataaagaacttgttaatattactggtaacttggaaagaagagttaaagatttagaaggaatctaagataatatatttcatgggcctgaaattatttaattttagtttatatttttgctttaattgcagtgaggaagtaggtacagtagtgagtaaactaatttagcaaaactaattaatgtaatttatcattctttctgttttttaaactttaagaacaaagactaggtaagatatagcatgcacrtatatgagttagttttaaatgtgcggtacacctggctaggggaacatattagggttctgtttaaatcacactgggaattgtgaagtctcaaactacttagagctgaaagagaattacacattatagtcaaagtgtttataattctgaaggagtacttgtcttgtacggaagtgtggtttttttattgaactcaatttaattaatgtgaagattgtgtaatggaaaggaaaaacataaaaaaattccctctttggcctctgtatttttgcattggtatttctgtttttatttttgtcatatatatatatatatatacacacacaca

SEQ ID NO: 86145 - DNA, 588 bp, Homo sapiens
attacataatgaacataataaagaacttgttaatattactggtaacttggaaagaagagttaaagatttagaaggaatctaagataatatatttcatgggcctgaaattatttaattttagtttatatttttgctttaattgcagtgaggaagtaggtacagtagtgagtaaactaatttagcaaaactaattaatgtaatttatcattctttctgttttttaaactttaagaacaaagactaggtaagatatagcatgcacatatatgagttagttttaaatgtgcggtacacctggctaggggaacatatwagggttctgtttaaatcacactgggaattgtgaagtctcaaactacttagagctgaaagagaattacacattatagtcaaagtgtttataattctgaaggagtacttgtcttgtacggaagtgtggtttttttattgaactcaatttaattaatgtgaagattgtgtaatggaaaggaaaaacataaaaaaattccctctttggcctctgtatttttgcattggtatttctgtttttatttttgtcatatatatatatatatatacacacacaca

SEQ ID NO: 86146 - DNA, 588 bp, Homo sapiens
attacataatgaacataataaagaacttgttaatattactggtaacttggaaagaagagttaaagatttagaaggaatctaagataatatatttcatgggcctgaaattatttaattttagtttatatttttgctttaattgcagtgaggaagtaggtacagtagtgagtaaactaatttagcaaaactaattaatgtaatttatcattctttctgttttttaaactttaagaacaaagactaggtaagatatagcatgcacatatatgagttagttttaaatgtgcggtacacctggctaggggaacatattagggttctgtttaaatcacactgggaattgtgaagtctcaaactacttagagctgaaagagaattacacattatagtcaaagtgtttataattctgaaggagtacttgtcttgtacggaagtgtggtttttttattgaactcaatttaattaatgtgaagattgtgtaatggaaaggaaaaacataaaaaaattccctctttggcctctgtatttttgcattggtatttctgtttttatttttgtcatatatatatatatatatayacacacaca

SEQ ID NO: 86147 - DNA, 588 bp, Homo sapiens
attacataatgaacataataaagaacttgttaatattactggtaacttggaaagaagagttaaagatttagaaggaatctaagataatatatttcatgggcctgaaattatttaattttagtttatatttttgctttaattgcagtgaggaagtaggtacagtagtgagtaaactaatttagcaaaactaattaatgtaatttatcattctttctgttttttaaactttaagaacaaagactaggtaagatatagcatgcacatatatgagttagttttaaatgtgcggtacacctggctaggggaacatattagggttctgtttaaatcacactgggaattgtgaagtctcaaactacttagagctgaaagagaattacacattatagtcaaagtgtttataattctgaaggagtacttgtcttgtacggaagtgtggtttttttattgaactcaatttaattaatgtgaagattgtgtaatggaaaggaaaaacataaaaaaattccctctttggcctctgtatttttgcattggtatttctgtttttatttttgtcatatatatatatatatatacayacacaca

SEQ ID NO: 86148 - DNA, 588 bp, Homo sapiens
attacataatgaacataataaagaacttgttaatattactggtaacttggaaagaagagttaaagatttagaaggaatctaagataatatatttcatgggcctgaaattatttaattttagtttatatttttgctttaattgcagtgaggaagtaggtacagtagtgagtaaactaatttagcaaaactaattaatgtaatttatcattctttctgttttttaaactttaagaacaaagactaggtaagatatagcatgcacatatatgagttagttttaaatgtgcggtacacctggctaggggaacatattagggttctgtttaaatcacactgggaattgtgaagtctcaaactacttagagctgaaagagaattacacattatagtcaaagtgtttataattctgaaggagtacttgtcttgtacggaagtgtggtttttttattgaactcaatttaattaatgtgaagattgtgtaatggaaaggaaaaacataaaaaaattccctctttggcctctgtatttttgcattggtatttctgtttttatttttgtcatatatatatatatatatacacacayaca

SEQ ID NO: 86149 - DNA, 544 bp, Homo sapiens
ttttgagacagagtcttgctctgtcacccagactggagtgcaatggcatgatctcgcctcactgcaacctccgcctcccaggttcaagtgattctccctgcctcagcctcccgaagtagttaatacttttgtaacttagttgcagaagagagatagaaatttctgaataattttcagaattattcatagatttataatctggcagaatataaggaagttataagtatattgataaatcatgacataactggcaagaattggtataaagacaagatggttaacttgaaacagggttgttgtttattatatgcctatcatttttccatgagataaaccaaatattagattaagtatttrgactgatccacaaatgacatgggaagacagagtgtttacaaagagttttagaagtgatacaggacaataatttggagttttaacttaatctcattttaaatttcaaagtgaaattatttctgattatgaaagctacagaacttttttttagatggagtctcattgtgtcacccaggctggagtgcag

SEQ ID NO: 86150 - DNA, 733 bp, Homo sapiens
ttgtacctcagtctcccaaagtgctaagattacaggtgtgggccaccacaccacttcttgacaagttttttttttttttttttttttttytgagacggagtcttgctctttcacccaggctagagtggcgccatctcagctcactgcaacctctgcctcccaggttcaagttgattctcctgcttcagcctctcgagtagctgggattacaggcagccggcacaacactcagctaattttcgtatttttagcagagacgggatttcaccaccttggccaggctggcctcgaactcctgatcttgtgattcacctttcttggcctcccaaagtgctgggattacaggcgtgagccaccgagcccggacaacaattttttaaggattcatttaatcttgtctgcagctgcaatagaatggtggaatcatgatcacagcttttcagtggccctcatggagaaaaaacaagtctgaaaaaaatacttttttctaagacaactctttgaggagagcatatgccctggaatcacaatcatatagcctaaatttgaatcctggctctgaaaccgtatttcagccattctaagataaatattgtttcatattttaaactctgggctgggcattgtggcttgtgcccatagacctagttactcagggcaggctgagggaggaggatcattgagcccaggaggtcgaggctgcagtgagctatgattataccactgcactcca

SEQ ID NO: 86151 - DNA, 560 bp, Homo sapiens
tttgcgcctgctgcaaagtgggaattcttgtcccaataattccagccacacagcgtcagggagccacgaggcaaggccaccagggagtgcaggctgctggggcccaaagggcagccccatggggcagggtccagaccatgcccggccttctggaacgggcagtgacaattgtgctgggattgctgcctgggctgagggtctggcgccacaggcccagtaaaggcatctttcttccagctcaggaccccaaagggaggggtgggaaccctgggaagcctctctgctgcctcagcctcacagcccagcctggcggggctccagcaggcaatctctgggtgttgccggtgctaagctccaggccccaggccccagtttccccccmcacaccccaggcctttcttccacccctgaccgcccagaggagggagaggcacgcacagtgcacatcatgcctgaaaaggaaggaacaaaggccgcccagaggcagggtgctgcgacccccactggcctgcggtaccccgcttccctccaggcccagcggggcttcctggtgttctgga

SEQ ID NO: 86152 - DNA, 506 bp, Homo sapiens
ccgatgcagaactgagggaggggggcctcagtacatgagcaactggcccccaccagcccagcaccggcctgtctgcagctggcacccagggggtacggctggatgggtggggctgtggcaaggtcacaggtctttgtggggtgggtgggggacagtgaggcacaggcaaccaacttgtccctattttgggccctggggaktgttgggggatgcaactgaaaaggtaggatggaggctgcagtcttccccagccaacccctactccagtcagacggagcgggtgaggtgggggtttcccctgcccctagccctgctgagcctggatcaaagagggtgtggacagggacccggggtgcagcaccaaagccgggaggactcattggagatgaggaggaaacagggctgggcacacctggctggcatcaaagttggcctggatggggacctgggcctggcctggggatgcccagagcagggcaaggagggaactgatcagcagagcccga

SEQ ID NO: 86153 - DNA, 995 bp, Homo sapiens
ttctgtgagaggcattaaatatatctactctaatagctttctatgacacttgaactacttaactaacacatatattttctgaagatcaataatttgagaagtgttttattcaaataaaaaagacattatctccttaggcagggtcacctagtacttcaatatagattagcaactaatctcagagaacaaatttttcggggacgaaagaaagcaccacgcctgataaggtgctgtggtatgacctaaaaggaagatgagagggcwttaaagacaagctcatcctaactcatagccttgctgacagtgattctagtcatgagccagtcaaactacccagcatttccatctctgagtggaagtggaactttttgcctgctgattcacgtccctatttagtgttcacatgctaacccatttacttatttatttagtgcactgcacaactttttccagatccaaatatttgaatggatttagggtgaataaacagagtcactgttttttttttttcaccaatgttcttcaaaataaaccaaatatatatgaacatgtgactattaaataaactttaacagaggggtgaccagtcttttgggttcctttgcccatactggatgaaaaaaaattgccttgaaccacacctaaaatacactaacactaatgatagctgatgagctaaaaaaaaaaaaaaaaaactgtgaaaaaatttcatagtgttttaagaaagtttacaaatttgttttggtccacattcaaagccatcctgggccacatgcagtctataggctgtgggttgagcaagcttgttttaacacatagaatagattgaagaaaattttgtttcaaattagcatacaatcccatcacccagcatcagaataaaacagtttttcgtggtttgttcttcctagttaatatcctactgcatacagagtattctgacttttcttgtgtcattatgttttatacaatattcacttatgactttgctgtat

SEQ ID NO: 86154 - DNA, 995 bp, Homo sapiens
ttctgtgagaggcattaaatatatctactctaatagctttctatgacacttgaactacttaactaacacatatattttctgaagatcaataatttgagaagtgttttattcaaataaaaaagacattatctccttaggcagggtcacctagtacttcaatatagattagcaactaatctcagagaacaaatttttcggggacgaaagaaagcaccacgcctgataaggtgctgtggtatgacctaaaaggaagatgagagggctttaaagacaagctcatcctaactcatagccttgctgacagtgattctagtcatgagccagtcaaactacccagcatttccatctytgagtggaagtggaactttttgcctgctgattcacgtccctatttagtgttcacatgctaacccatttacttatttatttagtgcactgcacaactttttccagatccaaatatttgaatggatttagggtgaataaacagagtcactgttttttttttttcaccaatgttcttcaaaataaaccaaatatatatgaacatgtgactattaaataaactttaacagaggggtgaccagtcttttgggttcctttgcccatactggatgaaaaaaaattgccttgaaccacacctaaaatacactaacactaatgatagctgatgagctaaaaaaaaaaaaaaaaaactgtgaaaaaatttcatagtgttttaagaaagtttacaaatttgttttggtccacattcaaagccatcctgggccacatgcagtctataggctgtgggttgagcaagcttgttttaacacatagaatagattgaagaaaattttgtttcaaattagcatacaatcccatcacccagcatcagaataaaacagtttttcgtggtttgttcttcctagttaatatcctactgcatacagagtattctgacttttcttgtgtcattatgttttatacaatattcacttatgactttgctgtat

SEQ ID NO: 86155 - DNA, 911 bp, Homo sapiens
gcattgtcttccctattgcaacagtttaytactgattaaaatctgcccttaccactttattgtccagttttgtttatctttgacaatggtgaagagatttttatgttgttttgatgtttaaacttgaccttttcagcctcttgcctcctggaatgtgacaaaatgcttgaaggaactggagccatgctgtatccacaaggatgaaagtcacttgctagggatagcattgaagtaagaaagaaatagcctagatctttgataatatcctcaagtaacgacctctgaggagtaattggactggctacttttagattatttgttacataatgataataataataaccttttatttaagcaagtcattatagctgaatttctatatttacaatgaaaaacaatgttacctaatatactttgttctaatcatgcaacttaattattacctgatgttgaaaaaatttctataaaagtgagggaattggaatatgttacttaatagtatcccctcagttctgaaattctactaaccatacaaatattgtgactctaaagacttttgaatctttcagggcaatattagagaatatactgatgaataaaaactcctagtaacttgtctgtgtctttcgagaaccttgcaaagtttttgatatttttcaagtagacacttttcatctgctgatatctacctataatgtcagagccattagaaatctaaatatgtgtttaacttaattgttttgtatttatcattcccattacctgctgacttcattaacttccactgagtgtgacaatctcttagaaatctcacaattagttttgcatatgctgtatttgctaagtttacgtcaaggcatttacacctgaagacagactctcagaaatagacatagacagggcatttctta

SEQ ID NO: 86156 - DNA, 621 bp, Homo sapiens
agccccagcactgctgtctccatcaccttcagacacacttaaatcgtagctacctcttgtgaatacttggcctcaagtgaaagaaaggaagatggagaaacaaaggaagaaactgaacagaatgcattttattcgaagcaccttccttctacctccttttattttggctaaggataaaagggtagattaaagtgagatttgcaagtagcttaaggaaggcaaagtcaaggattgagagccragaaagaattaaggacaattcagtaggatgtacattccagaagaaagctggttaagaccaaaacccaaccaatctctgatgtaaacaatggagctgatgattaagtttaaaactaaaggccagcaaattttgaaatttgaaaagcaatacagttatttaattcaatgatactctattgattgtaaattcattttaatctttaaaccatccttctgattatatgaacaaatgcagcaaaatttaacaactatttctttctcttttttttttgttttttgttttttgtttgtttttgagacagggtctcgttctgtggtctaggctggaatgcagtggcataatcacagctcaccacagcctcaaactcctcggctcaaggg

SEQ ID NO: 86157 - DNA, 621 bp, Homo sapiens
agccccagcactgctgtctccatcaccttcagacacacttaaatcgtagctacctcttgtgaatacttggcctcaagtgaaagaaaggaagatggagaaacaaaggaagaaactgaacagaatgcattttattcgaagcaccttccttctacctccttttattttggctaaggataaaagggtagattaaagtgagatttgcaagtagcttaaggaaggcaaagtcaaggattgagagccgagaaagaattaaggacaattcagtaggatgtacattccagaagaaagctggttaagaccaaaacccaaccaatctctgatgtaaacaatggagctgatgattaagtttaaaactaaaggccagcaaattttgaaatttgaaaagcaatacagttatttaattcaatgatactctattgattgtaaattcattttaatctttaaaccatccttctgattatatgaacaaatgcagcaaaatttaacaactatttctttctcttttttttttgttttttgttttttgtttgtttttgagacagggtctcgytctgtggtctaggctggaatgcagtggcataatcacagctcaccacagcctcaaactcctcggctcaaggg

SEQ ID NO: 86158 - DNA, 1299 bp, Homo sapiens
attccttgtaaaatatatcaccaaaatatgaccatgtatgatgttattactcatasttttatgccatacaagtacatattatacaagtcatacatcaaacggaaaaatgtcaaacagtacagaaaggtaaaaaataaaacatccaaacttccttcctatccttcaccttaatgccagttgcagctgcaatgtctctcttttgataggttctatctgtaattctcatgattacctccataaacttaatattcttgatcttctatttcttcatttactcatttcactataaagataaggaatttaattatatttttctctcattctattcacaacttttctttagttaattttgtttgtttttgtttcgttttattttgttctgttttgtttttgagatggaatctggctctgtcaccaggctggagtgcaatggtgcaatctcggctcactgcaaccttcaccttctgggttcaagtgattctcctgcctcagcctcccgagtagctgggattacaggcacccgccaccacacctggctaatttttatatttttagtagagacgaggtttcaccatgttggccaggatggtctcgatctcttgacttcatgatctgcccacttcagcctcccaaagtgctgggattacaggcgtgagccaccgtgcccagccagttaatttttattttattttaaataaataaatacatttttcttcacatttcttcctttcttacatttcctaaaactgtcagctataacattgcttgacattgtcaagatgtgaaatgttagcattttaccctgaaactatgattacatatgaggtccttggcctacattaattcagcaaatctaaagtcagtaaatattatttacaattttaaaaattatttgtatttatttatttatttttagagacagggtctcactctgtcacccaggctggagtacagtggtactatcatggctcactgcagcttccaactctcgggctcaagggttccttccacctcagcctcccaagtagctgggactacaggcatgtaccacacccggctaattttttattattttttaaattttatagagagatagggtcttgctatgttgcccaggctggtctcaaacttttgacatcaagtgatcctccagccttggcctcctaaaatgctgggattacaggcatgagccaatgtgcccagcctcaatcacaattttacaatcatataaataaatagtcactgcagatcataatggaactgaaaaattcttatcacctactaatctagccgtcataa

SEQ ID NO: 86159 - DNA, 1299 bp, Homo sapiens
attccttgtaaaatatatcaccaaaatatgaccatgtatgatgttattactcatagttttatgccatacaagtacatattatacaagtcatacatcaaacggaaaaatgtcaaacagtacagaaaggtaaaaaataaaacatccaaacttccttcctatccttcaccttaatgccagttgcagctgcaatgtctctcttttgataggttctatctgtaattctcatgattacctccataaacttaatattcttgatcttctatttcttcatttactcatttcactataaagataaggaatttaattatatttttctctcattctattcacaacttttctttagttaattttgtttgtttttgtttcgttttattttgttctgttttgtttttgagatggaatctggctctgtcaccaggctggagtgcaatggtgcaatctcggctcactgcaaccttcaccttctgggttcaagtgattctcctgcctcagcctcccgagtagctgggattacaggcacccgccaccacacctggctaatttttrtatttttagtagagacgaggtttcaccatgttggccaggatggtctcgatctcttgacttcatgatctgcccacttcagcctcccaaagtgctgggattacaggcgtgagccaccgtgcccagccagttaatttttattttattttaaataaataaatacatttttcttcacatttcttcctttcttacatttcctaaaactgtcagctataacattgcttgacattgtcaagatgtgaaatgttagcattttaccctgaaactatgattacatatgaggtccttggcctacattaattcagcaaatctaaagtcagtaaatattatttacaattttaaaaattatttgtatttatttatttatttttagagacagggtctcactctgtcacccaggctggagtacagtggtactatcatggctcactgcagcttccaactctcgggctcaagggttccttccacctcagcctcccaagtagctgggactacaggcatgtaccacacccggctaattttttattattttttaaattttatagagagatagggtcttgctatgttgcccaggctggtctcaaacttttgacatcaagtgatcctccagccttggcctcctaaaatgctgggattacaggcatgagccaatgtgcccagcctcaatcacaattttacaatcatataaataaatagtcactgcagatcataatggaactgaaaaattcttatcacctactaatctagccgtcataa

SEQ ID NO: 86160 - DNA, 564 bp, Homo sapiens
atcatctgtttctgctgtgatacagagtcaaaataaaaataatttgcccagtaatatactctttgacaaggtctccagccttgcagctgcattttgctctttgtaaggccgttcaaaataacacaagggccacccattggcaggtgaatatctgaaaaatgttagaataattacggggcactcttaacaagtcaatcactcaggcatttttaaatactcttctcaccttatataagaatgcaaggcactgggggaaagtttctttctaacagttctcaagtgtgtaagctggagccagtctatctgggttcaaattgtcaagcagtatacatggccaaacacatccatcatttcrtgccctggcctttccatgtgtaaaaatggggataataacagtacctgacttacaaggctgtttaaggatgaaataaattaaaactggtagagcacttggctgatggtcatcattccagatacttttgtgaaacgttaataatttcttcccaaagatatttcctatcttcttcaatttgtgtttattgagtgatatagtttggatgtttc

SEQ ID NO: 86161 - DNA, 349 bp, Homo sapiens
tttttagattgaatcagcaaaaatagcccttcaactattagacaaatgttctctgtgaagaaatgaaataaaatcagttatcaatgtgaatccattgccaaaaatacactcactataagctagcagctatctgcaaaaattaacgtttcctacacaagcactaaagtttgctgatcataaatatatgtagaaaaagaatgattccctaccaaaacagaatgtttctargtaaatgtacctctgtgtgtgtgtgtgtgtgtgtgtgtgtgtgtgtgtttgtatccatacaaccatccacaaagcagatcagtctgccatggtaatacaggaacacaaatgtgttagcaag

SEQ ID NO: 86162 - DNA, 730 bp, Homo sapiens
ggatccaaggttttaaacctaagccagtctggccagcttgactcatccaggacatctttcagtagtttcacagtggccatcagctctgtcagacaccggacatggcttgaaagggccatgtcagcaagtgatcattattgtgtctgaaaagagctgtgcttgatggctgaaatattacaactaccaaaaagctacaagtggaaactccatagaatcagctcatttgtagtcacagaatactctattcctacccactttcacacacgctactccctatatctccatatcaagaaaaaagtcctgtcttctttaagtcmattaccatgctttaatccagaatttggaattattcagggaaaccaaatcaagtatctattaccttctagagccatcatcatatccatgaacaaatcagctgtaaagcggtttatctttggggattaaatactttccagtccaaaatgcagtttttaaaatgcaatttttgccttctcttctgtattgagatgactaggcctatgtcaatttaactgtgtctctataaagtcatgcaaatgtaggcactttaaaatgactgctcacaaaaaaattgttaagagctctgcttaaaaatcttgcaaataaaaaaaacagttcctcatacaatttttctaaatggtggtgagggagtgttcttaaagttatatcctgatttatggaaatcttttattagtaaactaaagaggatggt

SEQ ID NO: 86163 - DNA, 1915 bp, Homo sapiens
gcaaaaaatgccaaacaatagggagtattggtgagacatactggctttggcaaggcagaaaaaaaaaaaaagcactagtaattcaatttagactaagatttgtttcttctgatcaggtcaaacaaaaactgtgaaagctcaatgattcaatattctttcaccacaacctaaggcaagtctccttatgtggcctggctgcttaatttatagtattatttatctcagacctctatatttcatctaaatgtggtcctagacatattgcaataacaagtatggttagagatggggacagcccttgacttgatcttaaaggtgcatggtttttaaagtcaggcttttctgaatctgggtcaggaaaggcagtgtgaagctaatttggagctgaggtctgctccccctgctgactcacagtgtgggcacrgtccatagtgtacgctcttaaagtgcaataaactgtccatgccagaggacaatgctccagttgttaaaagtgctttattctggagcatggactttctacacgacatggtctgagtgtgtcctggtgaggaggctgaaccgtctgtggaaatgagactgttcaatgtttctgcagcaactgtagtcagctccttttccttcctgtttgggggagtttaattggatgcagctggagcatccccgcactctgagtctgaatttgctaaagaaagagggtgggaaaggcagttctcactgcattctgtctgaacctacaaagccacgggagactccagagataaaatgattcaaaatctcactaaagtcactgtgggtgttttcccaactgccaagacccagctacacagaactgaagtcactctttaagaatgcatgcagattaagtttatctccatcttgaaacattgggaataaaaattaataatgataatagtaataatttatagtattacttgcttccctaaatattttcacttatcagttgattgactagcattaatttgttctgaaaataaaacatttttagagtagggtacaaaaaaaggataggtagcatggtgggaaaagcgcaatttaggttcaaaatccactgctgagagttacccatgtatgatcataggcaagtcacttaaagcttatctgaatttctgtttcgtctgattacaaaccaacatatataaaaaggcatcatagactgaaacaaggttgtaaaaggggtcatcagatagtaacaaaatgagatagtttcatgtcttttttcctttctaaaaaacagagcaggaggtatatatccacatgagtgtgtttatttccaggatcttccttcaagagggaggaaaacttattcctatggtgtagtaatcctaggaacacttatagtttccaaatcgggaaatgatataaggcttgcttatgaatcacttgaatttgtgtgacatgattttatcgtcacatccttttgtgtttattcatttttatccccattgataagtcacttcacttatttacttgcttttgttttgaatgatgtttggctctttataaaatcaaattcattctcaaagatttaacatcagtgaagaaattgcaactcttttcctccctacttttgatcagtctcttacacatttgtgagcaatgacagtgcaaaggttttaccttccacaggggggtggtctatagaagcgacaacttgcattaattggatgcctaatgtttaccatactctatgttgggtgtatcttatacacatccgatattatctttttaataatattgtgagatagacaatgttatctcattttaaagatgacaacaataaagcttggattttttaaacttgtttttcacttacctgttaaataaggaactacaattagatcctaattctctctgagcccaagatctgtttttttcctccacaggaggcttc

SEQ ID NO: 86164 - DNA, 619 bp, Homo sapiens
gcagtagggagggaaggcccccagccctcagccccttccctggggccccttcctggaggccccagtactttctgagcccagagaaaaaacctaaaaccattttcttccaattcagtggctaaattgaggacatcccactttccatgggacagaaacttcaataaaacaacaaattcacccacattaaggagtagagcgagtagcatactggttgcctgagatctggtttcaagtttttgctctgccatttacttgctgtgtgtctccagcaagttacccaacctttgtgtactcaggcttcccwtctacaaaatgggtacattaataaccccttctttgacttcctcaagaggtggtcctgaggttcaaactcaatgttagtccattataaagtggggtaatagtagcacccacctcatggtgtctcagtgaggaataaatgagacagtcatataatcgttcagcacagcgcctagcaggcagtagatgccccagaaaggcagctggtcttgttcataaagcacaggtagaatatgtggcactagcaccgacaaaggtcaccaaccttggaagtgtctagttcagcttctcatgggtggtcttaccagctactgtgctg

SEQ ID NO: 86165 - DNA, 785 bp, Homo sapiens
caagagtgggaaagaggcatttcccttaacaaaagataacagtatcagcagtgaagaaagaacatgcaaagtgacaaagaaggatccagattttaggggctagagataggaaggacaagctgggccacagcgtgttgaaaggattttcccaggggaaagatttgagctggctttttgtgatgataacatttagataggcaagaagaagagcctgctggtgggagtgggagggatgatatgggcaaaatactgagaacacaagaaagaatgtaaaccccaaagcaggtgatgacagtggaaactgcaagaaagggtcaaagtagcaaatgttgagaaggggataccactgsggggagataatatgtaggaggagaaaaaaggagtatgaattcaaggggagggatctcagttctcctttccctttgggaccatagtgtgtcagttaacctctccaggactgtctcaatttcctcatctgcaaaatgggagaatttggatagctgatttctctagccattggttagcatggctgccactgttaagaggagctattaagcttgtcaggtagaaccaatggcattcttcccagaaatagaaaaaaaattccaaatttatatggaatcacaaaagacccagaatagtcaaagctatcctgagcaaaatgtacaaaactggaggaatcacattacctaacttcaaattacactactgagctatggtaaccaaaacaacatggtactggcctaaaaacagacacatagaccaatggaacataatggagagcc

SEQ ID NO: 86166 - DNA, 742 bp, Homo sapiens
cttaaatttttattcatcaagcaatatacaattaaaatataaaacactcttacatatacaataaaaaggagacccagacaagtaaaatatacataaggttttagagcatctgatcaataattactaaacttgtttaaataagtatatatgtagatgatatacattctttcaaacacctatggaacatgtatagaagttgaacatatgttaagcctcaaagaaaatctcaatatatttcaaaaactggaaattatttaggtcaaattgattgatcacaatatagtaaaacttaaaagggcaaccaaagaagattagaaagttaaatagatataagaatacagcaacaacaatgttttcaaatagctcctggttaaaagaagaaaccacattgaaattataaactgtttggcaataagtcataataaagaacagactataggaaatgctgccaaagatggtactaaaaggaaaatgtacattagaataatatgttaaaatgataaagaatgaaactaacaaaaatgaccaatatgataagccacaaayactagaaaggaaaaaactaataaaggtaacaaagtcttcatgcacaaaaacaaacaaacaaaaccattactatgaaaagatccatcaatttgcctccaccccacctcccactccccaaaattacaaacttctggcaattccgaaaatgaaaagaaagaacccaccactctcctctccctccttggactcacatata

SEQ ID NO: 86167 - DNA, 1076 bp, Homo sapiens
cagggagacctagctaactgaaggaacagttagttttttggcttttggctgattaagggacagttgagacatacagcaattgcacctctgtctctggggagttgccactcattccagtcaaaccacttcttatgtgttttgatttttttattggggtttaggacagacagagaagccatattgttaggtttctcaaatctatagggtttaagctgtcttgtccttcctcatctggacatttaattcaaaaaaagagtttggaaagaatcctaaaagcgtcacctttcaaatttgcatatcatgtcttctcatttctttctcaattaatgtgaatctctgggcaaagccatatttattttattgaggaatttctgtggcaagaaagacatgattaaaactgtatatatatatatttttaactctgtcatttatttttctgtcccttgggaagccattgtatatttttaaatatgatttctgaatatgatacaaaaaaggaaaaaatatactcttattatttctccttttcctttaactttcaacatcactttgactgccctcatcattgctaaaatgagacttaaagtgtcagaggacaaggaaggagattgtgcaaatagtatttttttttttttttttgagacggagtctcgctctttggcccaggcyggactgcggattgcagtggcactatctcagctcactgcaagctccgcctcccgggttcacgccattctcctgcctcagcctcccgagtagctgggactacaggtgcccgccaccacgcctggctaattttttgtatttttagtagagacggggtttcactgtgttagccaagatggtctcgatctcctgacctcgtgatctgcccgcctcggcctcccaaagtgctgggattacaggcgtgagccaccgcgcccggcctggtatttatttttgtattttaagtttttctgttgaatcgaaaactaagcataatgtaataacggtttagcattagaaatcactggcataactacatttctagggtctaaaatatatatatttttaaatattacaattgtacaaaatta

SEQ ID NO: 86168 - DNA, 650 bp, Homo sapiens
ctcaaactctctattgagaatctgctaatagagaagaatttgttctccctcactcctggttctcatgaggagggattttcccaaagcacattcctaaattccctctaatttcctttgctcactccatccctgggaggtggagggacttagctaattaattaacttgggaagaataaacagccatgctttgctccackctgcctatttttctttcaggaatgagattagcaggcctatctgcttctcacccttcactatgacctacaatttagcctctggtaatactaaaattttcttacacttcactttatgtctcaatttgtttagaattcttggagggaagagatgtacttaatatgtacaaaatgttgcaaacactgctctgggcactgaatacatatttatccacttcacagttctgcatggagtttagagtgcaatgagtttgagctgcattctgaaattggaacaagtaaagagataagcattctacaaaaaacaaggctgtgggcagtctcaaagttggcagtgctcattatgcaaataggaattgatcaataaggctcactgcagaagcaagagaatccttctccctaccttcagctctcctttcctggagtggattaggagattaaagaacctctgagggg

SEQ ID NO: 86169 - DNA, 650 bp, Homo sapiens
ctcaaactctctattgagaatctgctaatagagaagaatttgttctccctcactcctggttctcatgaggagggattttcccaaagcacattcctaaattccctctaatttcctttgctcactccatccctgggaggtggagggacttagctaattaattaacttgggaagaataaacagccatgctttgctccactctgcctatttttctttcaggaatgagattagcaggcctatctgcttctcacccttcactatgacctacaatttagcctctggtaatactaaaattttcttacacttcactttatgtctcaatttgtttagaattcttggagggaagagatgkacttaatatgtacaaaatgttgcaaacactgctctgggcactgaatacatatttatccacttcacagttctgcatggagtttagagtgcaatgagtttgagctgcattctgaaattggaacaagtaaagagataagcattctacaaaaaacaaggctgtgggcagtctcaaagttggcagtgctcattatgcaaataggaattgatcaataaggctcactgcagaagcaagagaatccttctccctaccttcagctctcctttcctggagtggattaggagattaaagaacctctgagggg

SEQ ID NO: 86170 - DNA, 619 bp, Homo sapiens
atccacttaaagttaacttctagtgagtatggttcacactttcttgttttttcatgactcattttcttttgttaagaactgaatattttaggtaatatgttatctcacctctagattatgttttgtttttctgaaatttttcttttctgtttttctttttagtaccttgtattgacttacaatgcaaaatctgtctccctcccatggtatatccaatgatacttccacattttattaccctggcttcatagttttaaatttttaattgctcagtttttaaatttaaatttaaagttttattccaggctgccttagaaagtccaaatttggtctgagcacagttgctcattcctgtaatcctagtattttgggagatagaggcaggaagattgcttgagctcaggagtctgagactagcctgggaaacwtagtgaaggcctgtctctacagaaaatacattaaaaaataattagttggtttcaatgatgtgtgcctgtagtcccagctactgaggtggctgagatcagagaatcacttgagcctgggaagttgaggtgacagtgagccatgattgagccactatattccagcctgggtgacagactgagaccctgtctcg

SEQ ID NO: 86171 - DNA, 1123 bp, Homo sapiens
acatatttaaataaaaatacatgcttgtaactttataagaacatttcttaactgaaatattcaaagaaatagcctttgataacagcccagcatagaatacaaactacagtacttaaacataaaatcactgaattttgtcatcaatattatgaaaaactaaagcaactgacatttgaagttttcctaagtggaaaggtagtagataaatgactgctaatgtttctgacaaaacaaatacccatacagtgcagaagatttytttatgaaaagaagaatcaatcagtatcctttaaaagtagtaagcctaggaatactattttttttttttttttttttttttttgagacggagtctccctctgttgcccaggctggagtgcagtggcgtgatctcggctcactgcaacctcggccttccgggtcaagcaactcttctgcctcagcctcccgagtagctgggactacaggcgcgcgccacaatgcccggctaatttttgtatttttagtagacacggggtttcaccatattggtctcgaacgcctgaccttatgatccgcccgcctcggcctcccaaagtgctgggattacaggcttgagccactgcgcccggccagaatactattcttaactgccaatcttacatacagaaaatgtgaattacaatatactatgcatgcaattttaaggcaatttaacgattaagtgaaagtgttattaactgaattccttgacttcttgtgtctctaaaattaaagcaaaaatattttcataaggaaattctcccttataattatcaaagagctttaaaacatgttaaaatgttcacttaacaaaagtaaaacagagcaagcttaaaaataaaattatctgattagaaacgtcagccataaaaatgcttgtatcttcttcaaatttgttactcatatgctaacacagcgattagtcaaacctccaacttcctaaaaacgcattctatcttaaccaaatcgtaattcactaatcaatgatcccaagagaaaccgcaaccattctattcacacacaaaaaaggatggtcttcaattacagaaattctacttttaaaaagtcttgccatgtaagcaaatatatttcacctcaatttt

SEQ ID NO: 86172 - DNA, 1123 bp, Homo sapiens
acatatttaaataaaaatacatgcttgtaactttataagaacatttcttaactgaaatattcaaagaaatagcctttgataacagcccagcatagaatacaaactacagtacttaaacataaaatcactgaattttgtcatcaatattatgaaaaactaaagcaactgacatttgaagttttcctaagtggaaaggtagtagataaatgactgctaatgtttctgacaaaacaaatacccatacagtgcagaagatttttttatgaaaagaagaatcaatcagtatcctttaaaagtagtaarcctaggaatactattttttttttttttttttttttttttgagacggagtctccctctgttgcccaggctggagtgcagtggcgtgatctcggctcactgcaacctcggccttccgggtcaagcaactcttctgcctcagcctcccgagtagctgggactacaggcgcgcgccacaatgcccggctaatttttgtatttttagtagacacggggtttcaccatattggtctcgaacgcctgaccttatgatccgcccgcctcggcctcccaaagtgctgggattacaggcttgagccactgcgcccggccagaatactattcttaactgccaatcttacatacagaaaatgtgaattacaatatactatgcatgcaattttaaggcaatttaacgattaagtgaaagtgttattaactgaattccttgacttcttgtgtctctaaaattaaagcaaaaatattttcataaggaaattctcccttataattatcaaagagctttaaaacatgttaaaatgttcacttaacaaaagtaaaacagagcaagcttaaaaataaaattatctgattagaaacgtcagccataaaaatgcttgtatcttcttcaaatttgttactcatatgctaacacagcgattagtcaaacctccaacttcctaaaaacgcattctatcttaaccaaatcgtaattcactaatcaatgatcccaagagaaaccgcaaccattctattcacacacaaaaaaggatggtcttcaattacagaaattctacttttaaaaagtcttgccatgtaagcaaatatatttcacctcaatttt

SEQ ID NO: 86173 - DNA, 963 bp, Homo sapiens
ataagatataatgtaatacttttaagaaaaatatttatgaaatataatgctttttaaactcctataaacttctaaatgctattaaagcaaacagatgttggcattcaccttgcaatccctgttagaataactttgttaaaatatatattctgctagttttgtcaattaaactccaaataatatagaatgtaatatttgttgaaaacactgtaaacacataggattctagtgccccttgttaaacattttgtataatatatgaagtggttatgcactgttttaatggacagctgagatttgcaaacttgcactcctgtccatgggaagcataaggaaataatatgaactattgacagatgtaggtacttttgtggttgaatataaaataacagaggtagaaagcaaaccctctttgctatccagggtggcctgcattaaattcctgcctctgtccttcgctgactgttgtatagactgaattttgtctcttcacatatattcatgtgttgaagcccccagggtgatgatatttggaggtggggtcttggtaattatatcaygaaggtagaaccctcatgaatgggatcagtgcccttgtaagaagagacaggaaagagatgagctctctcttcaccatatgaggatacaaggaggtgtctgtttgacagtcaggagctgaatcggccagcacttgaatcttgaacattcagcctacacaactgtgagaaataaatttatattgtttaagccactcagttaacggtattttgtaagaacaatctgaactaagacagctatgttaccttggctgactcatttaactccagtaaaacagagataatgatatttacctctgcccgttgttttagatttaaatgagaactggagtaacaagggtagaatttaccttgtacctggcaagtaagtactcaataagctttagctattgttagcatcaataag

SEQ ID NO: 86174 - DNA, 697 bp, Homo sapiens
gttgagagtgacatggaatttttcaggaatagcagtctgggcttttctcttaaattaggcatttagaagaaatgtaaatcttttgcaattgctcatttcatttttaaaatgagttaaaactttaaaaggcatttttagtatcagttgaaaaactttgagaggtttaaaggcacaaatatccgaagaccaggaagctccccacagatatactacagattgtgggcagagaagaggaaaaagctgtcagtctttttctaccccagcactttttctagttatggaatcaagtaatttgtgtttatatgatgtgatgctcattccattttccttcatcatgtttttgaaatgtcattgcttaaaaaggggaaagaatgaaaaaagttggatatgagaccaacagcatggtgataactttaacaaccagaactcaaacgtgtgacaactgacaactatatttaaatcagtactatgaaattttgagaggttattgttgatttaaccagacacatttatagattctagtcatttgatcaggagggttaatacttgggctatcccaggtttatgacatctcttccagcagtcaagtaggtgaaaatcagtgaagtaaaaacaaaatgcaaagccagrctatttaaggaagacccagactccttagcaattttaattttagaatgtaaaattatattagtcagga

SEQ ID NO: 86175 - DNA, 1328 bp, Homo sapiens
agaaatagaagtgagatctagccaacagccaggcttcaaagacaatcatgggccacttcactgcagcagtttttctttttccatttttctctttttccctaacttccctcttacccatttcttttttccttatgtacaaatcctttatacacaaacattcaacttgtacacttacatattcagtgtcccctgaattgctgtaaatgtttcatacttttattcatttcatttaaatgtgtcttaacctaaccaagttttaatgtatcaaaatacttgaaccaatcaaatccttttaactgaatcgaattacatgctctaaaatatagttctacagaggtatcatttacttaataaatttcaaaatggtatagaaaataaaaggaaattcttacctaaatattctggtgttcccatgatttcccgaagttcacacgcatgccctatttttcgagacattccaaaatctactattttaatgtccccgagagggtatatgctgctcagtaatatattctgtggctaaacaaagtacaacaaaaacatgataagtaatatacaaaaaagcatactagtctcagatggaaagtatattaagtggaagatattgctcagctattatacatttcattgagtcatgyatcaaacatttactgacttactacttaggcggagctattattcaatgatgcataaagccaaaaacacacccaaaaaggattctaggtttgaagagaaaagaagttaaatggaaagattaagatatagaatactcagtaataaaaagactgcctcattctgtcaataagaaattccaagaaggctttgcagtagagatgatgcgtaagctgagacttaaaagagtatgctggttagaaaggtgctctgggtagctgggtacggtggtgtcaacctgtagtctcagctactctggaggcaggggtgggaggatcgtttgagctcaggagttcaagagtagcctgtgcaacatagtgagaccctctcttaaataaaaaaaaaattaaaaaattaaaaaaaaaaagaggccgggcatggtggctcacgcctgtaatcccaggactttgggaggctgaggtaggcagatcacgaggtcaggagatcaagaccatcctggctaacatggtgaaaccccgcctctactaaaaatacaaaaaaatcaggcgtggtggcaggcacctgtagtcccagctacttgggaggctgaggcagaagaatggcgtgaacccgggaggtggagcttgcagtgagccaagatcgcaccactgcaattcagcctgggcgacagagcgagactctgtctcaaaaaaaaa

SEQ ID NO: 86176 - DNA, 1140 bp, Homo sapiens
  misc_feature (1)...(1140): n = A,T,C or G
tagatgctgatgctgctggtgcaggaatcacatttgagaaccattggctaatcccccaagcttataggacttgcctataaacttggacttgatgaccragaccctatccaacaagcacataggatttccctctaggatgttatgtgctggtatcaatattgtaatttcacatcaggtaacctgcaaaagtatttcctaagtgcacaaatactattttttgaattatctcccaccaccaccattctggcgccacatctatacacctagtcttcttaacgttctcctttatgctttgaacatctcctatttattcctgaagacactccaaatcaatatacaaattcttttttccctcttacctttcctcatttatcttgtgttttattctcctttatcctcatggggaaaaaaaaaacaacttgagggtattgagaatgttttcaatactgagccatgttcccaaggagagacataactctataacagtaataaaaagcaaacatgattcatcattgatcttgcaacccagaaaatgagtgccattttccaaatttgctttcccagggagctttgaagataaacacattatttcttgacttgagtccccttgctctcaagacaaagtgccaggcaagagctcttttacaagaattgtacttccagtagactgtcaggtgagctattaagcaacatggccgtgatgacagaaaagtctgtcttaccacttcagagccaaattacacaccctatatgaaacccatctgaggccagactgcagagacctaaacgtatagatgagaggatcagagtatggaacctcctttctcataataagactgcagcataagaagggcacagtgccatgtgatgggactgcanaatgnnnnnnnnnnnnnnnnnnnnnnnnnnnnnnnnnnnnnnnnnnnnnnnnnnnnnnnnnnnnnnnnnnnnnnnnnnnnnnnnnnnnnnnnnnnnnnnnnnnncttcactttaaaatttttactttagactaagctccttacgtttctgcttgattaattcagtggactttcattttattttgcagtagcccaactttagggtaaagtttacacactgccacaaatgtgtcatgccacaggctggcaggtgtgggcaggc

SEQ ID NO: 86177 - DNA, 541 bp, Homo sapiens
ttaaaccaggagtgtggcgagatgatccaaatgatgacccaagacttcaaaagcatgggccagataggtgacttccgagtcaataaataaagcaaaactaacagtggttcacaaagagatagacctcggccttaggtcatcagcacagtgatgtcagcactataatcaaatcagctctgtgaagcttaccaaatgctaccagtgattcaagctacgatttcacaaaagtgctgctttgcccaaatgaccacaaacacactgaagtcacaaagagtatcatatttgaaaggaatctaacacaggaaggacaatgcataattagtgcatgtgacagagttcatttaaaattgaaaatgacaaatcaaaccacatgtcatctttgcctgcttaatcaggaaatctgyccactggcttcctcctatctttgcttgaaattgagttataactccctgtgctctccaaaatatgaggcattaaaacatcccttcctggaatacttgactcgagaaaaaatatgaatgttttttctcttcagggccaa

SEQ ID NO: 86178 - DNA, 1680 bp, Homo sapiens
tgagggctctgttctgttccattgatctatatctctgttttggtaccagtaccgtgctgttttggttactgtagccttgtagtagagtttgaagtcaggtagtgtgatgcctccagctttgttcttttggcttaggattgacttggtgatgcgggctcttttttggttccatatgaactttaaagtagttttttccaattctgtgaagaaagtcattggtagcttgatggggatggcattgaatctgtaaattaccttgggcagtatggccattttcacgatattgattcttcctacccatgagcatggaatgttcttccatttgtttgtgtcctcttttatttccttgagcagtggtttgtagttctccttgaagaggtccttcacatcccttgtaagttgtattcctaggtattttattctctttgaagcaattgtgaatgggagttcacccatgatttggctctctgtttgtctgtttctgaagttacttatcagctccattcctgttctgctccctctactggctgccaggtaattaattgtcttcactgcaaatgttagctgttatttttcaaggctaccaggaagctggagagagagagatggctccagtgctaccaaattaactgttcttaccaagattcaacaatgtttcttgaataaattcttctagaattttgaaaaagttgaatctgaccatttttgtctgttttttcactacttttatggagggcagatttgttttcttctccactaaaaaataatttaaaatttaattttaattttagatgcagggggtccatgtgctggtttgttacatgggtatattgtatgatgctgaggtttgggtgtggatcctgtcatccaggtagtgagcattgtacccaasaagtagtttttcaacccatgtcagcatcctaagcgaattaatgcaggaacagaaaatcaaataacacatgttctcatttataagtgggtgctgaacattgagaacacaggaacataaagatgggaataatagacagtgggtactactgtgggagagggatggagagggcagattgttaaaggtccttacttcatcattttcgctgatgtctcctgtagcagcttttaattttgagaactgttttctcactcttaaatttagctgtttccagagttcaatagatttcatctaaggtagatgatgatcttggggttgaacaataaaataacaaagtacacatatttatctaattaattgcataaaattttatgaaattgcaacctattttatttagtgtatgtaatagttacattttcacctaaactgttttctgaacaagttccaatttatagaaatttcatgtgatttacacaataaatggtttttagtgatgaataaaactgtatagacattcatagattactaatgaacttcagaatatcactagagttatcaaagaaataagttttccattattctatgaacaatgaattaaaaagtgaatacagaaagcttctaacaaagggataaatataaaatgtagaacattagaaaacttactgctaaacagttttcaagtaagaaatataatgtaataataaatatatgaaaaggtaatttgctaagtgatatgctaacaagatacaaataccacatacaaataaggcatccttttatgtgtacagaaa

SEQ ID NO: 86179 - DNA, 856 bp, Homo sapiens
ctttgtcacaccaggcctccttacacatatgactccacctccagatacataatagcactcagtgaacatttggtgaaactgaataaaaatgcctgtagagaccaaatgcctcatgcagagaccaaatgcctagagatacccartgcacactgtctgtgaacttctcttttgatgctgcatagaaacagcaccatgcttattccttcagcatgtgtctgtgcagcttctactatgtccgtggtaagcaagtgagtcatggcctcagccttcatggagacagacattcagtaagtcggtatgtaattacacactgcaataggtgctatgaaagaaaagaactggactcttaagaaaaaataactttattggaaggtcaagggggacttttcagaggaagtgacattatgagctcaggacatatgaatctcagagttcaagatttaaaaaaaggagtgtggctgggcgcggtggctcacgcctgtaatcctagcactttgggaggctgaggcgggcagatcatgaggtcaagagatggaaaccatcctggccaacatggtgaaaccccgtctctactaaaaatacaaaaaaattagctgggcgtagtggcgcatgcctgtagtcccagctactcgggaggctgaggcaggagaatcacttgaacccgggagggtggatgttgcggtgagctgagattgcaccactgcattccagcctggcgacagagcaagactctgtctcaaaaaaaaaaaaaaaaaaaaaaaaaaaaggagtgttctaggcagagagagctgcatgtgcaaaggtcccgaggtggaaaagctgaatgtgcaagagtgctgcttctcacacttcactg

SEQ ID NO: 86180 - DNA, 639 bp, Homo sapiens
ccaagtttagtatttcaatatccccatctttatgatttttgcctcactgggtacctcttgtattactatttacttaatatgttcctttaaatttactcacttttaagaaatgttgcttctgtcctaaacaataatattcatgaaatcatgggctcactaattcattcatccatttgttcaacaaatattgattgtatgcctatggggtacaggcactgttctatgtgctggggatgcagcaaagaaaaaaggaacaggcaaagtctgtctcttagggagattacgtttgcttggaggagatggagaataaatatatacagaagagagtttcagataacatccgctgctctgaagaaaactcagcagggtaatgtattaggtcaaaatttttgattcctagtaagaaactgattttacactgcagcccaatgtacacacaagcatacaaaaaagaaaaatgaaaatgtgaagaaacactacttacctttattacacatgatgtgttctgatattttctcttctgttttattgtagaagatgctggttatgggccacattagatrggttgtacagtctaggaatggattgcagcctgcagtttgaaaaacactggaacagctagggagtggtggtgacatg

SEQ ID NO: 86181 - DNA, 454 bp, Homo sapiens
gtttctttgaaagcaaacacagagcacctcctatgtgccaggtattttttatatagtaaccaatttaatcctcagaataatcttatgaggtaggtcctattagtatccttgttttatggttggagaaccctgagaggcagagaggttacccatctaatgttactttttctttaatcatagcctcaattttacaagtcaccactaccactaccaaaacaaactggataaaaatgcaccaaacactacaaatctaaatctacagtacgtatactaaaatgatacttagctgtgacttattaattattcaaaataaggggccattcctggtaacaaaagggcaaaataaatttmtacttcttataataaagtgcaacaattctctatctttagtgttattcgaccaaggaatcgtgatcagctcaaatttcaccaggattcacccaaatttcatcat

SEQ ID NO: 86182 - DNA, 670 bp, Homo sapiens
ctatttcccctttttttcccttttcacccaataaaaccctctgctttactcaccctttaaactgtctgcaagcctgaattttcatagccatgggacggacaagttctttagctgaactaaggaaaagtcctgcaatgctaacagagctgccttagtttctagagtgaagaatctttttacattcttttttttttttttttgagacagagtctagctctgtcacccaggatggaatgcagtgatctcggctcactgcaacatccactcccgggttcaagcaattctcgtgcctcagcctcctgagtagctgggattacagatgcccgccaccacgtccagctaatttttgtatttttagtagagacagggtttcaccatgttggccaggctggtcttgaactcctgacctcgtaatccacccggcttggcctcccaaagtgctggctcacaagcgtgagccactgcacctggctacattcttttattagccctataactgmgactcaaactctacttacattctcttgcattactagtaattcaaaaagataactatggtaaggccctggagactcagtggctcatgcctataatcccaacacttacgaaggccgaggcaggaggactgcttgagcccaggaattcaagactggcctaggcaacattgcaa

SEQ ID NO: 86183 - DNA, 987 bp, Homo sapiens
cctcttactgggcttttggagatctgcttgtctccaacttctgaggttgaaggtaaatttcatcttgaccagtgtcagtttagtaatttttattcttcaggtgttttctgaccattagactgtctgactctccagtgtgagattgacctcattttttggttctaagagggtcttccatcagggcagactggcctcggtaacatagcccctgataatggggctttattcaaaaccttattgaattaatagaggcatccttcaaaggaaattcacatatgaaaattgttgctagaagcttacttatcaaagaagtaaaataacacaggatatcaaataatctacagtggtttactcatcactgattattatgatctgatgtctcacatttgttaaagaacacactaatttcaggaacactattctctgcttaataattttctttttgttattattttctaggaaaaaagcaaatgtatctttgagtcaagaatacaactttttatactactgaaattcagtagaagaaataagtgccaggctycctaaactaaatgttttcttaatctgcataaaaaagataggcttttatttttttacaacaataaaagaagcgaaagaaagtaatgttcaatttgtttccagctgagtgatacctcatgatggtgttaatccgccatatatgctgatacttctttattgtctcacatggtggtgaaaactattttggcttctgcttgtttttattgaactaagtaaatatgaaaaaccaaatccatcattaaaactttttaattttaatttttagtaacatagtttatataagtgtatgtactgctaaaaatattttaacatttgatcatttaattgaatcttctacatttccattataaatggtaacagtccatatttctattctctcaaatctgttttataccatggaattggtatgtggaatgaagtttgttttgaaaggtagaggggaaaaac

SEQ ID NO: 86184 - DNA, 1030 bp, Homo sapiens
cagcaggcatttagggagcacctgttaycatgattgaaaacctaaacccttcatcaacctccagtgctcactcactctccttttggctcctaaaagcctcttctctactgcgcatttgacttttaaccttcccttgtcttgtcgagttgattaacttttcaaacgcatgtgccatattttcacatttaagtttttggtttcttgaagacgtttctcacagccaaaaggtaggaggcagaagtgatttttgtaaagctacttttaaatttaaagaaacatattttattatgagattatctccttcttcctcttttatgtttaaatatattttctcttttaaatgcactcggtggccaaaataaaacagttggcaattctctgtcagattctcaatttttcttaaagattgtaaaatgtatgagcctttaaaacactgataaaaatggtcccaatatatctcttttcattctaaatagctatcagagtatctcacacacagggaggctcaacaaatatcttaactagtttaatcatttttctatctgtgaataattcttaccagaaatcaaacccccagtctttactttgttttttcctagttctaacgacttagtaagtgaccaaagtatatgtttgcctggggatcttatagtgtgaatcagtgtatttccaccatagtcataaactcaaatgtcctcagatccaagtacatgcactcagaaatggaaagggagagagagagaaaatttaacagaatgactgtttcacttgtcagtccactcactgagcatatgcccaagagtgagcacggcgtggaaaaatgggacgctgtcttttcctctgttgagttcacctcccacacacctctcttagtgatcatctcactgcagttatgagtattctagtctttagagatatgtattgcacataataatatcatacctaaattcaatgcagttacattatctagtgctccactgaaaaagggaaaaataatctatctgttccaaagctggagggaaaaactggc

SEQ ID NO: 86185 - DNA, 704 bp, Homo sapiens
atattgtgcccctattactttattatgagttttctcactcctctgaaagccgatcaccaatcacaaatgtctggcacaaatgttttttaaaatgaaaaagagaatgatcacatatgatttccacttgatcagaacacaagacctcatatctacttcttgcaactaaatttggaagaaatttgggaggaatcatgaaatttctggtaataggcctggtattttcctctgtaaagctatacactcaccaggtcagaggaaataaagytacccaagtgactaagatgagttccactgactgggttttattagttgtaactattgctaataccatttcttaaataaagtatcagagcaacaataaaatctctccttagcaatcctagagtgactttggcaacattcttatttagctataattcctttataagcaaatcttctggaaatcagctttcagaaagggagatcaattagggagtcccttctaaattcatataactttaggattaggcttggaggtgagtagggtgcttttagtgaggtacattagagatgattcacttgatttgttcaccacttgccatacatttctctatgtgtgagctaagtttttttcatgttcatcagtaggaatgagcccaccaaagccgattaactctcaccaagggtttaaatggaatggaataaagatggcttatttaaatcac

SEQ ID NO: 86186 - DNA, 563 bp, Homo sapiens
tatgaatttgtcctcaaaattcattaagaacgtgtgagttcaaatttttaacatataaaaactagacaacacttgaagtctcctgccccaatgaatctggagatcatatcacaattctataccccctragaatccaaaaattttatgattattgaaaagtcccaatttggaggatgtgtgtatgctgtcagagtcaagtgagctctaggttctagctctggcagggactgtcatcttatttacttcaggttgccaacatgtaaagtttaagcctttaattaatttccaccaagcatcctatttccccattataggacatgagattgagtgtaagatgtatgtacacatgcatgtgtgtttgaaagagagggagcaagagcgagatgaagattttcatgaataaatctgagatgtgtgatgtggatcaaggtttatattgcagcaatcaaactgatgaaaattgtatattaggcttctgaattaccaaaagttgtctctcgactttacacttgagggttctcatgaccttgctcccctatagtacccagcattttatcatttgg

SEQ ID NO: 86187 - DNA, 563 bp, Homo sapiens
tatgaatttgtcctcaaaattcattaagaacgtgtgagttcaaatttttaacatataaaaactagacaacacttgaagtctcctgccccaatgaatctggagatcatatcacaattctataccccctgagaatccaaaaattttatgattattgaaaagtcccaatttggaggatgtgtgtatgctgtcagagtcaagtgagctctaggttctagctctggcagggactgtcatcttatttacttcaggtygccaacatgtaaagtttaagcctttaattaatttccaccaagcatcctatttccccattataggacatgagattgagtgtaagatgtatgtacacatgcatgtgtgtttgaaagagagggagcaagagcgagatgaagattttcatgaataaatctgagatgtgtgatgtggatcaaggtttatattgcagcaatcaaactgatgaaaattgtatattaggcttctgaattaccaaaagttgtctctcgactttacacttgagggttctcatgaccttgctcccctatagtacccagcattttatcatttgg

SEQ ID NO: 86188 - DNA, 609 bp, Homo sapiens
aaaggcttttaaaataaacttccactccttctgtgaaacttgccctctttttctgccatatgcccctcagttgaattctttcttctgaggaggcaagaattgaggttgctgcagacccacagaaattcactgccagtaccttgggcatcttctaccagccatgtagttattactttttttttttttttggcgggggaggggcgggcgcggagaaccccatcctgcttatacagccattataatttagatgtggttttgtcccccccgcccagcagtctagagggcttttcttaacaaattacgggtaaaacatgcacagtttaacttcagttatataaccataaactgccagtcaaatgacatcattctgtcactcaaacagcccaagcctcaactcctcccacaaaccccataaaaacaccctgagctctaaagcagaagtgacatgaagtgaaatcagcccactctctttctgagagtctattactgtgcttcagtaaaattggctttaagcttrcatgtgggtgttagtttgcaattcttcgctcactattacaaaaaccaagattgctggtacagagctcgagctctgttatctcctcgattaaa

SEQ ID NO: 86189 - DNA, 1499 bp, Homo sapiens
tataaattatacctcaatcaatttgatctttaaaaatattaatatgtacctggcttgaattcccaaagtcctttcttcactggtcctagtcttcagtcaccctttttctgtttcttagtcatgtcataatagtctcccacaaaattaaaaacttttccatttttaaaattttggtttatttgcttcttcagttattgaccactcttcagtctttcagttcacagatattattctggcttgcctttaaaagcctcattttggaaagtcaactatagtggccaaacggcttcagtttaaattctgagatattagattttgatgaaaatagagactcaagtatcaaagatgtggtttggaagaattcattttaaaagttcatgcagcatttgtattatgtgatttatggaaarcagtttggttttcgcattgcttcaaatttttagtgcacatcagaatcacttggagaacatgttacaatgatgtatgtctgaagaagggtctgggatcttagttttaagaagcttcccaggtgatttggatgcaggtagttttctgaccatactttaagagcccagctttgctgtaaagaagttatcttggcctgctatggggtagagagtgcatgtgtgtgtgatggccatgaagggtagagagtattgtactcatggaattcatatcccagatcagccattttcaattggtgatacattgggaaatcacttaagctctttgaacttcactttccttatttatgagaattatacctattcctgaggtttgttgttctaaaggtatgatgttagacacattgacaaattaggacgcttggcttaaaaaaaaatgctcaaaatatttttaaaaagagtaaatatctccagtgagcttgtgtctcatggccctctgactttgtgtaatttggacactgtcattaagttaccagaattgcagagctcctgtgctgggagtgcatacagatcagcatccacatctctatttctctccagtacaccagggcatctttcgttaactaccaatcctatcacactagtaatgaacaacctaaccttgaatactcctctcaatactgaacccccacctacatccctccctctcgtacccagatcatgcatatagttcacattagatattacttatatctaatttctgtgacatgcgtatagttcacattagatattacttatctccattcctcgagttaaagaaggcatacacattgttcagctttattcagatatttcatgtggtgatgatatctaggttaaaagtgtcttatttttctctacttagttaaaagtttcaaattgtgagaaaatgatcatatgaatagtacatgtggcctgttttgcactgagaaacatgtcacatttctgtgatataaatggttaggatttaggggtatggcattactatgaaagatttttcctttttctttttctcccctccttttcccctccctttctttcctgtcccttcctttt

SEQ ID NO: 86190 - DNA, 1499 bp, Homo sapiens
tataaattatacctcaatcaatttgatctttaaaaatattaatatgtacctggcttgaattcccaaagtcctttcttcactggtcctagtcttcagtcaccctttttctgtttcttagtcatgtcataatagtctcccacaaaattaaaaacttttccatttttaaaattttggtttatttgcttcttcagttattgaccactcttcagtctttcagttcacagatattattctggcttgcctttaaaagcctcattttggaaagtcaactatagtggccaaacggcttcagtttaaattctgagatattagattttgatgaaaatagagactcaagtatcaaagatgtggtttggaagaattcattttaaaagttcatgcagcatttgtattatgtgatttatggaaagcagtttggttttcgcattgcttcaaatttttagtgcacatcagaatcacttggagaacatgttacaatgatgtatgtctgaagaagggtctgggatcttagttttaagaagcttcccaggtgatttggatgcaggtagttttctgaccatactttaagagcccagctttgctgtaaagaagttatcttggcctgctatggggtagagagtgcatgtgtgtgtgatggccatgaagggtagagagtattgtactcatggaattcatatcccagatcagccattttcaattggtgatacattgggaaatcacttaagctctttgaacttcactttccttatttatgagaattatacctattcctgaggtttgttgttctaaaggtatgatgttagacacattgacaaattaggacgcttggcttaaaaaaaaatgctcaaaatatttttaaaaagagtaaatatctccagtgagcttgtgtctcatggccctctgactttgtgtaatttggacactgtcattaagttaccagaattgcagagctcctgtgctgggagtgcatacagatcagcatccacatctctatttctctccartacaccagggcatctttcgttaactaccaatcctatcacactagtaatgaacaacctaaccttgaatactcctctcaatactgaacccccacctacatccctccctctcgtacccagatcatgcatatagttcacattagatattacttatatctaatttctgtgacatgcgtatagttcacattagatattacttatctccattcctcgagttaaagaaggcatacacattgttcagctttattcagatatttcatgtggtgatgatatctaggttaaaagtgtcttatttttctctacttagttaaaagtttcaaattgtgagaaaatgatcatatgaatagtacatgtggcctgttttgcactgagaaacatgtcacatttctgtgatataaatggttaggatttaggggtatggcattactatgaaagatttttcctttttctttttctcccctccttttcccctccctttctttcctgtcccttcctttt

SEQ ID NO: 86191 - DNA, 1394 bp, Homo sapiens
  misc_feature (1)...(1394): n = A,T,C or G
ttatagtactttagaaaaaaagaaagtgggctgggcggggtggctcatgcccgtaatcccagcactttgggagtccaaggcgggcggatcacctgagatcaggaggttgagaccagcctggccaacatggcaaaaccccgtctctactaaaaatacaaaaattagctgggtgtggtggtgcgtgcctgtaatcccagctactcggcaggctgaggcagaagaattgcctgaacccaggaggtggaggttgcaatgagccaagattgttcccctgcactccagcactccagcctgggccacagagtgagactctgcctcaaaaaaaaaaagaaaagaaaaaaaaaagaaggtcgggtgtggtgactgacgcctataatcccagcattttgggaggccgtgaggcgagtggatcacctgaggtcaggagttcaaggccagcctggtcaacatggcaaaaccccgtctctactaaaaatacaaaaattagccatgtgtgatggcaggcgcctgtaatcccagctactcaggaggctgaggcaggagaatcgcttgaacccaggaggcggaggttgcagtgagctgagatggcgccactgcactccagcctgggtgacagagcaagactcaagaaagctacttttgataccttgaggcaacccagatgagactccacttgaaatttataagcatgaacttgagtgcctttgtccacagctcctgcgtgttcagatgggttctgatggaatagcattcccctcggccgccaacgtcctccatcaggcctgtctccacctggatcccgtagggcagagagaggcccagctcacccttctcagcctcttccttgaactgctgcatgcagtccaggaaggccaccatcgcgcggtcatacttgttattgaggaaaacatcctgccccccataacagaacaacggcagctcagtgcggtcatctgttaaagacttcagatacgaatggtttccgcaggggatgagtcgatacctctgaaactgcagtccaattgtattggccagggtaaggagcagcaaggccgcctgtccccaggcagtgttaatctcattccagcccacacggacagtggggaggcggcccaacctgaagttattgatgangcgaaggggccctccacccagatctcaaacgtggcggtgaaacagttgatttccttcagccggtccmtctggaccctggcatactgcagctggttctccacgttccccagctgatcaagcagttccagctgctcccgcttcaaggcactgtagtccctgtagtgctgcctctcctgctggtccacgtccgcagcctctgcctgggctgcctggagatccgccgctgctcttgcattgttcctgtccacatcctccagctc

SEQ ID NO: 86192 - DNA, 536 bp, Homo sapiens
tgaaggcagcattgttttcctaggaagtgtgtgtgtgtgcatacacgtgtgtgcaagtgtgtgtctaggtctgagcaaagttaagtgaaaggtgcttatcactgcattttgcttaatttttttctctattcttgtgacatgttatgtcgctacattttatttttttattattattattttttaagatggagtctccctgtctcgcccaggctggagtgcagtggcrcaatctctgctcactgcaagctccacctcccgggttcacgccattctcccacctcagcctcctgagtagctgggactacaggcgcccgccaccacacccggctaattttgtttttgtatttttagtggagacaggatttcaccgtgttagccaggatggtctccatctcctgacctcgtgatctgcccacctccagaagtgctgggatgagaggcgtgagccaccacacccggcctatgtcactacattttaaacagcatctcccttttctccaagtttcaaatctaattttctccaagaagtagatcat

SEQ ID NO: 86193 - DNA, 996 bp, Homo sapiens
gcatgaatatgtatgctatactctatattttccctttaagaaaatacagatatatgcaggaatatgacattatgtgtatatagttagaaatgtgtttaattgtaactttacagataaatttaaacaaacatgctcttatttaatagtgcctagaactgagatgactgaatcatagctactacataaacacctttgctattgaggaagaaaatgtatttttttaaaactgaatttgttgaagtttgaatttagcagatatttggtaatatcctaatattcacttttgccccattaaaactggtcttcaggaaatacgttaatgaatatcatacctcaacattcaaatggctaaaactttttactgtttcacaaggttatttttatcaacagtgagagataatccacataataaaataacatttatcagtcacatatatcagtgatactttctgaaatctgaccattattatgatgccagaatgcctgctttttgttcactccagctcacttgctcagaaaccttcacaagaacactggaaagtcccattttctattctgctttctgccattaaccttctatgaagcttgtaacaaaatcatacccacaaccaggttcccagatgccctatttaaaaaacagatctacattatagttaagatcctagcatggaaaataattaggagggcaaagagcaacattttcagcactttgctgtcacatcatcaaataaaatcagtggaagaagttgccagagggaggagaaaatatttctcacctcttgaggaaaaacgtggcatagaaaccccaaaattattgcttaaggccaaccttatgcctctcagctctttgtttttctcagtcacactagtgcagaactctgcctcatttagtctaatttgcgwcccttgttatattatctgcgcacaaaataaagtcctgttgtactccttctccactgacatttcactcttgggcactcaggggacaagtgtgtc

SEQ ID NO: 86194 - DNA, 2303 bp, Homo sapiens
atcccagattttcacatcacattggctttatcagcttccacagctgctggagagtgcaaggtcctaagaggctctaagagacacttagacacctgtcaaaccaggtgcactggggcagcaactgcccactaaacatccaggctggcatgcagccaactccttctctaccctaataattttttttaaaggccaatgtgatcacatttaaataacacaacgctttcccagagagaaatttttacaggcactgaaaagagagaaaagtgtgctttttaaaaaatctgaagcaaagttaggacagaatccagaaatgaagcttactcagccagttctgaaatgtaacctgcttgttaatcattaatgagatgttaaatttatgaaatcttgaagtgaaacacaagactaagattttggcatcaggtttcatttgaatcaactttctggagaaaaaaaacagctcagtaagttgaactgcaggctgcgggggctaccccagggcatcagcgttgtgctgtaaaatcacactatatcatcagcacacatgtgcacaagggagaaaacacattagactgtaagataatcgtcaagcagagaaaataaaatatgccctcaggcgtcccatttgtaattcccttgaatccatgttcacaaggctttcttttctatacaatttgacaagttaatgcaaaccactttatgtagtcactacaacgccccaaatccctgaagttttgtagggataatttatggtcagctaaagcaaatgccttagagaagtcaatagaaattgcttctatcacacagtcttcatctattgcattggagatagtgtggataccagatcctgggtgattggtttgctgtgaagcctgacaagaaaggagtcagcaagtcctttggctgtagatagtttgaaatgtgtacgtgtacattttttttaacaggtagagccaaaatagctttctgctgaatcaaacctcttaatttcctttttgtggaggtgaactatactgacaatgtcttcagacttgaatgaagggaagacctcagaacggagatattttctttgctattaccagaattggcaagtgaagaaatgcaggctcttcacagatactgtatcacaatttagtattcaccaggaaataattccaaattttccaatgcataaatgaatctctctcagtaaaaatccacattaatccctctgagtgcatttatttgtttgaaggcaaagccctcaccaccatcaccaaaagacattggtataaatgataatgacattaagaatctggtgtttgtcagtcttactgttttaaatctttacagttgaaatggttatagttaagtattttaaaataattttcacatatatgtatgtgtgaataaggtatatatatatatatatatatattaggaattatctccattctcagaaaaaaatccagatgtttccagagattaatttcctagttttttatatatgtatatatttcatatatatattttaactatatattattaaagagcaggcagattacaaaatatttctcaaagaacaatataacatttttaaattttattttttatttgttcrttttaatctgagtgtttctctctttgactctgtagtacctctggtctaccagcacaggagaattgaaagtagggtggcctaccattcaagaaagagtactggctaggttctctaacttatccaaaacatataacaatcttgtcctctacacatctatcatgtatagattctatcatgtgtattggctctcaaataaggggaaatatttttgtaatagtcaatgtttggtcatgaaaatagaagctattttattattccaagtatgaaggatttcaatagaagaaactaaaagtttttcaaaaccattgtatggatcggagagtaaagaaagggaagctctcaccaatatttccagcctatggcactaaagtagatggttcttaaaaattcctccagaagtcactgaaatctcaagaactgctgagtggcttccactgactatttgaatctgcaataccaaggagaacaattctccagaagtcaccatgagctatctaagctatacaaagcctaaagcaggtgagatgtaggatgttgtcagcaagctgctgtgaacttcttgtctgtcatctgcccacacccttggcttcaaaggcttctgaagaataatcctcttttttcttctaccttccaaatctcagtttagttcatctcattgtcagactgtgacctaaaccatggggcaaagatagattgaagaaatgca

SEQ ID NO: 86195 - DNA, 627 bp, Homo sapiens
gcacaagtcagagacatatgtccatcggatttactcctttttcactgcttccattgaaggccaagaaattcttccactgtgacttcctcccccattccggaaaggaagtccttagaacttttgcctgtaggaccccaaatgtcgcaagcccttagaacagtggtcccyaacctttttagcaccagggacaggtttcatggaagacaatttttccactaccgtggggaggggggtatgctccacctcagatcatcaggcattagttagactctcataaggaggacaaccttgatccctcacatgcacagttcacaatagggttcgcgctcctatgagaatctaatgccgctactgatctgacaggaggcggacgtcaggagagcagcctgggagttggggagccctgccttagaacttgcctataggaccccagatggagaacaggccatggattgttcctcttcaccccagacccttcctgccccttcatatttaatccattataatagctatcatttatacaagggcaactatatgtctacaagaatgatttcacctaatacccatgagatccatactgttattattgccattttacagatcagaatgctgaagcttacgtaggtg

SEQ ID NO: 86196 - DNA, 720 bp, Homo sapiens
atctagccaatttagttttttggttttttttttttttttttttttttttgagacagggccttgctttgtcacacaggctggagtgcagtggcacgatcttggctcactgtarcctctgctgcgtgggttcaagcgattctcctgcctcagcctcccaagtagctgggattacaggtgcatgccaccacacctggctaatttttgtgtttttagtagagacagggtttcagcatcttgaccaggctggtcttgaactcctaacctcgtaatccgcccatttcggctttccaaagtgctgggattacaggcatgagccaccatgcctggcctaccaatttagttcttactgatgcctattatggtaagattttctgaccccaaactcaggatacgttgtctgatcaatgtcttgtccgataggggggacactgaattccaggactgctccagaagatttaaaatacatgttttaaaatcccttttattgaaattccagaccatgaaaaaaaaccacaaaaggtactctaaaattgatcctaaacccaactccccagttcaaaactcaagatgctttatagaacttataaccaactctgttgaaaacattgattctctacatacacagcactccttacactagatgtgcaaggacttttccaaaactattcaattctctagggaacacccactggttgtcctataatttaattcaattttaac

SEQ ID NO: 86197 - DNA, 1043 bp, Homo sapiens
agagaaagagaatgggaaccaaactcatcctttttgtgaagaacccattcccaaattaactaatccactcccttgataaaagcattaatccattcttgagggaagagccctcatgatcgaaaaacctttcaaaggtctgacctctcaacactgttgtattggaaatgaagtttacaacacataaaccttggaaaacacaattgaaccatagcagctgccctattctatccctctgaaagaattgctcatctagaaaactagcatttctggctcccaacacagaggtgtctatgatttacccccaagagaagagggcttggtgtcattattcaagaagtaaccacacacttacagaattatgagttttctctcttatggttggactccagctaccaccctttctatatgcacccaaacctattttatgcacccaaacctattttctgctctctgcctcactacatgctacccaaaacacattatttttttagaagcaccaaatttgcattttagaaatccactatatttcttttgtatagattaatttaaactaagtatgtgttttcttagtcataaagatgtgctaaatgtctgtttagatagagcactgtagtaactagcccctcagcaaacacgttatttcattcattcccagacacaaaggaattgcaagctagaaggaagagtaagtgctgggtgctcagaacagccatttaggtacctaacctaccatttagatacatgaccatgagtaggttatttaacattttcatgccttggcatttttattttcaaaatttacacttaaaaatttctatcacaccaggactgtgataggcagaattttggccccagtgatctctgtgccctggcattcctcccaggaatggttatggtacgttacatgacaagtgggattttgcagatgtaattaagtttactaatmagttgaccttagaataggaggatttccctggattattcaagttggctcagtgcaatcacatgagcccttaaagcagaataggaaaacagaagaggag

SEQ ID NO: 86198 - DNA, 685 bp, Homo sapiens
ggatcccaatgaaggtaaacaacatcaccatccagccagttacataaaccagaatctctctcaccaaccaaagttctgtgattttgatactcaaggctttcaaatcctcttctgtctcttacctttactgctgtcatcaaagtcctagttaacatgacctcttttcagcctcaaaactggtatctccaaaggctttcatgtctccttcactccattctccacactgcaacaagacagatctttccagaaggcaaatcatattgtcatccttgtgttgcccagcccccaccccatttagaaagctccctagcttcctgttacttacaccacgaagactaaagtcctgcacactgtatgtaaggccttgcctgggaaggctcctttctatttctccayggttgcctctctccatactccctcgagcttttgagactcaagacacctggcttccttgcaggctctcagtcaagccatatgccatccctcctcaagttatttgctcaagtttttcccattgcctgaaactctcctcatactactacctgctttttgagttatagctactcttctttcaggtctccaggcacagctgcttcctcaaaggaacctcaggcaccatgcatgtctcttccacaacactgacacagtttcaatattgcattttggtgtcagtattttttttttt

SEQ ID NO: 86199 - DNA, 685 bp, Homo sapiens
ggatcccaatgaaggtaaacaacatcaccatccagccagttacataaaccagaatctctctcaccaaccaaagttctgtgattttgatactcaaggctttcaaatcctcttctgtctcttacctttactgctgtcatcaaagtcctagttaacatgacctcttttcagcctcaaaactggtatctccaaaggctttcatgtctccttcactccattctccacactgcaacaagacagatctttccagaaggcaaatcatattgtcatccttgtgttgcccagcccccaccccatttagaaagctccctagcttcctgttacttacaccacgaagactaaagtcctgcacactgtatgtaaggccttgcctgggaaggctcctttctatttctccacggttgcctctctccatactccctcgagcttttgagactcaagacacctggctyccttgcaggctctcagtcaagccatatgccatccctcctcaagttatttgctcaagtttttcccattgcctgaaactctcctcatactactacctgctttttgagttatagctactcttctttcaggtctccaggcacagctgcttcctcaaaggaacctcaggcaccatgcatgtctcttccacaacactgacacagtttcaatattgcattttggtgtcagtattttttttttt

SEQ ID NO: 86200 - DNA, 664 bp, Homo sapiens
ccagtctcacaaaccgccactcccaccctattccccattccattaacagtgttaacaaaagcttaatttttgagttttaaagtgcaattgatttgggtatgactgccattgcaacaggcctgaaaagaaaaaaatgaagtctcctctgtttatgcgatgttttccaggatataaaagatgagttccatgacgacagggccctcactgagctgacaggcccctccggggatcactggcaccaaggtgctgtccagatcattcatatactgtgagggaaggggctggccattgctccctgcttgatagcraacctgatctgagtcaagtgtcatacttagtcccagtttggtcattccatcttccttcagaagcttcaggtgaggacagagagcaaggcaaaaagccttggcaacatgcttagtcaatctaatttgatttgcaggatcatttgctaaaatgatcattttgtaggatcatttaggtgttttctaggaaaaacacctctgtccatctgataacttttccatttgctttacattctgatccatggaatagcttcacatttgttatagtctccatggacttctcatttataggacttatgacacatttgctaaagttcttgtcgtcatccacccactggatgtggatgtgctcctgggga

SEQ ID NO: 86201 - DNA, 2737 bp, Homo sapiens
  misc_feature (1)...(2737): n = A,T,C or G
ggtcatgccaaggaagtcccctgtccacagccgggacgccctgggtggtgctcgtggcgtcagggccagtactcgaatcagtgtccctactttgcttctgtgcccgggtcccccttgattgacacacgacctgtcatctattctggtctctgaagggcctttgtgcgcctcttctgtgctgcacgaggcgctgatttttacggcctgtcctttgcagaggaagcttctctcatgaatttctcaatttttgtggcaaggagggtccccaaagcctggacatgtcagcaacactcctgtcttttccaaacctctccacgcatcgccaccaggaagcggggcagcaggctgaagctgggaccctcactctgccccttagaatgtgagcaagggaaagtcccagagcagatcccagggcactaccgggcccttccctcatctgtaaaggagctccttcctcccagggccagaggaggcagcgtgtggtaagtgttgagcaggtgtaattatacatttaattactgccctcactaaggaaagtgtgcagctgtgtccaccggtgggtggttctcaaccaggggtggtttggcctttgggacatctggccatgtctggagacatttttggttgccatgatggaaagcaggacgtgctggcatctagcgggtcaaggcagggacgccgctggacaccccatagtgtaaaggttgccttcacctgcccagctagaaggatccaaccccgaatgtcagaggcgctgggttagaggaaggccggagtggccgtctgtctttgtggagggagagcctgtgtctgtctcgctcactgtcacatctccaacacgtagtgcgggtttcacaaatggttcttgacacatgggcgtgtgctggctgcccaccggagctggtcaacacgttcccacttctaaggcaggcagtgacctgtgctggacctgacacgggctttaggggctcagaggatggggacgagggctccatagagtggggggggtcagctcgtccctgatggataaggaggatgctggtgaccacctcgggctggggcttggagactggtttggggtaggtgggagatgggggtgttcagatgccccagggtggcagatgggcgtgacgctgaaggtctccagatgctaatggggggcttttgtgcagccactaggaaaacaggattccagacagctgtgcctctcagcccggaagccacggactcagccaaggannnnnnnnnnnnnnnnnnnnnnnnnnnnnnnnnnnnnnnnnnnnnnnnnnnnnnnnnnnnnnnnnnnnnnnnnnnnnnnnnnnnnnnnnnnnnnnnnnnnctgtgcaccgagacaggacgagtagcaagcttgcagagcaccagggtcgatctagaggatcccagtcaatggcacagtccactgaacctattgggggatgtggtcataagcccccagagtcaagggaaggggacagtgacccatctctcaatgagaggagtatggaagaatgcagtggccgtgtgttaaaagtgcctagtttacaagctgcagtgttgtttgaattttacgagcgtgtgcttctttctcattaaaagayatttgcatatctgtttgctttggagcacggccatagagtccgaagatcccagcgctgccccttactcaggacataatgccaggcagggaggcctggatgtacgcagagtggctttgacgactcaactcatgcttcacaatctatgttgctgctttcacgtaacctcagaagttatctgtggtctccatcagtgacgatcacgtcccgttgggggcggaacgtgcagggagaacagaggctccactaagccacccccatgccacaccaacaacgaccctctggaaaactccctctggtccgcccagtccccttccttccccactcacccacacaccaccaccttccctccaggctcctgcacactgggaagtccagaagcatccagcatcctccaggcctccttccgttgtgccaagcaagggcccgggggagagcagagctcaaggctgagggaaggcggtcatcctggcgctggggattccgtgcccctccaaaactccacacggacggtgctcggcaaaacagcctcggagttctaggtggtttccatggcttggaacttataacctcattttctttttttcccaggcagagaaaatgccttggctcacagcagcactctggccagcagctgctaattacccacgtgtggagaagggtggcagggtggaggccatggggagcgcgctgagtcctgggaagcaggacaggaagctgggaaaccttcctcctccccatggcacagggaagctctgcagggaagcccaggccaatgcggggaggcctggacactctaacaaaggctgtgcccgctccattccctgctgcctggaagtgcagccctttagggcaagcaaggaccagcccctcccccacactgtgctagtccatgtgcccaccactgtgacaagcaggggggtcacacagtccaagtgtgcttctgctcaggacacagtccgggggccgctctgcagggagctccacacactcatgcaaggcccagaatggcccacaccgctcctgttcccattccttcagcaagtgaggcacctggcccacctagatgtgggagttggagcatagagacctcctggagccgggaaggagaggggtcgccgcactgtgagctgatcctatgg

SEQ ID NO: 86202 - DNA, 566 bp, Homo sapiens
actgagcaccaaactcccttctgggagggaagtccagccctgctgaaggcctcttgcacagaatcacagagcgtaagaaagcaccctctgatttagatctttgattccccaggcatttacagcaatgacaaaggacattttgtgacaaacaatggcattttcattctgcgacctcaattcaaaaggtcagaaatgtgccctgaacattccctggagagtttgttacgggtcagtcatccttgaaattaggctgctggacccagacagacctggctgcagaccagtcctgcctctgcctcctgtgtgatcgtggggcacaggacctcggacaagtgtgtctctccacgttcaatgtcttcacatgtcaacagaaggacaaaggtgttgtgggttkgtgttggggtgtttgttttttttttttttttgagatgcacttttgctctcgttgcctgggctggagtgcaatggcgtgatcttggctcactgcaacctccacttcctgggttcaagcgattctcctacctcagcctcctgagcagctgggattacaggcgtgcaccaccaca

SEQ ID NO: 86203 - DNA, 566 bp, Homo sapiens
actgagcaccaaactcccttctgggagggaagtccagccctgctgaaggcctcttgcacagaatcacagagcgtaagaaagcaccctctgatttagatctttgattccccaggcatttacagcaatgacaaaggacattttgtgacaaacaatggcattttcattctgcgacctcaattcaaaaggtcagaaatgtgccctgaacattccctggagagtttgttacgggtcagtcatccttgaaattaggctgctggacccagacagacctggctgcagaccagtcctgcctctgcctcctgtgtgatcgtggggcacaggacctcggacaagtgtgtctctccacgttcaatgtcttcacatgtcaacagaaggacaaaggtgttgtgggttggtgttggkgtgtttgttttttttttttttttgagatgcacttttgctctcgttgcctgggctggagtgcaatggcgtgatcttggctcactgcaacctccacttcctgggttcaagcgattctcctacctcagcctcctgagcagctgggattacaggcgtgcaccaccaca

SEQ ID NO: 86204 - DNA, 566 bp, Homo sapiens
actgagcaccaaactcccttctgggagggaagtccagccctgctgaaggcctcttgcacagaatcacagagcgtaagaaagcaccctctgatttagatctttgattccccaggcatttacagcaatgacaaaggacattttgtgacaaacaatggcattttcattctgcgacctcaattcaaaaggtcagaaatgtgccctgaacattccctggagagtttgttacgggtcagtcatccttgaaattaggctgctggacccagacagacctggctgcagaccagtcctgcctctgcctcctgtgtgatcgtggggcacaggacctcggacaagtgtgtctctccacgttcaatgtcttcacatgtcaacagaaggacaaaggtgttgtgggttggtgttgggktgtttgttttttttttttttttgagatgcacttttgctctcgttgcctgggctggagtgcaatggcgtgatcttggctcactgcaacctccacttcctgggttcaagcgattctcctacctcagcctcctgagcagctgggattacaggcgtgcaccaccaca

SEQ ID NO: 86205 - DNA, 566 bp, Homo sapiens
actgagcaccaaactcccttctgggagggaagtccagccctgctgaaggcctcttgcacagaatcacagagcgtaagaaagcaccctctgatttagatctttgattccccaggcatttacagcaatgacaaaggacattttgtgacaaacaatggcattttcattctgcgacctcaattcaaaaggtcagaaatgtgccctgaacattccctggagagtttgttacgggtcagtcatccttgaaattaggctgctggacccagacagacctggctgcagaccagtcctgcctctgcctcctgtgtgatcgtggggcacaggacctcggacaagtgtgtctctccacgttcaatgtcttcacatgtcaacagaaggacaaaggtgttgtgggttggtgttggggtgtttgtkttttttttttttttgagatgcacttttgctctcgttgcctgggctggagtgcaatggcgtgatcttggctcactgcaacctccacttcctgggttcaagcgattctcctacctcagcctcctgagcagctgggattacaggcgtgcaccaccaca

SEQ ID NO: 86206 - DNA, 1622 bp, Homo sapiens
cagaaaggcagcagcttggaagagtggacagacctctggctttgtagccaaagacaccccgtttccatgagacgctgcacgtcccctcctgtcacactccccggcactagcaggtgttcaagagcccatggctcccatgactgtcactgcttctgttgctattcctttgggggataacattttgccrttaagaaaactgaggctcagagagattcagagatctgcccgaggacatgccattggcaatggagccccaaatccctctgtaccattaagcttagaaaatctagagcaggtggaaaagctcaacaaggtgttgggggagtgaattttaaatcccgggggatattgaccatgtctggggacattttttgttgtcatgctaactggggtggggtacgactggcatctagtgggtggaggccaggggtactgctaaacacccccacagtgccctggatggcacccccctagctgagaatgctccagccccacatgtcaggagagccacggtggtggataggccgtgttccaacactaaagcaaattcaagactgtgacatcagacacaatagcgggacagacacaccccagtgggatttgtcaggataaatgcaaaggaccctttaatatgtagaatagccaggaaaggaaaagaggacccttaggtctctggagcttgatttgcccaggatgtcttgagcaggaaccatgaattctgtgaaatcaatattccctccttcgagtcctctctctgccattgaggtttcttaaatgtctgaggccaaaaatcacctgctagcagctccctccttaggatcctttctaaaaccctgcagcctcctggggaaggttcatcgtagtcactctctccctgatgtgaactcagaaggcgatggagtgggtttgtaggaaaaaccccaggggttctgagcacaggtgtgagccagccagctgcctctcagtcagcacggagcctcccgaagaccgcagacacggacagctctgctcccatcgagggactgcccaactcaggacatctcactcagcctgttcaaaccttagaaggggccagaaaaagaaaaaaaaaaaaaaacagactctggaatcagagaggcatgtgttccaatcccagctcagctgcctcctagccacagccatgcaaactcaggccacgcactcggcctctcaggcctcagttttctctgccggagacaggagataagaatagagcttcattaaagaggtgattaaaaaggtgatgaaagaggattaaagaggtgacacaatagagtactcagcgcgctgcaggtccccaacaaatggcgctcatgacgatcactatgcggctccacgtccaccggcctggctgctaatcacccttgggtcaggcacattagccagcagggttcttccacttccccagcctgaactggcttgagttggagcagggggtccagttgggcttgttccattggtgttaacctctaacccccagttctgtcacccgcacctgcatggcaaggtctgtctcccagacgccacatcactgtggtgtagtgaaaacagccgataaccactcagccaatgcaccatacccgccatggtctactaggtctgca

SEQ ID NO: 86207 - DNA, 1622 bp, Homo sapiens
cagaaaggcagcagcttggaagagtggacagacctctggctttgtagccaaagacaccccgtttccatgagacgctgcacgtcccctcctgtcacactccccggcactagcaggtgttcaagagcccatggctcccatgactgtcactgcttctgttgctattcctttgggggataacattttgccgttaagaaaactgaggctcagagagattcagagatctgcccgaggacatgccattggcaatggagccccaaatccctctgtaccattaagcttagaaaatctagagcaggtggaaaagctcaacaaggtgttgggggagtgaattttaaatcccgggggatattgaccatgtctggggacattttttgttgtcatgctaactggggtggggtacgactggcatctagtgggtggaggccaggggtactgctaaacacccccacagtgccctggatggcacccccctagctgagaatgctccagccccacatgtcaggagagccacggtggtggataggccgtgttccaacactaaagcaaattcaagactgtgacatcagacacaatagcgggacagacacaccccagtgggatttgtcaggataaatgcaaaggaccctttaatatgtagaatagccaggaaaggaaaagaggacccttaggtctctggagcttgatttgcccaggatgtcttgagcaggaaccatgaattctgtgaaatcaatattccctccttcgagtcctctctctgccattgaggtttcttaaatgtctgaggccaaaaatcacctgctagcagctccctccttaggatcctttctaaaaccctgcagcctcctggggaaggttcatcgtagtcactctctccctgatgtgaactcagaaggcgatggagtgggtttgtaggaaaaaccccaggggttctgagcacaggtgtgagccagccagctgcctctcagtcagcacggagcctcccgaagaccgcagacacggacagctctgctcccatcgagggactgcccaactcaggacatctcactcagcctgttcaaaccttagaaggggccagaaaaagaaaaaaaaaaaaaaacagactctggaatcagagaggcatgtgttccaatcccagctcagctgcctcctagccacagccatgcaaactcaggccacgcactcggcctctcaggcctcagttttctctgccggagacaggagataagaatagagcttcattaaagaggtgattaaaaaggtgatgaaagaggattaaagaggtgacacaatagagtactcagygcgctgcaggtccccaacaaatggcgctcatgacgatcactatgcggctccacgtccaccggcctggctgctaatcacccttgggtcaggcacattagccagcagggttcttccacttccccagcctgaactggcttgagttggagcagggggtccagttgggcttgttccattggtgttaacctctaacccccagttctgtcacccgcacctgcatggcaaggtctgtctcccagacgccacatcactgtggtgtagtgaaaacagccgataaccactcagccaatgcaccatacccgccatggtctactaggtctgca

SEQ ID NO: 86208 - DNA, 1622 bp, Homo sapiens
cagaaaggcagcagcttggaagagtggacagacctctggctttgtagccaaagacaccccgtttccatgagacgctgcacgtcccctcctgtcacactccccggcactagcaggtgttcaagagcccatggctcccatgactgtcactgcttctgttgctattcctttgggggataacattttgccgttaagaaaactgaggctcagagagattcagagatctgcccgaggacatgccattggcaatggagccccaaatccctctgtaccattaagcttagaaaatctagagcaggtggaaaagctcaacaaggtgttgggggagtgaattttaaatcccgggggatattgaccatgtctggggacattttttgttgtcatgctaactggggtggggtacgactggcatctagtgggtggaggccaggggtactgctaaacacccccacagtgccctggatggcacccccctagctgagaatgctccagccccacatgtcaggagagccacggtggtggataggccgtgttccaacactaaagcaaattcaagactgtgacatcagacacaatagcgggacagacacaccccagtgggatttgtcaggataaatgcaaaggaccctttaatatgtagaatagccaggaaaggaaaagaggacccttaggtctctggagcttgatttgcccaggatgtcttgagcaggaaccatgaattctgtgaaatcaatattccctccttcgagtcctctctctgccattgaggtttcttaaatgtctgaggccaaaaatcacctgctagcagctccctccttaggatcctttctaaaaccctgcagcctcctggggaaggttcatcgtagtcactctctccctgatgtgaactcagaaggcgatggagtgggtttgtaggaaaaaccccaggggttctgagcacaggtgtgagccagccagctgcctctcagtcagcacggagcctcccgaagaccgcagacacggacagctctgctcccatcgagggactgcccaactcaggacatctcactcagcctgttcaaaccttagaaggggccagaaaaagaaaaaaaaaaaaaaacagactctggaatcagagaggcatgtgttccaatcccagctcagctgcctcctagccacagccatgcaaactcaggccacgcactcggcctctcaggcctcagttttctctgccggagacaggagataagaatagagcttcattaaagaggtgattaaaaaggtgatgaaagaggattaaagaggtgacacaatagagtactcagcgcgctgcaggtccccaacaaatggcgctcatgacgatcacyatgcggctccacgtccaccggcctggctgctaatcacccttgggtcaggcacattagccagcagggttcttccacttccccagcctgaactggcttgagttggagcagggggtccagttgggcttgttccattggtgttaacctctaacccccagttctgtcacccgcacctgcatggcaaggtctgtctcccagacgccacatcactgtggtgtagtgaaaacagccgataaccactcagccaatgcaccatacccgccatggtctactaggtctgca

SEQ ID NO: 86209 - DNA, 697 bp, Homo sapiens
ctggagttttattcacggactaagaaataaggattaaaacaaggagcaagggaacaaaggcttgtmgtgcaaggaatggatttgcctttcgacccagaagacaggccatttatttgaacgagaactctcacaactctctctttatcccctttggagcatattttatgtcgccaagaatttcaaggcgattaaaaccagcaaagaaacaaatcctttaaaattgcctatttatagcaaagggtaggcaggttttcaaagcagcaggagtggcaagactttagaacctcttttgaagttgacagccggcaggatttactgacgctgaacacacaatccccctgtgacccagaaattacacttctgggcagattcccaccccaaacagggatacgcattcaccaaaaggcacagtctcgaatgttggtggctgtcctgccgaaatgtccatcgatggtaaaatgggtaagtgaatcaggacagtctccccgtggaatactacacagcaaagaaaatgagaatttggcaaccacacagtcacaagcacaaagatgatcaaaaaagtccacatgccacagccataaactcaaactcaaacgacttctcagtggtgacagaggtcacattgtggttcctgggaagggtagttaccagaatggaggaaaacggggggccttttgggagttggggcatgttgtgc

SEQ ID NO: 86210 - DNA, 1407 bp, Homo sapiens
ttaatgtcctgttcactgtgaccccagggcctggtacaaagcctggcatacagtaggtgggcatcacagaggtgtccccaagatctcctgcatcctgcctttttgtgattttagacataggttggggaggggctgattctactgcaagatcagatgtgaatccttgtcagcacgctcacccctggtaagtcagacctaaaccaatcagagtgagttattcctcagcccagagggattgatggagaaatgggcatgtgacccagctggagccagagagatggcatggggatgtgctggaggcttctgggaaagaagaggcctctcctagcaaccggctctttctccttgtgaatgaggtggtgtgtaaagggatgcctggaactcctgcagctcttttgcaatgaagagggaagccaacctgaggatgaactaaaatggcagacagcacagcagagagaaggaaagaaattgggtcccttggtaacaccatcaggagctgaagcaaaccaactctgacacccaccctgtctccagaacattcacttacatagactgaaaaaccaagtcttttattgtgtcagccaatactaatgggcttagccccattccggctcctttgacttggccactttgctggggtcactttgtctcatggtcttgggatccacaggtcttggaaacagatgacctgggttcagatcccaaccccagcacttccttactacggggcctggggtaagtcacatcctctctttgagccccagtttcttcagacacaaaatatcgcaaatgagaggctcctccagctcagggatgatgcgttacttctcctctcagtccgtcccctgtcttcctttctaccccgccatggctgatagtcaggggagaatggacattcttaatacattcgagcagaggaccgaggatcggggtctctggttgctagctcttactagaatacaggatttttcaacaaacactgatatagcgcttgctcagtgccgggctgtgttctgtgtgctttgcaaatattaacttatgccacctcaaaacgctagggagtgggggacctggctatacccatttataggtgagaaaactgaggcccaaagaggtcraatgacttggccaaggttacagagccagtgggtggtggagcctgggtttggactcagggggccaggctgcagtccaaacacacagctgtgacattgtattataagaatgtgcatttgctgggtctaggcagtttacgtgaatatcttacttaatcctcacagcaaccccatgaaataggtactattattacccccactttacagatgacaaagccatgtctgagaaatgaagaaatgctacatttgccagggggtgaatgagtgaatgaattatggttaatcagacctg

SEQ ID NO: 86211 - DNA, 555 bp, Homo sapiens
ctctgtctggggtgggatgccttactttgcacttaatttaataagggcattctcggaggagtagacgtttaatacgaagtggcggcatagccctgccgagatgtcggtgatggcctggatgctgtaaccacaacctgtggctaaaaattttattttctatcctttacccgtcattatcattagttgctatgattctttctgcattttcggttaactatcatttccaaagacttgtcattcagtaatattagcagatagctgcttcgataaaggaatttggagtttaaaaatcaacttgtgaaaacaaggttgtttttgtctttatcktttgttagagttatagatttatgatttcataggcttgattctatgtgaaatatctttttacttttatgcattttaataagatttaaaaatatttagattaaagccccctttaatgagtacaagaaaaactcttggcttgttagaagaaagtatattctttctagaatttggtgcaggaatatgtgttcatatccaggcaaacgggtgtgtttttatcttcagacaatg

SEQ ID NO: 86212 - DNA, 1236 bp, Homo sapiens
ctctaataggatatattttactaccatgaaacttctatgcttatttaagtatgcttgactccacccctctgacctaaaataggtttaactgtgactgtcctataccagaaagcagtggcttgcgggaatacatagataataaggcatwccagctcatataaatggcagctgatattggagcggaattaagtcaattttgtttctcctactcagaagagacaggtaggtgataagattgtcaaacacaaattttctcttttggcagagtcctttctcctttgataacttcttgattccttttatcctctctcgcttatgcttcagaccagggagaaaaataaaatatgttttagatccaaagatctagtttattcaattttcatgggccacttctttttacttaacataataggaatagcctgagcagtctatgattcttctccgtgattgatttccttcatattccattagtcattaatttttaagtgataatctatcggcattagcaaatttttcttccctgaatggaatcaaattgaaacttctgtgtgaatcagtcctctgctggtctgagcatgataacctagctacggtttccagtgctggctatgcttgagaaccgtctaaaaatacgggtgcctgaactgactccaacctgctagatcaaaaccttcagaagttccaaattgggaaccactctagatactcagaatccaaggggtctacagctgtagctggattttcatttgaagtaaagaaaagcttatggcttatagcatacatttaagataggaaagagaatacttttgggggactggttttttggccagatatcaaagttaacaatatggagctattattaataatagcaactccaatttcaaaaattcatcagtgaaatacaaaaaataaaaatgaagtgacctctgtttttacatgtaaatacccatcactttgttgttgttttaaagaaagactatttcatgtgaatttttttccctgaagataaataattcatattggtatacctcaatactacgttctattacattcttcctaagagcggagtggcaatttgtgaatcagtaggtatatattgcaggtgtacctaaaatccttgcctgtttaagtttttttcttacgtatttagctgctgagatccttgtgggtttatatctttgctttgaattttcatgtgacagtttaaaataatataatctctaggatgactatgca

SEQ ID NO: 86213 - DNA, 534 bp, Homo sapiens
taaaatatacaaaacctcacagttatcatttttatggtgagagcatttaaaatctactctcttaggtctcttgaacttattcctcttatctaactgaaattttgtatcctttgatgaacatctctccaacaccccccaccccagccatattttgatttatcagaagtgtgagactgaaaaaagaaaacccagtgaaacacagagaggcaaattcctggactccctcagtgaggagaatgaaggaaagcaagctatgtgtttatatctcttgcacacagaattacaacaaccaaagtagtcagttctaatttcaaagaatttccagaagcctaatctatataaagaagctatgcctgcatgataaccagtcaattccatgaagaaaaagatcaacccagccgactggatctggtgaggttaaaagctaccttcctggccaggcgtggtggatcacrcctgtaatctcagcactttgggaggtcaaggagggaggatcacttgaggtcaggagttcgagaccagcctggccaacat

SEQ ID NO: 86214 - DNA, 663 bp, Homo sapiens
taaaaattgcaatcagtgagttatcaattagtatgcttttaagaagtgaaataacataaaaatggatattttatgaattcagcacataaaaaaaaagtttacccctgacctgaatttcaactagaaagatctgattaatttgtttttatactcttttggtcattagagctgatagcttgcaattttcctgtggtttcaagtactgtagttattggattatggtcttgtgcatcagaaaacctgggctgttatcatgagagcagtgggcaatattctctctacctttcctatcaactgctgtccagggccacccactggcctctcaaatggcaagccgcaaatrccagcactctgttagatggagctaccacatctaagcattgcctttgagtcttttctatatccactaactattcatcagtttgatttcccttgactctttgtcctaggtagagacataaaaatacgtcttaccctgtacctactcttttatgtataatagctacgtctcttggatgcactagagaatatatcagcttcaacagagcttggaggagtcttactctttagtcagaagtatttatgtcactgtaaaaaaatgcctatgaccatctattctctaggagactcaaagctctgtccaatttacttttttgactgatt

SEQ ID NO: 86215 - DNA, 663 bp, Homo sapiens
taaaaattgcaatcagtgagttatcaattagtatgcttttaagaagtgaaataacataaaaatggatattttatgaattcagcacataaaaaaaaagtttacccctgacctgaatttcaactagaaagatctgattaatttgtttttatactcttttggtcattagagctgatagcttgcaattttcctgtggtttcaagtactgtagttattggattatggtcttgtgcatcagaaaacctgggctgttatcatgagagcagtgggcaatattctctctacctttcctatcaactgctgtccagggccacccactggcctctcaaatggcaagccgcaaatgccagcactctgttagatggagctaccacatctaagcattgcctttgagtcttttctatatccactaactattcatcagtttgatttcccttgactctttgtcctaggtagagacataaaaatacgtcttaccctgtacctactcttttatgtataatagctacgtctcktggatgcactagagaatatatcagcttcaacagagcttggaggagtcttactctttagtcagaagtatttatgtcactgtaaaaaaatgcctatgaccatctattctctaggagactcaaagctctgtccaatttacttttttgactgatt

SEQ ID NO: 86216 - DNA, 539 bp, Homo sapiens
tgtggagtttcagaggatctcttactggctccttgtgactcctcatggcattatcctcctgttgtggataatgccttctgttcccctagctttgcccatctatatgatcttcttgggcagaagtcacagtagtgctaggctagtctcttttctttagagcccatatctgctccacaagcaatacacatcctttgttcttgcaggctgagcaggtgaggggggaggcaaactcatctcagcagcaagcttttttccactgccaaagagtctgctaagcctttctctcttgccctttgatttctcagaccagaagcaagcaccagtccactgtgtttatctaattgcaggagactgataccaagttctacatatagtcctgttgaagccactgtcttattatgcttttcctcactagttcatcatgacaattttcaaacatgcagtaaarttgaaataattccctgtgaacattggtatacccaccacctaccattacattttactatgcttatcttttaaggtatatatttatctatctg

SEQ ID NO: 86217 - DNA, 1277 bp, Homo sapiens
tgcatcgcacacgtctgccacgctgaaagggcacacactcacctgaatcccaggaggtcccggtggcccaggggagccaggcaggcctgatgggcctcgaatcccttcgctgccctggaaaccagcgccgcccccccsccccgccccacaataaagtcagcagggctttgccccacccatggagaccaggccctgggtcaagggtcctggtgactgctggaaacaggacagctggcttctgggcccaatctgtccctgtctaactgcatatgtgccacacgtcgcctccccaggaggatctgtcttcatctgcaaagcatcccctttccttgctgccccatgaggaagggacagggcatcttctccagtgctgacccaggggctggcatggcaggggctcagtagcatgtgctgaactgaaagcacagcttcaatccactgtgaaagctgcctgttgtattctactccatcagaccccctgcctcctccccacctacctccctacctttccccccatcccagcagacatgggcccgggctgcacagaggcctcaacagcgcacgcagcaccatgtgggctctgattccccaagatgaaaaagtgggtgcccctgtcctcaaggagctcacagtccagtgagggtcatgggcccaacacaaccaggggcaatacaacagtctaagtgttctgtgtggaaaggggctcagggagctcaggagcggggagcagttccctctggctggggatcagggaaagtgtcacagaagtgtcaccagatgctagactctgaggatgtctgggattgggcaggtggaggagaaaagtgcatgccagagggaacctaagagaaggataaagacttgcaagtgggcacatgcctggcctggccagggcatctgggggagcctgtgggatgggctggcaggcagaagaggctggaagagtcaccatgatgagtgggggccctgaacgctgtgctaaactttatcgaacagtcagtggtttttaagctgtacttctcagagcactggggcttctgggggagcctagaagctgggggcatgaagtggggactgaagagagggactctaggacccccaccgttgtcttagccagggaatctccgcttgtatttgttttatagattgaggtttttacatttgcttttatgtgataaaaagactctgggactacaaaataaagtctgaaaacccctgctacaggcactggggagccattgaatgttcaaagcagaagagtgatgagaactgatgca

SEQ ID NO: 86218 - DNA, 622 bp, Homo sapiens
tgacctctcagaactaaatgttctacctgttgtcctactgcggaagcgaagtgcagccagaattgaaagctgggctcaatgacctactagttgcctcaggcatctttcttaacctcagtgcctcagcttcctcctctgtggaatggactgagatgaaatgagataactaagcactgggacaatacagccttggatgagtaagtgctgtacatccctgagcctgtttctatacctgaataaaggagctgcttggccctcctgcatcccacctggcatggggcaggtacctgtgagcagcagcctcggcttggtctcaagcactggcactaggtaaggactctggtgcctgggaccagactcagcagtcactcttttctgcctcattccccagcatgtcttggcagggtttacactacatcagctctcgcttattaatgggtcactttgaaatgactcttacrcttccccaagcaaactgcaagccctctgcagacagattcctgtttcctggcagtgtggcaggaagccccaaaagccccagacactcggcaaatgtgtggctgcaaatatgtggcgtgggctctagttcagcacttccaatagggtagagagaattgggatc

SEQ ID NO: 86219 - DNA, 741 bp, Homo sapiens
tagctgaaggcaatctgcactcttataggttgtttccttaaagtagagtcagtggcttacatttctctaaataataagactagcactgcagtatgttactgttatgagatattcttacaaattttcaaattagctatgaaaacacttagactgatatataaatgaatagaaaatatttatgttttaaacatgaatwctactgtatgattatgtttatatgaatgtctggaacaggaaaaaaccacctatgggacaggaatcagaagagtggttaaccagagactggcagggttgggaaaggaatgactgataaagcacacaaatggagtttctgacatgatggaaatgttctctatcttgatagaaacgtgaactatgcaggtgtatacaattgtcaaactcactgcattctacacatgagaactgatatacagtttcactaaattatatctcaatttttaaaaggaggaaaaaagtgaaaaaaagtattgttctacttagaatattaaacttacaggcaataaaaataattatcctcactgggtgtggtggttcacgcctgtaatcccagcactttgggaggccaaagtgggaggactgcttgagcccaggagttggagaccagccttggcaacatggtgagacactgtctctaccaaaaaacccacaaaaattagccaggcagggtggtgcaagcctgttgtcccaggtgctcaggaggctgaggtgggaggatccact

SEQ ID NO: 86220 - DNA, 704 bp, Homo sapiens
aaaatgtattatttcgggattgctgcactagatagatttaaaaacaggtaagtggataggtttcctgtgaaggatctcttccctgacccygcagacagggtcttaactctcatccaggctggagtgcagtggcgcaatctcggctcactgcagccttgaccttgcgggctcaagtgattctcccacttcagcctcctgagtagctgggaccacaggtgcataccaccattcccagccttttgtaatttttgtacagacagggtttcaccatggtctcaaactcccaccttggcctctgaaagtgctgggattattggtgtgagccactgtgcctggcctgaagcttttttttttttttttttgagatggagtcttgctctgtcccccaggctagagtgcagtggtgcaatctgggcccactgcaccttccgcctcctgagttcaagcgattctcctgcctcagcctctcaagtagctgggattacagacgcgtgccactgcacccagctaatttttgtatttttagtagagacagggttccaccatgttggccaggctggtcttgaactcctgacctcgggtgatccacccacctcggcctcccagagtgctgggattataggtgtgagccactgggcccagccaaagcctctcttttttaatataagtggtaggaaaactaaaatgagaacagaggttttttg

SEQ ID NO: 86221 - DNA, 751 bp, Homo sapiens
agagggagaatcagacactgcaagacagagcaacagagagacagagttagagagaaattccaagtcaaaagtacatatcactcacacagacactcgccagccgatggcctcttaaggaaagcttccaagtttggacaggagggtacaggtgggaaaaagggccagactcaaggtggggcgcaggaactcagctggaggtgactgactgttcccaggaaagacccaggcaaatgactcagagcaggggcagttagacacccctgagcttttagggtagggaggagagcagctctccccttccccaacagtcaagagaatcctagcttctagaagtcactggacactgctttgagcccatgactcggccctctggaacccccctgaacccactgtctttgctcttgtttctctgtccctctaaaagaaagaaagaaaaaaaaaaaacagcccattcccgcacagtggctgagcctagaggaaaaaggggaggaggaagctgaaggggaaaaatttgtgattgtgtgcatctaagtgtgtgctcggctgcacaggctgcagttgtgtgcatctggggttgtgtggacacgactgttggtgtggacctgcaactgtggggacctgggccttgtgaactcrttctgcacctgagttcaggggaccatgtgcaaatgagtgcacctgtgtctgcaggttccacagtcaatcaactaacaagtatttacagagcagcccttgtgctaggctctgcgtg

SEQ ID NO: 86222 - DNA, 481 bp, Homo sapiens
ttttttgtagagatggggtctcgctcttgcccaggcttgtctcctggctgggatcaagcgatcctttcgtctcagcctcccaaagtgctgggactacaggcatgagctactgcccttgtcaggattttagaacctatttaaaaataaatggtcagtagaaacagatgttgattcaaaatcctgacattatttccttcttaaggtttatggaaattatttcattttggcaaggcattggccaccattgaaaagaatcagtgtgttttctttggaccattataaggatatacaaagtgcatgagctaagtttttagtgcacctacaggagtgcacgttaataatgtatgttatcaaacaaaggccaccatggcatagaattcttccctgagtaaaatattttttttttttttgagagggagtctcactctgtctgtcgcccaggctggggtgcagtggggygatctgggctcactgcaacctc

SEQ ID NO: 86223 - DNA, 820 bp, Homo sapiens
ctagtgctgtgtcctcattctgtgatggatgactgctgcagcttcaggtagactaggtttggagggccagtgagattttcttgagaggcctcctaagaaggcagccttttaggagatgagctatcccaggtgcaaaaggtgagtttggagacaatgcctcaatgtcagagaggacatcattttgcatattgcaaaggctgtgctggtcatcatactagttttcccacaaaggactaggaaagggtaaggtaaagatacatatgtgaccaacaaactttctaagcctttaggagccaaaggcaatgctgcttctctgacaatgtaataagtgaaataaggaaaaatgaggagcaagaacwtgttctttatgtgatcatctttggggcacactggactatgctgtaggaacacttgacattggtctgcagtgagaggtgaatcagatgattttggaggaagggatcaggaaagccatatgtctaaatttggttgattatgcaagggttcctcagagctgtactggtggactacatgaagggagcaggacagacattcccagtaacatcctcatctggttggaaagaattgatggggaagtgaagttgggagttctttcatcttttgtgctaaatgtgaatgacaaaaggtagacctttttagaaggaaattgctcctcctcttttttttctctatattatagcacagagaaaataagttcctgtaatttctctaccttacagggaagggcagagaagacatattacttctctctgttccccaaagcaggatgagtaaataatctgacctgtgttgggatgca

SEQ ID NO: 86224 - DNA, 3512 bp, Homo sapiens
cctttaggaactctcacaattttggtgcctgctgacagttcttcatattcttcccagatgtggcagcactggyggaatcctccataaccactgtctctggctggcaggcactatgtgtgttagaagttaaggaaggaccgggcactgagtaccagctcctcacacaaggggactgcggccttccagacccggtctgtgagttacccagggagtgggcaaagagctgagtcatgtgtaccttgtatcccttacagcacacggctagacttaaacctgtagtccaaaatacctatgctaatttctgagatataccatttcacaacaaaagctttattatgaaagttatagtactttattatgtttataaacctctcctctaataaatgtattctattcatttttgatggtttatttacaacctcttaataaaacactgccttgtcgagatggaatggctatttgatccaaggactccaagtccttatttatgttatctctccatgtagtatgctaatgcatttatggcctgtcttgtcagttacatttacactccgtgacacctgctgccttcctggtagcaataaaggctgaagaacgtggtgaactttcctaactcggattttaagcacctatttaagaattaacctcgacccttgaaagacaaagtgaatgatgtcgctttgggatacaaaggaataaacgatgttcatagcttttctccctctttcctaaaggatctaccagggggtcctcctcacttcatcctggatgatataagcagatttgacatccaacaaggaggcgcaggtaagagtgcaacatcttccctccgtgccctggataggaagtggtggagggtggtgcttacccacagagtcctgccccacttctgagggagaaaggccagttcccttggtgctgccgtggacaaactgctcacgcccagtcctgcagcctgcaatgagcaggggaaaaggagacaggaaaaatgaaagcaaacatacactgagtttctgcaatgaccgtgcaagataccttgtgtgtgcaacaaccccattttatatatgtgacaatggagagtgcaagaggtaaaataatttgcttaatgtcacacactcagttagcaacagagttaagaatccagcactctctgactgcttcccaccccaccagacattcccagagcaaaggagctgctgagagctggagggcatggacagggaaacaggaggggctgcctaagaggaggtacctgggctgttccaggtgtggccaagagaaacctcagaaagagaagccttggagtgaaagggcagagctggctggaaagtggataggagttgggagacagcaaaaacaacaacccttctgagaatacactctaagctttcaaaacgtcagcttgccgatgataggtcctgtacttgaacttcgcctggtgaaatcaccgtgccttggaccaagtcaatagagcctgcctggccaccagccaagggttcccctgttggagtttcacctaactggagaaaggacctctctgaggccatctttgtggcttctgtactgaacccagtgtctggtgtgaaatggcattcaaagacaaattgatcatgttaggggtgaaggagaaaggactcagggaggggaggagaggctcaaaagggcttacaacgacatccaaggagaaactcgaggccatgcatccctcaaggaggaaaaggagagaacgtccccctacttctgcacagggacgggctgagctaacagcaaagaaaaacgcgaatcagttttcctcaattgtacacagcatcattgccaaaatttgctgtaactgagcacctctggcaaaaagagaatcagaggctggacgtgctggctcatacctgtaatctcagcactttgagaggctgaggtgggtggatcacttgaggtcaggagtttgagaccagcctggccaacatggtgaaaccctgtctccactaaaaataaaaaaaattagccgggcttggtgcagctgtggaggctgtggcaggagaatctcttgaacccgggaggcggaggttgcagtgagcccagagcgcgtcactgcactccagcctgggctacagagcgagactccatgaacaccaccaccaccactgccccttctttatcttgcttggagccagtccctgtgactccctcccccggttctcctctctcagaggaaaaaaaaatgcattatttagaaggaattgtgtagcctctggtggtaaggacctttgaaattatgggggagggtttccaagtgtgtccaatcagcctttcctggcttatctcccctcacagctgactgctggttcctggcagcactgggatccttgactcagaacccacagtacaggcagaagatcctgatggtccaaagcttttcacaccagtatgctggcattttccgtttccgggtacgtgtgcccttgcagcgctcattatatgatggggttctctgtgagtacagggaaggtgaaagtcttaagttttctcgtggccgggaagcctgagatgaaagtgacagttgtgttagttaccctccctaccttcaaaaaaaggattcaagcttataatctgacaacacacagggaagatgagagttgaaatgtttttgtgtaaataaaaagaaatgacagaaatgattagcaaagagtcactgatcgagaaccctgtaactaacatcgagtttttgtctctgtctattcctgtgccatatcgtgctattttgattacagtagctttataggaagtggtaacatctggtaggataagttctccttcattattcattaccattttctcaaaaatatcttggtaattcttgcacatttattcttccatgagaattttaaaattattttgtctattttttttaaaaaaagccactgtgatacacaatgcagcagcatttatgtattaatttagaaaaattacattttgtattggtttaagttttcctttccagaaacacgggatacctttccatttattcagaactagttttctgtccttcaataaagtgttatatttatattggtggtgtatctttcttgattaattcattctcaaacattttatgattttgtggctcatgtaaatgaggtctttttcccctcattttgaacttggtgctgctaaaaaagagaaaagctactacttaccatatattaaactgcatctagccaacttaccaaattcttttattagttcttaattctttctttaacagaatctggaatggtttagttatctaataatattatctgcaaatagataattttctatctccttttaatatttgcagaacttcttttgctctcttgctttgtcacattagctagaacctcagaattttgaatgagtgacaagagccaaatcctgccttctcttgacttcagtaatgtgcttccttgatttactcttctttcagtacattcaagttgctaaaaattgtcttggaatttttgtacctatatcatgca

SEQ ID NO: 86225 - DNA, 505 bp, Homo sapiens
cccaacaatttcagcctttattaaccttttccttctctaactatcagtcctatcgctttttttgggggggggggcgggaggcaggtgggaggtgtacagctcctcatacttgctgttctgtttatgtatgctctatagcaaactatccccaaatctaacggcttaacacagtaaactgtttccctatcatcactcatgattttgtggatcgggaattccagccggactcagctgggaaattcttttgctcctcgctrtattgaagggggtcgctggatactttcactgggcagatgggtgaactggaggtgattaagatggcttcacatgcctggcgccttggtgggatggctggaaggcatgttcagctgggtgtgtccactggggcttccacacatggtggtctcaaagtagtcagacctctttcaggtagctggcttccacaagagtgagcatttcaagagaaaggaagtgtaagtggccaagcctcctaagcctgggccca

SEQ ID NO: 86226 - DNA, 1039 bp, Homo sapiens
gcatcaaatatgggcttagttcctcatgtaaacaattctcccaggaaattagaggataaaaagttaaaaatagcatatatgtcctgccctcaggaagtttacgttttgaaggggggatacaacaaaaagctagaatttgtagcagcgtacaacacatgccaataaaacttgcaactcaagccctgtgcacagagaaccatttggcagaaattctagagaggcttcctggaggaggtgctagtagaggagaccttgacaaatggggatggatctagatcaaattcccctatgccacgtgctcctctttgcgttcagaatgctcttgtttgcaagatttcagccatgtacaactcttctggcactcagccatggactaaaaygaggttcatgcccacagtattggtctgcagaaaagcatgagactggatgacagtcagaacaaatggaatcctctagggtagggagaagagaaagaaagaggaaataaaacagcataatcccaggaactgccaataggaaaggatgggagaaaggacaactggcaaagactctgatgtggtgtccagcctttcagatgtcacctgaggacgttgctacaattaacatgcagccagacacacacagtgactacacattttggtgtggttggcggcattagttgagtcttaaacaaaagcaatttcagttgcaaatcttgtgccaggctttcagagaaagagaataaattatgctgctgtgacaagctgttccactgtggcaacaatagtttggacttccagtgctgcctgtcaaccaggactgaaaatacatcttcatttgttgctgggcagctgggaagatgagtcattaaagaattttataatacatcaaaggccatgattttctacctttcacgcagttacaccttttcccaagtcctcattctgccacaaaaaacttttgaatgcaccgaaagttaagtagaattccttttaaaatgttctgttctgtgcacatatctctaggggaagtgcagaagacatggggcattcccttttgt

SEQ ID NO: 86227 - DNA, 810 bp, Homo sapiens
tcccacctcagccaactagctgagactacaggtgtgtgccaccatacccagttattttttttttctgtagaggcaggatctcactatgttgtccaggctagtcttgaactcctgggctcaagtgatcctcttgccgtggcctcctaaagttctgggactacaagtataagccactgtgtctggctgagaatgggctttttaaatttgagatttctgtcactgttttcstttttgctgtttatttttattacatcaattccctttaatttactgaatatccaactaaccacctttgtagtaaaacacagccagccagataatatttccaggagtggttgctgactttattgccttctgaaatttcagacaatgcttattattatcagtacaaagttacattgaaggctgatgttaagcaaacagccaattcaaatttttgccttgagaaattgagaaatggtaaagagaatgagggattgagaaagggtaaagacaagtcagataagagaaaataaaagtgaattcaacatttattaaagaaagtaacatgaaacattattagcctcaatctttttattagtttttctaaaaatcaactcaagatggattaaagatcgtaaacccaaaactataaaaaccctagaagaaaacctaggcaataccattcaggacataagcactggcaaagatgtgatgatgaagataccaaaagccattctaacaaaagcaaaaattgacaaatgggatctaatctgacaaaggtctaatacccagctctatgagaaagttaaacaagtttacaagagaaaa

SEQ ID NO: 86228 - DNA, 848 bp, Homo sapiens
ttttctcctgacaagcttttatccatttattcagtaaacatttttgaaactttccccgaagtctttgagtccagatttggtacgtgttctccaagatctgaaagcatcctcttctactacaaccttacagcagtcttcccttattcaaaaggagtacattccaagactcacagtagatgcttgaaaccctagataacacaaaaacttatacatcttatgcttttttcctaaatatacatatctatgataaagtttattttataaattaggcacggtaacaacaataattaataataaaatagaataataataaaaatatattgtaacaaaagttatgtaaawgcagtctctctctctctcaaaatatctattgttgaattcacctttcttcatgtgatgatgtgagatgataaagtagctacataatgagatgaagtgaggtgaatgacagtggcattgtcacatagcgtttgactactcttgactttctggtgatacatcagaaggaggatcatctgctctgggtgatcctgaatcactgagccctgacaatatcggctggatgtcaggagcagataatgttaactaactgggaggcagtatataccgtgtggatatgctggacaaaggggtaattcatgttccaggtaggaaagagcaggatggcaggagatttcatcacgctactcaaaatggcataggatttaaaacctatgaattatttatttctggaattttccatttaatgttttcagaccacagttgactgcaggtaattgaaacctcaggtgaaaccatggataagagcctactgtattgttgctgacccatttcctttgctagccata

SEQ ID NO: 86229 - DNA, 779 bp, Homo sapiens
tcaaaatttcttttttcagctcagaaattactaccagagggtagtaatttaccctctggatttgtgcagggaagagaattctcactttaatgctctcattgattctcaaggaattggtggcttaactggcttgccttttcaccaattttctcatatagcagaacaaaaacggcattatatgagggactggaagctcactagaaaagaaaaaattacaaaaataacagttttcatcccgtaggatggctgtattataggatttgaacgttttttccagtttatttaaaaagttaaatataaattttaaagacagtttttaaacgtacattattctagacttttaaattgtgctactgtttcatttgacattattagcatatccccctataaactaaatgatacccggaaatatgcttcaccatgtttatatctacataaagataataatagtaaaaataaagcaaagtttctcaaccacagcactgttgatatttgagactagataattctttgttgtagggagctgcactttagatgaaaggacatttaccagaatttctggcctctacccactagttgtcagcatcacctcctccattctgcccaccccttctcagattttcacaamcaaatacgtcttcagattttgtcaaatgtctctccagggcgcaaaataacccatagttgtcaatcactagaataaagaaatctctgtgtaattaagaatttaaagcagtcatttttttcagtatggcataattgttaagattctgtattct

SEQ ID NO: 86230 - DNA, 779 bp, Homo sapiens
tcaaaatttcttttttcagctcagaaattactaccagagggtagtaatttaccctctggatttgtgcagggaagagaattctcactttaatgctctcattgattctcaaggaattggtggcttaactggcttgccttttcaccaattttctcatatagcagaacaaaaacggcattatatgagggactggaagctcactagaaaagaaaaaattacaaaaataacagttttcatcccgtaggatggctgtattataggatttgaacgttttttccagtttatttaaaaagttaaatataaattttaaagacagtttttaaacgtacattattctagacttttaaattgtgctactgtttcatttgacattattagcatatccccctataaactaaatgatacccggaaatatgcttcaccatgtttatatctacataaagataataatagtaaaaataaagcaaagtttctcaaccacagcactgttgatatttgagactagataattctttgttgtagggagctgcactttagatgaaaggacatttaccagaatttctggcctctacccactagttgtcagcatcacctcctccattctgcccaccccttctcagattttcacaaccaaataygtcttcagattttgtcaaatgtctctccagggcgcaaaataacccatagttgtcaatcactagaataaagaaatctctgtgtaattaagaatttaaagcagtcatttttttcagtatggcataattgttaagattctgtattct

SEQ ID NO: 86231 - DNA, 564 bp, Homo sapiens
  misc_feature (1)...(564): n = A,T,C or G
cccaaacactccctcaaagctcagcctgcgctggctttgacccacttcatcccctgctccagcctctccccatctttcccaccccacaacctctgccctttctcttgtagtttgtttctttctcccccacctccacccattacccagattcacagggtaaagcccgggctgcagctgcctgacacaccaagtttccttcctcagagaggacagggaggaaggaggctctgaaaacgttaataacgttttccctcttcccaaaatggacatamatctgtcaattcagctaaatacagaatcacatcaaagagtttccaatggttaatatctgaggagcgatattatagggactatttcttcccattgtattcatttccgcattatctattttacttttttctctgttttttttttctttttgagacagggtgtcgtgcagcagtcttgaactcctgggctcaagtgatcttcccacctcagcctcccccagtagctggatacaggcttgtgcnacatgcatgactttttttttttttttttttttttttgagacagagcttgctc

SEQ ID NO: 86232 - DNA, 527 bp, Homo sapiens
tccaccttcttttcacccctcctcctgggcctccgcttctccacccgtggagataacctgaccaaccccacttccggctctgcttccgggtgatttttttatacaaataagtcaaatatgtcatttttggactttaggggacctaatatctaaaacattaatgaagtcagaaaaagatataatttgtaatttgattttggaaagtttgtccaatatcaaaggtttaaaatatttgatattataaaatagaattctaggtcaccctaagttattcatttagccaaaaatggtaactcaaaaatttttaaaaagsataaaactttacttattgatacagggaagacttaggtttccaaacaatctatctcttgtctttcctttctttttcctgtggtttattcaaaaggcaaacaaaaatcttcattatcctttaatactacatacaaatattgttcatggccaagcgtggtggctcatacctgtaatcccagcactttgagaggccaaggtgggtggatcatttgagg

SEQ ID NO: 86233 - DNA, 522 bp, Homo sapiens
ctcagctagctcattcatttgcttagtttctggacgtaagaaaacatacaaaaagggaacaaacaaaactgagttcagaagtcaaagatttgaaaataagccgccaaaatgtattaagttccacaaaatggactttgtatctatactgtcacattgttatctgaaaattcttatttcaagattcttcacactgtaaytttcaaattttactataatttaagtgtttgaggtgtaaaatagtttgccacaaagagacacaaaggaaaagactttacaagccctcaattgaaatttaaatgaaagaaatctgttcaacatttgttaacctatacatatatcaatatcaggtaaggagtcacactctttgagagtgcccatggggtatttcaaaatagttttctagagttctgaaagccagattggtcatatgacaataataaaaggctgttttaagcttctactattagatacttccatgccacatagtagttatgagtgtatcatggaatcttaactgctaaa

SEQ ID NO: 86234 - DNA, 522 bp, Homo sapiens
ctcagctagctcattcatttgcttagtttctggacgtaagaaaacatacaaaaagggaacaaacaaaactgagttcagaagtcaaagatttgaaaataagccgccaaaatgtattaagttccacaaaatggactttgtatctatactgtcacattgttatctgaaaattcttatttcaagattcttcacactgtaattttcaaattttactataatttaagtgtttgaggtgtaaaatagtttgccacaaagagacacaarggaaaagactttacaagccctcaattgaaatttaaatgaaagaaatctgttcaacatttgttaacctatacatatatcaatatcaggtaaggagtcacactctttgagagtgcccatggggtatttcaaaatagttttctagagttctgaaagccagattggtcatatgacaataataaaaggctgttttaagcttctactattagatacttccatgccacatagtagttatgagtgtatcatggaatcttaactgctaaa

SEQ ID NO: 86235 - DNA, 522 bp, Homo sapiens
ctcagctagctcattcatttgcttagtttctggacgtaagaaaacatacaaaaagggaacaaacaaaactgagttcagaagtcaaagatttgaaaataagccgccaaaatgtattaagttccacaaaatggactttgtatctatactgtcacattgttatctgaaaattcttatttcaagattcttcacactgtaattttcaaattttactataatttaagtgtttgaggtgtaaaatagtttgccacaaagagacacaaaggaaaagactttacaagccctcaattgaaatttaaatgaaagaaatctgttcaacatttgttaacctatacatatatcaatatcaggtaaggagtcacactctttgagagtgcccatggggtatttcmaaatagttttctagagttctgaaagccagattggtcatatgacaataataaaaggctgttttaagcttctactattagatacttccatgccacatagtagttatgagtgtatcatggaatcttaactgctaaa

SEQ ID NO: 86236 - DNA, 607 bp, Homo sapiens
ttgcctaatattttctctcagtctgmagcttacctttttaatttcataatgagtgttttttgatgaacagaaatttctaattatgatgatgtccatttctttccttcatggttattgcctctgatatgttttgcctgccttagggttcaggaacatatttcctatattttctcttagatactttatggttttagcttttacatttaaatgtatgacccatctcagatttatttctgtatggtgtatatggtgtgaggtagggactaggggattcaagtttcttctgtcttttcttacagatagctagttgctgcaacattacttactggaaaaaaacaacaataatcctttctttcacactgaattttttcaatgcctttgttgaaaatgtttattttatacaaaaatttattttcaacaaaggcatatgcacttagtattatcaagtgcctttcccctccaaagcctgataagccaagagaaaggggaaacaggcagtacacttcaggtatcattccaaggaagtctagattcacagaaaggcatgtggaagcatatgttatatggttgttacatttgtctttccttgcccttaagaacaatattc

SEQ ID NO: 86237 - DNA, 607 bp, Homo sapiens
ttgcctaatattttctctcagtctgaagcttacctttttaatttcataatgagtgttttttgatgaacagaaatttctaattatgatgatgtccatttctttccttcatggttattgcctctgatatgttttgcctgccttagggttcaggaacatatttcctatattttctcttagatactttatggttttagcttttacatttaaatgtatgacccatctcagatttatttctgtatggtgtatatggtgtgaggtagggactaggggattcaagtttcttctgtcttttcttacagatagctagttgctgcaacattacttactggaaaaaaacaacaataatcctttctttcacactgaattttttcaaygcctttgttgaaaatgtttattttatacaaaaatttattttcaacaaaggcatatgcacttagtattatcaagtgcctttcccctccaaagcctgataagccaagagaaaggggaaacaggcagtacacttcaggtatcattccaaggaagtctagattcacagaaaggcatgtggaagcatatgttatatggttgttacatttgtctttccttgcccttaagaacaatattc

SEQ ID NO: 86238 - DNA, 483 bp, Homo sapiens
gattgatagtttggcttgagtatagaattaaaagaaataattttctgtcagattttgaaggctttgctcaatggtgctctagcctcgggtattgtagtaaagaagtccacagccattctgattcttgattacttggtataaaacttgttttatttttttctccctttctctctggaaacttggaggatattttccccagtgttctgaagctttacaatgaygtgccttggtttgtcttaacctggttttctaataacagagcccgaggctggaggcttatgtgctgttatttgggagtacaatctcaggaaacacccaaagagaagcagggaaacaggagagatgatatggcgatgtattatcaagctggctgctgctacaggcaattgattgtgtgatcctatggacctatccaagaagctgcataaattgaattcaggaccacttgaatttacccactgtcttcagtctcccaatgatcaa

SEQ ID NO: 86239 - DNA, 1933 bp, Homo sapiens
agggcagtggctgctgggggaagcaacagtgtccattatgtcgtctgtcagtacactcgacctggacgcccaagaagcagagggttggcgactgaccaggcccaaggtgccaccaatgacatagtgacagcgttcactgtctggtctgtctccatcttctttggaaggaatcttctcctgcttagctataaaatcctttgtttcaaatgactgtgatgaaaagtgacagtgcctgcctcaccactgatcagtttttgctttgagtcagatgaaggcagccacgtatgtccaaaatgttttaaaatgccaatgttttgtctatatcccagtggccctttattagctatctggtgccttaaaacctttttattttcagctccactatatactgcacatgttaggttgaacctgatggaatgaaattgtggttcttataagtcaaaagtggttgagtatcaccattcacaaaattcaactatacatcatttcttacctccacattcctgtgaggtgggtactgtacccccattttcattgatgaggagcctgagtttagaaaggacatgcagtaggtcgaggagctggggtttgaacccaagtctttctgtctttttatcctcaaacttatccaracagtgcatatcctcttctgggagctacctgcaaccagtaatgcattggaaactgagagccaggctggtttgggagatgatgtgatagctactgattgatcagtgatacctttaaaggtgtctccagaagagccaatccacaagtcaaactaatgtatggagttggcttcccgagactgaggtgttctgaccgtcctagatagaagttccccacccctcaggagggttcaagcagctcatccatatcagactggtctgggccgtggagctaggcaggtggatggcgaagtggagtcctaacttcatgagaacctgaacacagaagctgcacagctgggcctgctggtgacctgctggtctccctagtcatccccactgggaggcagtgctgcagcaggtgtgttctagaacacttccattctttttcctgatttgctgtgtgacattgggcaaattgcttctctgcgtaaaatgaggacttgcttagtggttgttaacctttgtagcagtggaattccttcttaagagcacagaacccctttttcaaatgaattcttatggtccctatattagttttctagagctgctgcaacaaattagcacacatttagtggcttaaaatgaaagaaatttattctctcccagttctagaagccagaagtctaagattgaggtgtcagcagggccatgctccctctgaaggctctaggggagaatccttcctttcttctattttgcttctaatggttttggtcatccgggctggctctttggcttataactacatcactccagtctcgtcttcatcttcacatggccttctgtttctccgtgtgtccttttctgtctcttttaagggtagtcacattggatttatgacccatcctcatccagtatgatctcatttcaagattcttatctaattgtctgtgcaaagagcctttttccaaataaggtcatcttctaaggttctgggtagacatgattgcctgagtgggagtcacctctcctttctcccttctgagaacaaaaaatgaagccactcctttgtatcctggcttagctgggcttatgtttattgctggcatcctgcttcatagtttattgctaaacaggtgagaagcccaggtcagcgtgatgctttatctgatcatccaggcacccaggagccagagaggcatagcagcatgtccagtgtcacagagcaaagtgatagacctgatctgaagttctgcagggttcctgctgcaacgtttggccctttgtctttcccccatagtacgtgatagggaagagtcaca

SEQ ID NO: 86240 - DNA, 634 bp, Homo sapiens
acagagcagccatgctttagaagtcaactgcacttaggagcagcagagcagggagtcagaggtcactcttttggtcacttgagcaagtggtggctctgaggaggcacgttggtatcagtccctgaaacctcttcacacgctttcctctcagttatggtttgccagtgttcagaatgctgtgactgtaactgttaccagcccatccacagatggagagagtgcrgcatggggcagtaacttaaaggaggtgctggagttcccaagtaccttggagatttaataatcatgagatttaatgataatgctaagtaataactataaaaatgtatgcaaggctctgttctcagcactttatatacattaaaatatgttgaatcctcacagcaactctttgagggaggaaccattttcatactcatttttcagatgcagaaattgatgtgaagatatatgcttattagggcaaagctggggggttggacctagagagtccagctcctgtgtatccttcagcgcatccttctagatgttgcctttctgaagtgagtgtaagtatttgttgaaagataacacaactcatcatctcccatgtctcagctggtatcaggaaccccagccaatgtaatgaagagac

SEQ ID NO: 86241 - DNA, 743 bp, Homo sapiens
aagtagccatagttgtgaacaggacctaatactacagtttgtgtaataagacaggaacatggagtgtaagaatgtcacaaggcaatgtgtgattcctttccaattaagttttgtaaaggaggctcccatgaattggagacttctttgtcaaatattcctgaacaatgtgggaaattaacagtacattaagtgatggtaaattttagatttggggtggaaaatacatttagtggctaacagagtgaagaaatgcacagaaatgagaaggaatgaggtctgctcaaggctaaacttttggaggctctttgggacagtcattgaatgaaagactggaaactgtctttggatcctgatttccccaactgttctgctaaaaaacactattcaataagtatactccaaaatttgagttattttccaattagtggaaaatacagaaataggaaaatgaagaacagttgtattcatgctgagctccccacataatttaatatactgatatacattgtgaatctccactatgtgaataacagtatgatatggtttggctgtgtccctacccaaatctcatcttgaattgtagttcccataatccccacatgtcatgggagggacctggtgggacrtaattgaatcatgggggttgttaccttcatgtttttcttgtgatcatgaattctcatgagatctgatgattgtgtaagggcttttcccccttttgctcagcacttctccttcctgcc

SEQ ID NO: 86242 - DNA, 387 bp, Homo sapiens
tatgtttccatacagaattctgaaaatgtttgattgmacaaagcagttactgtgatcaccaaacacatttgtgaccaatagaaaaaaatcataaatatcaaagcaagataatgttgatctactcttctgcttttacttccttacaaataccaacttgagtttgcttgttctattaaaacctgcgggctttgaggggaaagatgagtaaagcattccagatttgctaatacagcacattttgacaggttgctgtgcataacttgattgatcatcagaatgaaaatagaaataatagcagaaatgaagtcacgccaacctgagggaaatgaatgttctgttaaacttttaattattttttgaataaattgagctgacttttgctttcta

SEQ ID NO: 86243 - DNA, 582 bp, Homo sapiens
tggtgtctgataatggccttaagggagaattgcttattagtgacttaaaggaaatcatgtcatctattgaattactagcattatatcctcttgcacctggattttccttggaggtcaccctcccaaacattaaccagatttgaccctcactgagcttgagagctctgatgagctcatagcccaaggtggtgtagttttaaagactgcattgcaataagaatatatctgtcatagatgaaaatgcaggagcatatttatgtcttcatgtaatacattcattgcttttkatgaacctgagttctccagggagtgaaacaaattcatgtaacgtttctgtgtgttacaatttgtattttgatctctgctttagctgacagactttttttttacaataaccagagtactctcaagtgaatgtacagatgtagacatttaaaaaaattagcttagtgattcaagttaaaggcagtagtcacttattctgaatttttaaatttaatttttccccattttcagttgaaaaatgcaatttcagattgaaatttgtatcagctccaacactgtagtgggtgttgtttctca

SEQ ID NO: 86244 - DNA, 1151 bp, Homo sapiens
atgtttggggtggtctctgggatgcaagactttctagagcttcctcccctgggagctcgctttcctgctcatgtctgtctgcctactctaacagtaatgtttagtttgtcttctatttccctgaaaaattcatctttgaygaaaaagtctcaaaccatcattcattaaagaaaataaaaactttttggctaaccaggcccaccttccttagaggcagtgtattgattatttattgccactcaagcccacctcttgcaatcttaccttcagctccaagtggctcatcaaaatattttcatatgttcatattctacctgtaccagaccaggtccacaaatatacttttgctcattttataatatttctagtgctttaaaagtgtttccatccttgctgcacctctggaagttgcccagcaacattttttatagtgtccattcagattgatacttctcctgccttctctgttaaagtccctctgttgtattatttggggaatacaccttcaaccatccccttccacatacatgtatgttaaacatacatagtaatccacaaagtatcaatttaatttatgaaatacagttttctatgtagcatcttttattcaggtctgtgatttaggagacacaaaataaacataaagactgattattgcctttactacaaagtccattatgcactcttctaaaaggtacttatattgggaaaatgtaattttcaaaagtaacagtgaatatgttttaaatccaccatgtgctagaatatgtcttaaacttctgagtcttggaagaactgtgagttttattcctagctgtacataggaaacagagaagatgaggggaaatgaaatggcctacatatgtaacaaaaaactacataaccaacattttttgttagtccatctttggcatatttacataaggagaaaaaacaaaacaaaataaaaacatttgaaatagcacaaagacccttgtcttattagcttttcagaagcttgtttgcatagatgtcatggtgctctgtttggaatacagccccaaaccatcacattccattataattaactgggcagcatgtgactgttctactgatgggctgattttgagatggaaattttggaggaatcccatcaaatgctggagaatgca

SEQ ID NO: 86245 - DNA, 1151 bp, Homo sapiens
atgtttggggtggtctctgggatgcaagactttctagagcttcctcccctgggagctcgctttcctgctcatgtctgtctgcctactctaacagtaatgtttagtttgtcttctatttccctgaaaaattcatctttgatgaaaaagtctcaaaccatcattcattaaagaaaataaaaactttttggctaaccaggcccaccttccttagaggcagtgtattgattatttattgccactcaagcccacctcttgcaatcttaccttcagctccaagtggctcatcaaaatattttcatatgttcatattctacctgtaccagaccaggtccacaaatatacttttgctcattttataatatttctagtgctttaaaagtgtttccatccttgctgcacctctggaagttgcccagcaacattttttatagtgtccattcagattgatacttctcctgccttctctgttaaagtccctctgttgtattatttggggaatacaccttcaaccatccccttccacatacatgtatgttaaacatacatagtaatccacaaagtatcaatttaatttatgaaatacagttttctatgtagcatcttttattcaggtctgtgatttaggagacacaaaataaacataaagactgattattgcctttactacaaagtccattatgcactcttctaaaaggtacttatattgggaaaatgtaattttcaaaagtaacagtgaatatgttttaaatccaccatgtgctagaatatgtcttaaacttctgagtcttggaagaactgtgagttttattcctagctgtacataggaracagagaagatgaggggaaatgaaatggcctacatatgtaacaaaaaactacataaccaacattttttgttagtccatctttggcatatttacataaggagaaaaaacaaaacaaaataaaaacatttgaaatagcacaaagacccttgtcttattagcttttcagaagcttgtttgcatagatgtcatggtgctctgtttggaatacagccccaaaccatcacattccattataattaactgggcagcatgtgactgttctactgatgggctgattttgagatggaaattttggaggaatcccatcaaatgctggagaatgca

SEQ ID NO: 86246 - DNA, 1151 bp, Homo sapiens
atgtttggggtggtctctgggatgcaagactttctagagcttcctcccctgggagctcgctttcctgctcatgtctgtctgcctactctaacagtaatgtttagtttgtcttctatttccctgaaaaattcatctttgatgaaaaagtctcaaaccatcattcattaaagaaaataaaaactttttggctaaccaggcccaccttccttagaggcagtgtattgattatttattgccactcaagcccacctcttgcaatcttaccttcagctccaagtggctcatcaaaatattttcatatgttcatattctacctgtaccagaccaggtccacaaatatacttttgctcattttataatatttctagtgctttaaaagtgtttccatccttgctgcacctctggaagttgcccagcaacattttttatagtgtccattcagattgatacttctcctgccttctctgttaaagtccctctgttgtattatttggggaatacaccttcaaccatccccttccacatacatgtatgttaaacatacatagtaatccacaaagtatcaatttaatttatgaaatacagttttctatgtagcatcttttattcaggtctgtgatttaggagacacaaaataaacataaagactgattattgcctttactacaaagtccattatgcactcttctaaaaggtacttatattgggaaaatgtaattttcaaaagtaacagtgaatatgttttaaatccaccatgtgctagaatatgtcttaaacttctgagtcttggaagaactgtgagttttattcctagctgtacataggaaacmgagaagatgaggggaaatgaaatggcctacatatgtaacaaaaaactacataaccaacattttttgttagtccatctttggcatatttacataaggagaaaaaacaaaacaaaataaaaacatttgaaatagcacaaagacccttgtcttattagcttttcagaagcttgtttgcatagatgtcatggtgctctgtttggaatacagccccaaaccatcacattccattataattaactgggcagcatgtgactgttctactgatgggctgattttgagatggaaattttggaggaatcccatcaaatgctggagaatgca

SEQ ID NO: 86247 - DNA, 1151 bp, Homo sapiens
atgtttggggtggtctctgggatgcaagactttctagagcttcctcccctgggagctcgctttcctgctcatgtctgtctgcctactctaacagtaatgtttagtttgtcttctatttccctgaaaaattcatctttgatgaaaaagtctcaaaccatcattcattaaagaaaataaaaactttttggctaaccaggcccaccttccttagaggcagtgtattgattatttattgccactcaagcccacctcttgcaatcttaccttcagctccaagtggctcatcaaaatattttcatatgttcatattctacctgtaccagaccaggtccacaaatatacttttgctcattttataatatttctagtgctttaaaagtgtttccatccttgctgcacctctggaagttgcccagcaacattttttatagtgtccattcagattgatacttctcctgccttctctgttaaagtccctctgttgtattatttggggaatacaccttcaaccatccccttccacatacatgtatgttaaacatacatagtaatccacaaagtatcaatttaatttatgaaatacagttttctatgtagcatcttttattcaggtctgtgatttaggagacacaaaataaacataaagactgattattgcctttactacaaagtccattatgcactcttctaaaaggtacttatattgggaaaatgtaattttcaaaagtaacagtgaatatgttttaaatccaccatgtgctagaatatgtcttaaacttctgagtcttggaagaactgtgagttttattcctagctgtacataggaaacagagaagatgaggggaaatgaaatggcctacatatgtaacaaaaaactacataaccaacattttttgttagtccatctttggcatatttacataaggagaaaaaacaaaacaaaataaaaacatttgaaatagcacaaagacccttgtcttattagcttttcagaagcttgtttgyatagatgtcatggtgctctgtttggaatacagccccaaaccatcacattccattataattaactgggcagcatgtgactgttctactgatgggctgattttgagatggaaattttggaggaatcccatcaaatgctggagaatgca

SEQ ID NO: 86248 - DNA, 665 bp, Homo sapiens
agaattatgatgaagttttccactgaagtctattttgagcattctaaaaaatgctaagctaactcacatcaactttgaaagcttcaacttgtgagatatcgccaatgcttttccaatctactctttaggtagtagtcagctttggaagtataacgcatgttctgttgcagaatttggatttggttttaaaataagcttaatttctttctctgataagcattgaaaaagagccaaactcttagctgtcaagttgcttatccccctgcttgatctacttaaaaaatcatgatatgcccaatctcagaattgtgcctttttcatcaggaagtggtatgttcaggctattcaagagactgkatatatctttgagacacacagcttgcgccagccaatataaaccaccttttctggtactacgaatttgtgaagagatgtttttatcttgcctatcttttcaaagcctctgtgagcacctgttcattgaacagctagcattcctcagtggagaaagcagtcctgctccctctatcagtttttctacacagcacactgagcacgtcattccagggaagatatcccttgcctcccagtgctctttccttcacccccaccctatcccaagactccctcactctctactctgcttatttatatccacgctactt

SEQ ID NO: 86249 - DNA, 1331 bp, Homo sapiens
cttcaaattgcaaccattttgaaaaacctgaaagctgtttcataaaggaaataccaaatttatcgcaagtcagtacaaaagaaaacacttgtcttttcaatatctttcacaaagctatatagttagtaggctcttcaggtttaaaatagtagcctgatacttttgtataatttttatcttgattactagctatctatggagctaatagaaaatcaaataaggttttgagaaatcaaaggtttccagcattctcctactttattgaaaaaaagaaagagaaaaaagataaaagagagagactaaaaaaagaaatataaaggagatgatatgagaattgcagatagtagttagctattttccttccggctaaagggtttaaaagacaacctgtgagtccatatttttatagctttcatttgcaatatacaaaagtattattaggcaagcaagtaaattgctatatatatcacatgtggggaaaaattcttctttttctattacataaatatacatcttgaacaaaatctggtaagacattaaatgttggccccaaatatctgcattaccgcagcctatatcaataaaatgaaatcttaggtttgtgccatgaatctttattcagattattatttgtagattgatgacttgctgaaatgaaactaggatggcgggtcaagatttttctactgagttttcttcatgaactgtggaacatatggcattgctgtgacttgagtgggaaggatccttttttctcactccctgctatggtatcttttctttgggatctttgcagggtcaaagaagtttaaactgatttttcttcaagactagtgttaaatgaggtctttgtgacaacctacttttgctgttttgttttttgttttcctatgagaaggaaaggacrtatatggtaagaagaggatcataagcgaattagttattttgaaaaataaatgaccgtctctttgattttagggcaggctgtctcagaaccagttagcatctattgttatgggtcttcagaaatagaagaagaggcgattttagcatgcagttaccttttgcatcattactctggtataacagcattaaaatcaaagtgaaagggacgtttcaagataagagagatgaacctccttaacccccaagataagagggatgaaagaataacgagccaaagcatttattaatggaaagctgaccttctcaatcttttatcttactcatttttgtcttcccccacttctactctgcattctgccgaggtaaaaccatccattattttttgcctgcttcccaaatttagtcataggtgaccaagctatgct

SEQ ID NO: 86250 - DNA, 1331 bp, Homo sapiens
cttcaaattgcaaccattttgaaaaacctgaaagctgtttcataaaggaaataccaaatttatcgcaagtcagtacaaaagaaaacacttgtcttttcaatatctttcacaaagctatatagttagtaggctcttcaggtttaaaatagtagcctgatacttttgtataatttttatcttgattactagctatctatggagctaatagaaaatcaaataaggttttgagaaatcaaaggtttccagcattctcctactttattgaaaaaaagaaagagaaaaaagataaaagagagagactaaaaaaagaaatataaaggagatgatatgagaattgcagatagtagttagctattttccttccggctaaagggtttaaaagacaacctgtgagtccatatttttatagctttcatttgcaatatacaaaagtattattaggcaagcaagtaaattgctatatatatcacatgtggggaaaaattcttctttttctattacataaatatacatcttgaacaaaatctggtaagacattaaatgttggccccaaatatctgcattaccgcagcctatatcaataaaatgaaatcttaggtttgtgccatgaatctttattcagattattatttgtagattgatgacttgctgaaatgaaactaggatggcgggtcaagatttttctactgagttttcttcatgaactgtggaacatatggcattgctgtgacttgagtgggaaggatccttttttctcactccctgctatggtatcttttctttgggatctttgcagggtcaaagaagtttaaactgatttttcttcaagactagtgttaaatgaggtctttgtgacaacctacttttgctgttttgttttttgttttcctatgagaaggaaaggacatatatggtaagaagaggatcataagcgaattagttattttgaaaaataaatgaccgtctctttgattttagggcaggctgtctcagaaccagttagcatctattgttatgggtcttcagaaatagaagaagaggcgattttagcatgcagttaccttttgcatcattactmtggtataacagcattaaaatcaaagtgaaagggacgtttcaagataagagagatgaacctccttaacccccaagataagagggatgaaagaataacgagccaaagcatttattaatggaaagctgaccttctcaatcttttatcttactcatttttgtcttcccccacttctactctgcattctgccgaggtaaaaccatccattattttttgcctgcttcccaaatttagtcataggtgaccaagctatgct

SEQ ID NO: 86251 - DNA, 409 bp, Homo sapiens
aaagtacaaataaaaatgataactatgtaaaaatatggaaaaatatatagaaaataatgcttttaagagtagaataaaaagtgaactgttcacaactattagaagcttatacacttagctaggcatacccaggtcagaaaatgaaagaaaaaattttacctaaacactgccacatttttctttttcattttgtctttcaaggtttcaatgtgctttaatattaatttttccaaattataaaaagcatactccttgttggcaaascactgtttttcccttatgtgatgaaatgtgaaaaaaaaattgtttcaaaagaagctgtaatagcattttattttattttattcttttttttttttttttttttttgagacagagtttcactctgccgcccaggctggagtgcagt

SEQ ID NO: 86252 - DNA, 703 bp, Homo sapiens
aaaacttaagctgaaaaaaaaacagtgtgccctatatttaattttttcatagaaaactcttcttccaacagtgtttaaaatccaggttaattatatgacataagtaacaagtaatctccatcttctccaggcttctaatcagtttcagaacaggagttttggttaaacctcttccctgccatgaaaacacaaagagcaattcagtaaaaaaaaagcaagaatgtaataaaatgcaattactgtcatacatcactaagctatactcctaaaatcatgaatactttctatttttttctttatttgaaggaaagttgttctgttctgtgctaaaawtttttttaatccactctacaaagatcatgtgatgctttaatcctgaatcaactccattaacattttttcggctacctgatagatgaaaactctgaaactaagtgaaaactgaaaatgctgtttggattacatgcctgacatctttccaatgtcttattccttctgtgaacctcctaaggttacagagcctgtgtatactttcttttgtctcacagggtcttctagttcaaatcttctttgtttcatagactctgtgtgtgtattttaatgttagacagtgcaccagaagaaacagaaacatgtagtcaatctgcctattcctataaggctctcctgaatccttcctttgcatgtcttagcctagaaaaga

SEQ ID NO: 86253 - DNA, 751 bp, Homo sapiens
atattagagtgaaataaggaagctttaaaaaaacacccatgccggggacacacaaccagaccagttaaattagaacctctggggtggtctttttaaagatccccagatgattctgatattcagccaaagttgagaaacactgttttagagtttgagatcctcttacaagagattaaaatctggttggcaagcaggacctacaaacatgatcataaacaatgcagaaatrtacggaacagtgagtgcgatagagttcagaaaaaggagaaacgaatacagggtgttctgactaggagaggctttgctagctggacagacaatctgggcagtattttgaaaagagaatgaaaaagaaatttttaatgtggaaacaacagagccaaaggtataaaaggacatagggtgcttgggggaggcagtagattgtatggtggcctcccaaaagacaggtccacctggaatctgtgaaggtgactttatttggaaaaaaggtctttgcagctgtaatcgagttaaggatcttgagatgagagcatcctggattagagtgggtcctaagtccttagaagagaagacagacaggaagaaggccatgtgaagacagcggcagagtttggagtgatgtgccttccagccaaggaacaccaggattgcctgcagccaccagaagctggaagaagcagtgaaggattctctctagacccttcagacggaacagctgctgacacctcaatttcagaattctggcctc

SEQ ID NO: 86254 - DNA, 751 bp, Homo sapiens
atattagagtgaaataaggaagctttaaaaaaacacccatgccggggacacacaaccagaccagttaaattagaacctctggggtggtctttttaaagatccccagatgattctgatattcagccaaagttgagaaacactgttttagagtttgagatcctcttacaagagattaaaatctggttggcaagcaggacctacaaacatgatcataaacaatgcagaaatgtacggaacagtgagtgcgatagagttcagaaaaaggagaaacgaatacagggtgttctgactaggagaggctttgctagctggacagacaatctgggcagtattttgaaaagagaatgaaaaagaaatttttaatgtggaaacaacagagccaaaggtataaaaggacatagggtgcttgggggaggcagtagattgtatggtggcctcccaaaagacaggtccacctggaatctgtgaaggtgactttatttggaaaaaaggtmtttgcagctgtaatcgagttaaggatcttgagatgagagcatcctggattagagtgggtcctaagtccttagaagagaagacagacaggaagaaggccatgtgaagacagcggcagagtttggagtgatgtgccttccagccaaggaacaccaggattgcctgcagccaccagaagctggaagaagcagtgaaggattctctctagacccttcagacggaacagctgctgacacctcaatttcagaattctggcctc

SEQ ID NO: 86255 - DNA, 776 bp, Homo sapiens
cagttctgcagggctggggagacctcaggaaacttacaatcatgtcagaacgggaagcaaacatgtccttcttcacgtgttggcagcaaggagaagcgcagagtgaagtgggggaaaagccccttataaaaccatcagatattgtgagaactcactcactatcatgagaacagcatagaggtaactgcccccatgattcaattacctgccattgggtccctcccatgacatgtggggattatgagaactacagttcaagatgagatttgggtggggacatggccaaaccatatcacaagcctatataaaaagggtgaaactaaagaaaggtctttgagagtgatttcaaataatgtacaaggaacaaacacccagacacaaacacacatgcgtgcacgcgcrcgcacacgcgcgagcacacacacacacacacacacacactatttctacaaaatattaccacaccctcatctagtataagcttgctattaaaacaagggtttggggatctgggaacactagggtaaaaagatatttcaacaacacaaggcattgttgttggcctaattcatttctattatgttttcattttaactacttaatagagaaattcataatttcattttagtattggagtaaactaaaaaaaagaccaaatgtttggaactattgaataaaaatccaacatagaaataatttgatccattaaacctttggcatctgccttgaaaagtacatatgtttctttgtgttatttctcagtatattaatatgag

SEQ ID NO: 86256 - DNA, 1501 bp, Homo sapiens
ctcctgggttcacgccattctcctgcctcagccccccaagtaggtgggactacaggtgcctgccaccacgccctgctaattttccatgtagaaagttttgaacaaagttattggtgtgttttatctttcctactccattgaaaactatttgagaataaagactctactttttacataacagaggcttagcaaatgtctgaatgaataaatmtccttatatttccacataagaacctacattgcatagaaaaatgtaaatgaagaattttttttttttttttgaggcagagtctcgctctgtcgcccaggctggagtgcagtggcgccatcgtgctcactgcaagctccgcctccctggttcactccattctcctgcctcagcctcccgagtagctgggactacaggcgcccgccaccacacctggctaattttttgtatttctagtagagacggggtttcaccatgttagccaggatggtctccatctcctgacctcgtgatccacccgcctcggcctcccaatgtgctaggattacaggcgtgagccaccgcgcccggccaagaattttatgatttattcataataattaatttttcttctcattctgtctgctacatggttcagtagtgttgtgtgtattcatattgttgggcacggagcgccagaatttttttctatcttggaaaatgggaactctctactcataaaataacaattcctatttcaacctttcctccaccctgggcaaccacaattctgctttctgtttctatgaatttgaatcatttagacacttcattatcattatttttgattgctcaatatttattaaatgcttcagatagtggcagtggaaaaagtatgttaaaagatgtatgctttatgttggacacatgcaaatctcactttcactgcccccatcccccttccaaaacatacacgcgtgagagaaacagaggtaaaaatttattgtagaaatcagcaacctaatttaaagctgaaagcaatcttaccttgggtaacagaaaaaaaaaaaaaaaaggtaaccttctctttgaaacataaatcactcctgaaaggaccatgtgggaattcctagaattcctctctttctatttttgactcttgtagaagaggttgaaaacagaagcatgattggaatattaggagccttttcctcttggtaatcattaaaaaaggaaagtctgaaagaaacttctaatttcccctatagctgtgtaaactccagttaaatataaattgttttgttctctctcgattgttacatttatatttcttgaggtcaaagtgactttccatagtcataaacagattctactttgtaaccccactttaactatcaaagtacccgaaaaagcatcaaactgtgcattaagacaatatccaggtgacagagagaaaccataaaaggatttaggctaggagtaaaaatattatcctttgggagccctacatgagacctagaaataatatcctgt

SEQ ID NO: 86257 - DNA, 1501 bp, Homo sapiens
ctcctgggttcacgccattctcctgcctcagccccccaagtaggtgggactacaggtgcctgccaccacgccctgctaattttccatgtagaaagttttgaacaaagttattggtgtgttttatctttcctactccattgaaaactatttgagaataaagactctactttttacataacagaggcttagcaaatgtctgaatgaataaatakccttatatttccacataagaacctacattgcatagaaaaatgtaaatgaagaattttttttttttttttgaggcagagtctcgctctgtcgcccaggctggagtgcagtggcgccatcgtgctcactgcaagctccgcctccctggttcactccattctcctgcctcagcctcccgagtagctgggactacaggcgcccgccaccacacctggctaattttttgtatttctagtagagacggggtttcaccatgttagccaggatggtctccatctcctgacctcgtgatccacccgcctcggcctcccaatgtgctaggattacaggcgtgagccaccgcgcccggccaagaattttatgatttattcataataattaatttttcttctcattctgtctgctacatggttcagtagtgttgtgtgtattcatattgttgggcacggagcgccagaatttttttctatcttggaaaatgggaactctctactcataaaataacaattcctatttcaacctttcctccaccctgggcaaccacaattctgctttctgtttctatgaatttgaatcatttagacacttcattatcattatttttgattgctcaatatttattaaatgcttcagatagtggcagtggaaaaagtatgttaaaagatgtatgctttatgttggacacatgcaaatctcactttcactgcccccatcccccttccaaaacatacacgcgtgagagaaacagaggtaaaaatttattgtagaaatcagcaacctaatttaaagctgaaagcaatcttaccttgggtaacagaaaaaaaaaaaaaaaaggtaaccttctctttgaaacataaatcactcctgaaaggaccatgtgggaattcctagaattcctctctttctatttttgactcttgtagaagaggttgaaaacagaagcatgattggaatattaggagccttttcctcttggtaatcattaaaaaaggaaagtctgaaagaaacttctaatttcccctatagctgtgtaaactccagttaaatataaattgttttgttctctctcgattgttacatttatatttcttgaggtcaaagtgactttccatagtcataaacagattctactttgtaaccccactttaactatcaaagtacccgaaaaagcatcaaactgtgcattaagacaatatccaggtgacagagagaaaccataaaaggatttaggctaggagtaaaaatattatcctttgggagccctacatgagacctagaaataatatcctgt

SEQ ID NO: 86258 - DNA, 1501 bp, Homo sapiens
ctcctgggttcacgccattctcctgcctcagccccccaagtaggtgggactacaggtgcctgccaccacgccctgctaattttccatgtagaaagttttgaacaaagttattggtgtgttttatctttcctactccattgaaaactatttgagaataaagactctactttttacataacagaggcttagcaaatgtctgaatgaataaatatccttatatttccacataagaacctacattgcatagaaaaatgtaaatgaagaattttttttttttttttgaggcagagtctcgctctgtcgcccaggctggagtgcagtggcgccatcgtgctcactgcaagctccgcctccctggttcactccattctcctgcctcagcctcccgagtagctgggactacaggcgcccgccaccacacctggctaattttttgtatttctagtagagacggggtttcaccatgttagccaggatggtctccatctcctgacctcgtgatccacccgcctcggcctcccaatgtgctaggattacaggcgtgagccaccgcgcccggccaagaattttatgatttattcataataattaatttttcttctcattctgtctgctacatggttcagtagtgttgtgtgtattcatattgttgggcacggagcgccagaatttttttctatcttggaaaatgggaactctctactcataaaataacaattcctatttcaacctttcctccaccctgggcaaccacaattctgctttctgtttctatgaatttgaatcatttagacacttcattatcattatttttgattgctcaatatttattaaatgcttcagatagtggcagtggaaaaagtaygttaaaagatgtatgctttatgttggacacatgcaaatctcactttcactgcccccatcccccttccaaaacatacacgcgtgagagaaacagaggtaaaaatttattgtagaaatcagcaacctaatttaaagctgaaagcaatcttaccttgggtaacagaaaaaaaaaaaaaaaaggtaaccttctctttgaaacataaatcactcctgaaaggaccatgtgggaattcctagaattcctctctttctatttttgactcttgtagaagaggttgaaaacagaagcatgattggaatattaggagccttttcctcttggtaatcattaaaaaaggaaagtctgaaagaaacttctaatttcccctatagctgtgtaaactccagttaaatataaattgttttgttctctctcgattgttacatttatatttcttgaggtcaaagtgactttccatagtcataaacagattctactttgtaaccccactttaactatcaaagtacccgaaaaagcatcaaactgtgcattaagacaatatccaggtgacagagagaaaccataaaaggatttaggctaggagtaaaaatattatcctttgggagccctacatgagacctagaaataatatcctgt

SEQ ID NO: 86259 - DNA, 756 bp, Homo sapiens
aaagctctccttattcatctaacccaggtcctcagccagcagagccacgttccttatgagcaccgtgggtttatttcattttcctacaccactgacccgaatatgcccggcgccatggggactccggctttgggagaagctgacgttgttatccccaggaatagctgtcactccggtccagatggcaggcaagaaggactaccctgcactgctttccttggatgagaatgaactcgaagagcagtttgtgaaaggacacggtccagggggccaggcaaccaacaaaaccagcaactgcgtggtgctgaagcacatcccctcaggcatcgttgtaaaggtagatcacagaaggccgctgaggggagaggccccgcccaagggttccacagcctccagagatttctcccaagtgtgaatgggatcagccgaagtgcattatttttctggcttgggccaccctctaccagccaggcagtagagagcaccgcagatctcgtcccatccctgagccrttcctccctaaggcagaacctcctacaacagcctgggaagcctgtttccaggatcttttggagccagggtatggctgccatccttgaatttggcagacagcactggtgcttggctgctgccccggaagcaacgtcttgacaaagctaagcagtggctgataaaggcaggcgcccgggcagcatggttctttcaaatccgttcccactgcaggaaggctgccgagatccccagcattgctatggg

SEQ ID NO: 86260 - DNA, 756 bp, Homo sapiens
aaagctctccttattcatctaacccaggtcctcagccagcagagccacgttccttatgagcaccgtgggtttatttcattttcctacaccactgacccgaatatgcccggcgccatggggactccggctttgggagaagctgacgttgttatccccaggaatagctgtcactccggtccagatggcaggcaagaaggactaccctgcactgctttccttggatgagaatgaactcgaagagcagtttgtgaaaggacacggtccagggggccaggcaaccaacaaaaccagcaactgcgtggtgctgaagcacatcccctcaggcatcgttgtaaaggtagatcacagaaggccgctgaggggagaggccccgcccaagggttccacagcctccagagatttctcccaagtgtgaatgggatcagccgaagtgcattatttttctggcttgggccaccctctaccagccaggcagtagagagcaccgcagatctcgtcccatccctgagccattcctccctaaggcagaacctcctacaacagcctgggaagcctgtttccaggatcttttggagccagggtatggctgccatccttgaatttggcagacagcactggtgcttggctgctgccccggaagcaacgtcttgacaaagctaagcagtggctgataaaggcaggcgcccgggcagcatggttctttcaaatcygttcccactgcaggaaggctgccgagatccccagcattgctatggg

SEQ ID NO: 86261 - DNA, 1089 bp, Homo sapiens
tccaaattccaggctcccacacatgagcagtagcgtatctatcaaatatgcttttaatttgaagttatctcaataaccattttataaacagaaatgtatcccccatatcaagagagatcactactgtacctgaatgtcaattttttgttgttggtgaaacttcaaaaagttcaatgtatgtaatatcacaagtaattaaaaaagggaacatttcaattatgataaacataaactgtgatgacatggaatataactcatattttaatcttaatgccttattaatctagattcaaattatggttgaattagctacaagtcaggtacccaaatcaagaacctactattcattccagcttaatctagtttaaattcctgttgcatttcaggttcaaaaaattcacacaagtgattgtgactttgactagtgatacaattattggtattaacaacaatggaaatcgtgagcttcttcctgcatacattttcactttctcaatgtttaaatgaaaatttgttcagaatacaaaacaaaatagcacattgtaagaactaagaatttccctttggctagaatggacaagtagaaaaacaaatataaaagtatactttgttttatgtattcaatgattttattctatctaatatttattagataaatttgagaacagtgagttaagtattaatataaaattgattaagctttgtatcaattaagggtctgtctttttatgctattatctgycccttattttcatagttggctccttgatttgttcactgacaaaagaggtcttcctctccactacttttacccaataaaaaatggaaaatcctggactagaacacctataaaatcaccttgtattacaaagtcttcaacagcaatgagatatttgtttactgctctgtatgtaagagagactatctcatagatctttccaaacagcttcagcctgctgcctcctgacttttgggcatcttgacttcctctggattttctgggaactctccaattactggtctccgtaactacaccaaatgtaaacacttcctatgtataaatgatttgcaggagggcatcttaggagt

SEQ ID NO: 86262 - DNA, 557 bp, Homo sapiens
ttaaaatgtaaaacttcaatacatcagtaaacactgtaggaacaaagtagacaagtcacaagcttgaagaatagtgtgtttaacaaaggaggaatatttaggacatgtaaaaatttcacttcaacaggaaaaaaagaaacaatgtaatagaaaattagaatataaacacaatttataaaaggagaaatctggaatggccaataagcagatgaaaagatctttaaactcactagcatttgaggaaatatcccaaatactgcaatagaaagcatttaacaaataccttgaaactgygatagataccatttcatatctatcagatgtccaaaaatttaaaagtctgaaaatgtcaagaattagaaagatgtgaaacaacaggaattcaaaagctgataaaagtgtgaaaatgtacacttaagagcaatttggcaatatctagcaaaactgcagatgttcccatcttacaacccagcagtgccacttcctgggtacacatcctgaagaaactagcacatgtacttagggaggtacggcactctctggtctgctcctggtta

SEQ ID NO: 86263 - DNA, 546 bp, Homo sapiens
gtttctaacaataaacatttaataattcacacagcttctgtgggtaaggatttcagaaatatcttaactggttggtcctggctcaggggctcccaagaggatgtaaaatgttacccaggactgcagtcatctgaagagttccagggctggaggaccctctaccaaggtggctccttcatacaactggtaaattggagctattagcagagggcctcactttcttgccacatgaatctccatggactgcttgagtcttcccaagacacggcagttggctctctccagagtgtgtgatccaatagaggaaggtggaaatggcaatatcttttatgacagccttagaagtcatacttcctcagaagtcatacaccatcacttccgtcatcttctattgatcacacagaatatataacgtgggaggggacttcacaaagcatgaatagcaataggaaaaggtcaytggggactatctccgagtctgacagttacaatcttgagatgagcttcctaatgaaagattaatgctcaacatacttttagaactat

SEQ ID NO: 86264 - DNA, 500 bp, Homo sapiens
ccctaacaagaaatgtggtccctttgcctgaaaggcaaatggggatatatataagagcatgtctatataagactcgtaatatttatttggaagcgcttgctctgcaagcaaggtggaagagcaacatgaaggaagcgtggtggaggtgagaggactggaggttaagttggtagggagatacaggaaagaagcttatgacacttgagttaaaatgtagcatccttcctatgtgtagggctcataaaaatgtatagtctaagatrgaacacagaatactctatgaatcctgcccacaaggtgttggtaatctagattcactttttttttctgataatgccatccatatgtatggagcgtctactactgtatgccagagtgactctggaatcggtttggttgatctagacaagaccataaggagagtccccttactacctcttctccaggggagggattcaagttgaactagtacttcagagactgtttagtaatatcatgca

SEQ ID NO: 86265 - DNA, 802 bp, Homo sapiens
ggggagccacttttatacttttatggttattatctcccatagaatagttctcagaaatttcatgagtattattgtttaatgatgtttttcagtggcaaggatactctggaggtactcataaagtttctctggggagcttatagtttatgtcagataaataacaaaatcgaagccaaatggagagttgaaattttaaagtaatacgcacggtaaaagcagggctagcactatgtagcctttacagtgattttggtattttttttcctaatggttattamaacaaccccatgaagctagttgacaagtgctgtcttcatttgacttaggggcaaactgaagcccagagcagcaaatgtgcttagacagcaaatggcagggctatgattagaactcagatgttctgcttgttccactacgaggcgtctgcaaacaccagcacgttgaaatagggttttagtaatgatcactggagtatgtcatgaaaagtgaatatttatttgaaactcaaaggcaaaaattctttgataggcatttctaggaagaaaattttagttataatacagaatgtgagaattaaacttgtttcagaagcaggctgggaaaattcctatgatgctcaatcccaggccttcatctaagaatttttattgaacacctaaagtatagaaaatggtgttctaaatgctgtaggaagggcagaggcgagaagaaataaacatgatgtgtaattcagaagggttgtatactaagagaaaaacaaatcttttaaatcaatttatgccaaaatgtaatggcatatatt

SEQ ID NO: 86266 - DNA, 876 bp, Homo sapiens
atttaagaaagaggatagaatttaggaagtttccactaggagtaaaaacaaaggtttgtaggggaaaaggcaatcagtgctgatgggaaacttaatgtcataatgttgggcatgtgtcagcagagagcatgactatgaaggatagcaccagcccacgcagagcagcagacccaacagagaaccaatgatggagctgctgttgtagccagagatgcaatggtatggattccaagtcccatgggctaagaatgagccctatccctggtttcccagatctatgtaagctcagagttttcaaatggaggaacagatcctaaatatgcctgatagcagatttctggtctaacctcgtaactcaagactctgtgctgaatataatctgacttataaaagtaatgtgacatttrtagaaaagaaatatagtatagtaagtccattcccaccatactagtttagcatttggttaatggcattacaaaaaaagattatctattcttcatttatttatatttccaaggccaataaagcacagaattttttactttgggaaaataaagatcagaaataaaatagtaaaactcattgcagagtatgttttataaaactgtttcctaaaacccttgaaatttttagattttgctagttaattcaaaatcagagattagtaatctgttgcgatatccaactatgtttgtgaatgaatgaggtgtgcataccagtgtgaaatttttatcagttatagcttcactggaagaggttttacctctagaggagccaacatattccttttatggatatttcagaaaataaagtcagttatcagcttaatataaacccccttaatagatcataacatcactcacatctattaaagca

SEQ ID NO: 86267 - DNA, 671 bp, Homo sapiens
gtgtctttatggtagaacaatttatattccttggatatataaccagtgatgggactgttgggtcaaatggtaattctgttttaagttctttgagaaatcactacactgctttccacagtggctgaactaatttacattcccatgaacagtgtacaagtgttccctacctctggagccttgccagcgtctgttatttttcgactttttaatcatagccatcttgacttgtgtgagatggtatctcaytgtggttttgatttgcacttctctaatgattagtgaaacatacatagcttactggtacagcagagctctttcctggatatcaagtctctggtctaaatatcctcaaacaaggagtcagaacatcttttcacaataattaacatatgctgccacttgctgatgttgagatcctgagtttagtgcatttttgatataattgaatttagtattcaccacaaccctattagataggtactcactacctgaatctgttctgaatcattctaatctcccacatttccttctcttactactttgtgcatagatagttttgcttataactatgaatacgtggtggggaaaagtgcagatcatgcttgcttagtgatcgctactacttttgcagggctttcttccccaacccctgcttttttcccaccaaaccc

SEQ ID NO: 86268 - DNA, 672 bp, Homo sapiens
tgagctgtagccacaatggaaattgtcatcagttgatagaatctcagaaatgaaaaaaaagtacaaaggaatggggtaaagaaaaagtgctgtaatcactggaagaagaaaatgagccctaacaaggattggcaagagcaaaaattgtaatgggagaaagtcaagtagtcattctttttctcttttaacaaatatgtattaagcacatcctatattccagacactgtacatacattaaggtatggccaaacaccgtggctcatgcctgtaattccagcactttggaaggctgaagtgaacagatcacttgaggccaggagttcgagaccaacctggcaaacatgacaaaaccccatctctactaaaagtccaaaaattagccaggcatggtgstgtacacctgtagtcccagctattcaggaggctagggcacgagaattgcttgaacccagtaggcagaggttgcagtgagcctggatcaccactgcactccagcctgggtgacagcaccagactctgtctcagaaaaaaaaggataataataatacagaagtgaactatacattcatttcgttgtcctcaaaatgagaaaaatttgtccactctcatcacttctattaaatatagtagtggccctagtcagagaaattaaggaagaaaaagaaataaaag

SEQ ID NO: 86269 - DNA, 478 bp, Homo sapiens
cattttggtccagcaagaaagtaactttctaaactaacatgaaaggctactttaacrtggactttaaaaacagcaaatgaatttattgcaaataactgaacacagacccggggatgattccatgtatgaacagatcccatattattatgaagattacattggtacaacacaccttatatactttgaagaatacataaaagagtctgctataaacttttagttctcactacctaaaaacagatagaaataactcatgacctgtctctaagaaagtaatcactgttacaactcatcctgaattccttcaaattttactgaacctccttgatatgcttcccatcatttgtttatcatgctggtttatgctgtgatgttaacttttttcctctttctttctttctttccttccttccttccttccttccttccttccttccttccttctttctttctctttctttttctttctttctttctt

SEQ ID NO: 86270 - DNA, 478 bp, Homo sapiens
cattttggtccagcaagaaagtaactttctaaactaacatgaaaggctactttaacgtggactttaaaaacagcaaatgaatttattgcaaataactgaacacagacccggggatgattccatgtatgaacagatcccatattattatgaagattacattggtacaacacaccttatawactttgaagaatacataaaagagtctgctataaacttttagttctcactacctaaaaacagatagaaataactcatgacctgtctctaagaaagtaatcactgttacaactcatcctgaattccttcaaattttactgaacctccttgatatgcttcccatcatttgtttatcatgctggtttatgctgtgatgttaacttttttcctctttctttctttctttccttccttccttccttccttccttccttccttccttccttctttctttctctttctttttctttctttctttctt

SEQ ID NO: 86271 - DNA, 659 bp, Homo sapiens
acaggagcttttcttctstgggacccccaggctttctcttcctttacccttggcctcttccatgaatctgaatttccagaatgcctccccgttcaccttgaggacttgctgaaggctctctctctctctatatctctctctctctcaatctgggacctctctcttcctgaggtcccagagacagttcaggtcccttgtcacttaccaagacccaggagggtgcagagcaacacaaaggccagcagaaaggtctctggtctcctggagagcctcatggtgtgtgtatcagcagtacctggtccccagcttttataggaagctgaggaggggcgggtctggacccacattcaccctacggggagaaatagctgaggtcagaacccagggcagtcctctgtggcctccgggttgggaaggcagaaccagaatccaaaagtgacctgggcatcttgtgcccagccccccacctccatggagaccccaggagtctgggcttccatccccctcttctattagaacccagaaagtcaccaccctgttttctcaccttcccacggcccattgttgtttgtttgtttgcttgaagaccaagacggagttgggcctcttgattcccagtggctgcaagaactgggattccctctccttctctctcttcc

SEQ ID NO: 86272 - DNA, 672 bp, Homo sapiens
caggctcagtgcctcctcctctggggcctccgctcctcgggccccactgcagaggcaggaagtacygcctgatgctcagcttccgctgggggtgttggcacggcccagcgccctccccactcccagggaccttcccacctcgagcctgtagcactttcacttccccaggtacccagcccctgcccccagcacctgggtgctccctggtccagaacaggctgcagactctgagaggcacaaaaacaagtggggaagggggagacagagaaaagaagacaggctgggcacagtggctcacgcccataatcccagcactttaggaggccaaggcaggaggatcacttgagcccagaaatttgagaccagcctaggcaacacagtgagactcccatctctacaaaaaatgaagaaaattagccaggcatggtggtgtgcacctgtagtcccagctacttgggaggctgaggtgcaaggattgctcgagcctgggaaggttggggctgcagtgagctatgatcgcactactgcattccagcctgggcgaccctgtctcaaaaacaaaaacaaaagagagatgaagagagaaaggaggaaggacccaaagaaggggccagaagcagagagaggccaggcacagtggctcacgcctgtaatcccaacactttgggaggc

SEQ ID NO: 86273 - DNA, 640 bp, Homo sapiens
tccacagtctctcctagctctaggcagccattgggaggaaaagactctggcagttataaccccaacacctcagaagagctcagcttctccagcttctacagttcatttctttggctcaccatggctggtgttctggggatttccaaagtcccctgcctccgcttccagcacccacattcccaaaaagatcaccataagtagggggcttaggacagggaagccagagaaggacttcctgcagaagaacagtgatgtgaagattttgagtgcgtctggggagattctaactctgaaggactttagaataagataggggatgggagtcaagagaagaattctatttccagtttgggttcttaagacaagatgaaatttcgaaggaatgtgaggtcctaaggatgttggcagtcaggaaggagagaaaaggaagaaacaatgataagtcacctaccatagtcaagaagaagcaatttttamaaaggtggggggggatggaaatgggaggagaataaggtaaagggcaagatggacagagtaaaaggtgaagttggcacgcgcacacacacacacacacacacgcacaaaacatatgggggactgccaggtcttgatctctccacttcactaaactacaactggt

SEQ ID NO: 86274 - DNA, 735 bp, Homo sapiens
tctttccaaaagcaaagaatattctgcaatctagccaccaccttcctgccttcagtactgaggacatccccgccttctcagagctgttcttcttccatctagcgcccatcttctcattgggacctgctgccatagtggcccccacgcccttcagcaacctatcccttggcttacctggggatgactggtcactggtcagcacgagggtggcaggggtggggcggcgcctccgaatctgagggaaggtgggaaatggggaagaggtcaagtacacgtggaagcatcaaagccccacccaaaaccactcagtaacataatccaggctagcctacttaacacacctcaaaaaatgccaygttaatgcagctggaggccattatcctaagcaaacttatgcagaaacagaaaaccaaatactgcgtgttctcacttataagtgggagctaaacattgagtactcatggacataaagataggaacaatagacactggggaataaaagagagggagggaggagggcaagggctgaaaaactacctattgggtactatgttcactctctgggtcaatcatatcccagacttcagcaccatgtaataaacctttgtaacaaacctgcacatgtacccccctgaatctaaaataaaagttgaaaaaaaaatgccatgttacattggtgaaccagggtgaacatccctgggctcctccccctcccctggggagagctaatcctaa

SEQ ID NO: 86275 - DNA, 735 bp, Homo sapiens
tctttccaaaagcaaagaatattctgcaatctagccaccaccttcctgccttcagtactgaggacatccccgccttctcagagctgttcttcttccatctagcgcccatcttctcattgggacctgctgccatagtggcccccacgcccttcagcaacctatcccttggcttacctggggatgactggtcactggtcagcacgagggtggcaggggtggggcggcgcctccgaatctgagggaaggtgggaaatggggaagaggtcaagtacacgtggaagcatcaaagccccacccaaaaccactcagtaacataatccaggctagcctacttaacacacctcaaaaaatgccatgttaatgcagctggaggccattatcctaagcaaacttatgcagaaacagaaaaccaaatactgcgtgttctcacttataagtgggagctaaacattgagtactcatggacataaagataggaacaatagacactggggaataaaagasagggagggaggagggcaagggctgaaaaactacctattgggtactatgttcactctctgggtcaatcatatcccagacttcagcaccatgtaataaacctttgtaacaaacctgcacatgtacccccctgaatctaaaataaaagttgaaaaaaaaatgccatgttacattggtgaaccagggtgaacatccctgggctcctccccctcccctggggagagctaatcctaa

SEQ ID NO: 86276 - DNA, 681 bp, Homo sapiens
ggctttttatccagagtcaaaaacaccaggcctagtctccctgaagaaagtctggatgtcctgattagaaattaaaagggtagaagggggggaataggatgtgttgagtagaagaatctagatagatagttagataaatacatacaagtatatatgccatgtttccatttccaagcagtacccagtcctaagataatcatgtctatttcctatttccagacttagcaaccccttcccaccttgaccaaaggggcagggggatctttatttccacttaaaagggggaacatctcctttctcacctattcagaaaccatcccattgagagggttgggaaactcccacctcttacccagcaaagccctaaatccttttatttcccttcatctgatagtcaaagcctccccaatattcaaaaaggcaaaatccagtaggccatcaacatagatcaagttgggatctaccttgatttcaaggtctttctctgctttaaggacgtragactgggaatctattcctgccaattaataatccggagattgtacttttttgggtaagttatattacatgtagctagctttattttttacttgtaaatttattgtacaaagctagcattcttaaggaccagactgctgaagtgagtgaagaccagaatgatctaatcaataagaataggga

SEQ ID NO: 86277 - DNA, 1485 bp, Homo sapiens
  misc_feature (1)...(1485): n = A,T,C or G
catagtgcctagcataaggcacttagaaaattttcatgtttattaaattcttactctacattatctttatctgacttcccctggctacctccagatcccaaaacagggaaggacactcaacctcagccatgcaggtgaagctcagggactgaaatgagcagtattgggtaaagaggaagtgatgcaggtgttgttttaacattagcttgggcttttattttgatatcattctttacaattggtcatagcttttggtccagttcctcccttacctgcaaacctttaaatgaaatgccaaggcagggtggtgacaagagtctgggtattggttttaatgcactggtgtgaaccttcagcctctttcctccttcatataaagtaggaagataggaagtgaaatgacyaccaacatagcaaattaatgcagaagtttgtatacgaagctcactatgtctgttaaaaagaaaaaaggttacctaccccaattatgtagctttgggcaggtttcccaactttcctccacaacaccagtttcctccacaacaaagtgggggtcagagtgatatctacctcatgaagctgtggtgaggataaactataattgaatgcgaagcacttagaacaatgcgtggtatacagtaagcacgcaatgaatgcttcattttagttaattaattaaaaatgttttgcttatacatgtgaagaatatccctggaaagtaatacaagttactggatacagtgtgagtgcctctgtaaaccggaatgggggtctgagagttggagggggaggaatactcactacttagtggagatccttttgcactgctaagatttttaccccatgcatacattccttttccacaaaaatgacaaaaactattctgagtagtgccaaccccccgttcatctacatatttaccatattacgttcaccagtcctccctgtctctgttttttggggaagactagaacattcctcttcactcttaaatttatcctcaagcgggatcagcaaacgatgactgacggccccaatctggtctatggtctctttttgtgtgacctctaatttacagttaaaagtttaaaggtgtaaaaaaacagttttcacacctttaaaggactatataaataaaaagaacatgcaacagatatttaatatccagtcctttacagaaaaaagcttctctagcgcacatatagtttaaaaagctctcatgttaaccacttagatggcttggtcagagctgtgggacagtgacttctggggacccaacacctagtaggtgttcaattaagattatgatggagaggctaacaagcaaaaaaatttcttcctgtggctcttcttagaacctggaagctgggaggggatgtgttgccttgtcctggtccccagtctattttagtagtanaaggtcttcctttgtttgagtaaacactctntgtctaagcagaagaaggtctggtgctgctgtttata

SEQ ID NO: 86278 - DNA, 1485 bp, Homo sapiens
  misc_feature (1)...(1485): n = A,T,C or G
catagtgcctagcataaggcacttagaaaattttcatgtttattaaattcttactctacattatctttatctgacttcccctggctacctccagatcccaaaacagggaaggacactcaacctcagccatgcaggtgaagctcagggactgaaatgagcagtattgggtaaagaggaagtgatgcaggtgttgttttaacattagcttgggcttttattttgatatcattctttacaattggtcatagcttttggtccagttcctcccttacctgcaaacctttaaatgaaatgccaaggcagggtggtgacaagagtctgggtattggttttaatgcactggtgtgaaccttcagcctctttcctccttcatataaagtaggaagataggaagtgaaatgactaccaacatagcaaattaatgcagaagtttgtatacgaagctcactatgtctgttaaaaagaaaaaaggttacctaccccaattatgtagctttgggcaggtttcccaactttcctccacaacaccagtttcctccacaacaaagtgggggtcagagtgatatctacctcatgaarctgtggtgaggataaactataattgaatgcgaagcacttagaacaatgcgtggtatacagtaagcacgcaatgaatgcttcattttagttaattaattaaaaatgttttgcttatacatgtgaagaatatccctggaaagtaatacaagttactggatacagtgtgagtgcctctgtaaaccggaatgggggtctgagagttggagggggaggaatactcactacttagtggagatccttttgcactgctaagatttttaccccatgcatacattccttttccacaaaaatgacaaaaactattctgagtagtgccaaccccccgttcatctacatatttaccatattacgttcaccagtcctccctgtctctgttttttggggaagactagaacattcctcttcactcttaaatttatcctcaagcgggatcagcaaacgatgactgacggccccaatctggtctatggtctctttttgtgtgacctctaatttacagttaaaagtttaaaggtgtaaaaaaacagttttcacacctttaaaggactatataaataaaaagaacatgcaacagatatttaatatccagtcctttacagaaaaaagcttctctagcgcacatatagtttaaaaagctctcatgttaaccacttagatggcttggtcagagctgtgggacagtgacttctggggacccaacacctagtaggtgttcaattaagattatgatggagaggctaacaagcaaaaaaatttcttcctgtggctcttcttagaacctggaagctgggaggggatgtgttgccttgtcctggtccccagtctattttagtagtanaaggtcttcctttgtttgagtaaacactctntgtctaagcagaagaaggtctggtgctgctgtttata

SEQ ID NO: 86279 - DNA, 642 bp, Homo sapiens
tgtgagcccaggagtttgaggccagcctaaagaaacatagtgaaaccgcatttccaaaaaaacaaacaaamaaaaacaaatcattgcctgaaaaaccatcagaagcaagcctttggagaacgagtacaataagctgtacacctttcctgttactagcctgtctgatgcatgggatggttcagtacatcgtaatcagttcctaattaaaagtgtcatttttttttctgttgttcttccatgctcatgtgtgtacagggattctacattcaatgcagtactaaaatctggaagtaaatttggaagtaaattcctattttggttgctgggttggtttttatttttgcatggcagaagccagaaggggaaaggggaaagaggaaagagaaataagttctgacataaggtgacttttaaaaatactcatcagcttcttgctagcatatttactttcattctgaaatttaggaggtcttcttaaaatttccttatagaaatccacttattcactttaagtagttccatagttcaggtgtatatacataaatccaaataaccacagaaagattcacagtagtctagaaatcagttcaccttcaccaataaacatcttacttttcatacatcaaatagcctttttttaaa

SEQ ID NO: 86280 - DNA, 560 bp, Homo sapiens
atcattatgtgatactcatagaatgctaaattagtatcttagcccattygagctgctataacaaaacaacacaaactgggtggcttataaacaacagaaatttatttcttactgttctggaggccgagctgtccaaggtcaaactgccagcagatttggtgtctggttgtctggtgaggacccacactctctttcataaatggcaccttctagatgcgttctcacatggaggatgggaagaaccctggtatctgcagcccctataagggcactaattccattatgaggaccccactctcatgatctaatcacttcccaaaggccccaccaactagtgccatcacactgaagattaggtttcaacacaggagtttttgggaagcacaaatattcaaagcagttagatgaagtgatttacctgaaagaaataataaagaagagaagctgaccacttattcctatcatctcaaaaacaaaatgacacgctttttattttgaagtgaaagaattggatggatcaaactagattggcatctgaacgtgtttccctcaaatggccc

SEQ ID NO: 86281 - DNA, 560 bp, Homo sapiens
atcattatgtgatactcatagaatgctaaattagtatcttagcccattcgagctgctataacaaaacaacacaaactgggtggcttataaacaacagaaatttatttcttactgttctggaggccgagctgtccaaggtcaaactgccagcagatttggtgtctggttgtctggtgaggacccacactctctttcataaatggcaccttctagatgcgttctcacatggaggatgggaagaaccctggtatctgcagcccctataagggcactaattccattatgaggaccccactctcatgatctaatcacttcccaaaggccccaccaactagtgccatcacactgaagattaggtttcaacacaggagtttttgggaagcacaaatattcaaagcagttagatgaagtgatttacctgaaagaaataataaagaagagaagctgaccacttattcctatcatctcaaaaacaaaatgacaygctttttattttgaagtgaaagaattggatggatcaaactagattggcatctgaacgtgtttccctcaaatggccc

SEQ ID NO: 86282 - DNA, 1240 bp, Homo sapiens
tgtgttaattcattttttaatccctcatttaatcctcacaacaatcctacaaggtaggtactaacattatccccagttgacaaaggaggaaactgaggcatggagaggttgaatgaattgaatgaatgaacacaggaatgaatgaatgactgttgacctgcctcagttaaaatcccaggcattccatttctagaggggtgaacctgggcagccccttcacctctctgatcttcatttccttgtctagaaaatgagaaataaatcatctgtacctccccaggtggtaccaaagaggaagtgagttcatgtgtgttaagcacctggctcaggggcaaatgggcaagtggaggccaatccatctgatatgaaaatcccattactgctkggctggctgggtgaccttgggcaagtcacgtaacttctctgatcctcatttcctcatcagtaaaatggggatgcaagtatccaagctggcaaggaggaagcttcaaatcacacttgcaaagcccctcactcagctagtgactgccttaaagaaagccttgtactgacaagtggcccctacccagccaggactctgttccaggaaagctaaagagcccagactggctcctccttctcaaggctaatccaacatatgcctgcaacaccaaccttgtgagctgtcagacaggctgggcagaacccagtgggtgcactctgcttcccctctgccaatgaataaatcattacaggagcgttatgcatcccacccgcatccataaggatctgaattatatataacaaggcagcaaaagcaatttattccaggcacgtgcaagtcataaaataggagttcttaggtgcctgagacaattttcagatattgcagtttttatcaaagcaataaggaccaccaacggagcaccctgccccacgggtgtggggacaccttagtcgggtttatttatcatcagagaagaaaaatctaactttccctcccagctctgccacctcccccacccaccgccctgatgcagctgcttctcagcttaggagctccaggatgtggggctgagctgccaaaagcatccacctttctagtgggaaccatctgctgagagtctgggggtgggaccaggtgtgctccaaatctctggagggagagagaagagagtttgcaaggagagaaaataatatggcagcaagagctctaaatcagagctcaggagtcccacctctgctgctgactacaggtgga

SEQ ID NO: 86283 - DNA, 1240 bp, Homo sapiens
tgtgttaattcattttttaatccctcatttaatcctcacaacaatcctacaaggtaggtactaacattatccccagttgacaaaggaggaaactgaggcatggagaggttgaatgaattgaatgaatgaacacaggaatgaatgaatgactgttgacctgcctcagttaaaatcccaggcattccatttctagaggggtgaacctgggcagccccttcacctctctgatcttcatttccttgtctagaaaatgagaaataaatcatctgtacctccccaggtggtaccaaagaggaagtgagttcatgtgtgttaagcacctggctcaggggcaaatgggcaagtggaggccaatccatctgatatgaaaatcccattactgcttggctggctgggtgaccttgggcaagtcacgtaacttctctgatcctcatttcctcatcagtaaaatggggatgcaagtatccaagctggcaaggaggaagcttcaaatcacacttgcaaagcccctcactcagctagtgactgccttaaagaaagccttgtactgacaagtggcccctacccagccaggactctgttccaggaaagctaaagagcccagactggctcctccttctcaaggctaatccaacatatgcctgcaacaccaaccttgygagctgtcagacaggctgggcagaacccagtgggtgcactctgcttcccctctgccaatgaataaatcattacaggagcgttatgcatcccacccgcatccataaggatctgaattatatataacaaggcagcaaaagcaatttattccaggcacgtgcaagtcataaaataggagttcttaggtgcctgagacaattttcagatattgcagtttttatcaaagcaataaggaccaccaacggagcaccctgccccacgggtgtggggacaccttagtcgggtttatttatcatcagagaagaaaaatctaactttccctcccagctctgccacctcccccacccaccgccctgatgcagctgcttctcagcttaggagctccaggatgtggggctgagctgccaaaagcatccacctttctagtgggaaccatctgctgagagtctgggggtgggaccaggtgtgctccaaatctctggagggagagagaagagagtttgcaaggagagaaaataatatggcagcaagagctctaaatcagagctcaggagtcccacctctgctgctgactacaggtgga

SEQ ID NO: 86284 - DNA, 1120 bp, Homo sapiens
ggatgggcatccatgtgcgttgggtgctgtgggagcccagagctggggccgaacgaaggcttcacagaggagtcgtgtttcaggatgggagggactggcaaaggcctggaggtgggaactcacttgatgtgttgcaaaagtagcaaggaattctgaacttagggtctggggtgccccttcacacagggagagtctggcactcactgtgtcccagtggccattaatataatcatctgtgtttatttaacaaacatgcacagarcacccaacagaggctgaggcgcccttgcgcactttccaatattgccttgtccagtcctcaagtgaagcctgcggggcaggggccgcaggggctgctgcctgctgatgcccctgaggtggggaggagctgggagggagggagtcagaccagtttcctcttggacaatcacatgttagttcagatgatattagccatgggcccaggacccaggcccgaggggtgtccacctggtctgatcagaggccagtggggagctcagggaacagttttacctgccagcgagtgactgcccctgagccaggctgggaggccgaggaggcagcagccctgaggggcctgagagaggggacttacacaggtggtggacacatcagaggtcttgcagagaaggggcctggagttcccaggtaagtgctatcgccacaggcttggggagtcaccagggccttggagaacctgggcgtcccaggatcagatctgagctgatgtcatgaggctgatcatctgctggactgagctcctcgccaggcccctgtgtgtgtatatgtggatcctgcaagaacgtggccagacagagccagctagaggagcctgggaggtggaaccgggtttgttctgagatggtggcagtgaggagcaggatatctctgtgagaggaaggagcagttaggtggtgccttgcccaggctcagtcctggcacagttaccctgaggaagatcctggtgctggagttgtacatgctgccctctgagctcacatcctggcaggtaaaattttccctcactgggcacggagggagaggcctgtgtttccaggctccttgaaggaactcccattaggctgcacaaacatgagcc

SEQ ID NO: 86285 - DNA, 1120 bp, Homo sapiens
ggatgggcatccatgtgcgttgggtgctgtgggagcccagagctggggccgaacgaaggcttcacagaggagtcgtgtttcaggatgggagggactggcaaaggcctggaggtgggaactcacttgatgtgttgcaaaagtagcaaggaattctgaacttagggtctggggtgccccttcacacagggagagtctggcactcactgtgtcccagtggccattaatataatcatctgtgtttatttaacaaacatgcacagaacacccaacagaggctgaggygcccttgcgcactttccaatattgccttgtccagtcctcaagtgaagcctgcggggcaggggccgcaggggctgctgcctgctgatgcccctgaggtggggaggagctgggagggagggagtcagaccagtttcctcttggacaatcacatgttagttcagatgatattagccatgggcccaggacccaggcccgaggggtgtccacctggtctgatcagaggccagtggggagctcagggaacagttttacctgccagcgagtgactgcccctgagccaggctgggaggccgaggaggcagcagccctgaggggcctgagagaggggacttacacaggtggtggacacatcagaggtcttgcagagaaggggcctggagttcccaggtaagtgctatcgccacaggcttggggagtcaccagggccttggagaacctgggcgtcccaggatcagatctgagctgatgtcatgaggctgatcatctgctggactgagctcctcgccaggcccctgtgtgtgtatatgtggatcctgcaagaacgtggccagacagagccagctagaggagcctgggaggtggaaccgggtttgttctgagatggtggcagtgaggagcaggatatctctgtgagaggaaggagcagttaggtggtgccttgcccaggctcagtcctggcacagttaccctgaggaagatcctggtgctggagttgtacatgctgccctctgagctcacatcctggcaggtaaaattttccctcactgggcacggagggagaggcctgtgtttccaggctccttgaaggaactcccattaggctgcacaaacatgagcc

SEQ ID NO: 86286 - DNA, 828 bp, Homo sapiens
ttccaggcacatagccatataacaactgatgttacctggaaagttaaacggctgggtctctacaatgctgagtggatgttacctagcagaagtgtctttggttttcaaacttccacaagacacagtgactatcagtcatttttcagagctcagctggtgggtcacttcctcctggaagcgctcctgagcccttcgtgctgggttaggttttcagccctgtcccaatacttctcacattgcatcactttgagcctgtgttcctgtctgcctcccctccggactgcaagctctttgggcacaaggtctcttatccaccagcactaactcagtgcctaacagagaacagatttgcaataccttttgttttcctcttttgagttgactttgaaaaattttactttgtcccagatgagtgatgcaaaatagtgtattgagactttgtgcagttttatctctgcatctaatgtgaacgtggtggttcgtgaatgtttggcagctcctactgcagcccagacacttcaggatgacctctctgtaatggtgagagaaggaaaatagaggagaaagatgaagggaagagcaaagagcaacataaggagtggtacagagagctggctccagggccaggaaggggtgggcatgtgaggctggcatcggcctggctgcagacacagcagcccctccctagtgggactgcaggtctgtgtgcaaagtaccagaagctgtggscttggctcccaaagggacaaattccagcttgctccaggaatacttcttaccctgtctttgagagtaattggcacttatttttgaaataatgaaagcaaa

SEQ ID NO: 86287 - DNA, 630 bp, Homo sapiens
attgttaaaattttgccatgaatacagcagcctcactgaattctcttagtagttctaatagcttgccatttgattctaacaggttttctatgtaaaagatggtgtcatcttcaaacaatgatagtttcatttcttctctttcacctcttaccttccttgtgtttctttagcattgggcaggtccttcagggatatgtgaaacagtggcagtaacaaccagacatcctggcctctttgtttttttttccatgatgaagtctcactccgttgcccaggctggagtgcagtggcacgatctcggctcactgcagcctccacctcccggsttcaagtgattctcctgcctcaaccccccaagtacttgggattacaggtacctgccactacacccgactaatttttgtacttttagtagagacagggtttcaccatgttggccaggctggttgagaattcctgacctccagtgatccacctgcctcgtcctctctaagttcttggattacaagtgtgagccaccacgcctgccattgtggcctctttattggtcttcttgagaatgcacctgaagtgtcttaattacacataatgtttgctgtagagcaatgattctcaaaccttttggtctca

SEQ ID NO: 86288 - DNA, 1406 bp, Homo sapiens
  misc_feature (1)...(1406): n = A,T,C or G
cttttcaaatacagaaggattgttttggaaagagacagcttgttcccttcagctgtagaagctacatacaattaggaataatggtagagctctaagtgatcaggcttcagcatagtattaaaaagaaccttataatagtgagccctttggaggactggaattggcagcttcatgagagtgagtgctttctttccatggctgaaaatgttcagggatctagggcaaaactaatttctgaattaggtggacatgttcactgaattacctatgaatctttttccatcttgagaattctaggaagtagggctcatgtgcgatcttgaaagctgggtatgtttggataagaaaatctggaagggaagcagtcatttcagggagagtaaacataaagtataaagttgaagttggtttaacactgtcattcagcagcttctctgagaattggcattgcttatgctgtttttattttccattctcatttctgttaaattctttttttcttttcagtagaacttactaggtgtgtccccctgcacacccccgcattatattataacttccaggacattctctttttaccgagattaaggcaaaatgacctactcagagtttctttgtttcaagatcacaagtagaagagacactatgatattatcattcctttccatctcttggatcctgtaccatggttttatctttttcttgaatcttcagtccctttcgttctagactctacttttagctactacctacaaatctgttgaagagtctccccaataataacgtcaagagaggttttctccttttccaccagacttcttgagtaattgaaatgttttatcctcattttcatatcacccacccgttttctcaagtctttgttttctagcatctaaccacccacagcactttacagaaattgtgtgacctcccaacacacaattcttcaattcctttctgttgcctgccaagttaagttcaggttctttggtttgaaattcaaagtgttttgtaacttgggcccaaattaagattccagctttatctttcattattccgttgcttgtatcctgtttcaaccaaagactaaatttgtattcttctagtatattctgcatttttttcttctctatatatttgcttattgctaccctacctgctaccctttcccttttccttgagataaaagcctagtcagcatcagtactactttccttagagcgttttcttcagttccctttaattcaatgtgatccctctgtcctgtaaagttctaacaaagcagtttgcttwtgtttcccttannnnnnnnnnnnnnnnnnnnnnnnnnnnnnnnnnnnnnnnnnnnnnnnnnnnnnnnnnnnnnnnnnnnnnnnnnnnnnnnnnnnnnnnnnnnnnnnnnnncc

SEQ ID NO: 86289 - DNA, 678 bp, Homo sapiens
aactggctcctgctgctcttctcagtcaggtcacaagtatctttgtcacagaagtattaataggcagtgttttaactgacttcagtaacatgacttgaacatagtggattctcaatgaatgacttgtgggtgtaactcaggctaaattgcaaaaaattgaggcacaatagaaggacagagtagggattttttttttttctccaagtcatgcccttccttttgtaattcaatcatttcctgaatacctactaagtgccatctaccataaagcagctcactgttagaygtggcacacattaggaagtgcagagcctctggagcaagactgcttaggtctgaagctctgcttgccagttgccagttgtgtgacctccagcaagcaaactccttcacactttgtgcctctgtttcactgtcagtataaataaatatattaaatagaacctaccctgtagggttcttatgaggaataacttggaaagtaaatacatgtagtttgtgtagactagtacctagtatgcagtaaatgttctgtaaatgttattattctgtctacttgtaactcggccttgagtaagagagttccatcttcgcgtcccagtccccttctccagactggaatccaaagcccagggtctatctcccctctgctctcctttaccaagacccaattcttct

SEQ ID NO: 86290 - DNA, 650 bp, Homo sapiens
atcaaagttcaggtggcctttacacatggaattttatcctgttgctgactgttgataaagatcaccccaccatgttttctgtctgcacccaagggcaacgtcttactttggcaggtaactcatgtccttggcagttcatggttccatatggtttagtctatattacattaccttttgatattgctacaagcacccagttagcatattatcttaaatcagtaccctcgctccatatttctctcggccaggcaggtaaggaaggaaggaagagatctcagggtaatccatgctgcttctgctactgcctgtgattcagaactttgatcagtttgtcagaagccagtttttcccatgttttatttttctttactgaggtgaaattaacttaacagtaataatttttgtgtgaataattctttgacgtttagtacattcacaccrttgtgtaaccactccctctataaaagtccaaaattattttcattgtctccagaggaaatcccatactcattaaattgtttctccctatttcccctctcctagcccctggaagccatcagtctgaattatgtccctgtggattgttacctgtttctgatattttatacaattggagccattcaatatgtgggtgtaaatttctccttcat

SEQ ID NO: 86291 - DNA, 650 bp, Homo sapiens
atcaaagttcaggtggcctttacacatggaattttatcctgttgctgactgttgataaagatcaccccaccatgttttctgtctgcacccaagggcaacgtcttactttggcaggtaactcatgtccttggcagttcatggttccatatggtttagtctatattacattaccttttgatattgctacaagcacccagttagcatattatcttaaatcagtaccctcgctccatatttctctcggccaggcaggtaaggaaggaaggaagagatctcagggtaatccatgctgcttctgctactgcctgtgattcagaactttgatcagtttgtcagaagccagtttttcccatgttttatttttctttactgaggtgaaattaacttaacagtaataatttttgtgtgaataattctttgacgtttagtacattcacaccgttgtgtaaccactccctctataaaagtccaaaattattttcattgtctccagaggaaatcccatactcattaaattgtttctccctatttcccctctcctagcccctggaagccatcagtctgaattatgtccctgtggattgttacctgtttctgatattttatacaattggarccattcaatatgtgggtgtaaatttctccttcat

SEQ ID NO: 86292 - DNA, 1038 bp, Homo sapiens
  misc_feature (1)...(1038): n = A,T,C or G
tggccgcattctctccgtggctgacacacgaggctcggaactgcctgggctctggaatcctggggcaggtggctgccagggtcaggcacagcttggcctcgctggtgccaggactcctgtggtgggagaatctgcctgcggtctcatcctcttctccctctggggcttctagcccacttcctttttctatcacacatctttgcctctggcccatctgaaaagatggcttgtgcttaccattttcaatgttttcacatctgcaatcacacttatcccccctacaatgactgtggagcaagcaggcattccttctatccgttccacaaacagtgagcactattgattctgtcagacccttttctaacggctgaagatgtaaaggccaagccctggctgtcctgacaagttgggtggaggcaggccagaggctaattccacgtgacagagaggaagctgcgaggggcggtgctggctgtctctgccagtgccctcccccgtagctccttgctggttcccaggaagccaggctgcctctttagtctctgaagaccccactgtttgggttggggccatgagaactggactttttttgggttagttttaggggtgaaggcagctgaaacggtagggggagatacacctccattcttggtaggagagtaccccaagagtgggtggccctgtccacacaatttcacrctctctaccctatgggtttttatgggctggatccaggttcaggacagcaggctgggagtgtgtctaggtgagtgctggaggccagcactctggaagggagcttgaccttggttgcagccactagtagtgagagggttaactgttggccaccagcccctggaaccgagcccctcctcctcccagagtcagggtctgcctttggccctgggaggaaggctgtggcaggtgaggcatcctgnnnnnnnnnnnnnnnnnnnnnnnnnnnnnnnnnnnnnnnnnnnnnnnnnnnnnnnnnnnnnnnnnnnnnnnnnnnnnnnnnnnnnnnnnnnnnnnnnnnna

SEQ ID NO: 86293 - DNA, 1088 bp, Homo sapiens
gtgtgcktgtgtgcacactcacgttgggtggtgtttggtaggtttccctccaggtctggtagggactgggctgttgcgtgattctgcgtggatcgggggtaagagagctcacctgtgtcccagccctctgatggtggtgagaccaggggaaaggccagctcagagggtggtcacagcatgtgtcctctgacgtatgcccccaaagctctccagccagactgaggtcacagatgtgggagagtccctgatgagcccgctgacacgtgtgcgcccctttgcaccccatgcagaggtgctctcctcctttctcagccatggccccccatccctgacctcagcttgggaagcagctcctgctgggagcatggcctcagcccccagcatctcctggggcccccatggctggggcaggggaaagagagccctcaaaggcctctttctggtctgtctgggggttcccattcccacacatgtgcccagagtagggggcatggaggagatggtccctgtcctactgcaggacactgagggcttggctgcctgccaccgccatctggagcccaccacagctcttctccctgttctctgggcctgagcctggggccacccccaagtgccgacttgtttctcccagagccccaggtgctgccccttctctcctgttcctcgtccgtttactgccgcagcccctcctggttcttctggtgctggggtggagcaggctctgtgctcccaccactgtaccccgaatccctcctgcaggctcattgccacttttgtagagaatgttctctatcagtatcgtacctgtcttgtcctttaatgctttggggatagagtgaagagtggaagggtgggggtgggggcgggagggggtctgctctgcgcttgtgaggactgggtcctattctctggagtgtcttcgagaccccatgctgtgcatctttgcagggatccctaggcctttacctgctctcctagctcagcccagaattaggagctggtggagaggcagggctgagaactagggcaggagagtccccctgagcaaggaggatggctgagcctccaggcttgttgccagggcc

SEQ ID NO: 86294 - DNA, 1088 bp, Homo sapiens
gtgtgcgtgtgtgcacactcacgttgggtggtgtttggtaggtttccctccaggtctggtagggactgggctgttgcgtgattctgcgtggatcgggggtaagagagctcacctgtgtcccagccctctgatggtggtgagaccaggggaaaggccagctcagagggtggtcacagcatgtgtcctctgacgtatgcccccaaagctctccagccagactgaggtcacagatgtgggagagtccctgatgagcccgctgacacgtgtgcgcccctttgcaccccatgcagaggtgctctcctcctttctcagccatggccccccatccctgacctcagcttgggaagcagctcctgctgggagcatggcctcagcccccagcatctcctggggcccccatggctggggcaggggaaagagagccctcaaaggcctctttctggtctgtctgggggttcccattcccacacatgtgcccagagtagggggcatggaggagatggtccctgtcctactgcaggacactgagggcttggctgcctgccaccgccatctggagcccaccacagctcttctccctgttctctgggcctgagcctggggccacccccaagtgccgacttgtttctcccagagccccaggtgctgccccttctctcctgttcctcgtccgtttactgccgcagcccctcctggttcttctggtgctggggtgsagcaggctctgtgctcccaccactgtaccccgaatccctcctgcaggctcattgccacttttgtagagaatgttctctatcagtatcgtacctgtcttgtcctttaatgctttggggatagagtgaagagtggaagggtgggggtgggggcgggagggggtctgctctgcgcttgtgaggactgggtcctattctctggagtgtcttcgagaccccatgctgtgcatctttgcagggatccctaggcctttacctgctctcctagctcagcccagaattaggagctggtggagaggcagggctgagaactagggcaggagagtccccctgagcaaggaggatggctgagcctccaggcttgttgccagggcc

SEQ ID NO: 86295 - DNA, 1082 bp, Homo sapiens
ttcaatgtattagtataattagcagtgatgagaaaactgtttggaactgaattacctctcacgagttcatttgagctatatgaaattacaccatgcaagaaggaaaattatggagccatccagagagagttcatgcctgatttgatcatagccactaattggatgatcattttcgtaaagcttttcaaatggttgacagtttctgcctctcattttttttttttaatggacgagctctttatttcttgtcctaagcaaccaaacataggtttgttagagatttgggtgtttctacagggaccttacaggtgtaattgtcacaatctgagcaacctttgtcccttaattagctgcttttggggaacccctaatgagagttgctgttcttgttaacaatcttagagaatacctgatgagtgaagctctccaagcctgacgcatgtcagcagccaccatatgacagcaatttaatgaagttaaaatctgccccgattgggatggatagaagagcacttgtgttgtactgcttttgattcctccgtgtgtgtgtgtgtgtgtgtgtgtgtgtgtaatatgaagtaggtgttctagtaaaggacaacaggaaagtgaagggtgagggtggagaaaagaagctttatgaaccctcttcacaagacaaccaatagccaatatcagaagaaaattgaaataatgaaattagcttcgtataaattgctttatgtgcactgyaggatatagcaaagtcttacaattcaggtgattagtaaatatactgttagctccttaactttttacttttcttccataactccaacttgaatcatttccatttcaggcatacaagattttcaaacatgcttcaattgtgtgaagttaaaattattatttaaaaaacatacttttctcatatgtgtgacctaataaatcaaacagtcattatgaaaatatgtcactcaatttgttgctggaaaggaagacaacattatgataatgattttcaatctgatggacaagttctcatattactaggaagagccagatgagatacaatgcagcactggcgttttgtgtgcctgtgg

SEQ ID NO: 86296 - DNA, 1302 bp, Homo sapiens
atttaagtgatgaacagaatcataatatgatgaagacattttatgaatacatgcaactggtragacatgaaatgtttaggcccccaaaaaataaagagaaaaaattcaatctatgcattgtctaaataagtaatgataaactcccactgctacacgaacaacagaaacaacaaaactctaatcagaagaataatgtcttgggaaataaaataagcattatgagcatgtctctgaaatacacagacatactgactctctacactgtacatcagtttttaggaaaacaaagaaagtaagaggacatatccatctccccagctgcctcccaagggctcacaatccaagaaattcttcagtaatatctcattagtgataaagtttgcatcaaaactcacatggtatcatacacattgtattacatttttcaaagaacataacactgtgtattggaaaataagtggaaattacttgggattggctataatatatacccttgaactgggcaatacttaagtgattgtcagatggcaaaattgagactaaaaagcttactcacttgaaaatgactcttgttggtactccacaaaatagaactttataaatgtagcgctacgtatttgtctaagaggtaaggcatcccatggagcatgctttattagtttggtcattaaccttgctcgggcctttcaaaaattttagttataaattataaaacataaggaaacatctaaagtttataatacagagttttactttactatcaaagaccataaaaaatagaaactattcatcttcatggagggccaaaaatacccaaatatgacaaaaatatccagaaggatgttaccttcccagctgatattctaagagaataaatgcttaaagtattggctatggatagctgttctttttagacatgttgatcaacttctgtgttgaaatcatatgacatttgctagtttgaagaaaaaataagaaccactattctaatacagtagtattcaactatatttcaaaatagttcaacattttatatcaaatatatatacgtgtgtgtgtgtgtgtgtgtgtgtgcgtgtgtgcacctaaactgggcagaaatgagatcagctttttttgttgaagcctgaactggcagttaaacactaccccaaatcgtgttttctgcttctctccaaatggaactcctggcaatgcctatggcagaagatgaaacacaaagatgagaggcactatccttgtttctctagactcagatacctacacagctatcatatacaccattaacgtcaaattattaaa

SEQ ID NO: 86297 - DNA, 1302 bp, Homo sapiens
atttaagtgatgaacagaatcataatatgatgaagacattttatgaatacatgcaactggtaagacatgaaatgtttaggcccccaaaaaataaagagaaaaaattcaatctatgcattgtctaaataagtaatgataaactcccactgctacacgaacaacagaaacaacaaaactctaatcagaagaataatgtcttgggaaataaaataagcattatgagcatgtctctgaaatacacagacatactgactctctacactgtacatcagtttttaggaaaacaaagaaagtaagaggacatatccatctccccagctgcctcccaagggctcacaatccaagaaattcttcagtaatatctcattagtgataaagtttgcatcaaaactcacatggtatcatacacattgtattacatttttcaaagaacataacactgtgtattggaaaataagtggaaattacttgggattggctataatatatacccttgaactgggcaatacttaagtgattgtcagatggcaaaattgagactaaaaagcttactcacttgaaaatgactcttgttggtactccacaaaatagaactttataaatgtagcgctacgtatttgtctaagaggtaaggcatcccatggagcatgctttattagtttggtcattaaccttgctcgggcctttcaaaaattttagttataaattataaaacataaggaaacatctaaagtttataatacagagttttactttactatcaaagaccataaaaaatagaaactattcatcttcatggagggccaaaaatacccaaatatgacaaaaatatccagaaggatgttaccttcccagctgatattctaagagaataaatgcttaaagtattggctatggatagctgttctttttagacatgttgatcaacttctgtgttgaaatcatatgacatttgctagtttgaagaaaaaataagaaccactattctaatacagtagtattcaactatatttcaaaatagttcaacattttatatcaaatatatatacgtgtgtgtgtgtgtgtgtgtgtgtgcgtgygtgcacctaaactgggcagaaatgagatcagctttttttgttgaagcctgaactggcagttaaacactaccccaaatcgtgttttctgcttctctccaaatggaactcctggcaatgcctatggcagaagatgaaacacaaagatgagaggcactatccttgtttctctagactcagatacctacacagctatcatatacaccattaacgtcaaattattaaa

SEQ ID NO: 86298 - DNA, 1302 bp, Homo sapiens
atttaagtgatgaacagaatcataatatgatgaagacattttatgaatacatgcaactggtaagacatgaaatgtttaggcccccaaaaaataaagagaaaaaattcaatctatgcattgtctaaataagtaatgataaactcccactgctacacgaacaacagaaacaacaaaactctaatcagaagaataatgtcttgggaaataaaataagcattatgagcatgtctctgaaatacacagacatactgactctctacactgtacatcagtttttaggaaaacaaagaaagtaagaggacatatccatctccccagctgcctcccaagggctcacaatccaagaaattcttcagtaatatctcattagtgataaagtttgcatcaaaactcacatggtatcatacacattgtattacatttttcaaagaacataacactgtgtattggaaaataagtggaaattacttgggattggctataatatatacccttgaactgggcaatacttaagtgattgtcagatggcaaaattgagactaaaaagcttactcacttgaaaatgactcttgttggtactccacaaaatagaactttataaatgtagcgctacgtatttgtctaagaggtaaggcatcccatggagcatgctttattagtttggtcattaaccttgctcgggcctttcaaaaattttagttataaattataaaacataaggaaacatctaaagtttataatacagagttttactttactatcaaagaccataaaaaatagaaactattcatcttcatggagggccaaaaatacccaaatatgacaaaaatatccagaaggatgttaccttcccagctgatattctaagagaataaatgcttaaagtattggctatggatagctgttctttttagacatgttgatcaacttctgtgttgaaatcatatgacatttgctagtttgaagaaaaaataagaaccactattctaatacagtagtattcaactatatttcaaaatagttcaacattttatatcaaatatatatacgtgtgtgtgtgtgtgtgtgtgtgtgcgtgtgtgcacctaaactgggcagaaatgagatcagctttttttgttgaagcctgaactggcagttaaacactaccccaaatcgtgttttctgcttctctccaaatggaactcctggcaatgcytatggcagaagatgaaacacaaagatgagaggcactatccttgtttctctagactcagatacctacacagctatcatatacaccattaacgtcaaattattaaa

SEQ ID NO: 86299 - DNA, 1833 bp, Homo sapiens
tgacaatacaaatatttgcaacatctctgtgtctgcttcttcagttttttgtttctgcaaaggacttagaaataagacaacttaattaagttgtcttatttccttgtggatctatttattttttatcgagtgctggccattatgatttaaaatttacctgtagaaacaactttggcttggggtaattaggatgatataaaatttttcccaaagaagctttacatctcttaccagattcccttattcaaattagagcctatgttttttcttacgtcatatatacaacccttagtttgcaaaactcaaagagcagaaggtgcaaaggctgtttacctctgtgtgtgtttgtttaatcctaggaacagcccatcaggcttccagtctataggaactttattaaggtgacatttgtgagccctaatctacaacttaggttgtagtagcaccatgaaactgtgaaagcctttctcagcctttcagctgagtcttctaatttaataaatatccccaaaatttaaaaaaaaaaaagcctcaaatgttaggatcccttctctaaatttctgtcttctgcaagacattgccttgatatctctctgcctctgttcatccttttcagcagacattgttttacatcttacccagcttttctaattgttgccaataaaagcattattcttatttacctggcctactccagctaacattatttaccttcactgatcaaaaaaaccgtacatttaaaattaaggagttactcacatgtatacaaatttaagacttctcaaataagttctattttttcccccaactaaacagtatactaagttgaagaatacagtcatttgaagagatcttcaaaatcaatgtaaagaaatcaaatagcaaatggcagtagattaggttttgggggtatctcttgtttctcaggctagatgataaaaatagtctaagtaagaaaataaagcctggtggttctgcatcccaatgttccatttatccttttggtaagaacattttacatgcttgttgcttttagcatttaagctgtattatggataacttaggatcttgaatgtcttattctctttgtatagttaaaatacatgttcttctatgggcagccagtaagttcatctgaccctttgcaggagtagagacaaagggttactgagctggtggctgtagtttacgtttataatagctgtcagctctccacgtgtcaccctcagtcatcctaaagatgactgcaaaagatctcagtgcaaaaatattatgctttctatgtaaatgtaactttaaaacaagtcccctagccctcaattttaccacattattattccgaaatctcttaatgataaaattccagagccatagctatatcaattctatgtgggaacatttctgttgtccatttatactaaatgcattcagaasagatatctcctgtcattaaatttatgtctgactgaagtggaacttttcatgagaaaaacaaaatttctgcaaatcttgtgaaacacctaaacctggtctggatatagtaaagggaatagcgtaagaaatgtgttgactacagtactccaagatcctatcatctactcctggccccaatgtcaagggatattttcacgtaactttcttttttaaattgcatcataaaaataaacatataagtcatctacaaccctgtagataaaaatttacagacaaggtcatctttgtccaactagtttgtgtccaaggagaaataaaggaaaaagagtttgtagcaatagctgatattagcactgtgctaaacatctcatatatgctatctctaccctggaaacaacc

SEQ ID NO: 86300 - DNA, 821 bp, Homo sapiens
aagagcagaatgacctaaaattttgttatggatcttttaccttttagtgttatgcttgagaaatggctaatatcatttttttagcttattaaaacgtggttgtccatgtctgtttcggttctatcagtttgaaaaaattcaagaccacttactaaatataagaagaaaatacaaaatgtaactagagatagaaatttctagagtagattactttaagtggaaattgttttatacaagcatttggtattacttgagtaatgattctcaatgttctaaatatatatggatggttataaggatatccatcgatgagaaccaattctgccgtactttyatcaaacataggcacagaatgtccaagaatggagtaaatactggccttaggaaatgtcagctatcatgatttggtctcagctcagcagttacaggtaggtaacagtcttcttgattttttttttttactctgtagtaagagtggcaaagattatcctggcatataaattatatgttctttttgttgtaaaattcctagatattacgcaatattttcagttgttgtagttcattttttttccatgggcttttgaacaagcttgctaattttgtaattaaagtaataaaatatctaaatcattgaaactgcatgaagaacacgacagacaatgaaagggtgttatccagacaggagtgctgaaaacacacgaacaaagatgcaccttagctgtctcaaattcaacacaaatttgaaaatacgttatctttcagctgggcacgttggctcacgcctgtaatcccagcacttcgggaggccaaggcaggcg

SEQ ID NO: 86301 - DNA, 821 bp, Homo sapiens
aagagcagaatgacctaaaattttgttatggatcttttaccttttagtgttatgcttgagaaatggctaatatcatttttttagcttattaaaacgtggttgtccatgtctgtttcggttctatcagtttgaaaaaattcaagaccacttactaaatataagaagaaaatacaaaatgtaactagagatagaaatttctagagtagattactttaagtggaaattgttttatacaagcatttggtattacttgagtaatgattctcaatgttctaaatatatatggatggttataaggatatccatcgatgagaaccaattctgccgtactttcatcaaacayaggcacagaatgtccaagaatggagtaaatactggccttaggaaatgtcagctatcatgatttggtctcagctcagcagttacaggtaggtaacagtcttcttgattttttttttttactctgtagtaagagtggcaaagattatcctggcatataaattatatgttctttttgttgtaaaattcctagatattacgcaatattttcagttgttgtagttcattttttttccatgggcttttgaacaagcttgctaattttgtaattaaagtaataaaatatctaaatcattgaaactgcatgaagaacacgacagacaatgaaagggtgttatccagacaggagtgctgaaaacacacgaacaaagatgcaccttagctgtctcaaattcaacacaaatttgaaaatacgttatctttcagctgggcacgttggctcacgcctgtaatcccagcacttcgggaggccaaggcaggcg

SEQ ID NO: 86302 - DNA, 821 bp, Homo sapiens
aagagcagaatgacctaaaattttgttatggatcttttaccttttagtgttatgcttgagaaatggctaatatcatttttttagcttattaaaacgtggttgtccatgtctgtttcggttctatcagtttgaaaaaattcaagaccacttactaaatataagaagaaaatacaaaatgtaactagagatagaaatttctagagtagattactttaagtggaaattgttttatacaagcatttggtattacttgagtaatgattctcaatgttctaaatatatatggatggttataaggatatccatcgatgagaaccaattctgccgtactttcatcaaacataggcacagaatgtccaagaatggagtaaatactggccttaggaaatgtcagctatcatgatttggtctcagctcagcagttacaggtaggtaacagtcttcttgatttttwttttttactctgtagtaagagtggcaaagattatcctggcatataaattatatgttctttttgttgtaaaattcctagatattacgcaatattttcagttgttgtagttcattttttttccatgggcttttgaacaagcttgctaattttgtaattaaagtaataaaatatctaaatcattgaaactgcatgaagaacacgacagacaatgaaagggtgttatccagacaggagtgctgaaaacacacgaacaaagatgcaccttagctgtctcaaattcaacacaaatttgaaaatacgttatctttcagctgggcacgttggctcacgcctgtaatcccagcacttcgggaggccaaggcaggcg

SEQ ID NO: 86303 - DNA, 821 bp, Homo sapiens
aagagcagaatgacctaaaattttgttatggatcttttaccttttagtgttatgcttgagaaatggctaatatcatttttttagcttattaaaacgtggttgtccatgtctgtttcggttctatcagtttgaaaaaattcaagaccacttactaaatataagaagaaaatacaaaatgtaactagagatagaaatttctagagtagattactttaagtggaaattgttttatacaagcatttggtattacttgagtaatgattctcaatgttctaaatatatatggatggttataaggatatccatcgatgagaaccaattctgccgtactttcatcaaacataggcacagaatgtccaagaatggagtaaatactggccttaggaaatgtcagctatcatgatttggtctcagctcagcagttacaggtaggtaacagtcttcttgattttttttttttactctgtagtaagagtggcaaagattaycctggcatataaattatatgttctttttgttgtaaaattcctagatattacgcaatattttcagttgttgtagttcattttttttccatgggcttttgaacaagcttgctaattttgtaattaaagtaataaaatatctaaatcattgaaactgcatgaagaacacgacagacaatgaaagggtgttatccagacaggagtgctgaaaacacacgaacaaagatgcaccttagctgtctcaaattcaacacaaatttgaaaatacgttatctttcagctgggcacgttggctcacgcctgtaatcccagcacttcgggaggccaaggcaggcg

SEQ ID NO: 86304 - DNA, 821 bp, Homo sapiens
aagagcagaatgacctaaaattttgttatggatcttttaccttttagtgttatgcttgagaaatggctaatatcatttttttagcttattaaaacgtggttgtccatgtctgtttcggttctatcagtttgaaaaaattcaagaccacttactaaatataagaagaaaatacaaaatgtaactagagatagaaatttctagagtagattactttaagtggaaattgttttatacaagcatttggtattacttgagtaatgattctcaatgttctaaatatatatggatggttataaggatatccatcgatgagaaccaattctgccgtactttcatcaaacataggcacagaatgtccaagaatggagtaaatactggccttaggaaatgtcagctatcatgatttggtctcagctcagcagttacaggtaggtaacagtcttcttgattttttttttttactctgtagtaagagtggcaaagattatcctggcatataaattatatgttctttttgttgtaaaattcctagatattacgcaatattttcagttgwtgtagttcattttttttccatgggcttttgaacaagcttgctaattttgtaattaaagtaataaaatatctaaatcattgaaactgcatgaagaacacgacagacaatgaaagggtgttatccagacaggagtgctgaaaacacacgaacaaagatgcaccttagctgtctcaaattcaacacaaatttgaaaatacgttatctttcagctgggcacgttggctcacgcctgtaatcccagcacttcgggaggccaaggcaggcg

SEQ ID NO: 86305 - DNA, 821 bp, Homo sapiens
aagagcagaatgacctaaaattttgttatggatcttttaccttttagtgttatgcttgagaaatggctaatatcatttttttagcttattaaaacgtggttgtccatgtctgtttcggttctatcagtttgaaaaaattcaagaccacttactaaatataagaagaaaatacaaaatgtaactagagatagaaatttctagagtagattactttaagtggaaattgttttatacaagcatttggtattacttgagtaatgattctcaatgttctaaatatatatggatggttataaggatatccatcgatgagaaccaattctgccgtactttcatcaaacataggcacagaatgtccaagaatggagtaaatactggccttaggaaatgtcagctatcatgatttggtctcagctcagcagttacaggtaggtaacagtcttcttgattttttttttttactctgtagtaagagtggcaaagattatcctggcatataaattatatgttctttttgttgtaaaattcctagatattacgcaatattttcagttgttgtagttcattttytttccatgggcttttgaacaagcttgctaattttgtaattaaagtaataaaatatctaaatcattgaaactgcatgaagaacacgacagacaatgaaagggtgttatccagacaggagtgctgaaaacacacgaacaaagatgcaccttagctgtctcaaattcaacacaaatttgaaaatacgttatctttcagctgggcacgttggctcacgcctgtaatcccagcacttcgggaggccaaggcaggcg

SEQ ID NO: 86306 - DNA, 977 bp, Homo sapiens
tgatctgtggttaaatgattctattatttgaataacagtttcataaacagtataattttaagtagaacttgaaattggattaaaaccttgatggaataaaaacacacatggtaatttgagtaatataaaagctttgttcaaatgctgaatccattctgctgttaatttacagactcttgatgtacatatccagaataataagacrcactctgccagattgttctatggagtaaatgacaacacatatagaggttttagtgtatggtaattctccaaaatatatttttctttctaactgaaaacaataatatttgagaaatatttaaaataaatatgtatcagaggccaggcaccgtgacacccagcactttgggaggccgaggtgggtggatcacttgatcatttgtggtcaggagttcaagaccagcctggccaacatggtgaaaccttgtctctacttaaaaagaaaaaaagaacaaaaaagaaagaaaaattaggtgtgatggcgatcgcctgtattcccggctacagaggatgctggggcacgagaattgcttgaacctgggaggtggaggttgcagtgagccaaggttgcaccactgcactccagcctgggctatagagtgagactctgtctcaaaaatacacaaacatacaaacaataaataaataaaaataacatatacatcaaaaaccttacattaaattttgtaaaatatatctactatggataatttgtatgaattagttgaatagtatgaacaacacttgaattactatttcctaaatttaaaatattttttaaacaggaataaaggattgctgatggttgaagacaaaactagtacctaggtctccatttgtcgtatttcctgtaaaagtaatactgaaaataaaacacctgaaaaccatcttttagcataacgtgagggcagagaattcctgacattacataattacatatgtattttttacat

SEQ ID NO: 86307 - DNA, 977 bp, Homo sapiens
tgatctgtggttaaatgattctattatttgaataacagtttcataaacagtataattttaagtagaacttgaaattggattaaaaccttgatggaataaaaacacacatggtaatttgagtaatataaaagctttgttcaaatgctgaatccattctgctgttaatttacagactcttgatgtacatatccagaataataagacgcactctgccagattgttctatggagtaaatgacaacacatatagaggttttagtgtatggtaattctccaaaatatatttttctttctaactgaaaacaataatatttgagaaatatttaaaataaatatgtatcagaggccaggcaccgtgacacccagcactttgggaggccgaggtgggtggatcacttgatcatttgtggtcaggagttcaagaccagcctggccaacatggtgaaaccttgtctctacttaaaaagaaaaaaagaacaaaaaagaaagaaaaattaggtgtgatggcgatcgcctgtattcccggctacagaggatgctgrggcacgagaattgcttgaacctgggaggtggaggttgcagtgagccaaggttgcaccactgcactccagcctgggctatagagtgagactctgtctcaaaaatacacaaacatacaaacaataaataaataaaaataacatatacatcaaaaaccttacattaaattttgtaaaatatatctactatggataatttgtatgaattagttgaatagtatgaacaacacttgaattactatttcctaaatttaaaatattttttaaacaggaataaaggattgctgatggttgaagacaaaactagtacctaggtctccatttgtcgtatttcctgtaaaagtaatactgaaaataaaacacctgaaaaccatcttttagcataacgtgagggcagagaattcctgacattacataattacatatgtattttttacat

SEQ ID NO: 86308 - DNA, 977 bp, Homo sapiens
tgatctgtggttaaatgattctattatttgaataacagtttcataaacagtataattttaagtagaacttgaaattggattaaaaccttgatggaataaaaacacacatggtaatttgagtaatataaaagctttgttcaaatgctgaatccattctgctgttaatttacagactcttgatgtacatatccagaataataagacgcactctgccagattgttctatggagtaaatgacaacacatatagaggttttagtgtatggtaattctccaaaatatatttttctttctaactgaaaacaataatatttgagaaatatttaaaataaatatgtatcagaggccaggcaccgtgacacccagcactttgggaggccgaggtgggtggatcacttgatcatttgtggtcaggagttcaagaccagcctggccaacatggtgaaaccttgtctctacttaaaaagaaaaaaagaacaaaaaagaaagaaaaattaggtgtgatggcgatcgcctgtattcccggctacagaggatgctggggcacragaattgcttgaacctgggaggtggaggttgcagtgagccaaggttgcaccactgcactccagcctgggctatagagtgagactctgtctcaaaaatacacaaacatacaaacaataaataaataaaaataacatatacatcaaaaaccttacattaaattttgtaaaatatatctactatggataatttgtatgaattagttgaatagtatgaacaacacttgaattactatttcctaaatttaaaatattttttaaacaggaataaaggattgctgatggttgaagacaaaactagtacctaggtctccatttgtcgtatttcctgtaaaagtaatactgaaaataaaacacctgaaaaccatcttttagcataacgtgagggcagagaattcctgacattacataattacatatgtattttttacat

SEQ ID NO: 86309 - DNA, 977 bp, Homo sapiens
tgatctgtggttaaatgattctattatttgaataacagtttcataaacagtataattttaagtagaacttgaaattggattaaaaccttgatggaataaaaacacacatggtaatttgagtaatataaaagctttgttcaaatgctgaatccattctgctgttaatttacagactcttgatgtacatatccagaataataagacgcactctgccagattgttctatggagtaaatgacaacacatatagaggttttagtgtatggtaattctccaaaatatatttttctttctaactgaaaacaataatatttgagaaatatttaaaataaatatgtatcagaggccaggcaccgtgacacccagcactttgggaggccgaggtgggtggatcacttgatcatttgtggtcaggagttcaagaccagcctggccaacatggtgaaaccttgtctctacttaaaaagaaaaaaagaacaaaaaagaaagaaaaattaggtgtgatggcgatcgcctgtattcccggctacagaggatgctggggcacgagaattgcttgaacctgggaggtggaggttgcagtgagccaaggttgcaccactgcactccagcctgggctatagagtgagactctgtctcaaaaatacacaaacatacaaacaataaataaataaaaataacatatacatcaaaaaccttacattaaattttgtaaaatatatctactatggataatttgtatgaattagttgaatagtatgaacaacacttgaattactatttcctaaatttaaaatattttttaaacaggaataaaggattgctgatggttgaagacaaaactagtacctaggtctccatttgtcrtatttcctgtaaaagtaatactgaaaataaaacacctgaaaaccatcttttagcataacgtgagggcagagaattcctgacattacataattacatatgtattttttacat

SEQ ID NO: 86310 - DNA, 1938 bp, Homo sapiens
tttggaagaaaagagaaaaaaaggaatctttgtcttaaatattatatgcctttgaagaggtaaagattaatcataataatattaatagtaataacaagaacaactaccatttattatgggttaactgtgttctacccattctctgcactttagagatttgatcacattctttcctttctgtccaacagtttactgtgaatccttgttttcttttttaatgccaaagtgagacttacaataagcaaattacccaactttaggtagcaaataagtggggagccagtaatctgaactgtttgtcctcaaatcaaaaaataaaagaaaaacaaaacacttctttggttaaatctgtcatcctccaaattacttgattatggaaaacttcgtttctctccatctcaatactccatattaacatcttgtagagttagtgtcccatggaacactattcagaacataaaatttgcttttaacttgttcattttgaataaaagtaaacagatgaagatataataggttatttgttcaagctcacaaagttacaaacagaaaagcagacacagtacctaggacacagtatgcgtttaggcatttagaatatatgtttttatctctttttaatttttttaacctcagtctagcaccttcccactataataaaactgtccaaaaataaataaataaataaaagctgatcataaggacwtcggattcatttaaaggattttatcttcataacaacaaaagataactttattatttgggatcctattatttcctacttatgtatctaggtccttttatggatattacttaatttaggttttaaaatgattctatataacagtcattatttttcttcatttctcaagtaagaatactgaggccaaaatatattattgtcagaagaaataatttataagtaaaacttttttcatttcaactctgatttgactaaattgtattttgtaatcattaagagctaagaggtagaaagtgagtttgagagtaagagcaaaagttagaagagagacaagtaggaaggtttttccctaaatgggtaatttcctgtctttagataaagtaccaaagtaattaacctctcagcagatacagacaattgcaagagttgttaacacagagggcatactgaggcattatatgtaagactcatgatgttttacatccttagaatggagtcaggaaaacttaaaattaagaaaatgaacaatagtaattaaacaaaattgaaatgaaaataaggtcccatttagtggaatgtgaaggactcttgaacacctgcaggtctgttttactagttcatatttcctcagttcttagcacagtgcctaggacttgccggacattaaaatatttgttattgcttcatttttaacaatttttcttcatagagggcattttgtttggttttgttcattaacgtgttcttcagtaacctttgagagatacacgtgtaatacaggaatactaaatactactactaatattaataataaaataataatggaacatatagctttattctatgtgtgcattaactgttgattaagatcctttatgttcaaaatttctgacacttgttaaagcagtaaagaagactttattcgggactattgtgatagctgtctatagcaatagaaaagaagcattgggatcaactgtgaatacaagaacaagtgagaatttgtggccagggagcagcttgggaaagttggtgggatgaaaattactaaaaggacataccaaggatagagacattgttgctcaactgacctaagagaaattttgttgaaggcaggcagagttatcagagacagagtttaataagatttacaggttcttcggctatcatggcaggattccctgtaaaccttcttagcaggttctttctaaaactgggctatgcagacccaggaa

SEQ ID NO: 86311 - DNA, 717 bp, Homo sapiens
cctatggagaacaacttggtggttcccgtactctcatcatagatgataaatcatattcaaaacaggattcaactgaaaaatatttttggctgggtgcggtggctcacgcttgtaatcccagcactttgggaggccgaggcgggaggatcacgaggtcaggagatcaagaccatcctggctaacatggtgaaacctcgtctctactaaaaattcaaaaacatcagctgggctctttttttttttttaagatggagtctcgctctgtcactcaagctggagtgcagtggatcaatctcggctcactgcaaactccgcctcgcagggccacgccattctcctgcctcagcctcctgagtagctgggactacaggttgtgccaccacacccggctaatttttgtatttttagtagagacagggtttcaccatgttgrccaggctggtcttgaactcctgatagagatcaagccactgcactccagcctgggcagcagagcaagactctgtcttaaaaaatacgcacacacacacacacacacacacacacacacacatatatttggtgcagactgcatataaatgttcagtcttcttttccactaaatcttatgttggttacataatatacccatattctctatagcatatctttgccaataaagtatacctacacagttctttctaggtttatcatgaatatattttaaccatcaatcaa

SEQ ID NO: 86312 - DNA, 539 bp, Homo sapiens
tacttatatttttaagaatgacttctttgcttctcagtccttctcattgtaaaacaagtattttggactagaactaaaatawcttagtctgcagctctaaaattttaatctctgaagaactttaagttaatagaaattgtggtgggcaggagagaggacaatggagcaggtaaatggggcaaaaaggaaatggaaaaataagacaaggtatcagtgatgatagtgtaccatgaatgagaagtatgctgtatactctctacagctaaggtccagtactggacatatgtacacatgtacatagtcatccaggattgaatgatgcagacagagctaggtgcatagttcatatgtccaaagccaagaagaatgcagcaaacagtgtgatgttgagatctttaaagaaagccatataattatctttattatcagatatgaactaagttttaaagaaaggaaaagatctagatccaggaagactggagaggatggacttccaagagaaatcacatgaatattgattggaaaggtggttggagtga

SEQ ID NO: 86313 - DNA, 663 bp, Homo sapiens
ggatccagattacaaacaatgaaccagggatagcttttaactctactggcgttctctatttgtgtacatagctaatctcacagatggtaatctattttgggttgtaaagcaaatgtattcagaattttctcaggctcctgatccacgtgtccacrttgcacaactccagggaggcaccattaatgttccgtttatgtgctccagggtgagggcactgatgtggaatatgatatgaatagagcctcctggagttgtacaacatgggccaccagtgttgaaaatacagtttttcctctgctctcacaccacaattaacacagaagacttctgtggccagatgtgtgtagttttttctcaatgcatcaagcaagcaatcagttttgcaacagacaccaatagaccaataggtgtcctccaacccatttcaattctgtcactatctacctggagatagtatcagattacacaggttgacggctcagttctactagactgttccccagttccaacattaatagcaagccacaggttgttttacctgtgcttctgaccaacgctataaatcagggttcccatgaccgtctccttgggtttgattaagttgctagagtgcctcgcttgcttacacttactggtttattataaagaatattacaaaggata

SEQ ID NO: 86314 - DNA, 663 bp, Homo sapiens
ggatccagattacaaacaatgaaccagggatagcttttaactctactggcgttctctatttgtgtacatagctaatctcacagatggtaatctattttgggttgtaaagcaaatgtattcagaattttctcaggctcctgatccacgtgtccacgttgcacaactccagggaggcaccattaatgttccgtttatgtgctccagggtgagggcactgatgtggaatatgatatgaatagagcctcctggagttgtacaacatgggccaccwgtgttgaaaatacagtttttcctctgctctcacaccacaattaacacagaagacttctgtggccagatgtgtgtagttttttctcaatgcatcaagcaagcaatcagttttgcaacagacaccaatagaccaataggtgtcctccaacccatttcaattctgtcactatctacctggagatagtatcagattacacaggttgacggctcagttctactagactgttccccagttccaacattaatagcaagccacaggttgttttacctgtgcttctgaccaacgctataaatcagggttcccatgaccgtctccttgggtttgattaagttgctagagtgcctcgcttgcttacacttactggtttattataaagaatattacaaaggata

SEQ ID NO: 86315 - DNA, 637 bp, Homo sapiens
gaagctggactaggtcctatatgatctgactcctgccctctcttccagcctcttatttcgccatttgcttccttgcctccctttctcctcgccatctgtatagttaagagtgcgaacgctagggtcaaattatctgggttcaaatcctggctctgccacttactagctatgtaactttgggaaagtcacttaggtcctccttcttatctgtaaaatgggagaactagtagttcctatwttatatagttattgggaagagtcaatgtgttaaatgcttacaacacggcctggcccatagcaaataattaatacagacacttctccacttatgatggggttacatcccaataaacccattataagttgaaaatattataagtcaaaaatgcacttaggcctggtgcagtggctgacttctgtaatcccagcatttcaggaggccaaggcaggaggactgtttgagcccaggagtttgagaccagcctggggaacgtagggagaccccatttctacaaaaatcacaaaattagcaggatatggtggtacacgcctatagtcccagatacttgggaggggctgaagcaggaggatcatttgcacctgggaggtcaaggctgcagtgagctacgatggtgcc

SEQ ID NO: 86316 - DNA, 638 bp, Homo sapiens
ctccccaccgaccttcttgtgaataacgtctcttcattccttataattgagcacaggagttgaagcytttgatcccacacctcatgctggattaggtattcccggtatgtgcttccataaaaccatgcatccaactttaaccctgctcttaccacactgaatagttttctgctttaagcctctgtctcccctgtgtgctgcaccagacctcaaaacttcagtccaggtttcagggccagcaaaagacataggatgttcagaataaaggtacaattgagtaagcagatgcagctccgtggtaccttatttattacatgcaaggtgcacctggaatgacacagaccctgcacctcccagagttgagaagccctgcaagccatagagctcagaaccacaggcttagtctaggtgagtactcaagaggttgggtgcctcataccaggcaaggcacatgcaccaccactgtcccctccgtcctcagttttgggaccagagagcaagcctctcagctatcctatcattggccaaccacctccaggggacaactgcaggtccagtcctccttagcacaggctcattttgcaaaggagcttcccacacctgcttccagggaagagggacacactctccttagcatc

SEQ ID NO: 86317 - DNA, 638 bp, Homo sapiens
ctccccaccgaccttcttgtgaataacgtctcttcattccttataattgagcacaggagttgaagcctttgatcccacacctcatgctggattaggtattcccggtatgtgcttccataaaaccatgcatccaactttaaccctgctcttaccacactgaatagttttctgctttaagcctctgtctcccctgtgtgctgcaccagacctcaaaacttcagtccaggtttcagggccagcaaaagacataggatgttcagaataaaggtacaattgagtaagcagatgcagctccgtggtaccttatttattacatgcaaggtgcacctggaatgacacagaccctgcacctcccagagttgagaagccctgcaagccatagagctcagaaccacaggcttagtctaggtgagtactcaagaggttgggtgcctcataccaggcaaggcacatgcaccaccactgtcccctccgtcctcagttttgggaccagagagcaagcctctcagctawcctatcattggccaaccacctccaggggacaactgcaggtccagtcctccttagcacaggctcattttgcaaaggagcttcccacacctgcttccagggaagagggacacactctccttagcatc

SEQ ID NO: 86318 - DNA, 761 bp, Homo sapiens
tggggttcatctccatgtaataggtccttctgtttccttctctgccttcaaaagctggctccttcagagccactgccaatttcacatccaccaactttcctgaataacataaagttagctctccttccttccaaactagtatatttcttgtcagtataattcatttggaaaaagaaaaaagaataaaacctttactttcttgccctatctctctaaacagtgttctaagtatagttatgtcttgtttcaccaatcctgctttaagcgtttcagggataggattcatgtccctcactgaatttggcatcttcacaaagcaacagaacaagttgaagagatgttcatgtaagatctggataatattatgtcttggactttaccctctagccttatcaagaaatactcataaatgtcaatccatragaccataattcaccaagacaagaaacatgattgattagatagaaattatgaagaaataggccttgaaactccttctaataagcaaggagatacagacttccattattttctaacagtttttctttagttcaataaaatcttcctgggaggacataaaatccattgtcctttctaaacccacagcttattataagccacctattagaacaatacagataagttgggtgtctcatattacactaagcattttaaaccaaagatattgccactactagtttgcatttgtaaaagcagaacaataatagtaataggagttttgctgttgacatttctttaaa

SEQ ID NO: 86319 - DNA, 761 bp, Homo sapiens
tggggttcatctccatgtaataggtccttctgtttccttctctgccttcaaaagctggctccttcagagccactgccaatttcacatccaccaactttcctgaataacataaagttagctctccttccttccaaactagtatatttcttgtcagtataattcatttggaaaaagaaaaaagaataaaacctttactttcttgccctatctctctaaacagtgttctaagtatagttatgtcttgtttcaccaatcctgctttaagcgtttcagggataggattcatgtccctcactgaatttggcatcttcacaaagcaacagaacaagttgaagagatgttcatgtaagatctggataatattatgtcttggactttaccctctagccttatcaagaaatactcataaatgtcaatccatgagaccrtaattcaccaagacaagaaacatgattgattagatagaaattatgaagaaataggccttgaaactccttctaataagcaaggagatacagacttccattattttctaacagtttttctttagttcaataaaatcttcctgggaggacataaaatccattgtcctttctaaacccacagcttattataagccacctattagaacaatacagataagttgggtgtctcatattacactaagcattttaaaccaaagatattgccactactagtttgcatttgtaaaagcagaacaataatagtaataggagttttgctgttgacatttctttaaa

SEQ ID NO: 86320 - DNA, 1543 bp, Homo sapiens
tgtccccattggctctgatcctactcatagaggacgctctatgatcctaactcatagaggacactatggaaatctcccagctaattcagatgctggtcacagattgggagaagatcccaagtgatatttgtgatctaatcaggagtggggatgagctatctaggccagaaccaagaggtgagcaggaagcatgctcttgccctggctgagagctgcatgcccctgcttcttaggctgaacccagaaggatgtggcctggtttctgtctccagcaggagtcttgaagcttggggtagttttgcattctgagcacagacagctgaaggcccagctggctgtggcagctttctgccagcagaagtccatggatttaaaatctgctctgtcaaggacgtgggagctgggtgcatctcactgccaactgcygctcctctttctatgtgtggtgtcttttgtgcagcagaggcagttctgcttctccctggaacattaccccagcaaccagggaactgctgtctgactcccatagggattgccacttgtgcctgcacttggggaaccagatcatagacttgtctgacccagtccccacctagctttgcaactccacctgccttggtagcagaacctaaacagggacttttgggagtttcatagcccagtccattgcctaggacatctgaatatcccccataggtaaaatagaccaagtgcaagtcccacagccaccatcacagctgtctctctcctgcaagtgccacttcctggccagaggtcaaccagcacagcccactacaacatctgctggcacaataacacagcacatgggaggaagaaaacttttgtatgacctctgctaacaccattgcccccactattccagccactcaggaggccttgagcctattcatgttcccagtatattactactacagctgttaattgagaaagccatcacactaaagctttgtaaagccaaggaaatcttacgatgtctacaccaataccctgctattcccatcttggctggtgcttccacccactgctgggagaccagaggacaggtcatcctggttcagctccacccaacattgccccctctggagctaagagcagagccctagctactgcacatcccacagaccagtccatagcccgaggcatcagagagctactccaaacggctgcccagagatgtcagtgaccagttctcctcagaaggaagagccaaaattacaggtgaataatcatagtccaaatggaatgttaaagggaaagttctggaacctaccagagatttcactggaagaatctacaacacacacaaaagaaagacacaagaagctgacagagatcaaaccctgagaaagctagtattccataaaagggtagggagtattttcagcctctttaactcttgtggcagactgctggttatcataattcaagaagagattctttgccctcataagcccaagtactggagtgggctgcaatttggggacttcttcagagcattacactgggctaccagctcatgctg

SEQ ID NO: 86321 - DNA, 1543 bp, Homo sapiens
tgtccccattggctctgatcctactcatagaggacgctctatgatcctaactcatagaggacactatggaaatctcccagctaattcagatgctggtcacagattgggagaagatcccaagtgatatttgtgatctaatcaggagtggggatgagctatctaggccagaaccaagaggtgagcaggaagcatgctcttgccctggctgagagctgcatgcccctgcttcttaggctgaacccagaaggatgtggcctggtttctgtctccagcaggagtcttgaagcttggggtagttttgcattctgagcacagacagctgaaggcccagctggctgtggcagctttctgccagcagaagtccatggatttaaaatctgctctgtcaaggacgtgggagctgggtgcatctcactgccaactgctgctcctctttctatgtgtggtgtcttttgtgcagcagaggcagttctgcttctccctggaacattaccccagcaaccagggaactgctgtctgactcccatagggattgccacttgtgyctgcacttggggaaccagatcatagacttgtctgacccagtccccacctagctttgcaactccacctgccttggtagcagaacctaaacagggacttttgggagtttcatagcccagtccattgcctaggacatctgaatatcccccataggtaaaatagaccaagtgcaagtcccacagccaccatcacagctgtctctctcctgcaagtgccacttcctggccagaggtcaaccagcacagcccactacaacatctgctggcacaataacacagcacatgggaggaagaaaacttttgtatgacctctgctaacaccattgcccccactattccagccactcaggaggccttgagcctattcatgttcccagtatattactactacagctgttaattgagaaagccatcacactaaagctttgtaaagccaaggaaatcttacgatgtctacaccaataccctgctattcccatcttggctggtgcttccacccactgctgggagaccagaggacaggtcatcctggttcagctccacccaacattgccccctctggagctaagagcagagccctagctactgcacatcccacagaccagtccatagcccgaggcatcagagagctactccaaacggctgcccagagatgtcagtgaccagttctcctcagaaggaagagccaaaattacaggtgaataatcatagtccaaatggaatgttaaagggaaagttctggaacctaccagagatttcactggaagaatctacaacacacacaaaagaaagacacaagaagctgacagagatcaaaccctgagaaagctagtattccataaaagggtagggagtattttcagcctctttaactcttgtggcagactgctggttatcataattcaagaagagattctttgccctcataagcccaagtactggagtgggctgcaatttggggacttcttcagagcattacactgggctaccagctcatgctg

SEQ ID NO: 86322 - DNA, 576 bp, Homo sapiens
acttcttcaggagctacgaataagggagttcttcctgttaaactcattacatttacaaaggcccacccgtcgtttttcctaaaataatttccttttatgaatgtagagttgaaatgttacactaacaattcccatacttgttccaagatttttcacagacttgccatacctaaacaactttctccttacagcttcaaagataggactaaatatatcatccctatttaacaatcttaaaatttgaaaaatttttaaaagagggaatcrtcttcccctaataagaagaggcatactgaccataattcctcaattacttttactttctaatccaaatgaacatatagatgaaaggtgtttttcaaaatgcagagtaggtgcaaaatctttcatcagaggtgaagtatttgatatgtccttggtcatgaaagaaatcctcaaaattaagatttatttttacatttcatctttttatagccaactgtccacataaccaccagaaaaaaataccatgatggatttttttttaatttaatgaaggtaactgatctttttagagtttttctgataggcacagaa

SEQ ID NO: 86323 - DNA, 1022 bp, Homo sapiens
catgtcaccaggccccacaccaatctctttcggggtggaagttttaatacagaatctgctgaacctgaaagtcacctaagaagtccctaatggatatttcatttatgatacatgaaaatttaattttatctcttctaatttgaatctattgctccctcacattggttttagctataactcattgtttgttctaaaagcttctaggatagcagatcatacaaacttaataaatactaccaaagtatgacttttaaatctgcatttctggggcttatgagacagtacccaagcaacaagttttcattactttatatgtttgattggagagggtgagatagattggacaccatttagctgggattatgatgtcattacttcaagtgtttgtagataatactcatccctgaaaagactgggaaaaccaagggacttttgaaaacataattccactcaatcaatgtggctacataagcatgctttatggctatacacaccacatttagcaactgggagctggggtcagccaagtgccaattgtttaatgtcaacattttaaaaaaggaaacattcaactatggttttaagcctatctttctcagcagggtgacatccagcctagactccaaatccaccccaacrcctcccacgtcaaagcactgtgagtaagttacaaggaaaaaccagcccaagcagttcccagggctttggctgtgtctccacaaagaatgatgctcagcagcgttccatcccagccttcatccaaacagtaatctgatctgtagatttgtaacccagggtccccaggtttttgggtatcactgtgaaaaagtacccatttgtaactgttgcatcttgagctcttatttcaaaaagttcgaggtagaagctcagtcctggaaaaacaaaaactggttggatccagaggtgcctgacttggagatgaactttggggagctttcctcattaccaccctaaaaacctcacccagggaggaacttatttgccattttgtacatatgtga

SEQ ID NO: 86324 - DNA, 987 bp, Homo sapiens
ccaagctgacgagacaaatgacatcctagattggatgcctgttactgcaccagcttttgatgaagatgagacaagggcaaagctatttatgagggcaaaccaggtgccaaatattgtgtgaaataagtcacttcatccttacagcaacccttaggggataggcattataacctccattttacggatgaattgttgtatattggagagtctagcacagtcctagcacatagtaggtgctcaataaacgacagctgatactaaactgggtctccattgggccctaaagtttctgcttcaattctacattaggcctattccattacataaagcaaattttcaaagggccatgatttgaatcaaatgattctcttctgttgctttctgtggagctcatttaaaacactaagtacctgctttgactacagctcataaccaggcacaagcctctgctgctggctgccccgtccatgaagtggatgaataaacagaaccagggatctttrtatcagggtagcttgatcatccatgaaggctctacggaagaagaatgatgcctataccagcctccagacgcattcctcaagcttccctttctgtaagcacaggagaggaagggccgcagggaggtccttccaacgcctgcgctttgtaagctaattatcatcttaggtagctggcagtcctcaggctttccttccgggcctctctagacagtgccatgaagctgcgtcagtgatttcagtaatcccttttattattcatcttcaaaatatctacttagtggaagttaaactccaacctcacatcatgtcaaatgtcctgtatacaggacaggaggttggatttcccggtttgagggtaagaatggcttgtatttgggtgctcagtgattcagaagaggttatttggcagaatgagaatctttttatacaggcacgacactaaaggggcctttagtaaaatgcactatcaatttataaggaaaaa

SEQ ID NO: 86325 - DNA, 648 bp, Homo sapiens
attatatataatgtatatataatatacaaatatacacatatgtgtgtgcttgtgtgtgtgtgtatatttttttttcccttgagatggaggtcttggtctgttgcccaggctgtagtgctaatgcagtggcatgatcatagctctctgcagcctccaaaccctgggctcaaggaattcttctactcagtctcctggaggagctgggactacgtgtaccatcatgcctggttaatttctttctttctttctttcttttctttcttttctttctttcctttcttctttctttttttttctttttcttttttttgtagagatgggggtctcgccatgttaccacagcttggggctttgaaactcctgggccttaagcaatcctcccaccttggcctcccaaagtgctgggattacacgtgtgagccaccatgcttggctgtgattctatttttaagtttgaattttttttcataataaaaagcttttaaaaaactgctgaatgtattggtgaggttgttaatcttggaaaatcaaaggatgagataaggaccctagagatacaatatcaggatcatctctttaaaaagaggtagaaggctgggcacggtggctcaygcctgttatcctagtactttgggaggttgaggcagg

SEQ ID NO: 86326 - DNA, 1130 bp, Homo sapiens
  misc_feature (1)...(1130): n = A,T,C or G
tttgagannnnnnnnnnnnnnnnnnnnnnnnnnnnnnnnnnnnnnnnnnnnnnnnnnnnnnnnnnnnnnnnnnnnnnnnnnnnnnnnnnnnnnnnnnnnnnnnnnnnaaagattgtgcttcccacatacaagaagtgagccccagggaagagctctctcttgctctgctccctacagttttagacacaatcaagtgagaagtgatgtctggcgcttaggcagccatcttgcaaccatgaagtgacaagcttcacagggaggaaaacaggcactaaagatagtagttcagaggaagggaaagatgatggtatcactgagctgagaccatttatctccagacttcttttaaacaaaaaatttctctatgatttaagccaccatatgttgtgctttctcttacttgcagccaaaagtgtcagaggtgggcagagtttatatcagtttgcccacaaacgtgtctcctgtcctcagcacagtgcttagcaaacaataggaatgcaattagtgtttgtggcataaaagcaacatggggtgttgggtctggctgagagaactgaagcacctaactttcagatgctacatacacctgtttttctaggattttcccatgtagagaggttttggccccaaagaaaagtccctagttgcaaaggccgtcggttctgcctctgcctgtgagtttttggtatcttgaatgctttctggctctacagcctgagatgaatcaaagtagagttcagtgcagccagtgcaggtgtgaatgctcaaaactggatactactgtggacctttcctttcagttctattctaggaaaactttggaaagaaaagctttgacagataaaggacagtaaaattatttgtgaaaatcattcaatcaaccaatcacaatcactgattatgttagacacatttctgggcatcggagaagaaatagaaagataccattcttatagttttcctgaattctaagttcccagtttcctttctctgcttgtcttccatccaaagatgggcttaatgcaatcatctggacccaaaagagaaaatgtgaagtttctcatggattccagtgtgatcgctttccagagctaratttcatgtagttttacggtgttcgtcagaaagtt

SEQ ID NO: 86327 - DNA, 678 bp, Homo sapiens
ttagaaagtcaggtgccaagctcctgtgcaggtgtgtgtacttgaacaagaacatttgaaacagactttggaatatgacagcacttcatcctttctgtgaacaaatccttctaatggacttgactcaccccccaccccaccttccaaccctcattccaataataactgcatttaagtgataaaagtttgggcctcataaaaagttagaaacagactgggaccttgctctgagaatcataattttgttttaaaaaatttaagccaggcgcggtggctcacgcctgtagtcccaacactttgggaggacgaggtgggtggatcacgaggtcaggagatcaagaccatcctggctaacacagtgaaaccccgtctctactaaaaatacaaaaaattagccaggctcggtggcgggcgcctgtagtcccagctacttgggaggctgaggcaggagaatggcgtgaacccgggaggcggagcttgcagtgagctgagattgagccactgcactccagcctgggcaacagagcgagacttgtctcaaacaaacaaaacaaaacaaaacaaaataaaaaaaacaacaaaaaaacatttaaaagyggcaggaagcatgtttaaagcaggcatacacatttccttcttatgttcagtggttcatctgtactgcatttaggctaagtc

SEQ ID NO: 86328 - DNA, 678 bp, Homo sapiens
ttagaaagtcaggtgccaagctcctgtgcaggtgtgtgtacttgaacaagaacatttgaaacagactttggaatatgacagcacttcatcctttctgtgaacaaatccttctaatggacttgactcaccccccaccccaccttccaaccctcattccaataataactgcatttaagtgataaaagtttgggcctcataaaaagttagaaacagactgggaccttgctctgagaatcataattttgttttaaaaaatttaagccaggcgcggtggctcacgcctgtagtcccaacactttgggaggacgaggtgggtggatcacgaggtcaggagatcaagaccatcctggctaacacagtgaaaccccgtctctactaaaaatacaaaaaattagccaggctcggtggcgggcgcctgtagtcccagctacttgggaggctgaggcaggagaatggcgtgaacccgggaggcggagcttgcagtgagctgagattgagccactgcactccagcctgggcaacagagcgagacttgtctcaaacaaacaaaacaaaacaaaacaaaataaaaaaaacaacaaaaaaacatttaaaagcggcaggaagcatgtttaaagcaggcatacacatttccttcttatgttcagtggttcatctgtaytgcatttaggctaagtc

SEQ ID NO: 86329 - DNA, 725 bp, Homo sapiens
tagagtttctcccctttccaactcctccacccacacaccatacacaattctagagggaagcagggggatcttgaggagaaacctgttgaccacgtgctgtcagaataactaaatcaatatttctttgcagagagcttggattctaatttcatagcctgtgttccaaattttacagacattttccgtagcctttgttctgttacaaaagtaattaagttccttgaaagttgacccatccaggtggagagggaagagatggaggactcggtctcagtttaatagctcagtttcaggcraaaagacatctagaacaagaagaaaacaggagagttgcaattatttgagatcattgtaaagaggatccaaatggaaagattatagataagataaattcctctttaagaaagcctagtaaagtgaagttgcaccataattacttttaacctacaagctgcctctagaaatgaaacccaggaagatgaaacctcattatttaactgaattcctcaataatgaacacatctattagcatgcattaaaattagggctgcataatattaaaacaaaatagaataaatcctgcagaggtatttctccagccgtgccccattgactgatggggagtttatagttaacttaaaatcagaggatttagtccagatacctgcaacgaaaattccatttggtgtctctcttcagtgtagtccagtagttctttaatattc

SEQ ID NO: 86330 - DNA, 1565 bp, Homo sapiens
cgggaggctaaggcaggagaatggcgtgaacccgggaggcggaggttgcagtgagccaagatggcaccactgcactccagcctgggcaacagagcgagactccacctcaaaaaaaaaaaaaaaagatatgtacacatgggtacacacatacacaccatgtactgggcaagcacacggactttcactaaagagataacagaaaatgggctacttcgtatgcctcataggctatgccttgtgtaattaaattagactccagtgtggatggcagccctgcgcctccactcactctgagctgtgcaagtgcacggctatcctatagcctgtacgcccagcagaagtatccctggttatgcacgaaactgaaagattttgtctgcagcctcttaattttcctccctgtctcgtatctgcctgcttccaatccaccgtgcatattaatgacagatttattttcctttgacaatggtctctgttagataaagcagaaggtacttgatcaaagaataaccgctacaggaaaaggctactctgaatgaattttaaaccaggttccaacatttcaaagtcaaaaatgaaaagaaatttttaaagctttgattaagacttggacaatgaagctaaaattattaaattagcttgcttcatagcacttcagcaacattagcttataattacaaccgcaggctaattcttaggaaaaacacaaagactgcagcccaactccatatcgaattaatataatgaatacagaggagaaaaatgttaatctgtgaagtataaacctttaaaatacaacacaasacttgtaacactctttgtcacttcttcgtctgtcagaattctgggatccttggaaatgggaagtgatcctatcctctctccgtctctgggaagcctagaggaaaagtcaccaggtggagctttaacttccgttatttattttatcagaactaagtataaaaatttctaaataaccttagtggaatgaccttcaatatcaccactaatagatactaaattattaaaatacatgaatctgtttctggattttgaaaatctaagccagggacccatttttcttaatctttaagttaaaaatcagctaattttggccgggcatggtggctcacacctgtaatcccagcactttgggagaccgaggcaggcggatcatgaggtcaggagatcgagaccatcctggctaacacggtgaaaccctgtctctactaaaaaaaaaattagccgggtgtggtggcgggtgcctgtagtcccagctactcgggaggctgaggcaggagaatggtgcaaacccgggaggcgagccgggatcgcaccactgcactccagcctgggcaacagagcgagactccgactcaaaaaaaaaaaaaaaagctaattttaaggtaaatgaccacagatggacagtggtttccatactggaaaagactggagagctttcacctgtagcctaacttcaccccacctccttcttaccctggggcttcactatactctcacagtctttctgctgcctgcgtccctccgtctgcctgtattagaat

SEQ ID NO: 86331 - DNA, 854 bp, Homo sapiens
attccagcctactcaggtctctcctgggacaaaagaaaggcataaagctaaggtaaaaatctgtgtgtcggacactcacacaacactacattcccttatacacacacacacatgcacgcacgcgcctagaagaggacaagcctctgaygcacttctggagaaaatgttcaaagaatgtgtaaaaactttctacgttttttaatcatttccgctctagcagctaaacacaccatgtgagagaaattttcatcctgtgggagctgagaacctggtgggtgaatcattcgtgtaaattatgaattaccactttcagcaatttgagaggctgatttgtcaccaacattatgagatgctcctatattgttcaattcctataaaataaataaaagcatttctttgcatatagagtgtgaaaacaagaggtacttataaacagtaaagagtaaatacacatatttgaacacaatattactttgtattgttatgttaccgagcttccccattgcctattccagggagcgtaaatacctctgatctgcataatcttgcatgaggaagctgcatcatgcttgcatgagaaagctgttccatgtctgcacacgtgcagacatagcagagactctgcttgatggggactatgagttaacgtagacttctgaatcttagtatgtgtatgcctaagaacgtcacttaaaggttctaaatgcttcattagaacatagaccctcctctaaagagaaacatggattcctctgccttgttccttctggagcactgctacccagtggaactttgtcccatgatgggtgtgtcccaagtgtgcccatccactatggcagccatgagttccatgt

SEQ ID NO: 86332 - DNA, 854 bp, Homo sapiens
attccagcctactcaggtctctcctgggacaaaagaaaggcataaagctaaggtaaaaatctgtgtgtcggacactcacacaacactacattcccttatacacacacacacatgcacgcacgcgcctagaagaggacaagcctctgacgcacttctggagaaaatgttcaaagaatgtgtaaaarctttctacgttttttaatcatttccgctctagcagctaaacacaccatgtgagagaaattttcatcctgtgggagctgagaacctggtgggtgaatcattcgtgtaaattatgaattaccactttcagcaatttgagaggctgatttgtcaccaacattatgagatgctcctatattgttcaattcctataaaataaataaaagcatttctttgcatatagagtgtgaaaacaagaggtacttataaacagtaaagagtaaatacacatatttgaacacaatattactttgtattgttatgttaccgagcttccccattgcctattccagggagcgtaaatacctctgatctgcataatcttgcatgaggaagctgcatcatgcttgcatgagaaagctgttccatgtctgcacacgtgcagacatagcagagactctgcttgatggggactatgagttaacgtagacttctgaatcttagtatgtgtatgcctaagaacgtcacttaaaggttctaaatgcttcattagaacatagaccctcctctaaagagaaacatggattcctctgccttgttccttctggagcactgctacccagtggaactttgtcccatgatgggtgtgtcccaagtgtgcccatccactatggcagccatgagttccatgt

SEQ ID NO: 86333 - DNA, 854 bp, Homo sapiens
attccagcctactcaggtctctcctgggacaaaagaaaggcataaagctaaggtaaaaatctgtgtgtcggacactcacacaacactacattcccttatacacacacacacatgcacgcacgcgcctagaagaggacaagcctctgacgcacttctggagaaaatgttcaaagaatgtgtaaaaactttctacgttttttaatcatttccgctctagcagctaaacacaccatgtgagagaaattttcatcctgtgggagctgagaacctggtgggtgaatcattcgtgtaaattatgaattaccactttcagcaatttgagaggctgatttgtcaccaacattatgagatgctcctatattgttcaattcctataaaataaataaaagcatttctttgcatatagagtgtgaaaacaagaggtacttataaacagtaaagagtaaatacacatatttgaacacaatattactttgtattgttatgttaccgagcttccccattgcctattccagggagcgtaaatacctctgatctgcataatcttgcatgaggaagctgcatcatgcttgcatgagaaagctgttccatgtctgcacacgtgcagacatagcagagactctgcttgatggggactatgagttaacgtagacttctgaatcttagtatgtgtatgcctargaacgtcacttaaaggttctaaatgcttcattagaacatagaccctcctctaaagagaaacatggattcctctgccttgttccttctggagcactgctacccagtggaactttgtcccatgatgggtgtgtcccaagtgtgcccatccactatggcagccatgagttccatgt

SEQ ID NO: 86334 - DNA, 702 bp, Homo sapiens
tgaagacacttggtctagaatctctgaacaggctaactggtaaagggctttccctgctgaagccagtttgtaaagagaacaagaagagcttacttcttcaaatgtgcccacaccaatacaagtccaaaagatcgtgaataatcagagaaacatgacatcatcaaaagatcaaaataaagcactgatggtacaggagttaagaaattatttaggcagatagtgagggtaaggaagtccttggtaaggtttaccttttaatgaaaagcaacccacaaatcattttctttttgtttgtttgtttggagacagggtcttgctctgtcgcccaggctcgagtgcagtggcacartctcggctcactgcaacctccacctcctgggttcatgtgattctcctacctcagcctcccaagtagctgggattacaggtgtgccccaccatgcccggctaattgttgcattttttagtagagacagggtttctccatgttggtcaggctggtcttgaaaatgaaaataaatcagttcattctgccagagataagaaatcacaagcagtttcatacaaaaaagacctggtccataaggagttctctcccagctctgtcctagtcagacagattaaatcaaggccctggaaagacccagcaaatctaacaggagaagaatctatgcagaacctattagatcaaggataccccca

SEQ ID NO: 86335 - DNA, 478 bp, Homo sapiens
ttgaggaggcatttcaaggcagagctgcctcattggctagcctggctggctttatgtggcttccagaggacctgccattcacaagatgaaagctcctgtggtagttacacgtctcaggttgtaagcatcagttatgcttgtaatgtgcttgagaaaagaagggctcacagagacctaaatctaggctgccgttccttcacttggctcatgtcaccccccarggctcccagaaaacaagttgtaccctccttaccagtagatggcactgctgcccctgggaattcctggaggagctgaactatggagctggcaaaccagcagtgtgtagcctctagtcagaagattttgaaaggctatgtcagccctcaaacgaaatctcaaagaaaatagttctgaaagccataactgtttacataaggtaggaataacgtgtgtcatggggattgaggaatggctgtgattacattgactgtacatg

SEQ ID NO: 86336 - DNA, 478 bp, Homo sapiens
ttgaggaggcatttcaaggcagagctgcctcattggctagcctggctggctttatgtggcttccagaggacctgccattcacaagatgaaagctcctgtggtagttacacgtctcaggttgtaagcatcagttatgcttgtaatgtgcttgagaaaagaagggctcacagagacctaaatctaggctgccgttccttcacttggctcatgtcaccccccagggctcccagaaaacaagttgtaccctccttaccagtagatggcactgctgcccctgggaattcctggaggagctgaactatggagctggcaaaccagcagtgtgtagcctctagtcagaagattttgaaaggctatgtcagccctcaaacgaaatctcaaagaaaatagttctgaaagccataactgtttacataaggtaggaataaygtgtgtcatggggattgaggaatggctgtgattacattgactgtacatg

SEQ ID NO: 86337 - DNA, 510 bp, Homo sapiens
tgcttgctattttgtagtatctcctataagagaacagaatcccaaatgaaaagcaaagaattctaattggaggttctcacygtcaagctccatgaatgaacgagacacttaagaaaaatagtgacaaggccaggactacaggtcttgagtgtagacaaacctctcaatctgcccctccaaaaactgtgggtgagagagggagtatggtggtctccctcctttgaaacagctcaatagttaaagaagagaaacttcactcacataggtgctaagcaaacagtgtgagtgatttctaagattaagaggtattgcttaataatacttctgactaatgcctaactctacaattgactttggactgtcaaagaaaagagtttattctcatatttgctccaaatttccctaaaagaagaattctaaagcatttgttctatgactgatatttctacttctgtccccatataaaataaccaagataagttaacaagctgccctatgcctgggaatgaa

SEQ ID NO: 86338 - DNA, 510 bp, Homo sapiens
tgcttgctattttgtagtatctcctataagagaacagaatcccaaatgaaaagcaaagaattctaattggaggttctcaccgtcaagctccatgaatgaacgagacacttaagaaaaatagtgacaaggccaggactacaggtcttgagtgtagacaaacctctcaatctgcccctccaaaaactgtgggtgagagagggagtatggtggtctccctcctttgaaacagctcaatagttaaagaagagaaacytcactcacataggtgctaagcaaacagtgtgagtgatttctaagattaagaggtattgcttaataatacttctgactaatgcctaactctacaattgactttggactgtcaaagaaaagagtttattctcatatttgctccaaatttccctaaaagaagaattctaaagcatttgttctatgactgatatttctacttctgtccccatataaaataaccaagataagttaacaagctgccctatgcctgggaatgaa

SEQ ID NO: 86339 - DNA, 681 bp, Homo sapiens
tccaagaattctaactgatgtttaatcaaagaaaaatacagaaagctgcaaatgtgtcttttcaggggctgatttaacctacagagagggacaactgaagagaaacttctcttcttcactggcaactcaataacaagaacatggaaaccatggtataatatttttttcagcttacaaaggttagaargaacactccgttaaaaaaatagagcattgcctttcatttccacatatccccagcttcccaaatagtcctcctacttttttcttacaaactcgagagaaaaaatttcccttggtactcattataaaaccccagaatgctcttgacattgccattttaactgtctattgttctcctaactccaggaaatctctgaaagccagacataatgactgttgtgacggttttcagtaacaagaagtgaagtttcctgtcaaaagaagtgctctctccattttcatcatatgtaaaacaagatgcttccatgagcaccttcatagacagatgagcttctttgagaccctgaaaatgtactacataggatgaaagaacgaatcaaaatgacagataaatgtgtgggagtttttcccttttagctatagcaaactctgatttatttcccaattagtactgattcttttgtcagagacttggctttttgctccagagctgtcaag

SEQ ID NO: 86340 - DNA, 625 bp, Homo sapiens
ggtaatgcacaaccacttttctgggaggaaacattagcaagacttctttttgccctaagctcacagtatgaaaatattttatraataatttttagtcttcagaaataacttatgagaatcacctaaccatataactttagacttggaagagattttaagagacatccaccatctcatcaatctcaggtgataaaagtaaggttcagaaaggtgaatagatttatttttagtcacataataagatggcattaatggactgttggcctaccactacctagcacaagcaggattttagtatttagcattggtagtaaagacaagctcatcagttcacttgagagacagaaagaaacctcaaataacctaagccataggatgggaactacacaaagcagcaggtgactggggtaattgcacctagaggtagcatcctatacctcaggcagagtcaaagccggggccctcattatacactataaccttcccatctcaaagaacagtaaataacagctagagaacaaagaatagttatttcaaaataggtggatggatgaattaaccctgactaataacatcattaaaaccaaagcacaagtttggggctgctaatataatattgaaaggt

SEQ ID NO: 86341 - DNA, 1908 bp, Homo sapiens
atggtgcgatctcggctcactgcaacctccgcctcctgggttcaagtgattctcctgcctcatcctcccgagtagctgggactacagatgtgtgccaccacgcccggctaattttgtgttttttagtagagatggggtttctccatgttggtcaggctggtcttgaactcctgacctcaggtgatccacccgccttggcctccgaaagtgttgggattacaggtgttagccactatacctggtcaggggctttactcttaatcattcttgttgttcatattttgtggatgaggaaacaggcacagagatgattaagtaagttgcccaaagccacagaataataaagcggttcagagacaaagttggttcagttaccatctgtatctccatctgtcattcttgatttctctggctggggtgacgtagaaaagcaagagttacacgtggagcattttagctatgatcaagcacattgatggacactggctggaaataaaggaaaaaaacatgaacttcaacctctaatactttgtaacttctaatgttaggagcatcaacttcaaatctttacaatcttattggcctgttttaccacattttttatttattagggcaagaaaatttattgtcttgattctgcacatataatttcagtacaaaataaatgcatgaagttcctatatatttttaaaatcttgatttcatttcctaattatagttcctaataagatcaagaacttccccaggaaggtggcacttgggccatgaaggcaaggaccctgtctgtttttttttttttgttttgttttttggaaacggagtttcgcttttgtcacccaggctggagtacaatggggcgatcttggctcactgcaacctctgcctcctgggttcaagcgattctcctgcctcagcctcccgagtagctgagattacaggtgcctgccaccacacccggctaatttttgtatttttagtggagacggggtttcaccatgttggccaagctggtctygaactcctgatctcaggtaatctgtccacctcgacctcccaaagtgctgggattacaggcgtgagccactgtgcctggcctattcttgaattttttctagagatgaggtctgtctcgctatgttgcccaggctggcctcaaactcctgggctcaagcaatcctctctcctcaactgtcccaagtgttagggttacaggcatgagccaccatgcctggccagatagatttttgaattcttcccattgcaaactgaaaatagacaagtaacgatcccttctcaaggcaacacccacatcccatccattctcgctcgaggccaaactgctttcccacagagactgacagccagtgtgcatttcataacactcttccccgcagtgcacccataggcttggaagcctgaacatttgtggccactatacaacagatgcagttttcagccagaaccctctagggccttccttttcactggccctcagcggctgctgggtctgcctgccatcaaggagcagccagtgtgtgtgtggctgtgaggtgtgggaggggccagggtaagcaacaaagcagatcagaggtgaattctggggctgggtggacacagtggcaggaccagtcatggcccacagtaagaccaaagggtcttgtgtcctccattaattcttttctgggcagtttctgctaaggacagcttcagggaaaattccagctggcccttaaggctcatcacctgggtgtgctccttgctaagcagctcaccgagcttgtgatcctcccgttgctctgagatgctcttctcctcctccacaggccttggatccttttccctgatgaactattccaggtggtatcccatagccccagtcatgaagtccacagggaatgtgacatagcg

SEQ ID NO: 86342 - DNA, 547 bp, Homo sapiens
cccaaaagaaaagaaatcattctaccaaaaagacaaatgcacttgtatgttgatcgcagcactattcacaatagcaatgatggggaatcaacgccaggtgcccatcaatggtagactggataaagaaaacgtggtacatcaagctcatccaacccacgcyccataggctgcatgtggcccaggatggctttgaatgcagccccgcaatccaccctcatccaaaatgcacagcaatgattggatatgttggctatgtttaaagacccttcaagtaggaagtaaagggcataaatgaatgaacagtgatactgcagcagataggataatagtccaagtttatttataaaatatatcccatcctgtcaaatactgctagaaaaaagggttcatctagaagatgttgaggttagagcatatattttcattgacagaactttagttatttgaacttttgcaatcccatgtaaattatcttatcttgtattccaaaaatcccatgctatccacatctatttggttcctgagttcagacactaagaaatacaat

SEQ ID NO: 86343 - DNA, 581 bp, Homo sapiens
tctggaatgtrtctagacttgctggctccttgctccttgctctcccaggattgattgtatcttgagttaaaagaatctgctctccattatctcaagtagagcaaatgctaaaccatcacagctgtaaatcatgtacttaatgcaatgtgcccttttgacctccacattctcaccacctgtttctttgttggattaccaataaatagcatgggctcccagagctcgggccttcgcagcctctacgattgtgatggccccctgggtccggtcccacttttctctctcaaactgtctttttctcaatcctttgactccgccggactttgtcacccccacgacctggtgttgggtctgatcaccccaacaggaaagattcttcattttcccttctcttcctaatactgtaatcctaaatccattaggggctgagcaagctaggcatacatgccggtgcagttacttaggcctaaagcactgcactgtagcttgagcacaatgaggaggtatctatccagggagagtatggcggcagtaatgggatagtggcttcttctaggggggactgatcaaatatgtttcat

SEQ ID NO: 86344 - DNA, 1157 bp, Homo sapiens
tacttgacttaggcaggtctctaaactttagctctactttctataaaatgggcacaaaaatatcacctaacccaaggagttgttggagaattaaatgagacaacatatgcctaaagtggataagacaatgtgtagcacgtggtcaatgctcagtaaatgttaactaatacagtcacaaacttgtaatttatatgcttattcaaacaatggaacaaccattacaattatggataacttcttgacttaaacattagaaaaagctttatacttataattacatattttgtttataaccaccaaataatattttatgttcgtttaatacctgcttttctctgcaaagctgatgttgacttgctgttggctatgttamgaaatcagatctacgttggaaaagagatgcttggcatagacaccagaatcctcacattggacccccctgtcatggcagtgatgaggcaagacctgcaaagaaagcagactcaatgagtgtcccagaggttctgtgaagagcattagttattagttgatgttgtataccagctgcctcccagttaaaaatgggtgagcctctgagagaaaacgtgttatataggtctctattgaaaagcgtcattggaattagatttactaaaactagtttcaccctatttgcatggccaagttgattactcccacccaaaaaaaggtatattgataaaatatttctgactgaaactagcctacattaaatttgcaccacctataactagactacaggaatgaccccttaattagtgtatgcccatcatcagggctgctacactcagttccatagtccattattatctaaaaataaaatataactaggccacctccctccacattcaaaatctgttggtgtttgcacatacaagctaaagctcaaccttcatagcatccatacaagcttcttgctcacctggaccttgccttcttctccagcctcatttttcaaggctccccaaccctaccctcacctgtgccccttgctaggagctttttcctctgagaatctcaaagtatggtactctgagctgaatttacttggtgtgactgaggtttcatcagacttatttctgtttcaaagcagacaatgtttctctttattacattcaataaacatttattcaataaat

SEQ ID NO: 86345 - DNA, 1157 bp, Homo sapiens
tacttgacttaggcaggtctctaaactttagctctactttctataaaatgggcacaaaaatatcacctaacccaaggagttgttggagaattaaatgagacaacatatgcctaaagtggataagacaatgtgtagcacgtggtcaatgctcagtaaatgttaactaatacagtcacaaacttgtaatttatatgcttattcaaacaatggaacaaccattacaattatggataacttcttgacttaaacattagaaaaagctttatacttataattacatattttgtttataaccaccaaataatattttatgttcgtttaatacctgcttttctctgcaaagctgatgttgacttgctgttggctatgttaagaaatcagatctacgttggaaaagagatgcttggcatagacaccagaatcctcacattggacccccctgtcatggcagtgatgaggcaagacctgcaaagaaagcagactcaatgagtgtcccagaggttctgtgaagagcattagttattagttgatgttgtataccagctgcctcccagttaaaaatgggtgagcctctgagagaaaacgtgttatataggtctctattgaaaagcgtcattggaattagatttactaaaactagtttcaccctatttgcatggccaagttgattactcccacccaaaaaaaggtatattgataaaatatttctgactgaaastagcctacattaaatttgcaccacctataactagactacaggaatgaccccttaattagtgtatgcccatcatcagggctgctacactcagttccatagtccattattatctaaaaataaaatataactaggccacctccctccacattcaaaatctgttggtgtttgcacatacaagctaaagctcaaccttcatagcatccatacaagcttcttgctcacctggaccttgccttcttctccagcctcatttttcaaggctccccaaccctaccctcacctgtgccccttgctaggagctttttcctctgagaatctcaaagtatggtactctgagctgaatttacttggtgtgactgaggtttcatcagacttatttctgtttcaaagcagacaatgtttctctttattacattcaataaacatttattcaataaat

SEQ ID NO: 86346 - DNA, 929 bp, Homo sapiens
tatgtaatcccagcactttgggaggccaagactggcagatcacttgagctgaggagttggagaccagcctggacaccacaatgaaacccagtctctgcaaaaaatacaaaaatttgctgagcgtgctggtgcatgcctgtagtcctggctactcaggaggctgaggtgggagaatcacttgacttgatgtcgaggctgcagtgagctgagatcgcaccactcctagatgataagagtgagagcctgtctcaaaacaaagaaaagaaagaaagaacgaaagagaagaaaatacaggtattacggcctaggtaagtaygtacccgtatgctaaattgtttagaagattatgtcagatgagtcacaccttagcttggtcctgtggagcacgtatcattattagtcatgtcacgttttacagatgagtaaactaatgcagttataatttgtagatatatgtaatcatctaagcagccaaactaggatttgaaaccagctccttgccttcttagcccacgttcttatcctctaactagcacccagccaccaggactattttcccctgaccatgaaaggcaaacaactttccattcaaagaatactttataatgacaaatgatggggagtcagtatcgccctaaggtctccaagctgcatcaatagctatcagtcacacatcagataaatagatttcagaagttttgtgtacagtatgttcttgaatttgggcttaagctcagactgacatatagtatttcatcactaatgtgatctctttcttgcagagggaacattctttttttaaattgtattgcataacttgtttgcttcctagcaaaacaatttttgaatttctgtataatttctgttaaatctatttttaaagttgaggcttaggtcaaatgcaaatatgaatatagatttatccagca

SEQ ID NO: 86347 - DNA, 570 bp, Homo sapiens
tcaggaggatgtactccatcaaaaccaaggtgaaaacaaagaacactcaggatcctagagcgaaactaacacaaaggcaagaaaggcatcccacggacgatggtgaaagcaaatccaaaggcagcagctatggagcaagtcaagagaacagaacgacctattcggaacaaatataagaattctttggtggggggaatttcttcaatgagaagaaattgacaggattcctaatatatgaatatattggaaggaaattaaacaagggaactttttatttaaattagtgataagtttatagaacacagcatataacaaaaaattactaagcatatttttaaaagacaatgactaatttttaaaattatgttcacatataattttcataaaaataaaatctaaattttacctatttaaagtgcttattatacttcctggcatatagtacttcatacatttagccactattctaacaatgatttcaactatacatacataccaggcttcacttccaactgcttcttccactaaatggcaccaggtaagttacctaccyagagcctgtttccttat

SEQ ID NO: 86348 - DNA, 682 bp, Homo sapiens
tataattaaatatataaatattctgacttttaaaaatcatgacccctcaaagtcaatttcttatttatgctatcaattatcaatgaattaatgtcaatttaatttggtaatcaatttacaaaagttaggtagatttggctttaaacaacacatttttatagaattgaatgtctttctaagcctaaggaagtctttttttttttttttgagacggagtctcgctctctcgcccaggctggagtgcagtggcacaatctccgctcactacaagctccgcctcccaggttcacgccattctcctgcctcagtctcccgagtagctgggactacaggckcccgctgccacgcccagctaattttttgtatttttagtagagacggggtttcaccgtgttagccaggatggtctcgatctcctgacttcgtgatccgcccgcctcggcctcctaaagtgctgggattacaggcatgagccactgcgcccggccagcctaaggaagtctttttattattctttcttgttttgttaatttataggcctgggttactagctaatcattatacatttttattgatacgtgatattagtgtagaatatagtggtaatttttttttcatagagaaaaaatgcgccacaaataaataaaacatgtttaaaagttgtagaaagaaaattataaat

SEQ ID NO: 86349 - DNA, 1364 bp, Homo sapiens
tattctcagttgtgaatgggagaatgtgaatctaaaagtgctgaatcaatatttttgaaacttaaatttgacttcaatagaacagactttagtaaatttgttaataacttttatttaatcacttagagctttactgtttactatttagtataacttgggaaagtagtatgcatttgttttcctggacactgcatcttgtttaaagggagatatctactctgcttttaatctgtaagaataatctcagttaattaatgacattcatattaaaggaacttaataacaagcaactcgacaaaattagaaaaatgctacctttatacttaataaactatatcaaacatacctgtggtaaaggagcaggcaggactgtgtcattctgactcttccaagataaaacagtgagtgactttaattaagttttccatttttctcttatagcttcatgcttatgtaggataatttatatgtagaaatcatttgtctgtcattcacatatttttatctcctctacttttataatgaacttattaccatcatatattaaatttgaaactgtgattaatatgcaagtttttatattaaatattaatgctggtgttattttaatattctacattgatcctgatgtcaaggggatccagttggaggtaacagcawtgagtacaaatctgcgttaatgttatttattattttatatttttaatatagtagcagtaaataatattaccacccactcaggcaaaaggggttataataaaccctgaaagaaaatatatggtgtcacaaaagactcttactgctagtgcctttgtttcagggggctgagtcaaaggaacatgtggctttttgtctagacgcacactgtgagagggtaagcaagtggcagtgggaaaaggagtacctcataaagaatctctgcaagagggcatccaattctggtccagtacttgaaaacagccactgaaaattaaccaatactttagaaatggcatggtatcttgggtttccataatgcctgccctaggaaaggtcaattcatggccattatatttatcatcagcaacttcaaacagtagtgcagggtgctatcatagttattttgttgtatgttaccttattaataactgtattgactttgggaatgtttgcaggaaataactagccatctttcattcattaatttattaactcatccccgatatggattgaggacttctctatacattcacaagggtacaattattaaaaagacatatatcctactcttaaatagccaatatcctaggataagtctttaaaatttagtataaaaattataaacattagtaattataattataaatgtatgatataaatttcct

SEQ ID NO: 86350 - DNA, 732 bp, Homo sapiens
gggatcccttggaaaactctgccagctccaggaggagcctgacccttaatcattatactgcagtatttaagctaataaaggagaattctaaatcacaagctatgtaaaccgtagaaaaaaaagcaactatggtaaggccgcgacagttccctctggggagggtctcagtactggacagaagaccataaaaactggatgaaagaaggtccatttggcagagattatggaaagactggcccttaaacatactgaccagtcctccttcctcctaaatacactacttggcctcctggacaccggtcttcttcagtctcgtttgctgatttctccttttctccccgcttcttagaatgccctcgggactccgtttttgaacctttactcttctcagtatacactcactgttgatctcatccagtctcgtggcttacaataccatttataagccaatgactcccaaatttctagttccatcctagacatctcccaaactcgtctcaaatattcaactgtttattcgtcattttcctcttaygtatccaaaggacacctcaaagttaactgtcccaaactaatttatttattcccccctcgcccccaaaactgccccatctgcagcctttttcctctcagttgacagaaactccattctttccattctaactcttttctctcatactccatcaggaaatcctgtgggttctacctttaaattacagatagtccctgact
